(19) United States
(12) Patent Application Publication
(10) Pub. No.: US 2025/0320254 A1
(43) Pub. Date: Oct. 16, 2025

(54) Compositions and Methods for Modulating Circulating Factors

(71) Applicant: Flagship Pioneering Innovations VII, LLC, Cambridge, MA (US)

(72) Inventors: Vinidhra Mani, Brookline, MA (US); Erica Gabrielle Weinstein, Newton, MA (US); Yann Paul Guy Régis Echelard, Jamaica Plain, MA (US); Avak Kahvejian, Lexington, MA (US); Patrick Shannon Pendergrast, Cambridge, MA (US); Tamara Ouspenskaia, Belmont, MA (US); Gabriel Humphrey Billings, Somerville, MA (US); Charlotte Marie Nicod, Cambridge, MA (US); Vlad Grishkevich, Cambridge, MA (US); Sungmin Baek, Cambridge, MA (US); Samantha Laber, Cambridge, MA (US); Shujia Dai, Cambridge, MA (US); George Adrian Rosenberger, Cambridge, MA (US); Tao Fang, Cambridge, MA (US); Shruthi Hamsanathan, Cambridge, MA (US)

(21) Appl. No.: 18/869,038

(22) PCT Filed: May 25, 2023
(86) PCT No.: PCT/US2023/067505

§ 371 Date: Nov. 25, 2024

Related U.S. Application Data
(60) Provisional application No. 63/345,771, filed on May 25, 2022.

(51) Int. Cl. C07K 14/00; A61K 38/00

(52) U.S. Cl. CPC C07K 14/001; A61K 38/00

(57) ABSTRACT

The disclosure provides, in various embodiments, compositions, such as polypeptides, polynucleotides, gene editing system, small molecules, vectors or host cells, that comprises and/or modulate expression or activity of immune regulation-associated proteins. The disclosure also provides, in various embodiments, methods of treating aging, senescence, fibrosis, a metabolic disease, cardiovascular disease, an endocrine-associated disorder, a genetic disease, cancer, an infection, an immunological disease, an indication treated with hormone, growth factor and/or protein replacement, or a combination thereof using an agent that comprises and/or modulates expression or activity of an immune regulation-associated protein and methods of identifying said agent.

### INCORPORATION BY REFERENCE OF MATERIAL

[0001] This application claims the benefit of U.S. Provisional Application No. 63/345,771, filed on May 25, 2022. The entire teachings of the above application are incorporated herein by reference.

### INCORPORATION BY REFERENCE OF MATERIAL IN XML

[0002] This application incorporates by reference the Sequence Listing contained in the following eXtensible Markup Language (XML) file being submitted concurrently herewith:
[0003] a) File name: 57081056002.xml; created May 25, 2023, 89,306,685 Bytes in size.

### BACKGROUND

[0004] Endocrine circulating factors are released from endocrine organs and found in circulation. Endocrine circulating factors modulate homeostasis and metabolism of the body. Dysregulation of these factors can be influenced by genetic factors as well as diseases such as cancer or hormonal imbalance. As such, endocrine circulating factors can be markers of disease states or biological/pre-disease phenotypes. Because dysregulation of endocrine circulating factors can affect homeostasis of the body, such dysregulation can cause a wide range of symptoms, and influence growth, development, metabolism, sexual function, and mood. Therefore, there is a critical need to identify additional and novel endocrine circulating factors as biomarkers and therapeutic targets.

### SUMMARY

[0005] The disclosure provided herein is based, in part, on the identification of non-canonical (e.g., proteins encoded by non-canonical open reading frames (ORFs)) circulating factors (e.g., endocrine circulating factors).

[0006] In one aspect, the present disclosure relates to an agent that comprises and/or modulates (e.g., increases or decreases) the expression and/or activity of a target protein identified herein (e.g., a target protein listed in the Sequence Listing, in Table A), or a variant of the foregoing). In some embodiments, the agent comprises a target protein identified herein (e.g., a target protein listed in the Sequence Listing, in Table A), or a variant of the foregoing). In certain embodiments, the agent modulates (e.g., increases or decreases) the expression and/or activity of a target protein identified herein (e.g., a target protein listed in the Sequence Listing, in Table A, or a variant of the foregoing). In some embodiments, the agent comprises, consists essentially of, or consists of a polypeptide, a polynucleotide, a gene editing system, a small molecule, or a cell (e.g., a cell therapy). The agent can be an inhibitor or an activator of a target protein identified herein. In some embodiments, the agent modulates the expression of a target protein identified herein. In some embodiments, the agent modulates the activity of a target protein identified herein.

[0007] In another aspect, the disclosure provides a pharmaceutical composition comprising a target protein identified herein, and a pharmaceutically acceptable carrier.

[0008] In another aspect, the disclosure provides a pharmaceutical composition comprising an agent that modulates the expression or activity of a target protein identified herein, and a pharmaceutically acceptable carrier.

[0009] In other aspects, the disclosure relates to a polynucleotide encoding a polypeptide described herein, an expression vector comprising a polynucleotide encoding a polypeptide described herein, and a host cell comprising a polynucleotide encoding a polypeptide described herein.

[0010] In another aspect, the disclosure provides a method of detecting a disease or condition, or determining a likelihood of developing the disease or condition in a subject, comprising quantifying an expression or activity of a target protein in a sample from the subject, wherein the level of expression or activity of the target protein in the sample is indicative of the likelihood of developing the disease or condition in the subject, wherein the disease or condition is selected from aging, senescence, fibrosis, a metabolic disease, a cardiovascular disease, an endocrine-associated disorder, a genetic disease, cancer (e.g., tumor), an infection, an immunological disease (e.g., inflammation and/or an autoimmune disease), an indication treated with hormone, growth factor and/or protein replacement (e.g., enzyme replacement, antibody replacement), or a combination thereof.

[0011] In another aspect, the disclosure provides a method of preparing a sample that is useful for determining a likelihood of developing a disease or condition in a subject, comprising:
[0012] a) obtaining or having obtained a sample from the subject;
[0013] b) adding a protease inhibitor, a control peptide, a standard peptide, or a combination thereof to the sample to prepare a sample that is useful for detecting a likelihood of developing cancer; and
[0014] c) quantifying an expression or activity of a target protein in the sample prepared in step b),
   wherein the disease or condition is selected from aging, senescence, fibrosis, a metabolic disease, a cardiovascular disease, an endocrine-associated disorder, a genetic disease, cancer (e.g., tumor), and infection, an immunological disease (e.g., inflammation and/or an autoimmune disease), an indication treated with hormone, growth factor and/or protein replacement, or a combination thereof.

[0015] In some embodiments, the method further comprises treating a subject who is predicted to have a likelihood of developing the disease or condition, comprising administering to the subject an effective amount of an agent that comprises and/or modulates the expression or activity of the target protein identified herein, or a pharmaceutical composition comprising the agent.

[0016] In another aspect, the disclosure provides a method of treating a disease or condition in a subject in need thereof (e.g., a human subject having a cancer), comprising administering to the subject an effective amount of an agent that comprises and/or modulates the expression or activity of a target protein identified herein, or a pharmaceutical composition comprising the agent.

[0017] In another aspect, the disclosure provides a method of selecting a subject suitable for treatment of a disease or condition, comprising quantifying an expression or activity of a target protein in a sample from the subject, and selecting the subject suitable for treatment of the disease or condition according to the level of expression or activity of the target protein in the sample, wherein the disease or condition is selected from aging, senescence, fibrosis, a metabolic disease, a cardiovascular disease, an endocrine-associated disorder, a genetic disease, cancer (e.g., tumor), an infection, an immunological disease (e.g., inflammation and/or an autoimmune disease), an indication treated with hormone, growth factor and/or protein replacement, or a combination thereof.

[0018] In another aspect, the disclosure provides a method of modulating the expression or activity of a target protein identified in the Sequence Listing, in Table A, or a variant of the foregoing in a cell (e.g., a cancer cell, such as a cancer cell in a subject), comprising contacting the cell (e.g., in vitro, ex vivo, or in vivo) with an agent that comprises and/or modulates the expression or activity of a target protein identified herein, or a pharmaceutical composition comprising the agent.

[0019] In another aspect, the disclosure provides a method of identifying an agent that modulates the expression or activity of a target protein identified herein, comprising: a) contacting the target protein with an agent; and
[0020] b) determining whether the agent modulates the expression or activity of the target protein, wherein a difference in the expression or activity of the target protein that has been contacted with the agent compared to a reference for the expression or activity of the target protein indicates that the agent modulates the expression or activity of the target protein.

### BRIEF DESCRIPTION OF THE DRAWINGS

[0021] The foregoing will be apparent from the following more particular description of example embodiments, as illustrated in the accompanying drawings in which like reference characters refer to the same parts throughout the different views. The drawings are not necessarily to scale, emphasis instead being placed upon illustrating embodiments.

[0022] FIG. 1 shows inhibition of Interferon Regulatory Factor (IRF) pathway by SEQ ID NO: 38427 protein treatment in THP-1 dual reporter cells. THP-1 dual reporter cells were incubated with increasing concentrations of the protein (0, 2.5, 5, 7.5, and 10 μM) in the presence of lipopolysaccharide (LPS) for 24 hours. The relative IRF activity was assessed by measuring the reporter gene expression. Data are presented as mean±SD of 10 technical replicates. Asterisks denote statistical significance compared to LPS-only treated cells (**p<0.01, ****p<0.0001).

[0023] FIG. 2 shows selective inhibition of IRF Response by SEQ ID NO: 38427 protein co-treatment with specific TLR agonists in THP-1 dual reporter cells. THP-1 dual reporter cells were treated with 10 different TLR agonists (TLR1/2, TLR2, TLR3, TLR4, TLR5, TLR6/2, TLR7, TLR8, and TLR9) in the presence of the SEQ ID NO: 38427 protein (10 μM) or scramble protein for 24 hours. The relative IRF activity was assessed by measuring the reporter gene expression. Data are presented as mean±SD of 10 technical replicates per treatment group from a representative experiment. Asterisks denote statistical significance compared to respective TLR agonist with scramble protein treated cells (****p<0.0001). The protein inhibited IRF response when co-treated with TLR1/2, TLR4, and TLR6/2 agonists, while no significant effect was observed with TLR2, TLR3, TLR5, TLR7, TLR8, or TLR9 agonists.

[0024] FIG. 3A shows UMAP visualization of cluster analysis reveals 10 distinct PBMC cell subtypes, while FIG. 3B shows bar graphs display the count of upregulated and downregulated genes when treated with SEQ ID NO: 38427 protein compared to the scrambled protein control.

[0025] FIG. 4 shows dose dependent reduction of hTNFa when compared to control (TA_H2O) on CD3/CD28 (TransAct) activated PBMCs. ***=p<0.0002 and ****=p<0.0001 compared to respective controls by two-way ANOVA.

[0026] FIG. 5 shows lack of IL-1b inhibition on CD3/CD28 (TransAct) activated PBMCs when compared to control (TA_H2O). Positive control shows significant inhibition. ****=p<0.0001 compared to respective controls by two-way ANOVA.

[0027] FIG. 6 shows relative increase in glucose uptake in adipocytes.

[0028] FIG. 7 shows representative results of novel ORF identification from plasma samples—SEQ ID NO: 24651.

[0029] FIG. 8 shows representative results of novel ORF identification from saliva samples—SEQ ID NO: 75388.

[0030] FIG. 9 shows relative increase in LDL uptake in human primary hepatocytes.

[0031] FIG. 10 shows a sorted bar plot of differentially secreted proteins in human plasma of SLE and healthy donors. Differential ORF proteins in SLE vs healthy plasma samples.

[0032] FIG. 11A is a bar graph of enriched terms across up-regulated proteins in SLE versus healthy plasma samples, colored by p-values and FIG. 11B shows a bar graph of enriched terms across down-regulated proteins in SLE versus healthy plasma samples, colored by p-value (by Metascape).

[0033] FIG. 12 shows a bar graph showing agonism presented as % activity (top) and antagonism presented as % inhibition (bottom) for a pool of 9 peptides, including target proteins SEQ ID NO: 49310 and SEQ ID NO: 42382 tested against 168 GPCR targets. % activity refers to β-arrestin recruitment compared to a known agonist at EC80 concentration. % inhibition refers to decrease in β-arrestin recruitment induced by agonist at EC80 concentration. CXCR4 (black) showed a significant GPCR antagonist activity, as evidenced by the percent inhibition and suppression of agonist activity against the peptide pool. C3AR1 (black) showed a strong agonism when compared to a known agonist and demonstrated a significant fold change with respect to basal activity (black dot).

[0034] FIG. 13 shows a bar graph showing % inhibition for the target protein, SEQ ID NO: 49310 tested on PathHunter® β-Arrestin cell line for CXCR4 human chemokine GPCR antagonist assay. Target protein SEQ ID NO: 49310, in black showed significant inhibition (˜80%) at both 1p M and 0.3p M when compared to Irrelevant peptide, irrelevant scrambled peptide, peptide pool with irrelevant peptides and target protein, SEQ ID NO: 30949 in gray. * pvalue <0.05, *** pvalue <0.001, ****pvalue <0.0001 vs. irrelevant scrambled peptide_1 μM, one way ANOVA, Dunnett's multiple comparison test.

[0035] FIG. 14 shows a bar graph showing % activity for the target protein, SEQ ID NO: 42382 tested on PathHunter® β-Arrestin cell line for C3AR1 human complement GPCR antagonist assay. Target protein SEQ ID NO: 34229, in black showed significant activity at both 1 μM and 0.3 μM when compared to Irrelevant peptide, irrelevant scrambled peptide, peptide pool with irrelevant peptides and target protein, SEQ ID NO: 42382 in gray. % activity for C3AR1 is with respect to known agonist, C3A Receptor Agonist * pvalue <0.05, *** pvalue <0.001, ****pvalue <0.0001 vs. irrelevant scrambled peptide_1 uM, one way ANOVA, Dunnett's multiple comparison test.

[0036] FIG. 15 shows quantification of the chemotactic response of NAMALWA cells migrating towards SEQ ID NO: 49310. Cells were allowed to migrate for 24 hours in the absence or presence of SEQ ID NO: 49310 or SDF-1 (CXCL-12) in the lower chamber of trans-well plates. Migration Inducer was used as positive control and ADM3100 was used as negative control for chemotaxis. The data are presented as the mean±standard error of the mean (SEM) of the three independent experiments, each performed in triplicate. Statistical analysis was performed using a two-tailed t-test, *p<0.05.

### DETAILED DESCRIPTION

[0037] A description of example embodiments follows.

### Target Proteins

[0038] In one aspect, the disclosure provides a target protein identified herein. As used herein, the expressions “target protein identified herein” and “target protein of the disclosure” includes both the polypeptide disclosed in the Sequence Listing (e.g., a target protein comprising an amino acid sequence selected from SEQ ID NO: 3585, SEQ ID NO: 24296, SEQ ID NO: 74164, SEQ ID NO: 7353, SEQ ID NO: 26888, SEQ ID NO: 36277, SEQ ID NO: 24296, SEQ ID NO: 32262, SEQ ID NO: 49310, SEQ ID NO: 42382, SEQ ID NO: 38427, SEQ ID NO: 246513, SEQ ID NO: 75388, and any of SEQ ID NOS: 75451-75473), a variant thereof (e.g., a target protein comprising an amino acid sequence selected from SEQ ID NO: 36277_T31A; SEQ ID NO: 7353 P25L, SEQ ID NO: 74164_136T, SEQ ID NO: 26888_L8V, SEQ ID NO: 24296 rs221797 V-to-A, V-to-G, or V-to-D) and the peptides disclosed in Table A herein. The target protein can be produced recombinantly (e.g., via DNA or mRNA) or synthetically.

[0039] In various embodiments, the target protein is an extracellular (secreted) protein.

[0040] In various embodiments, the target protein is a protein in the Sequence Listing or Table A. In some embodiments, the target protein is a protein comprising an amino acid sequence set forth in the Sequence Listing or Table A. In some embodiments, the target protein consists of an amino acid sequence set forth in the Sequence Listing or Table A. In some embodiments, the target protein comprises an amino acid sequence having one amino acid substitution relative to an amino acid sequence set forth in the Sequence Listing or Table A, wherein the substitution is substitution of an N-terminal residue in an amino acid sequence in the Sequence Listing or Table A with a methionine (Met) residue. In some embodiments, the target protein consists of an amino acid sequence having one amino acid substitution relative to an amino acid sequence set forth in the Sequence Listing or Table A, wherein the substitution is substitution of an N-terminal residue in an amino acid sequence in the Sequence Listing or Table A with a methionine (Met) residue. In some embodiments, the target protein comprises an amino acid sequence set forth in the Sequence Listing or Table A and further comprises a methionine (Met) residue at its N-terminus. In some embodiments, the target protein consists of an amino acid sequence set forth in the Sequence Listing or Table A and a methionine (Met) residue at its N-terminus.

TABLE A
Target Peptides of the Disclosure

| SEQ ID NO: | Sequence |
|---|---|
| 38805 | MIK |
| 38847 | MPL |
| 38918 | MMW |
| 38932 | MSA |
| 38952 | MDA |
| 39301 | MLS |
| 39440 | VLS |
| 39496 | TMH |
| 41374 | MPL |
| 41766 | LGP |
| 41869 | MVD |
| 42120 | MPD |
| 42246 | KSS |
| 45845 | MEE |
| 46266 | MLV |
| 47030 | MPL |
| 47704 | MAG |
| 47795 | MDP |
| 48072 | MEV |
| 49195 | MYA |
| 49617 | MLC |
| 50286 | MTQ |
| 50344 | MGT |
| 50481 | MED |
| 50548 | MRT |
| 51598 | MSS |
| 51865 | MEM |
| 52051 | MKP |
| 52334 | IGS |
| 52389 | MVA |
| 52587 | IPL |
| 52638 | IDL |
| 52800 | MMV |
| 52922 | MSG |
| 53252 | MRD |
| 53718 | LTC |
| 53847 | MRR |
| 53853 | MRR |
| 53879 | LAG |
| 53904 | MVL |
| 53946 | MRS |
| 54022 | MEL |
| 54126 | ICQ |
| 54241 | LLD |
| 54379 | IYG |
| 54943 | RQS |
| 54977 | LGH |
| 54985 | MVA |
| 55043 | LGH |
| 55474 | MAK |
| 55603 | KRK |
| 56012 | LMY |
| 56142 | LPV |
| 56600 | VMF |
| 56818 | LHT |
| 56852 | MCE |
| 57166 | MGS |
| 57536 | LLT |
| 57636 | VIF |
| 57765 | IMQ |
| 57808 | IKC |
| 57845 | VSS |
| 57849 | MTI |
| 57977 | IGQ |
| 57999 | VAS |
| 58080 | LME |
| 58092 | VNL |
| 58122 | ISS |
| 58181 | LTP |
| 58428 | MPL |
| 58487 | LLS |
| 58560 | LVF |
| 58605 | MLR |
| 58629 | KMH |
| 58633 | IMT |
| 58727 | RLS |
| 58783 | LAV |
| 58807 | MAA |
| 58826 | ILN |
| 58858 | MMN |
| 59162 | RKT |
| 59192 | ILP |
| 59211 | LAV |
| 59233 | KKK |
| 59328 | LAM |
| 59353 | MFT |
| 59358 | MML |
| 59396 | RMR |
| 59403 | LET |
| 59411 | LET |
| 59506 | MKL |
| 59514 | MEK |
| 59538 | KRL |
| 59628 | LES |
| 59821 | RKA |
| 59901 | IET |
| 59916 | KHG |
| 59999 | KEG |
| 60021 | MSA |
| 60100 | MEW |
| 60258 | LFI |
| 60261 | MSS |
| 60312 | IWL |
| 60361 | IYC |
| 60405 | IML |
| 60450 | RMQ |
| 60895 | IMN |
| 60919 | MNL |
| 60969 | MSV |
| 61207 | MPH |
| 61285 | MRL |
| 61316 | LVG |
| 61880 | ISG |
| 61906 | MIC |
| 61954 | MNL |
| 62179 | IQR |
| 62431 | MVI |
| 62500 | IRL |
| 62605 | ISL |
| 62980 | MVK |

[0041] Certain of the target proteins in the Sequence Listing and Table A have been identified as being differentially expressed (e.g., upregulated or downregulated) in a disease and/or condition state selected from aging, senescence, fibrosis, a metabolic disease, a cardiovascular disease, an endocrine-associated disorder, a genetic disease, cancer (e.g., tumor), and infection, an immunological disease (e.g., inflammation and/or an autoimmune disease), an indication treated with hormone, growth factor and/or protein replacement, or a combination thereof compared to a reference state (e.g., normal state) such that modulation of the level and/or activity of the target protein acts to treat, ameliorate, and/or prevent the development of the disease or condition.

[0042] As used herein, the term “differential expression,” refers to at least one recognizable difference in protein expression. It may be a quantitatively measurable, semi-quantitatively estimable or qualitatively detectable difference in protein expression. Thus, a differentially expressed protein, or “DEP,” may have a higher expression level in a reference state (e.g., normal state) than in a disease state, in which the DEP has a lower expression level or is not expressed at all. Conversely, a DEP may have a higher expression level in a disease state than in a reference state (e.g., normal state), in which the DEP has a lower expression level or is not expressed at all. Further, expression may be regarded as differential if the DEP is recognizably changed (e.g., mutated) between two states under comparison. Recognizable changes can include amino acid substitutions, insertions, and/or deletions, including N- and C-terminal truncations, as well as modifications (e.g., post-translational modifications).

[0043] As used herein, the term “reference” refers to a standard used for comparison purpose(s). A person skilled in the art can select an appropriate reference for a particular comparison purpose(s). Thus, for example, a reference for a disease state may be a normal, healthy state; a reference for a mutated protein may be the non-mutated protein; a reference for a disease treatment may be no treatment or may be a standard of care treatment. In some embodiments, particularly embodiments involving methods of identifying an agent that modulates the expression and/or activity of a target protein, the reference is the activity and/or expression of the target protein in the absence of the agent. In some embodiments, a reference is based on a predetermined level, e.g., based on functional expression or empirical assays. In some embodiments, a reference obtained from one cell, sample or subject (e.g., a cell or sample from a healthy subject, a subject that does not have a particular disease; a healthy subject, a subject who does not have the particular disease). In some embodiments, a reference is obtained from more than one (e.g., a population of) cell, sample or subject (e.g., a cell or sample from a healthy subject, a subject that does not have a particular disease; a healthy subject, a subject who does not have a particular disease), such as 2, 3, 4, 5, 10, 20, 30, 50, 100 or more, or a statistically significant number of cells, samples or healthy subjects. A reference obtained from more than one cell, sample or subject can be represented as a statistic (e.g., an average or median).

[0044] In some embodiments, the protein is used as a marker of an immune and/or a disease state.

[0045] In certain embodiments, the target protein has a higher expression level in an endocrine organ (e.g., hypothalamus gland, pituitary gland, thyroid gland, parathyroid gland, adrenal gland, pineal gland, pancreas, ovary and/or testes) and/or a secretory cell (e.g., an alpha cell, a beta cell, and/or a delta cell). In some embodiments, the target protein has an expression level in an endocrine organ and/or a secretory cell that is at least about 0.5-fold higher, e.g., at least about: 0.6-, 0.7-, 0.8-, 0.9-, 1.0-, 1.1-, 1.2-, 1.3-, 1.4-, 1.5-, 1.6-, 1.7-, 1.8-, 1.9-, 2.0-, 2.5-, 3-, 3.5-, 4-, 5-, 6-, 7-, 8-, 9- or 10-fold higher (e.g., 50-fold higher, 100-fold higher) than the target protein expression level in a reference organ and/or cell.

[0046] In certain embodiments, the target protein has a lower expression level in an endocrine organ and/or a secretory cell. In some embodiments, the target protein has an expression level in an endocrine organ and/or a secretory cell that is at least about 0.5-fold lower, e.g., at least about: 0.6-, 0.7-, 0.8-, 0.9-, 1.0-, 1.1-, 1.2-, 1.3-, 1.4-, 1.5-, 1.6-, 1.7-, 1.8-, 1.9-, 2.0-, 2.5-, 3-, 3.5-, 4-, 5-, 6-, 7-, 8-, 9- or 10-fold lower (e.g., 50-fold lower, 100-fold lower) than the target protein expression level in a reference organ and/or cell.

[0047] In some embodiments, the target protein has an expression level in a disease (e.g., as determined from a sample from a cell or tissue of a subject having the disease) that is at least about 0.5-fold higher, e.g., at least about: 0.6-, 0.7-, 0.8-, 0.9-, 1.0-, 1.1-, 1.2-, 1.3-, 1.4-, 1.5-, 1.6-, 1.7-, 1.8-, 1.9-, 2.0-, 2.5-, 3-, 3.5-, 4-, 5-, 6-, 7-, 8-, 9- or 10-fold higher (e.g., 50 fold higher, 100-fold higher) than the target protein expression level in a reference (e.g., a sample from a cell or tissue of a subject who does not have the disease).

[0048] In some embodiments, the target protein has an expression level in a disease (e.g., as determined from a sample comprising or obtained from a cell or tissue of a subject having the disease) that is at least about 0.5-fold lower, e.g. at least about: 0.6-, 0.7-, 0.8-, 0.9-, 1.0-, 1.1-, 1.2-, 1.3-, 1.4-, 1.5-, 1.6-, 1.7-, 1.8-, 1.9-, 2.0-, 2.5-, 3-, 3.5-, 4-, 5-, 6-, 7-, 8-, 9- or 10-fold lower (e.g., 50-fold lower, 100-fold lower) than the target protein expression level in a reference (e.g., a sample from a cell or tissue of a subject who does not have the disease). In some embodiments, the target protein is not expressed, or is expressed at an undetectable level, in a disease (e.g., as determined from a sample comprising or obtained from a cell or tissue of a subject having the disease).

[0049] In some embodiments, the target protein has a transcript level in a disease (e.g., as determined from a sample from a cell or tissue of a subject having the disease) that is at least about 0.5-fold higher, e.g., at least about: 0.6-, 0.7-, 0.8-, 0.9-, 1.0-, 1.1-, 1.2-, 1.3-, 1.4-, 1.5-, 1.6-, 1.7-, 1.8-, 1.9-, 2.0-, 2.5-, 3-, 3.5-, 4-, 5-, 6-, 7-, 8-, 9- or 10-fold higher (e.g., 50 fold higher, 100-fold higher) than the target protein transcript level in a reference (e.g., a sample from a cell or tissue of a subject who does not have the disease). In particular embodiments, an increase in the transcript level of a target protein contributes to (e.g., results in) a disease or condition described herein.

[0050] In some embodiments, the target protein has a transcript level in a disease (e.g., as determined from a sample comprising or obtained from a cell or tissue of a subject having the disease) that is at least about 0.5-fold lower, e.g. at least about: 0.6-, 0.7-, 0.8-, 0.9-, 1.0-, 1.1-, 1.2-, 1.3-, 1.4-, 1.5-, 1.6-, 1.7-, 1.8-, 1.9-, 2.0-, 2.5-, 3-, 3.5-, 4-, 5-, 6-, 7-, 8-, 9- or 10-fold lower (e.g., 50-fold lower, 100-fold lower) than the target protein transcript level in a reference (e.g., a sample from a cell or tissue of a subject who does not have the disease). In some embodiments, the transcript of the target protein is not expressed, or is expressed at an undetectable level, in a disease (e.g., as determined from a sample comprising or obtained from a cell or tissue of a subject having the disease). In particular embodiments, a decrease in the transcript level of a target protein contributes to (e.g., results in) a disease or condition described herein.

[0051] In particular embodiments, the gene encoding the target protein comprises at least one mutation (e.g., a fusion, a deletion, an insertion, a point mutation, and/or an expansion of amino-acid repeats) in a disease described herein.

[0052] Non-limiting examples of (biological) samples include blood, blood components (e.g., serum or plasma), urine, saliva, amniotic fluid, cerebrospinal fluid, tissue (e.g., a biopsy or microbiopsy), pancreatic fluid, chorionic villus sample, and cells, etc., isolated from a subject.

[0053] In some embodiments, the target protein is translated from a non-coding RNA. In some embodiments, the non-coding RNA is a long intergenic non-coding RNA (lincRNA). In certain embodiments, the non-coding RNA is a long noncoding RNA (lncRNA). In some embodiments, the non-coding RNA is a microRNA (miRNA or miR).

[0054] In some embodiments, the target protein is translated from a non-exonic element in an unprocessed precursor mRNA (pre-mRNA). In some embodiments, the non-exonic element is an intron in a pre-mRNA. In some embodiments, the non-exonic element is a 5′-untranslated region (5′-UTR) in a pre-mRNA. In some embodiments, the non-exonic element is a 3′-untranslated region (3′-UTR) in a pre-mRNA.

[0055] In some embodiments, the target protein has a length of 2,000 amino acids or less, e.g., 1000 amino acids or less, 750 amino acids or less, 500 amino acids or less, 250 amino acids or less, 150 amino acids or less or 100 amino acids or less. In some embodiments, the target protein has a length of 7 amino acids or more, e.g., 8, 9, 10, 15, 18, 25, 50, 75 or 100 amino acids or more. In certain embodiments, the target protein has a length of from about 50 to about 200 amino acids, e.g., from about 100 to about 150 amino acids. In particular embodiments, the target protein has a length of 7 amino acids or more. In more particular embodiments, the target protein has a length of about 18 amino acids.

[0056] In some embodiments, the target protein is an upstream signaling molecule of a metabolic pathway selected from acyl-CoA hydrolysis, acylglyceride metabolism, alanine, aspartate and glutamate metabolism, amino sugar and nucleotide sugar metabolism, aminoacyl-tRNA biosynthesis, androgen metabolism, arachidonic acid metabolism, arginine and proline metabolism, ascorbate and aldarate metabolism, beta oxidation of branched-chain fatty acids (mitochondrial), beta oxidation of di-unsaturated fatty acids (n-6) (mitochondrial), beta oxidation of di-unsaturated fatty acids (n-6) (peroxisomal), beta oxidation of even-chain fatty acids (mitochondrial), beta oxidation of even-chain fatty acids (peroxisomal), beta oxidation of odd-chain fatty acids (mitochondrial), beta oxidation of phytanic acid (peroxisomal), beta oxidation of poly-unsaturated fatty acids (mitochondrial), beta oxidation of unsaturated fatty acids (n-7) (mitochondrial), beta oxidation of unsaturated fatty acids (n-7) (peroxisomal), beta oxidation of unsaturated fatty acids (n-9) (mitochondrial), beta oxidation of unsaturated fatty acids (n-9) (peroxisomal), beta-alanine metabolism, bile acid biosynthesis, bile acid recycling, biopterin metabolism, biotin metabolism, blood group biosynthesis, butanoate metabolism, C5-branched dibasic acid metabolism, carnitine shuttle (cytosolic, endoplasmic reticular, mitochondrial, and/or peroxisomal), cholesterol biosynthesis 1 (Bloch pathway), cholesterol biosynthesis 2, cholesterol biosynthesis 3 (Kandustch-Russell pathway), cholesterol metabolism, chondroitin/heparan sulfate biosynthesis, chondroitin sulfate degradation, CoA synthesis, cysteine and methionine metabolism, drug metabolism, eicosanoid metabolism, estrogen metabolism, ether lipid metabolism, fatty acid activation (cytosolic and/or endoplasmic reticular), fatty acid biosynthesis (even-chain and/or odd-chain), fatty acid biosynthesis (unsaturated), fatty acid desaturation (even-chain and/or odd-chain), fatty acid elongation (even-chain and/or odd-chain), fatty acid oxidation, folate metabolism, formation and hydrolysis of cholesterol esters, fructose and mannose metabolism, galactose metabolism, glucocorticoid biosynthesis, glutathione metabolism, glycerolipid metabolism, glycerophospholipid metabolism, glycine, serine and threonine metabolism, glycolysis/gluconeogenesis, glycosphingolipid biosynthesis-ganglio series, glycosphingolipid biosynthesis-globo series, glycosphingolipid biosynthesis-lacto and neolacto series, glycosphingolipid metabolism, glycosylphosphatidylinositol (GPI)-anchor biosynthesis, heme degradation, heme synthesis, heparan sulfate degradation, histidine metabolism, inositol phosphate metabolism, isolated, Keratan sulfate biosynthesis, Keratan sulfate degradation, leukotriene metabolism, linoleate metabolism, lipoic acid metabolism, lysine metabolism, metabolism of other amino acids, N-glycan metabolism, nicotinate and nicotinamide metabolism, nucleotide metabolism, O-glycan metabolism, omega-3 fatty acid metabolism, omega-6 fatty acid metabolism, oxidative phosphorylation, pantothenate and CoA biosynthesis, pentose and glucuronate interconversions, pentose phosphate pathway, phenylalanine metabolism, phenylalanine; tyrosine and tryptophan biosynthesis, phosphatidylinositol phosphate metabolism, pool reactions, porphyrin metabolism, propanoate metabolism, prostaglandin biosynthesis, protein assembly, protein degradation, protein modification, purine metabolism, pyrimidine metabolism, pyruvate metabolism, retinol metabolism, riboflavin metabolism, ROS detoxification, serotonin and melatonin biosynthesis, sphingolipid metabolism, starch and sucrose metabolism, steroid metabolism, sulfur metabolism, terpenoid backbone biosynthesis, thiamine metabolism, transport reactions, tricarboxylic acid cycle and glyoxylate/dicarboxylate metabolism, tryptophan metabolism, tyrosine metabolism, ubiquinone synthesis, urea cycle, valine; leucine; and isoleucine metabolism, vitamin A metabolism, vitamin B2 metabolism, vitamin B6 metabolism, vitamin B12 metabolism, vitamin C metabolism, vitamin D metabolism, vitamin E metabolism, xenobiotics metabolism, or a combination thereof.

[0057] Certain of the target proteins disclosed herein (e.g., SEQ ID NO: 49310; SEQ ID NO: 42382) have been identified as modulators of G protein-coupled receptors (GPCRs) (see, e.g., Example 12). In some embodiments, a target protein of the disclosure is a modulator of one or more GPCRs. In some embodiments, a target protein is an agonist of one or more GPCRs. In some embodiments, a target protein is an antagonist of one or more GPCRs. In some embodiments, a target protein is a direct modulator of one or more GPCRs, such as a ligand for one or more GPCRs. In some embodiments, a target protein is an indirect modulator of one or more GPCRs.

[0058] The expression and/or activity of various GPCRs have been linked to different diseases/disorders, conditions and indications, including those set forth in Table B (see, e.g., Kenakin, T., Biased Receptor Signaling in Drug Discovery, Pharmacol Rev 71:267-315, April 2019; Harmar, A. J., et al., IUPHAR-DB: the IUPHAR database of G protein-coupled receptors and ion channels, Nucleic Acids Research, 2009, Vol. 37; and Davenport AP, Scully CCG, de Graaf C, Brown A J H, and Maguire J J. Advances in therapeutic peptides targeting G protein-coupled receptors. Nat Rev Drug Discov. 2020 Jun. 19(6):389-413; the contents of each are incorporated herein by reference in their entirety). Accordingly, in some embodiments, a target protein disclosed herein, which is a modulator of a GPCR, is useful for treating and/or diagnosing one or more diseases/disorders, conditions and/or indications, such as cancer or a pre-cancerous condition, or any of the diseases/disorders, conditions and indications listed in Table B, which are known to be associated with GPCR expression and/or activity.

TABLE B
GPCRs Associated with Disease

| Disease group | GPCRs Associated with Disease Group |
|---|---|
| acute disease | ADRB1, P2RY12, AGTR1 |
| breast disease | GNRHR |
| cancer or benign | ADRB2, ADRA1A, TSHR, SSTR3, SSTR1, GNRHR, CXCR4, CASR, |
| tumor | GCGR, ADRA1D, SSTR4, ADRA1B, OPRM1, SMO, TACR1, |
| | OPRK1, SSTR2, ADRB1, MC1R, SSTR5 |
| cardiovascular | ADRB3, OPRD1, ADRB2, ADRA1A, AGTR1, ADORA1, TSHR, |
| disease | HTR1D, PTGIR, HTR4, DRD2, F2R, HTR1B, FZD4, EDNRB, |
| | ADRA1D, ADORA2A, HTR1F, ADORA3, ADORA2B, CELSR1, |
| | CALCRL, ADRA1B, BDKRB2, OPRM1, ADRA2B, GLP1R, |
| | AVPR1A, P2RY12, OPRK1, PTGFR, ADRB1, ADRA2A, AVPR2, |
| | ADRA2C, EDNRA |
| chronic disease | ADORA3, ADORA2B, ADGRG6, ADRB2, CASR, GABBR1, |
| | AGTR1, GABBR2, ADORA1, CHRM3, CHRM1, ADORA2A |
| connective tissue | ADRB3, OPRD1, MC2R, OPRK1, CASR, PTGER3, OPRM1, |
| disease | ADRA2A, ADRA2B, ADRA2C, GNRHR |
| digestive system | CALCR, AGTR1, MTNR1B, GIPR, CHRM3, SSTR3, SSTR1, HTR4, |
| disease | PTGER3, GCGR, CHRM1, EDNRB, HRH2, DRD3, OPRM1, GLP1R, |
| | P2RY12, SIPR1, SSTR2, HTR1A, DRD4, MC1R, EDNRA, GLP2R, |
| | SSTR5 |
| disorder of | CALCR, S1PR4, AGTR1, GABBR2, CHRM3, GNRHR, KISS1R, |
| development or | S1PR3, FZD2, PTH1R, HRH1, S1PR2, EDNRB, LHCGR, ADGRG2, |
| morphogenesis | ADGRG6, CELSR1, GABBR1, SMO, S1PR1, MC2R, S1PR5, MC1R, |
| | EDNRA |
| disorder of | ADRB3, ADRB2, GPR179, GPR143, P2RY2, OPN1LW, CHRM3, |
| visual system | P2RY4, OPN1SW, GRM6, CASR, HRH1, CHRM1, FZD4, EDNRB, |
| | RHO, ADRA2B, ADGRV1, FZD5, CHRM2, P2RY1, PTGFR, |
| | ADRB1, ADRA2A, ADRA2C, P2RY6, OPN1MW |
| endocrine | CALCR, AGTR1, MTNR1B, MC4R, GIPR, TSHR, SSTR3, SSTR1, |
| system disease | TACR3, GNRHR, FSHR, KISS1R, PTH1R, CASR, GCGR, GHRHR, |
| | LHCGR, DRD3, SSTR4, GHSR, GLPIR, TACR1, P2RY12, MC2R, |
| | SSTR2, PROKR2, DRD4, MC1R, EDNRA, CHRM1, SSTR5 |
| genetic disorder | CNR1, GABBR2, MC4R, SSTR3, SSTR1, KISS1R, PTH1R, GHRHR, |
| | ADRA2B, GRM1, AVPR1A, P2RY12, HTR1A, PROKR2, OPN1MW, |
| | TBXA2R, ADRA1A, AGTR1, MTNR1B, OPN1LW, CHRM3, GRM7, |
| | HTR1D, GPR68, S1PR2, RHO, LHCGR, ADORA2A, ADORA3, |
| | ADORA2B, SSTR4, BDKRB2, LPAR6, ADGRV1, S1PR1, SSTR2, |
| | CHRM2, PTGFR, HRH3, CALCR, HTR2A, GPR143, MTNR1A, |
| | TACR3, HTR4, GNRHR, FSHR, GRM6, FZD2, CASR, EDNRB, |
| | ADRA1D, ADGRG2, ADGRG6, GABBR1, ADRA1B, OPRM1, |
| | SMO, FZD6, MC2R, ADRA2A, AVPR2, ADRA2C, CHRM1, SSTR5, |
| | ADRB3, GPR179, ADORA1, TSHR, OPN1SW, DRD2, CXCR4, |
| | FZD4, AVPR1B, HRH2, DRD3, CELSR1, CCR5, HTR2C, DRD4, |
| | MC1R, EDNRA |
| head and neck | ADRB3, ADRB2, GPR179, ADRA1A, GPR143, P2RY2, OPN1LW, |
| disorder | CHRM3, P2RY4, OPN1SW, GRM6, CASR, HRH1, FZD4, EDNRB, |
| | ADRA1D, RHO, OPN1MW, ADRA1B, ADRA2B, ADGRV1, FZD5, |
| | CHRM2, P2RY1, PTGFR, ADRB1, ADRA2A, ADRA2C, P2RY6, |
| | CHRM1 |
| hematologic | P2RY12, MC2R, CXCR4, TBXA2R, OPRM1, DRD4, AVPR2, |
| disease | AVPR1B, AVPR1A, SMO, DRD3 |
| idiopathic | HTR2A, CASR, HRH1, CNR1, GABBR2, EDNRB, EDNRA, HTR2C |
| disease | |
| immune system | ADRB3, CALCR, ADRA1A, S1PR4, GABBR2, TSHR, CHRM3, |
| disease | S1PR3, CXCR4, HRH1, S1PR2, GCGR, ADRA1D, CYSLTR1, |
| | CELSR1, GABBR1, ADRA1B, ADRA2B, GLP1R, CCR5, S1PR1, |
| | MC2R, CHRM2, S1PR5, PTGFR, ADRA2A, ADRA2C, CHRM1 |
| inflammatory | ADRB3, OPRD1, ADRB2, ADRA1A, AGTR1, P2RY2, TSHR, |
| disease | CHRM3, P2RY4, HRH1, PTGER3, ADRA1D, CYSLTR1, ADRA1B, |
| | BDKRB2, OPRM1, ADRA2B, S1PR1, MC2R, OPRK1, CHRM2, |
| | P2RY1, ADGRE2, PTGFR, ADRB1, ADRA2A, ADRA2C, P2RY6, |
| | CHRM1 |
| injury | PTH1R, HRH1, GABBR1, PTGER3, GABBR2, AVPR2, AVPR1B, |
| | AVPR1A, HRH2, CHRM1 |
| integumentary | ADRB3, HRH1, ADRA1A, GNRHR, ADRA1B, BDKRB2, ADGRE2, |
| system disease | LPAR6, EDNRA, ADRA2A, ADRA2B, EDNRB, MC1R, PTGFR, |
| | ADRA1D, ADRA2C, SMO, FZD6 |
| metabolic disease | ADRB3, OPRD1, CALCR, HTR2A, OXTR, CNR1, GPR143, AGTR1, |
| | GABBR2, MC4R, MTNR1A, GIPR, CHRM3, TSHR, MTNR1B, |
| | SSTR3, SSTR1, DRD2, CASR, GCGR, DRD3, ADORA2A, SSTR4, |
| | OPRM1, GRM1, GLP1R, HTR2C, P2RY12, OPRK1, SSTR2, |
| | CHRM2, DRD4, ADRA2A, MC1R, EDNRA, CHRM1, SSTR5 |
| musculoskeletal | ADRB3, OPRD1, ADRB2, CALCR, HTR2A, ADRA1A, AGTR1, |
| system disease | GABBR2, FZD2, PTH1R, CASR, PTGER3, EDNRB, ADRA1D, |
| | GABBR1, ADRA1B, OPRM1, ADRA2B, SMO, HTR2C, MC2R, |
| | OPRK1, ADRB1, ADRA2A, ADRA2C, EDNRA |
| nervous system | OPRD1, HCRTR1, DRD1, GRM3, CNR1, GABBR2, SSTR3, ADGRG1, |
| disease | SSTR1, GHRHR, HTR1F, HTR7, ADRA2B, GRM1, HCRTR2, P2RY12, |
| | HTR1A, S1PR5, OPN1MW, ADRB2, HTR2B, ADRA1A, AGTR1, MTNR1B, |
| | OPN1LW, HTR6, CHRM3, GRM7, HTR1D, S1PR3, S1PR2, RHO, ADORA2A, |
| | ADORA3, ADORA2B, SSTR4, DRD5, CALCRL, ADGRV1, HTR1E, |
| | S1PR1, SSTR2, CHRM2, HTR5A, HRH3, HTR2A, OXTR, GPR143, |
| | MTNR1A, HTR4, GRM6, CASR, HRH1, HTR1B, ADRA1D, GABBR1, |
| | ADRA1B, OPRM1, SMO, MC2R, OPRK1, ADRA2A, ADRA2C, CHRM1, |
| | SSTR5, GPR179, S1PR4, ADORA1, OPN1SW, DRD2, FZD4, DRD3, |
| | CYSLTR1, CELSR1, HTR2C, DRD4, ADRB1 |
| obstetric disorder | ADRB3, OXTR, ADRA1A, PTGER3, ADRA1B, TSHR, ADRA2A, |
| | ADRA2B, GLP1R, ADRA1D, ADRA2C |
| otorhinolaryngologic | ADRB3, ADRB2, CYSLTR1, HRH1, ADRA1A, CHRM2, ADRA1B, |
| disease | CHRM3, ADRA2A, ADRA2B, ADRB1, ADRA1D, ADRA2C, |
| | EDNRA, CHRM1 |
| psychiatric disorder | OPRD1, HCRTR1, HTR2A, DRD1, OXTR, HTR2B, ADRA1A, |
| | HRH3, GRM3, GABBR2, MTNR1A, HTR6, MTNR1B, HTR1D, |
| | HTR4, DRD2, HRH1, HTR1B, AVPR1B, DRD3, HTR1F, CYSLTR1, |
| | DRD5, GABBR1, OPRM1, HTR7, ADRA2B, GRM1, HCRTR2, |
| | AVPR1A, HTR2C, HTR1E, OPRK1, HTR1A, DRD4, ADRA2A, |
| | AVPR2, HTR5A, ADRA2C, CHRM1 |
| reproductive | ADRA1A, SSTR3, SSTR1, TACR3, GNRHR, FSHR, KISS1R, ADRA1D, |
| system disease | LHCGR, ADGRG2, DRD3, SSTR4, PTGER2, ADRA1B, PTGER1, CCR5, |
| | TACR1, SSTR2, PROKR2, DRD4, AVPR2, SSTR5 |
| respiratory | ADRB3, ADRB2, ADRA1A, AGTR1, ADORA1, CHRM3, PTGIR, CASR, |
| system disease | HRH1, EDNRB, ADRA1D, ADORA2A, ADORA3, ADORA2B, ADGRG6, |
| | CYSLTR1, ADRA1B, ADRA2B, CHRM2, ADRB1, ADRA2A, ADRA2C, |
| | EDNRA, CHRM1 |
| syndromic disease | HTR2A, P2RY2, GABBR2, CHRM3, SSTR3, P2RY4, SSTR1, HTR4, GNRHR, |
| | FSHR, KISS1R, DRD2, FZD2, CASR, EDNRB, LHCGR, DRD3, CYSLTR1, |
| | SSTR4, GABBR1, OPRM1, ADGRV1, HTR2C, P2RY12, MC2R, SSTR2, |
| | HTR1A, PROKR2, P2RY1, DRD4, P2RY6, CHRM1, SSTR5 |
| upper digestive | HTR4, HRH2 |
| tract disorder | |
| urinary system | ADRB3, ADRA1A, AGTR1, TSHR, CHRM3, CASR, EDNRB, |
| disease | AVPR1B, ADRA1D, ADORA2A, ADORA2B, ADRA1B, OPRM1, |
| | ADRA2B, AVPR1A, MC2R, CHRM2, ADRA2A, AVPR2, ADRA2C, |
| | EDNRA |

Agents that Modulate Target Proteins

[0059] Provided herein are agents that modulate the expression of a target protein disclosed herein, such as a target protein in the Sequence Listing, in Table A, or a variant of the foregoing, or a fragment of the foregoing (e.g., a biologically active fragment of a target protein). The expression of the target protein or variant or fragment thereof can be modulated by a wide range of processes, directly or indirectly, leading to an increase or a decrease of the target protein level. Non-limiting examples include altering: the copy number of the gene encoding the target protein, transcriptional initiation, elongation or termination, RNA processing, RNA stability (e.g., mRNA stability), RNA degradation, translation initiation, post-translational modification of a protein, protein stability, protein degradation (e.g., cleavage, such as protease cleavage), or a combination of the foregoing.

[0060] In some embodiments, the agent modulates (e.g., increases or decreases) the expression of a gene or gene transcript encoding the target protein. In some embodiments, the agent modulates the expression or activity of the target protein. In some embodiments, the agent decreases (e.g., inhibits, reduces or neutralizes) the activity of the target protein. In some embodiments, the agent increases (e.g., activates) the activity of the target protein. In some embodiments, the agent decreases (e.g., inhibits or downregulates) the expression of the target protein. In other embodiments, the agent increases (e.g., activates or upregulates) the expression of the target protein.

[0061] As used herein, the term “increasing” or “increase” refers to modulation that results in a higher level of expression, activity, function or a combination thereof of the target protein, or a metric (e.g., cancer cell death or DNA methylation of a target site), relative to a reference (e.g., the level prior to or in an absence of modulation by the agent). In some embodiments, the agent increases the expression or activity of the target protein, or the metric, by at least about 5% relative to the reference, e.g., by at least about: 10%, 15%, 20%, 25%, 30%, 35%, 40%, 45%, 50%, 55%, 60%, 65%, 70%, 75%, 80%, 85%, 90%, 95% or 98% relative to the reference.

[0062] As used herein, the term “decreasing” or “decrease” refers to modulation that results in a lower level of expression, activity, function or a combination thereof of the target protein, or a metric (e.g., cancer cell death or DNA methylation of a target site), relative to a reference (e.g., the level prior to or in an absence of modulation by the agent). In some embodiments, the agent decreases the expression or activity of the target protein, or the metric, by at least about 5% relative to the reference, e.g., by at least about: 10%, 15%, 20%, 25%, 30%, 35%, 40%, 45%, 50%, 55%, 60%, 65%, 70%, 75%, 80%, 85%, 90%, 95% or 98% relative to the reference.

[0063] Non-limiting examples of the metric include energy production or energy conversion in the liver (e.g., modulating ATP synthesis, B-oxidation, oxidation of metabolites derived from glycolysis, oxidation of metabolites derived from amino acids), mitochondrial transcription, mitochondrial ribosome assembly, mitochondrial translation, mitochondrial thermogenesis, hormonal signaling (e.g., mitochondrial estrogen receptor (mtER) signaling), redox maintenance (e.g., NADH and/or FADH2), cell cycle regulation, cell migration, cell morphology, apoptosis, necrosis, membrane potential, ion (e.g., calcium or zinc) storage, ion (e.g., calcium or zinc) homeostasis, metabolite synthesis (e.g., heme biosynthesis or steroid biosynthesis), nutrient sensing, unfolded protein stress response pathway, signaling processes (e.g., calcium signaling).

[0064] In some embodiments, the level of expression, activity, function or a combination thereof of the target protein, or the metric, is measured after the agent is contacted with (e.g., a cell) or administered (e.g., to a subject) for at least about 1 day, e.g., at least about: 2 days, 3 days, 4 days, 5 days, 6 days, 8 days, 9 days, 10 days, 1 week, 2 weeks, 3 weeks, 1 month, 2 months, 3 months, 4 months, 5 months or 6 months, e.g., after a treatment regimen has begun.

[0065] In some embodiments, the agent comprises, consists essentially of or consists of a polypeptide, a polynucleotide, a gene editing system, a small molecule, or a cell (e.g., a cell therapy).

[0066] In some embodiments, the target protein activates an immune cell, and the agent modulates (e.g., increases or decreases) the level of expression, activity, function or a combination thereof, of the target protein. In some embodiments, the target protein inhibits an immune cell (e.g., inhibits activation of an immune cell, induces immune cell death (e.g., apoptosis), or a combination thereof), and the agent modulates (e.g., increases or decreases) the level of expression, activity, function or a combination thereof of the target protein.

[0067] In certain embodiments, the agent modulates (e.g., increases or decreases) the level of expression, activity, function, or a combination thereof, of the target protein in a cancer cell (e.g., a metastatic cancer cell), a cell (e.g., stromal cell) in a tumor micro-environment, a target cell of an inflammatory response (e.g., an epithelial cell, an endothelial cell, a stem cell or a non-immune cell)), an immune cell (e.g., an effector T cell, a helper T cell, a Th1 cell, a Th2 cell, a Th17 cell, a B cell, an natural killer (NK) cell, an innate lymphoid cell (e.g., an ILC1 cell, an ILC2 cell, an ILC3 cell), a macrophage (e.g., an M1 macrophage, an M2 macrophage), a monocyte, and/or an antigen presenting cell (e.g., a dendritic cell), or a combination of the foregoing. In certain embodiments, the agent modulates the level of expression, activity, function or a combination thereof of the target protein in a tumor, a tumor microenvironment, a site of metastasis, a lymph node, a spleen, a secondary lymphoid organ, a tertiary lymphoid organ, a barrier tissue, skin, gut, an airway, a wound, another immune tissue, a non-immune tissue, or a combination of the foregoing.

[0068] In some embodiments, the agent modulates (e.g., increases or decreases) inflammation, decreases the level of an auto-antibody, increases an organ function, decreases the rate or number of relapses or flare-ups, decreases a viral load, controls infection, or a combination of the foregoing.

[0069] In some embodiments, the agent induces downregulation of the target protein (e.g., increases target-protein degradation); prevents multimerization (e.g., dimerization) of the target protein; sequesters a target protein (e.g., a secreted target protein); modulates (e.g., agonizes, antagonizes or disrupts) a known function of the target protein; decreases binding between the target protein and a binding partner (e.g., via steric hinderance); modulates (e.g., increases or decreases) a downstream cell signaling; induces antibody-dependent cell killing, phagocytosis, and/or opsonization of a cell expressing the target protein; or a combination of the foregoing. In certain embodiments, the agent lacks agonistic activity toward the target protein. In certain embodiments, the agent has agonistic activity toward the target protein. In some embodiments, the agent lacks antagonistic activity toward the target protein. In some embodiments, the agent has antagonistic activity toward the target protein. In particular embodiments, the agent binds to at least one residue of the target protein that is involved in binding to a binding partner. In some embodiments, the agent binds to one or more binding sites and/or domains of the target protein involved in binding of the target protein to the binding partner.

[0070] Non-limiting examples of binding partners include androgen receptors, calcitriol receptors, corticotropin-releasing hormone receptor 1, corticotropin releasing hormone receptor 2, estrogen receptors, follicle-stimulating hormone receptors, glucagon receptors, gonadotropin receptors, gonadotropin-releasing hormone receptors, growth hormone receptors, insulin receptor, luteinizing hormone, progesterone receptors, retinoid receptors, somatostatin receptors, thyroid hormone receptors, and thyrotropin receptors.

[0071] In some embodiments, the agent induces downregulation of a binding partner of the target protein; sequesters a binding partner (e.g., a secreted binding partner) of the target protein; prevents multimerization (e.g., dimerization) of a binding partner of the target protein; sequesters a binding partner of the target protein (e.g., a secreted binding partner); modulates (e.g., agonizes, antagonizes or disrupts) a known function of a binding partner of the target protein; decreases binding between the target protein and a binding partner (e.g., via steric hinderance); modulates (e.g., increases or decreases) a downstream cell signaling; induces antibody-dependent cell killing, phagocytosis, and/or opsonization of a cell expressing a binding partner of the target protein; or a combination of the foregoing. In certain embodiments, the agent lacks agonistic activity toward a binding partner of the target protein. In certain embodiments, the agent has agonistic activity toward a binding partner of the target protein. In some embodiments, the agent lacks antagonistic activity toward a binding partner of the target protein. In some embodiments, the agent has antagonistic activity toward a binding partner of the target protein. In particular embodiments, the agent further binds to at least one residue of a binding partner of the target protein that is involved in binding between the target protein and the binding partner. In more particular embodiments, the agent further binds to one or more binding sites and/or domains of a binding partner of the target protein involved in binding between the target protein and the binding partner.

[0072] In some embodiments, the agent modulates (e.g., activates or inhibits) immune signaling, cytokine signaling, inflammatory signaling, or a combination of the foregoing.

[0073] In some embodiments, the agent enhances a signal involved in T cell activation and/or survival. In certain embodiments, the agent activates a stimulatory checkpoint molecule. Non-limiting examples of stimulatory checkpoint molecules include CD27, CD28, CD40, CD122, CD137, OX40, GITR, inducible T-cell costimulator (ICOS). In particular embodiments, the agent is an agonist to CD28.

[0074] In some embodiments, the agent reduces a signal involved in T cell anergy and/or exhaustion. In certain embodiments, the agent inhibits an inhibitory checkpoint molecule. Non-limiting examples of inhibitory checkpoint molecules include PD-1, PD-L1, PD-L2, TIM-3, LAG-3, CTLA-4, A2AR, CD276, B7-H4, BTLA, IDO, KIR, NOX2, VISTA, SIGLECs 7 and SIGLECs 9. In particular embodiments, the agent is an inhibitor (e.g., a blocking antibody) to PD-1.

[0075] In certain embodiments, the agent modulates (e.g., increases or decreases) the level of expression, activity, function, or a combination thereof, of a variant of a target protein disclosed herein. In some embodiments, the variant comprises an amino acid sequence that is at least 70% identical to the amino acid sequence of a target protein disclosed herein. For example, the sequence identity to the variant can be at least about: 75%, 80%, 85%, 90%, 91%, 92%, 93%, 94%, 95%, 96%, 97%, 98% or 99%. In some embodiments, the sequence identity is about: 70%, 75%, 80%, 85%, 90%, 91%, 92%, 93%, 94%, 95%, 96%, 97%, 98% or 99%. In some embodiments, the sequence identity is about: 70-99%, 75-99%, 75-95%, 80-99%, 80-98%, 80-95%, 80-90%, 85-98%, 85-97%, 85-90%, 90-97%, 90-96%, 90-85%, 90-80% or 95-99%. In some embodiments, a variant comprises an amino acid sequence that is at least about 75%, at least about 80%, at least about 85%, at least about 90%, at least about 95%, or at least about 98% identical to the amino acid sequence of a target protein disclosed herein.

[0076] As used herein, the term “sequence identity,” refers to the extent to which two nucleotide sequences, or two amino acid sequences, have the same residues at the same positions when the sequences are aligned to achieve a maximal level of identity, expressed as a percentage. For sequence alignment and comparison, typically one sequence is designated as a reference sequence, to which a test sequences are compared. The sequence identity between reference and test sequences is expressed as the percentage of positions across the entire length of the reference sequence where the reference and test sequences share the same nucleotide or amino acid upon alignment of the reference and test sequences to achieve a maximal level of identity. As an example, two sequences are considered to have 70% sequence identity when, upon alignment to achieve a maximal level of identity, the test sequence has the same nucleotide or amino acid residue at 70% of the same positions over the entire length of the reference sequence.

[0077] Alignment of sequences for comparison to achieve maximal levels of identity can be readily performed by a person of ordinary skill in the art using an appropriate alignment method or algorithm. In some instances, the alignment can include introduced gaps to provide for the maximal level of identity. Examples include the local homology algorithm of Smith & Waterman, Adv. Appl. Math. 2:482 (1981), the homology alignment algorithm of Needleman & Wunsch, J. Mol. Biol. 48:443 (1970), the search for similarity method of Pearson & Lipman, Proc. Nat'l. Acad. Sci. USA 85:2444 (1988), computerized implementations of these algorithms (GAP, BESTFIT, FASTA, and TFASTA in the Wisconsin Genetics Software Package, Genetics Computer Group, 575 Science Dr., Madison, Wis.), and visual inspection (see generally Ausubel et al., Current Protocols in Molecular Biology).

[0078] When using a sequence comparison algorithm, test and reference sequences are input into a computer, subsequent coordinates are designated, if necessary, and sequence algorithm program parameters are designated. The sequence comparison algorithm then calculates the percent sequence identity for the test sequence(s) relative to the reference sequence, based on the designated program parameters. A commonly used tool for determining percent sequence identity is Protein Basic Local Alignment Search Tool (BLASTP) available through National Center for Biotechnology Information, National Library of Medicine, of the United States National Institutes of Health. (Altschul et al., 1990).

[0079] In some embodiments, the amino acid sequence of a variant of a target polypeptide disclosed herein comprises at least one amino acid substitution relative to the amino acid sequence of the target protein. In some embodiments, the number of amino acid substitutions in a variant relative to the amino acid sequence of a target protein disclosed herein is at least about: 2, 3, 4, 5, 6, 7, 8, 9, 10, 11, 12, 13, 14, 15, 16, 17, 18, 19, 20, 21, 22, 23, 24, 25, 26, 27, 28, 29, 30, 31, 32, 33, 34, 35, 36, 37, 38, 39, 40, 41, 42, 43, 44, 45, 46, 47, 48, 49, 50, 51, 52, 53, 54, 55, 56, 57, 58, 59 or 60. In some embodiments, the number of amino acid substitutions is at least about: 5, 6, 10, 15, 20, 25, 30, 35, 40, 45, 50, 55 or 60. In some embodiments, the number of amino acid substitutions is up to about: 60, 55, 50, 45, 40, 35, 30, 25, 20, 15, 10, 6 or 5. In some embodiments, the number of amino acid substitutions is about: 1-60, 1-55, 2-55, 2-50, 3-50, 3-45, 4-45, 4-40, 5-40, 5-35, 6-35, 6-30, 7-30, 7-25, 8-25, 8-20, 9-20, 9-15, 10-15, 5-60, 10-60, 10-55, 15-55, 15-50, 20-50, 20-45, 25-45, 25-40 or 30-40. In some embodiments, the number of amino acid substitutions is about: 10-35, 10-33, 11-33, 11-31, 12-31, 12-29, 13-29, 13-27, 14-27 or 14-25.

[0080] The amino acid substitution(s) in a variant can be substitutions with a canonical amino acid or a non-canonical amino acid. Non-canonical amino acids include, but are not limited to D amino acids, such as D versions of the canonical L-amino acids.

[0081] In some embodiments, an amino acid substitution is a conservative substitution. The term “conservative amino acid substitution(s)” or “conservative substitution(s)” refers to an amino acid substitution having a value of 0 or greater in BLOSUM62.

[0082] In some embodiments, an amino acid substitution is a highly conservative substitution. The term “highly conservative amino acid substitution(s)” or “highly conservative substitution(s)” refers to an amino acid substitution having a value of at least 1 (e.g., at least 2) in BLOSUM62.

[0083] In some embodiments, a variant of a target protein of the disclosure comprises about 5-60 amino acid substitutions, relative to the amino acid sequence of a target protein disclosed herein. In some embodiments, the amino acid substitutions include at least one conservative substitution. In some embodiments, the amino acid substitutions include at least one highly conservative substitution.

### A. Polypeptide Agents

[0084] The term “polypeptide” “peptide” or “protein” denotes a polymer of at least two amino acids covalently linked by an amide bond, regardless of length or post-translational modification (e.g., glycosylation or phosphorylation). A protein, peptide or polypeptide can comprise any suitable L- and/or D-amino acid, for example, common α-amino acids (e.g., alanine, glycine, valine), non-α-amino acids (e.g., β-alanine, 4-aminobutyric acid, 6-aminocaproic acid, sarcosine, statine), and unusual amino acids (e.g., citrulline, homocitruline, homoserine, norleucine, norvaline, ornithine). The amino, carboxyl and/or other functional groups on a peptide can be free (e.g., unmodified) or protected with a suitable protecting group. Suitable protecting groups for amino and carboxyl groups, and methods for adding or removing protecting groups are known in the art and are disclosed in, for example, Green and Wuts, “Protecting Groups in Organic Synthesis,” John Wiley and Sons, 1991. The functional groups of a protein, peptide or polypeptide can also be derivatized (e.g., alkylated) or labeled (e.g., with a detectable label, such as a fluorogen or a hapten) using methods known in the art. A protein, peptide or polypeptide can comprise one or more modifications (e.g., amino acid linkers, acylation, acetylation, amidation, methylation, terminal modifiers (e.g., cyclizing modifications), N-methyl-α-amino group substitution), if desired. In addition, a protein, peptide or polypeptide can be an analog of a known and/or naturally-occurring peptide, for example, a peptide analog having conservative amino acid residue substitution(s).

[0085] In some embodiments, the agent comprises a polypeptide. In some embodiments, the polypeptide is an isolated polypeptide (e.g., isolated or extracted from a biological sample or source). In some embodiments, the polypeptide is a recombinant polypeptide. In some embodiments, the polypeptide is an inhibitor (e.g., a direct inhibitor or an indirect inhibitor) of the expression and/or activity of a target protein disclosed herein. In some embodiments, the polypeptide is an activator (e.g., a direct activator or an indirect activator) of the expression and/or activity of a target protein disclosed herein. In some embodiments, the polypeptide decreases the expression or activity of the target protein disclosed herein. In other embodiments, the polypeptide increases the expression or activity of the target protein disclosed herein. In some embodiments, the polypeptide is a target protein disclosed herein, or a portion thereof (e.g., a biologically active portion thereof, such as a biologically active fragment of the target protein).

[0086] In some embodiments, the polypeptide is an immunoglobulin molecule, such as an antibody (e.g., a whole antibody, an intact antibody) or an antigen-binding fragment of an antibody. In some embodiments, the antibody or antigen-binding fragment thereof binds to the target protein. In some embodiments, the antibody or antigen-binding fragment thereof binds to a protein capable of modulating the expression or activity of the target protein.

[0087] In some embodiments, the polypeptide is an antibody. As used herein, the term “antibody” refers to an immunoglobulin molecule capable of specific binding to a target, such as a carbohydrate, polynucleotide, lipid, polypeptide, etc., through at least one antigen recognition site, located in the variable region of the immunoglobulin molecule. As used herein, the term “antibody” refers to a full-length antibody comprising two heavy (H) chains and two light (L) chains inter-connected by disulfide bonds or multimers thereof (for example, IgM). Each heavy chain comprises a heavy chain variable region (V_{H}) and a heavy chain constant region (comprising domains CH1, hinge CH2 and CH3). Each light chain comprises a light chain variable region (V_{L}) and a light chain constant region (CL). The V_{H} and the V_{L} regions may be further subdivided into regions of hypervariability, termed complementarity determining regions (CDR), interspersed within framework regions (FR). V_{H} and V_{L} each comprises three CDRs and four FR segments, arranged from the amino-terminus to the carboxy-terminus in the following order: FR1, CDR1, FR2, CDR2, FR3, CDR3, and FR4. The antibody can be of any species, such as a rodent (e.g., murine, rat, guinea pig) antibody, a human antibody, or the antibody can be a humanized antibody or chimeric antibody.

[0088] In some embodiments, the antibody comprises an IgA (e.g., IgA1 or IgA2) heavy chain constant region, an IgD heavy chain constant region, an IgE heavy chain constant region, an IgG (e.g., IgG1, IgG2 (e.g., IgG2a, IgG2b or IgG2c), IgG3 or IgG4) heavy chain constant region or an IgM heavy chain constant region. In some embodiments, the antibody comprises an IgG heavy chain constant region. In some embodiments, the antibody comprises a κ light chain constant region. In some embodiments, the antibody comprises a X light chain constant region.

[0089] In some embodiments, the antibody is a polyclonal antibody. In some embodiments, the antibody is a monoclonal antibody. In some embodiments, the antibody is human or chimeric. In some embodiments, the antibody is primatized (e.g., humanized). In some embodiments, the antibody is multispecific, e.g., bi-, tri-, or quad-specific. In some embodiments, the antibody is a heteroconjugate antibody.

[0090] In some embodiments, the polypeptide agent is an antigen-binding fragment of an immunoglobulin molecule (e.g., antibody). The term “antigen-binding fragment” refers to a portion of an immunoglobulin molecule (e.g., antibody) that retains the antigen binding properties of the parental full-length antibody. Non-limiting examples of antigen-binding fragments include a V_{H} region, a V_{L} region, an Fab fragment, an F(ab′)₂ fragment, an Fd fragment, an Fv fragment, and a domain antibody (dAb) consisting of one V_{H} domain or one V_{L} domain, etc. V_{H} and V_{L} domains may be linked together via a synthetic linker to form various types of single-chain antibody designs in which the V_{H}/V_{L} domains pair intramolecularly, or intermolecularly in those cases when the V_{H} and V_{L} domains are expressed by separate chains, to form a monovalent antigen binding site, such as single chain Fv (scFv) or diabody. In some embodiments, the polypeptide disclosed herein is an antigen binding fragment selected from Fab, Fab′, F(ab′)₂, Fd, Fv, disulfide-linked Fvs (sdFv, e.g., diabody, triabody or tetrabody), scFv, SMIP or rlgG. In some embodiments, the polypeptide is a scFv. Antigen-binding fragments can be produced by recombinant DNA techniques, enzymatic or chemical cleavage of intact immunoglobulins, or, in certain cases, by chemical peptide synthesis procedures known in the art.

[0091] Polypeptide agents (e.g., monoclonal antibodies) can be monovalent, bivalent or multivalent. A monoclonal antibody can be monospecific or multispecific (e.g., bispecific). Monospecific antibodies bind one antigenic epitope. A multispecific antibody, such as a bispecific antibody or a trispecific antibody, is included in the term monoclonal antibody.

[0092] “Multispecific” refers to an antibody that specifically binds at least two distinct antigens or at least two distinct epitopes within the antigens, for example three, four or five distinct antigens or epitopes. “Bispecific” refers to an antibody that specifically binds two distinct antigens or two distinct epitopes within the same antigen.

[0093] “Isolated antibody” refers to an antibody or an antigen-binding fragment thereof that is substantially free of other antibodies having different antigenic specificities (e.g., an isolated anti-target protein antibody is substantially free of antibodies that specifically bind antigens other than the target protein). In the case of a bispecific antibody, the bispecific antibody specifically binds two antigens of interest, and is substantially free of antibodies that specifically bind antigens other than the two antigens of interest. In some embodiments, the polypeptide agent (e.g., monoclonal antibody) is at least 80% pure, e.g., about: 80%, 81%, 82%, 83%, 84%, 85%, 86%, 87%, 88%, 89%, 90%, 91%, 92%, 93%, 94%, 95%, 96%, 97%, 98%, 99% or 100% pure.

[0094] In some embodiments, the polypeptide is an antagonist antibody that binds to the target protein (e.g., a target protein whose expression or activity is increased in a cancer state relative to a reference state). In some embodiments, the antibody described herein is an antagonist antibody that binds to a protein capable of modulating the expression or activity of the target protein. As used herein, the term “antagonist antibody” refers to an antibody that, upon binding to an antigen (e.g., the target protein or a protein capable of modulating the expression or activity of the target protein), reduces (e.g., inhibits) the function of the antigen. In some embodiments, the antigen is a receptor, and the antagonist antibody binds to the ligand-binding domain of the receptor. In some embodiments, the antigen is a transmembrane protein, and the antagonist antibody binds to the extracellular region of the transmembrane protein. In some embodiments, the antigen is an enzyme or a signaling molecule, and the antagonist antibody reduces the activity of the enzyme or attenuate a signal transduction pathway mediated by the signaling molecule. In some embodiments, the antagonist antibody reduces antigen function by at least about 10%, e.g., by at least about: 15%, 20%, 25%, 30%, 35%, 40%, 45%, 50%, 55%, 60%, 65%, 70%, 75%, 80%, 90%, 95%, 98% or 99%.

[0095] In some embodiments, the polypeptide is an agonist antibody that binds to the target protein (e.g., a target protein whose expression or activity is decreased in a cancer state relative to a reference state). In some embodiments, the antibody is an agonist antibody that binds to a protein capable of modulating the expression or activity of the target protein. As used herein, the term “agonist antibody” refers to an antibody that, upon binding to an antigen (e.g., the target protein or a protein capable of modulating the expression or activity of the target protein), increases the function of the antigen. In some embodiments, the antigen is a receptor, and the agonist antibody binds to the ligand-binding domain of the receptor. In some embodiments, the antigen is a transmembrane protein, and the agonist antibody binds to the extracellular region of the transmembrane protein. In some embodiments, the antigen is an enzyme or a signaling molecule, and the agonist antibody increases the activity of the enzyme or activates a signal transduction pathway mediated by the signaling molecule. In some embodiments, the agonist antibody increases antigen function by at least about 10%, e.g., by at least about: 15%, 20%, 25%, 30%, 35%, 40%, 45% 50%, 55%, 60%, 65%, 70%, 75%, 80%, 90%, 95%, 100%, 200%, 300%, 400%, 500%, 600%, 700%, 800%, 900% or 1,000%.

[0096] In some embodiments, the agonist antibody does not exert at least one of the following functional properties: reducing (e.g., inhibiting) the activity of the antigen; inducing antibody-dependent cell killing of a cell expressing the antigen (e.g., by natural killer (NK) cells, monocytes, macrophages, neutrophils, dendritic cells, or eosinophils); inducing phagocytosis of a cell expressing the antigen (e.g., by macrophage); inducing opsonization of a cell expressing the antigen; and inducing downregulation of the antigen on a cell surface (e.g., by hyper-crosslinking or clustering the antigen to induce internalization and degradation).

[0097] Suitable techniques, assays and reagents for making and using therapeutic antibodies against an antigen are known in the art. See, for example, Therapeutic Monoclonal Antibodies: From Bench to Clinic (Zhiqiang An eds., 1 st ed. 2009); Antibodies: A Laboratory Manual (Edward A. Greenfield eds., 2d ed. 2013); Ferrara et al., Using Phage and Yeast Display to Select Hundreds of Monoclonal Antibodies: Application to Antigen 85, a Tuberculosis Biomarker, PLoS ONE 7(11): e49535 (2012), for methods of making recombinant antibodies, including antibody engineering, use of degenerate oligonucleotides, 5′-RACE, phage display, and mutagenesis; antibody testing and characterization; antibody pharmacokinetics and pharmacodynamics; antibody purification and storage; and screening and labeling techniques.

[0098] In some embodiments, the polypeptide is an antibody mimetic that binds a target protein disclosed herein. The term “antibody mimetic” refers to polypeptides capable of mimicking an antibody's ability to bind an antigen, but structurally differ from native antibody structures. Non-limiting examples of antibody mimetics include Adnectins, Affibodies, Affilins, Affimers, Affitins, Alphabodies, Anticalins, Avimers, DARPins, Fynomers, Kunitz domain peptides, monobodies, nanobodies, nanoCLAMPs, and Versabodies.

[0099] In some embodiments (e.g., when the expression or activity of the target protein is decreased in a disease state relative to a reference state), the agent is a polypeptide (e.g., isolated polypeptide) that comprises an amino acid sequence that is at least 70% identical to at least a portion (e.g., a biologically active portion or fragment) of the target protein. For example, the percent identity can be at least about: 70%, 71%, 72%, 73%, 74%, 75%, 76%, 77%, 78%, 79%, 80%, 81%, 82%, 83%, 84%, 85%, 86%, 87%, 88%, 89%9, 90%, 91%, 92%, 93%, 94%, 95%, 96%, 97%, 98% or 99% to the full-length target protein or a biologically active portion or fragment thereof. In some embodiments, the polypeptide comprises the amino acid sequence of a full-length target protein. In some embodiments, the polypeptide comprising the amino acid sequence of a full-length target protein is a recombinant polypeptide. In some embodiments, the polypeptide comprising the amino acid sequence of a full-length target protein is a synthetic polypeptide.

[0100] In some embodiments, the polypeptide (e.g., isolated polypeptide) comprises an amino acid sequence having at least 1 amino acid substitution relative to the target protein. For example, the number of amino acid substitutions can be at least about: 2, 3, 4, 5, 6, 7, 8, 9, 10, 11, 12, 13, 14, 15, 16, 17, 18, 19 or 20, or about: 1-20, 1-19, 2-19, 2-18, 2-17, 3-17, 3-16, 4-16, 4-15, 5-15, 5-14, 6-14, 6-13, 7-13, 7-12, 8-12, 8-11 or 9-11. In some embodiments, the amino acid substitutions are conservative substitutions. In some embodiments, the amino acid substitutions are highly conservative substitutions.

[0101] In some embodiments, the polypeptide (e.g., isolated polypeptide) comprises an amino acid sequence that is at least 70% identical to at least a portion of a protein capable of modulating the expression or activity of the target protein. For example, the percent identity can be at least about: 71%, 72%, 73%, 74%, 75%, 76%, 77%, 78%, 79%, 80%, 81%, 82%, 83%, 84%, 85%, 86%, 87%, 88%, 89%, 90%, 91%, 92%, 93%, 94%, 95%, 96%, 97%, 98% or 99%. In some embodiments, the polypeptide comprises the amino acid sequence of a protein capable of modulating the expression or activity of the target protein.

[0102] In some embodiments, the polypeptide (e.g., isolated polypeptide) comprises an amino acid sequence having at least 1 amino acid substitution relative to a protein capable of modulating the expression or activity of the target protein. For example, the number of amino acid substitutions can be at least about: 2, 3, 4, 5, 6, 7, 8, 9, 10, 11, 12, 13, 14, 15, 16, 17, 18, 19 or 20, or about: 1-20, 1-19, 2-19, 2-18, 2-17, 3-17, 3-16, 4-16, 4-15, 5-15, 5-14, 6-14, 6-13, 7-13, 7-12, 8-12, 8-11 or 9-11. In some embodiments, the amino acid substitutions are conservative substitutions. In some embodiments, the amino acid substitutions are highly conservative substitutions.

[0103] In some embodiments, the polypeptide is a cell-penetrating peptide. In certain embodiments, the polypeptide is linked to a cell-penetrating peptide. Suitable cell-penetrating peptide sequences can be protein-derived, designed or, chimeric (modified). See, e.g., Regberg, et al., Applications of cell-penetrating peptides for tumor targeting and future cancer therapies, Pharmaceuticals 5(9): 991-1007 (2012). Non-limiting examples of cell-penetrating peptides include TAT (48-60), Penetratin, pVEC, MPG8, Transportan, Transportan10, PepFect3, PepFect 6, PepFect 14, Polyarginine, Stearyl-polyarginine, Pep-1, Pep-3, CADY, YTA2, YTA4, SynB1, SynB3, Maurocalcine and PTD4.

[0104] In some embodiments, the polypeptide is a circulating factor (e.g., a cytokine).

[0105] In some embodiments, the biological properties (e.g., biological activities or half-life) of the polypeptide (e.g., isolated polypeptide) and the target protein are similar. Non-limiting examples of biological activities include enzymatic activities or properties (e.g., selectivity, steady-state or kinetics), binding activities (e.g., nucleic acid (DNA, RNA) binding protein binding) or properties (e.g., specificity, affinity or kinetics), cell signaling activities, immunological activities, and structural activity (e.g., cell adhesion), among others. Non-limiting examples of enzyme activities include transferase activity (e.g., transfers functional groups from one molecule to another), oxioreductase activity (e.g., catalyzes oxidation-reduction reactions), hydrolase activity (e.g., cleaves chemical bonds via hydrolysis), lyase activity (e.g., generate a double bond), ligase activity (e.g., joining two molecules via a covalent bond), and isomerase activity (e.g., catalyzes structural changes within a molecule from one isomer to another).

[0106] In some embodiments, the polypeptide (e.g., isolated polypeptide) is a recombinant protein. In other embodiments, the polypeptide (e.g., isolated polypeptide) is a synthetic protein. Methods of producing therapeutic polypeptides are known in the art. See, e.g., Therapeutic Proteins: Methods and Protocols (Mark C. Smales & David C James eds., 2005); Pharmaceutical Biotechnology: Fundamentals and Applications (Daan J. A. Crommelin, Robert D. Sindelar & Bernd Meibohm eds., 2013). Polypeptides can be expressed recombinantly using mammalian cells, insect cells, yeast or bacteria etc., under the control of appropriate promoters.

[0107] In some embodiments, the polypeptides described herein (e.g., target proteins, or a portion thereof, polypeptide agents that modulate target proteins) are modified, for example, by cleavage (e.g., protease cleavage) or post-translational modification. In certain embodiments, the modification(s) will affect the activity of the polypeptide, for example, by making an inactive polypeptide active or by altering (e.g., increasing, decreasing) the level of activity of a polypeptide. In particular embodiments, a polypeptide described herein is provided as a prodrug, e.g., that can be converted (e.g., by proteolytic cleavage, post-translational modification) to an active polypeptide in vivo. In some embodiments, the polypeptide includes a post-translational modification or other chemical modification. Non-limiting examples of post-translational modifications include acetylation, amidation, formylation, glycosylation, hydroxylation, methylation, myristoylation, phosphorylation, deamidation, prenylation (e.g., farnesylation, geranylation, etc.), ubiquitylation, ribosylation and sulphation. Phosphorylation can occur on an amino acid such as tyrosine, serine, threonine, or histidine.

[0108] In some embodiments, the polypeptide is joined to a heterologous peptide or protein (e.g., via a covalent bond such as a peptide bond, or a non-covalent bond), such as in a conjugate or fusion protein. In some embodiments, the polypeptide comprises a tag (e.g., a detectable label, such as a fluorophore or enzyme, or a purification tag, such as an epitope tag).

[0109] In some embodiments, the polypeptide comprises one or more neoantigens selected from the Sequence Listing, in Table A, or a variant of the foregoing. As used herein, the term “neoantigen” refers to a tumor antigen that arises from a target protein described herein. In some embodiments, the neoantigen is a cancer-specific neoantigen. There are a variety of ways to produce a neoantigen. For example, a neoantigen may be produced in vitro as a polypeptide before being formulated into a neoplasia vaccine or immunogenic pharmaceutical composition. In some embodiments, the immunogenic pharmaceutical composition comprises an effective amount of one or more neoantigens or pharmaceutically acceptable salt(s) thereof. In some embodiments, the immunogenic pharmaceutical composition further comprises a pharmaceutically acceptable carrier, excipient, adjuvant or additive.

[0110] Alternatively, a neoantigen may be produced in vivo by introducing a polynucleotide or an expression vector (e.g., a viral expression vector) encoding the neoantigen into a cell or tissue (e.g., of a subject in need). In certain embodiments, the polypeptide comprises at least two neoantigens. In some embodiments, the polypeptide comprises a T cell enhancer amino acid sequence. In some embodiments, the T cell enhancer is selected from the group consisting of an invariant chain, a leader sequence of tissue-type plasminogen activator, a PEST sequence, a cyclin destruction box, a ubiquitination signal, and a SUMOylation signal.

### B. Polynucleotide Agents

[0111] In some embodiments, the agent comprises a polynucleotide, or an analog or derivative thereof. In some embodiments, the polynucleotide, or the analog or derivative thereof, is an inhibitor of the target protein. In some embodiments, the polynucleotide, or the analog or derivative thereof, is an activator of the target protein. In some embodiments, the polynucleotide, or the analog or derivative thereof, decreases (e.g., reduces or neutralizes) the expression or activity of the target protein. In other embodiments, the polynucleotide, or the analog or derivative thereof, increases the expression or activity of the target protein.

[0112] The polynucleotides can have sequences containing naturally occurring ribonucleotide or deoxyribonucleotide monomers, non-naturally occurring nucleotides, or combinations thereof. Accordingly, polynucleotides can include, for example, nucleotides comprising naturally occurring bases (e.g., A, G, C, or T) and nucleotides comprising modified bases (e.g., 7-deazaguanosine, inosine, or methylated nucleotides, such as 5-methyl dCTP and 5-hydroxymethyl cytosine). In some embodiments, the polynucleotide comprises at least one modified nucleotide. Non-limiting examples of modified nucleotides include 2′-fluoro, 2′-o-methyl, 2′-deoxy, unlocked nucleic acid, 2′-hydroxy, phosphorothioate, 2′-thiouridine, 4′-thiouridine and 2′-deoxyuridine. In some embodiments, the modification increases nuclease resistance, increases serum stability, decrease immunogenicity, or a combination of the foregoing.

[0113] In some embodiments, the polynucleotide is a DNA molecule. In some embodiments, the polynucleotide is an RNA molecule. In some embodiments, the polynucleotide is a vector (e.g., expression vector, plasmid).

[0114] In some embodiments, the polynucleotide comprises an analog or a derivative of a polynucleotide. In some embodiments, the analog or derivative is a peptide nucleic acid (PNA). In some embodiments, the analog or derivative is a locked nucleic acid (LNA). In some embodiments, the analog or derivative is a morpholino oligonucleotide. In some embodiments, the analog or derivative comprises one or more phosphorothioate-linkages. In some embodiments, the agent comprises a deoxyribonucleic guanidine (DNG) nucleotide. In some embodiments, the agent comprises ribonucleic guanidine (RNG) nucleotide.

[0115] In some embodiments, the polynucleotide modulates the expression and/or activity of a nucleic acid encoding a target protein disclosed herein (e.g., a target protein in the Sequence Listing or Table A), or a portion thereof (e.g., a biologically active portion or fragment thereof).

[0116] In some embodiments, the polynucleotide comprises a nucleotide sequence that is complementary (e.g., fully complementary or partially complementary) to at least a portion of a gene or gene transcript encoding a target protein disclosed herein, such that the polynucleotide sequence is capable of hybridizing or annealing to the gene or gene transcript (e.g., under physiological conditions). In other embodiments, the polynucleotide comprises a nucleotide sequence that is complementary to at least a portion of a gene or gene transcript encoding a protein that is capable of modulating the expression or activity of a target protein disclosed herein.

[0117] In some embodiments, the polynucleotide encodes a target protein disclosed herein, or a variant thereof (e.g., a biologically active variant thereof), or a portion thereof (e.g., a biologically active portion or fragment thereof).

[0118] In some embodiments, the nucleic acid that encodes the target protein, or variant thereof, or portion (e.g., fragment) thereof, is a gene sequence or a portion thereof. In some embodiments, the encoding nucleic acid is an unprocessed RNA transcript (e.g., pre-mRNA) or a portion thereof (e.g., a 5′-UTR, a 3′-UTR, an intron). In some embodiments, the encoding nucleic acid is a mRNA molecule or a portion thereof. In some embodiments, the encoding nucleic acid is present in a non-coding RNA (e.g., a long intergenic non-coding RNA (lincRNA), long noncoding RNA (lncRNA), or miRNA).

[0119] The encoding nucleic acid can comprise a canonical open reading frame (ORF) or a non-canonical ORF. In certain embodiments, the encoding nucleic acid comprises a non-canonical ORF.

[0120] The polynucleotides can be single stranded (ss) or double stranded (ds). In some embodiments, the polynucleotide is double stranded (ds). In some embodiments, the length of the ds polynucleotide is about 15-50 base pairs, e.g., about: 15-45, 15-40, 15-35, 15-30, 15-25, 18-50, 18-45, 18-40, 18-35, 18-30, 18-25, 20-50, 20-45, 20-40, 20-35, 20-30, 20-25, 25-50, 25-45, 25-40, 25-35, 25-30, 30-50, 30-45, 30-40, 30-35, 35-50, 35-45, 35-40 or 40-50 base pairs. In some embodiments, the length of the polynucleotide is about 19-23 base pairs. In some embodiments, the length of the polynucleotide is about 21 base pairs.

[0121] In some embodiments, the polynucleotide is single stranded (ss). In some embodiments, the length of the ss polynucleotide is about 15-50 nucleotides, e.g., about: 15-45, 15-40, 15-35, 15-30, 15-25, 18-50, 18-45, 18-40, 18-35, 18-30, 18-25, 20-50, 20-45, 20-40, 20-35, 20-30, 20-25, 25-50, 25-45, 25-40, 25-35, 25-30, 30-50, 30-45, 30-40, 30-35, 35-50, 35-45, 35-40 or 40-50 nucleotides.

[0122] In some embodiments, the polynucleotide prevents the maturation of a newly-generated nuclear RNA transcript into an mRNA for transcription. In some embodiments, the polynucleotide comprises a nucleotide sequence that is complementary to a sequence at the boundary of an intron and an exon.

[0123] In some embodiments, the polynucleotide (e.g., an antisense oligonucleotide) can hybridize to an mRNA encoding the target protein (e.g., under physiological conditions). In some embodiments, the length of the polynucleotide is at least about 10 nucleotides, e.g., at least about: 15, 16, 17, 18, 19, 20, 21, 22, 23, 24, 25, 26, 27, 28, 29 or 30 nucleotides or about: 10-30, 15-30, 15-25, 20-25 nucleotides. In some embodiments, the polynucleotide is at least 75% identical to an antisense sequence of identical the targeted transcript, e.g., at least about: 80%, 85%, 90%, 95%, 96%, 97%, 98% or 99%.

[0124] In some embodiments, the polynucleotide further comprises an overhang sequence (e.g., unpaired, overhanging nucleotides which are not directly involved in the formation of the double helical structure by the core sequences). In some embodiments, the polynucleotide comprises a 3′ overhang, a 5′ overhang, or both. In some embodiments, the overhang is about 1-5 nucleotides. In some embodiments, the overhang comprises a modified ribonucleotide or deoxynucleotide, e.g., a thiophosphate, phosphorothioate or deoxynucleotide inverted (3′ to 3′ linked) nucleotide.

[0125] Non-limiting examples of polynucleotide agents suitable for use in the compositions, kits and methods described herein include a small interfering RNA (siRNA), a short hairpin RNA (shRNA), a microRNA (miRNA), an antagomir, an antisense DNA, an antisense RNA, a morpholino nucleic acid (MNA), a locked nucleic acid (LNA), a peptide nucleic acid (PNA), an aptamer and a guide RNA (gRNA).

[0126] In some embodiments, the polynucleotide inhibits gene expression (e.g., through the biological process of RNA interference (RNAi)). Polynucleotides appropriate for RNA interference can be readily designed and produced by a person of ordinary skill using techniques, assays and reagents known in the art, including computational tools. See, e.g., Pei et al. 2006, Reynolds et al. 2004, Khvorova et al. 2003, Schwarz et al. 2003, Ui-Tei et al. 2004, Heale et al. 2005, Chalk et al. 2004, Amarzguioui et al. 2004.

[0127] In some embodiments, the polynucleotide is a miRNA. In some embodiments, the miRNA is about 22 nucleotides in length. miRNAs bind to target sites on mRNA molecules and silence the mRNA, e.g., by causing cleavage of the mRNA, destabilization of the mRNA, or inhibition of translation of the mRNA.

[0128] In some embodiments, the polynucleotide is a siRNA. In some embodiments, the siRNA comprises a nucleotide sequence that is identical to about a 15-25 contiguous mRNA sequence encoding the target protein. In some embodiments, the siRNA is a double-stranded RNA molecule having about 19-25 base pairs. In some embodiments, the siRNA commences with the dinucleotide AA. In some embodiments, the siRNA has a GC-content of about 30-70%, e.g., about: 30-65%, 30-60%, 30-55%, 30-50%, 40-70%, 40-65%, 40-60%, 40-55%, 45-70%, 45-65%, 45-60% or 45%-55%.

[0129] In some embodiments, the polynucleotide is a shRNA. A shRNA is an RNA molecule including a hairpin turn that decreases expression of target genes via RNAi. shRNAs can be delivered to cells in the form of plasmids, e.g., viral or bacterial vectors, e.g., by transfection, electroporation, or transduction.

[0130] siRNAs and shRNAs resemble intermediates in the processing pathway of the endogenous microRNA (miRNA) genes (see, e.g., Bartel, Cell 116:281-97 (2004)). In some embodiments, the siRNA functions as an miRNA; in other embodiments, the miRNA functions as an siRNA (see, e.g., Zeng et al., Mol Cell 9:1327-33 (2002); Doench et al., and Genes Dev 17:438-42 (2003)). MicroRNAs, like siRNAs, use RISC to downregulate target genes, but unlike siRNAs, most animal miRNAs do not cleave the mRNA. Instead, miRNAs reduce protein output through translational suppression or polyA removal and mRNA degradation (see, e.g., Wu et al., Proc Natl Acad Sci USA 103:4034-39 (2006)). Known miRNA binding sites are within mRNA 3′ UTRs; miRNAs seem to target sites with near-perfect complementarity to nucleotides 2-8 from the miRNA's 5′ end (see, e.g., Rajewsky, Nat Genet 38 Suppl: 58-13 (2006) and Lim et al., Nature 433:769-73 (2005)). This region is known as the seed region. Because siRNAs and miRNAs are interchangeable, exogenous siRNAs downregulate mRNAs with seed complementarity to the siRNA (see, e.g., Birmingham et al., Nat Methods 3:199-204 (2006)). Multiple target sites within a 3′ UTR give stronger downregulation (see, e.g., Doench et al., Genes Dev 17: 438-42 (2003)).

[0131] In some embodiments, the polynucleotide is a messenger RNA (mRNA) or a circular RNA (circRNA) encoding a target protein disclosed herein or a variant thereof (e.g., a variant that is at least about 70% identical (e.g., at least about: 75%, 80%, 85%, 90%, 95%, 98% or 99% identical to the wild-type protein). In some embodiments, the mRNA is codon optimized (e.g., to improve efficacy of protein synthesis and limit mRNA destabilization by rare codons (see, e.g., Presnyak et al., Cell. 160 (6): 1111-24 (2015) and Thess et al., Mol Ther. 23(9): 1456-64 (2015)).

[0132] In some embodiments, a polynucleotide comprising RNA is chemically synthesized. In some embodiments, a polynucleotide comprising RNA is expressed recombinantly. In some embodiments, the RNA is transcribed in vitro. The making and using of RNA therapeutics are known in the art. See, for example, RNA Therapeutics: Function, Design, and Delivery (Mouldy Sioud eds., 2010) and Kaczmarek et al., Advances in the delivery of RNA therapeutics: from concept to clinical reality, Genome Medicine 9:60 (2017).

[0133] In some embodiments, the mRNA is produced by in vitro transcription. In some embodiments, the mRNA is modified to optimize its activity. In some embodiments, the mRNA comprises a modified base, a 5′ cap, a 5′ cap analogue, an anti-reverse cap analog (ARCA), or a combination thereof.

[0134] In some embodiments, the mRNA comprises a poly(A) tail. In some embodiments, the poly(A) tail is about 100-200 nucleotides. In some embodiments, the poly(A) tail improves the expression and/or stability of the mRNA (see, e.g., Kaczmarek et al., Genome Medicine 9:60 (2017)).

[0135] In some embodiments, the mRNA comprises 5′ cap. In some embodiments, the mRNA comprises a 5′ cap analogue. In some embodiments, the 5′ cap analogue is a 1,2-dithiodiphosphate-modified cap (see, e.g., Strenkowska et al., Nucleic Acids Res. 44:9578-90 (2016)).

[0136] In some embodiments, the mRNA comprises a modified 3′ untranslated region (UTR), a 5′ UTR, or both. In some embodiments, the modified UTR comprises sequences responsible for recruiting RNA-binding proteins (RBPs) and miRNAs (e.g., to enhance the level of protein product (see, e.g., Kaczmarek et al., Genome Medicine 9:60 (2017)). In some embodiments, the 3′ UTR, 5′ UTR, or both are modified to encode a regulatory element. In some embodiments, the regulatory element comprises a K-turn motif, a miRNA binding site, or a combination thereof to control RNA expression in a cell-specific manner (see, e.g., Wroblewska et al., Nat Biotechnol. 33:839-41 (2015)).

[0137] In some embodiments, the mRNA comprises an RNA base modification. In some embodiments, the mRNA comprises a pseudouridine. In some embodiments, the mRNA comprises a N1-methyl-pseudouridine (e.g., to mask immune-stimulatory activity and enhance translation initiation (see, e.g., Andries et al., J Control Release 217:337-44 (2015) and Svitkin et al., Nucleic Acids Res. 45:6023-36 (2017)).

[0138] In some embodiments, the RNA (e.g., mRNA) is a circular RNA.

[0139] Compositions and methods for producing mRNA are disclosed, see, e.g., in WO2016011306, WO2016014846, WO2016022914, WO2016077123, WO2016164762, WO2016201377, WO2017049275, U.S. Pat. Nos. 9,937,233, 8,710,200, U.S. Ser. No. 10/022,425, U.S. Pat. Nos. 9,878,056, 9,572,897, WO2010084371, U.S. Pat. No. 9,353,153, WO2015034925 and WO2019236673. Also see, e.g., Jemielity et al., RNA 9(9):1108-22 (2003); Mockey et al., Biochem Biophys Res Commun. 340: 1062-88 (2006); Strenkowska et al. Nucleic Acids Res. 44: 9578-90 (2016); Presnyak et al., Cell 160: 1111-24 (2015) and Kaczmarek et al., Genome Medicine 9:60 (2017)). In some embodiments, the mRNA is prepared in a lipid nanoparticle (LNP) formulation (e.g., for in vivo delivery, see, e.g., U.S. Pat. Nos. 9,764,036, 9,682,139, Kauffman et al., Nano Lett. 15: 7300-6 (2015) and Fenton et al., Adv Mater. 28: 2939-43 (2016)).

[0140] In some embodiments, the polynucleotide is an aptamer. In certain embodiments, the aptamer binds to a target protein disclosed herein. In particular embodiments, the aptamer binds to a binding partner of a target protein disclosed herein.

[0141] In some embodiments, the polynucleotide is linked (e.g., covalently) to a delivery polymer. In some embodiments, the link between the polynucleotide and the delivery polymer is reversible. In some embodiments, the polynucleotide is linked to the delivery polymer via a physiologically labile linker. In some embodiments, the physiologically labile linker is a disulfide bond.

[0142] In some embodiments, the polynucleotide is conjugated to the polymer in the presence of an excess of polymer. In some embodiments, the excess polymer is removed prior to administration (e.g., to a cell or a subject).

[0143] A person of ordinary skill in the art can readily make suitable polynucleotide agents for use in the compositions, kits and methods described herein using the gene locus information of the protein sequences contained in the Sequence Listing incorporated herein, and Table A such as the chromosomal location, starting and ending nucleotide positions, and polymorphism identifications.

### C. Agents Comprising Gene Editing Systems

[0144] In some embodiments, the agent comprises a gene editing system. In some embodiments, the gene editing system produces a deletion of nucleotides, a substitution of nucleotides, an addition of nucleotides or a combination of the foregoing, in a gene encoding a target protein.

[0145] In some embodiments, the gene editing system is a CRISPR/Cas system, a transposon-based gene editing system, or a transcription activator-like effector nuclease (TALEN) system. In some embodiments, the gene editing system is a CRISPR/Cas system. In some embodiments, the gene editing system is a class II CRISPR/Cas system.

[0146] In some embodiments, the gene editing system (e.g., the CRISPR/Cas system) reduces (e.g., decreases, inhibits) or eliminates (e.g., via gene knockout) the expression of the target protein. In some embodiments, the gene editing system (e.g., the CRISPR/Cas system) reduces (e.g., decreases, inhibits) or eliminates (e.g., via gene knockout) the expression of a protein capable of modulating the expression or activity of the target protein. In some embodiments, the gene editing system (e.g., the CRISPR/Cas system) increases (e.g., via gene knock-in or gene replacement) the expression of the target protein. In some embodiments, the gene editing system (e.g., the CRISPR/Cas system) increases (e.g., via gene knock-in or gene replacement) the expression of a protein capable of modulating the expression or activity of the target protein.

[0147] In some embodiments, the CRISPR system specifically catalyzes cleavage in a gene encoding the target protein, thereby inactivating said gene. Repairing nucleic acid strand breaks through non-homologous end joining (NHEJ) often results in changes to the DNA sequence at the site of the cleavage, resulting in small insertions or deletions (Indels). In some embodiments, NHEJ is used to knock out the gene encoding the target protein. In some embodiments, homology directed repair (HDR) is used to concurrently inactivate a gene encoding the target protein and insert a heterologous sequence into the inactivated locus. Cells in which a knockout and/or knockin event has occurred can be identified and/or selected by well-known methods in the art.

[0148] In some embodiments, the gene editing system comprises a single Cas endonuclease or a polynucleotide encoding the single Cas endonuclease. In some embodiments, the single Cas endonuclease is Cas9, Cpf1, C2C1 or C2C3. In some embodiments, the single Cas endonuclease is Cas9 (e.g., of Streptococcus Pyogenes). In some embodiments, the single Cas endonuclease is Cpf1. In some embodiments, the Cpf1 is AsCpf1 (from Acidaminococcus sp.) or LbCpf1 (from Lachnospiraceae sp.). The choice of nuclease and gRNA(s) will typically be determined according to whether a deletion, a substitution, or an addition of nucleotide(s) to a targeted sequence is desired.

[0149] In some embodiments, the type II Cas endonuclease is Cas 9 (e.g., of Streptococcus pyogenes). In some embodiments, the modified Cas 9 is nickase Cas9, dead Cas9 (dCas9) or eSpCas9. In some embodiments, the nickase Cas9 is Cas9 D10A. In some embodiments, the dCas9 is D10A or H840A. In some embodiments, the gene editing system comprises a double nickase Cas9 (e.g., to achieve more accurate genome editing, see, e.g., Ran et al., Cell 154: 1380-89 (2013). Wild-type Cas9 generates double-strand breaks (DSBs) at specific DNA sequences targeted by a gRNA. Nickase Cas9 generates only a single-strand break. dCas9 is catalytically inactive. In some embodiments, dCas9 is fused to a nuclease (e.g., a FokI to generate DSBs at target sequences homologous to two gRNAs). Various CRISPR/Cas9 plasmids are publicly available from the Addgene repository (Addgene, Cambridge, MA: addgene.org/crispr/).

[0150] In some embodiments, the gene editing system comprises:
[0151] a) a wild-type or modified type II Cas endonuclease or a polynucleotide encoding the wild-type or modified type II Cas endonuclease;
[0152] b) a CRISPR RNA (“crRNA”); and
[0153] c) a trans-activating crRNA (“tracrRNA”).

[0154] In some embodiments, the crRNA comprises at least 1 “guide RNA” (sgRNA), e.g., at least: 2, 3 or 4 gRNAs. In some embodiments, the gRNA comprises a sequence that is identical to a portion of the gene sequence of the target protein. In some embodiments, the gRNA comprises a sequence that is identical to a portion of the gene sequence of a protein capable of modulating the expression or activity of the target protein. In some embodiments, the gRNA is at least about 16 nucleotides, e.g., at least about: 17, 18, 19, 20, 21, 22, 23, 24 or 25 nucleotides; or about: 16, 17, 18, 19, 20, 21, 22, 23, 24 or 25 nucleotides; or about: 16-24, 17-24, 17-23, 18-23, 18-22, 19-22 or 19-21 or 19, 20 or 21 nucleotides. In some embodiments, the sgRNA is chemically modified.

[0155] Design of gRNA sequences for gene editing are known in the art. See, for example, Cong et al., Science, 339: 819-23 (2013) and Ran et al., Nature Protocols 8: 2281-308 (2013). Cas9 requires at least about 16 or 17 nucleotides of gRNA sequence to cleave DNA, and Cpf1 requires at least about 16 nucleotides of gRNA sequence to cleave DNA. In practice, a gRNA sequence has a length of about 17-24 nucleotides (e.g., about: 19, 20 or 21 nucleotides) and is complementary to a target gene. Custom gRNA generators and algorithms are commercially available. Chemically modified sgRNAs have also been demonstrated to be effective in genome editing (see, e.g., Hendel et al., Nature Biotechnol., 985-91 (2015)).

[0156] In some embodiments, the crRNA further comprises a sequence capable of binding to the tracrRNA. Upon binding, the partially double-stranded structure is cleaved by RNase III, the resulting crRNA/tracrRNA hybrid directs the Cas9 endonuclease to recognize and cleave a target DNA sequence.

[0157] In some embodiments, the target DNA sequence is approximate to a “protospacer adjacent motif” (“PAM”) that is specific for a Cas endonuclease. PAM sequences appear throughout a given genome. CRISPR endonucleases of various prokaryotic species have unique PAM sequence requirements. Non-limiting examples of PAM sequences include: 5′-NGG (Streptococcus pyogenes), 5′-NNAGAA (Streptococcus thermophilus CRISPR1), 5′-NGGNG (Streptococcus thermophilus CRISPR3) and 5′-NNNGATT (Neisseria meningiditis). Some endonucleases, e.g., Cas9 endonucleases, are associated with G-rich PAM sites, e.g., 5′-NGG, and perform blunt-end cleaving of the target DNA at a location that is 3 nucleotides upstream (5′) of the PAM site.

[0158] In some embodiments, the gene editing system comprises:
[0159] a) a wild-type or modified type II Cas endonuclease or a polynucleotide encoding the wild-type or modified type II Cas endonuclease; and
[0160] b) a crRNA.

[0161] Cpf1-associated CRISPR arrays are processed into mature crRNAs without the requirement of a tracrRNA. Cpf1 endonucleases, are associated with T-rich PAM sites, e.g., 5′-TTN. Cpf1 can also recognize a 5′-CTA PAM motif. Cpf1 cleaves the target DNA by introducing an offset or staggered double-strand break with a 4- or 5-nucleotide 5′ overhang, for example, cleaving a target DNA with a 5-nucleotide offset or staggered cut located 18 nucleotides downstream (3′) of the PAM site on the coding strand and 23 nucleotides downstream from the PAM site on the complimentary strand. The 5-nucleotide overhang that results from such offset cleavage allows more precise genome editing by DNA insertion by homologous recombination than by insertion at blunt-end cleaved DNA. See, e.g., Zetsche et al., Cell 163:759-71 (2015).

[0162] In some embodiments, the gene editing system activates or represses transcription of a target gene. In some embodiments, the gene editing system comprises:
[0163] a) a chimeric protein comprising dCas9 and one or more effector domains; and
[0164] b) one or more sgRNAs.

[0165] In some embodiments, the chimeric protein represses the expression of the target protein (CRISPRi). In some embodiments, the chimeric protein activates the expression of the target protein (CRISPRa). In some embodiments, the chimeric protein methylates a DNA sequence recognized by the sgRNA. In some embodiments, the chimeric protein demethylates a DNA sequence recognized by the sgRNA.

[0166] An effector domain comprises a biologically active portion of an effector protein (e.g., transcriptional activator or repressor). In some embodiments, the gene editing system comprises 1 effector domain. In some embodiments, the gene editing system comprises at least 2 effector domains, e.g., 2, 3 or 4 effector domains. In some embodiments, the effector domain comprises KRAB. In some embodiments, the effector domain comprises VP64. In some embodiments, the effector domain comprises VP64, p65 and Rta. In some embodiments, the dCas9 is D10A. In some embodiments, the dCas9 is H840A.

[0167] Because dCas9 is catalytically inactive, dCas9 does not cut the target DNA but interferes with transcription by steric hindrance. The dCas9 chimeric protein (e.g., dCas9-VPR), guided by the one or more gRNAs to the upstream sequence of a transcriptional start site (TSS) of the target gene, modulates transcription of the target gene. See, e.g., Gilbert et al., CRISPR-Mediated Modular RNA-Guided Regulation of Transcription in Eukaryotes, Cell 154, 442-51 (2013); Cheng et al., Multiplexed activation of endogenous genes by CRISPR-on, an RNA-guided transcriptional activator system, Cell Res. 23: 1163-71 (2013); Gilbert et al., Genome-Scale CRISPR-Mediated Control of Gene Repression and Activation, Cell 159: 647-61 (2014); Tanenbaum et al., A protein-tagging system for signal amplification in gene expression and fluorescence imaging, Cell 159: 635-46 (2014); Konermann et al., Genome-scale transcriptional activation by an engineered CRISPR-Cas9 complex, Nature 517: 583-88 (2015); Chavez et al., Highly efficient Cas9-mediated transcriptional programming, Nat. Methods. 12: 326-28 (2015); Zalatan et al., Engineering complex synthetic transcriptional programs with CRISPR RNA scaffolds, Cell 160: 339-50 (2015); Horlbeck et al., Compact and highly active next-generation libraries for CRISPR-mediated gene repression and activation, eLife. 5: e19760 (2016); Chavez et al., Comparison of Cas9 activators in multiple species, Nat Methods. 7: 563-67 (2016).

[0168] CRISPR technology for editing the genes of eukaryotes is disclosed in US Patent Application Publications 2016/0138008A1 and US2015/0344912A1, and in U.S. Pat. Nos. 8,697,359, 8,771,945, 8,945,839, 8,999,641, 8,993,233, 8,895,308, 8,865,406, 8,889,418, 8,871,445, 8,889,356, 8,932,814, 8,795,965, and 8,906,616. Cpf1 endonuclease and corresponding guide RNAs and PAM sites are disclosed in US Patent Application Publication 2016/0208243 A1. CRISPR technology for generating mtDNA dysfunction in the mitochondrial genome is disclosed in Jo et al., BioMed Res. Int. 2015: 305716 (2015). Co-delivery of Cas9 and sgRNA with nanoparticles is disclosed in Mout et al., ACS Nano 11(3): 2452-58 (2017).

[0169] In some embodiments, the agent comprises a transposon-based gene editing system. An example of a suitable transposon-based gene editing system for use in the disclosure provided herein is the Gene Writer system described in International Publication Number WO 2020/047124, published on Mar. 5, 2020, the contents of which are incorporated herein by referenced in their entirety.

[0170] In some embodiments, the agent comprises a transcription activator-like effector nuclease (TALEN) system. TALEN-based systems comprise a protein comprising a TAL effector DNA binding domain and an enzymatic domain. They are made by fusing a TAL effector DNA-binding domain to a DNA cleavage domain (a nuclease which cuts DNA strands). The FokI restriction enzyme described above is an exemplary enzymatic domain suitable for use in TALEN-based gene-regulating systems.

[0171] TAL effectors are proteins that are secreted by Xanthomonas bacteria via their type III secretion system when they infect plants. The DNA binding domain contains a repeated, highly conserved, 33-34 amino acid sequence with divergent 12th and 13th amino acids. These two positions, referred to as the Repeat Variable Diresidue (RVD), are highly variable and strongly correlated with specific nucleotide recognition. Therefore, the TAL effector domains can be engineered to bind specific target DNA sequences by selecting a combination of repeat segments containing the appropriate RVDs. The nucleic acid specificity for RVD combinations is as follows: HD targets cytosine, NI targets adenine, NG targets thymine, and NN targets guanine (though, in some embodiments, NN can also bind adenine with lower specificity)

[0172] In some embodiments, the TAL effector domains bind to a target DNA sequence that is at least 90%, 95%, 96%, 97%, 98%, or 99% identical, or is 100% identical to a target DNA sequence of the target protein. In some embodiments, the TAL effector domains bind to a target DNA sequence that is at least 90%, 95%, 96%, 97%, 98%, or 99% identical, or is 100% identical to a target DNA sequence defined by a set of genomic coordinates.

[0173] In some embodiments, the gene-regulating system comprises two or more TAL effector-fusion proteins each comprising a TAL effector domain, wherein at least one of the TAL effector domains binds to a target DNA sequence of the target protein. In some embodiments, at least one of the two or more TAL effector domains binds to a target DNA sequence that is at least 90%, 95%, 96%, 97%, 98%, or 99% identical, or is 100% identical to a target DNA sequence defined by a set of genomic coordinates.

[0174] Methods and compositions for assembling the TAL-effector repeats are known in the art. See e.g., Cermak et al, Efficient design and assembly of custom TALEN and other TAL effector-based constructs for DNA targeting, Nucleic Acids Res 39(12): e82 (2011). Plasmids for constructions of the TAL-effector repeats are commercially available from e.g., Addgene.

[0175] In some embodiments, the agent comprises a zinc finger nuclease (ZFN) system. ZFN domains can be generated using commercially available plasmids, such as, for example, plasmid pairs (CSTZFN-1KT COMPOZR® Custom Zinc Finger Nuclease (ZFN) R-3257609) from Sigma Aldrich (St. Louis, MO). Plasmids can be prepared using the commercial system following manufacturer's protocol (e.g., NEB Monarch Miniprep (Cat #T1010), New England Biolabs, Ipswich, MA).

[0176] In some embodiments, the agent comprises a vector designed for delivering conventional gene therapy (e.g., gene knockout or knock-in via homologous recombination). Non-limiting examples of said vectors include retrovirus (e.g., Lentivirus 5), adenovirus, adeno-associated virus, Herpes Simplex Virus, nanoparticles and DNA Transposons.

### D. Small Molecule Agents

[0177] In some embodiments, the agent comprises a small molecule. In some embodiments, the small molecule binds to the target protein. In some embodiments, the small molecule binds to a protein capable of modulating the expression or activity of the target protein. In some embodiments, the small molecule is an inhibitor of the target protein (e.g., a direct inhibitor, an indirect inhibitor). In some embodiments, the small molecule is an activator of the target protein (e.g., a direct activator, and indirect activator).

[0178] Examples of small molecules include organic compounds, organometallic compounds, inorganic compounds, and salts of organic, organometallic or inorganic compounds. Atoms in a small molecule are typically linked together via covalent and/or ionic bonds. In certain embodiments, the small molecule is a small organic molecule. The arrangement of atoms in a small organic molecule may represent a chain (e.g. a carbon-carbon chain or a carbon-heteroatom chain), or may represent a ring containing carbon atoms, e.g. benzene or a polycyclic system, or a combination of carbon and heteroatoms, i.e., heterocycles such as a pyrimidine or quinazoline. Although small molecules can have a wide range of molecular weights, they generally include molecules that are less than about 5,000 daltons. For example, such small molecules can be less than about 1000 daltons and, preferably, are less than about 750 daltons or, more preferably, are less than about 500 daltons. Small molecules can be found in nature (e.g., identified, isolated, purified) and/or produced synthetically (e.g., by traditional organic synthesis, bio-mediated synthesis, or a combination thereof). See e.g. Ganesan, Drug Discov. Today 7(1): 47-55 (January 2002); Lou, Drug Discov. Today, 6(24): 1288-1294 (December 2001). Examples of naturally occurring small molecules include, but are not limited to, hormones, neurotransmitters, nucleotides, amino acids, sugars, lipids, and their derivatives.

[0179] In particular embodiments, the agent comprises a proteolysis targeting chimera (PROTAC).

[0180] A small molecule suitable for use in the compositions, kits and methods of this disclosure can be identified by a person of ordinary skill in the art using any of the screening methods disclosed herein.

### E. Therapeutic Cells and Cell-Based Therapies

[0181] In some embodiments, the agent comprises a therapeutic cell. In certain embodiments, the therapeutic cell expresses and/or is engineered to express a target protein (e.g., a target protein in the Sequence Listing, in Table A, or a variant of the foregoing), a polypeptide (e.g., an antibody, an antigen-binding fragment or a polypeptide that comprises an amino acid sequence that is at least 70% identical to at least a portion of the target protein), a polynucleotide (e.g., a recombinant DNA, an RNA such as mRNA or siRNA), and/or a gene editing system (e.g., a CRISPR/Cas system) described herein.

[0182] In some embodiments, a polypeptide disclosed herein (e.g., an antibody or antigen-binding fragment) is incorporated into a cell-based therapy. In some embodiments, the polypeptide is an engineered T cell receptor. In some embodiments, the polypeptide is a chimeric antigen receptor (CAR) (e.g., expressed on a T (CAR-T) cell, natural killer (CAR-NK) cell, or macrophage (CAR-M) cell). In some embodiments, the CAR comprises a transmembrane domain and an antigen-recognition moiety, wherein the antigen-recognition moiety binds the target protein. In certain embodiments, the polypeptide is expressed by a therapeutic cell (e.g., a CAR-T, CAR-NK or CAR-M cell). In particular embodiments, the polypeptide is a cytokine receptor expressed on the membrane of a CAR-T, CAR-NK or CAR-M cell. In more particular embodiments, the polypeptide is a cytokine secreted from a CAR-T, CAR-NK or CAR-M cell.

[0183] A therapeutic cell suitable for use in the compositions, kits and methods of this disclosure can be generated, identified and/or enriched with methods known to a person of ordinary skill in the art. Non-limiting examples of said methods include purifying, propagating and/or differentiating cells from a subject (e.g., a human) to a specific cell product; engineering a somatic cell for gene therapy; cell immortalization; ex vivo gene modification of a cell (e.g., using viral vector and/or lipid nanoparticle delivery technologies); in vivo gene modification of a cell (e.g., using viral vector and/or lipid nanoparticle delivery technologies); genome editing; cell plasticity technologies; gene modifications; and flow cytometry. In some embodiments, the therapeutic cell is autologous or syngeneic. In other embodiments, the therapeutic cell is allogeneic.

### Expression Vectors and Hosts

[0184] In another aspect, the disclosure provides an expression vector comprising a polynucleotide described herein.

[0185] The term “expression vector” refers to a replicable nucleic acid from which one or more proteins can be expressed when the expression vector is transformed into a suitable expression host cell.

[0186] In some embodiments, the expression vector comprises an expression control polynucleotide sequence operably linked to the polynucleotide, a polynucleotide sequence encoding a selectable marker, or both. In some embodiments, the expression control polynucleotide sequence comprises a promoter sequence, an enhancer sequence, or both. In some embodiments, the expression control polynucleotide sequence comprises an inducible promoter sequence. The term “promoter” refers to a region of DNA to which RNA polymerase binds and initiates the transcription of a gene. The term “operably linked” means that the nucleic acid is positioned in the recombinant polynucleotide, e.g., vector, in such a way that enables expression of the nucleic acid under control of the element (e.g., promoter) to which it is linked. The term “selectable marker element” is an element that confers a trait suitable for artificial selection. Selectable marker elements can be negative or positive selection markers. Non-limiting examples of expression vectors for use with bacterial, fungal, yeast, and mammalian cellular hosts are described in Molecular Cloning: A Laboratory Manual (Michael R. Green & Joseph Sambrook eds., 4^{th} ed. 2012).

[0187] In another aspect, the disclosure provides an expression host cell comprising any one or more of the polynucleotides or expression vectors described herein.

[0188] The term “expression host cell” refers to a cell useful for receiving, maintaining, reproducing and/or amplifying a vector.

[0189] Non-limiting examples of expression host cells include mammalian cells such as hybridoma cells, Baby Hamster Kidney fibroblasts (BHK cells), Chinese hamster ovary (CHO) cells, COS cells, HeLa cells, and human embryonic kidney (HEK), yeast cells such as Pichia pastoris cells, or bacterial cells such as DH5a, etc. See, e.g., Mammalian Cell Cultures for Biologics Manufacturing (Weichang Zhou & Anne Kantardjieff eds., 2014) for processes of host cell culture for production of protein therapeutics; Protein Biotechnology: Isolation, Characterization, and Stabilization (Felix Franks eds., 2013) and Protein Purification Protocols (Paul Cutler eds., 2010) for purification of protein therapeutics; and Therapeutic Protein Drug Products: Practical Approaches to formulation in the Laboratory, Manufacturing, and the Clinic (Brian K Meyer eds., 2012) for formulation of protein therapeutics.

[0190] A polynucleotide or expression vector described herein can be introduced into a suitable or desired host cell using techniques known in the art, including transformation, electroporation, and transduction. The introduced nucleic acid can be extrachromosomal in the host cell, or integrated into the host cell's genome.

### Pharmaceutical Compositions

[0191] In another aspect, the disclosure provides a pharmaceutical composition, wherein the pharmaceutical composition comprises an agent disclosed herein, and a pharmaceutically acceptable carrier. As used herein, the term “pharmaceutical composition” refers to a composition having pharmacological activity or other direct effect in mitigating, treating, or preventing cancer, or a finished dosage form or formulation thereof.

[0192] In some embodiments, the composition (e.g., pharmaceutical composition) comprises pharmaceutically acceptable carriers, excipients, stabilizers, diluents or tonifiers (Remington's Pharmaceutical Sciences 16^{th} edition, Osol, A. Ed. (1980)). Suitable pharmaceutically acceptable carriers, excipients, or stabilizers are nontoxic to recipients at the dosages and concentrations employed. Non-limiting examples of pharmaceutically acceptable carriers, excipients, stabilizers, diluents or tonifiers include buffers (e.g., phosphate, citrate, histidine), antioxidants (e.g., ascorbic acid or methionine), preservatives, proteins (e.g., serum albumin, gelatin or immunoglobulins); hydrophilic polymers, amino acids, carbohydrates (e.g., monosaccharides, disaccharides, glucose, mannose or dextrins); chelating agents (e.g., EDTA), sugars (e.g., sucrose, mannitol, trehalose or sorbitol), salt-forming counter-ions (e.g., sodium), metal complexes (e.g., Zn-protein complexes); non-ionic surfactants (e.g., Tween), PLURONICS™ and polyethylene glycol (PEG).

[0193] In some embodiments, the agent of the pharmaceutical compositions (e.g., polypeptide, polynucleotide, or small molecule) is modified, e.g., conjugated to a heterologous moiety. The term “conjugated” refers to attached, via a covalent or noncovalent interaction. Conjugation can employ any of suitable linking agents; non-limiting examples include peptide linkers, compound linkers, and chemical cross-linking agents.

[0194] In some embodiments, the heterologous moiety is a marker (e.g., a fluorescent or radioactive marker), a molecule that stabilizes the agent, a molecule that targets the agent (e.g., to a particular cell or tissue, to facilitate or prevent from crossing the blood brain barrier), or a combination thereof.

[0195] In some embodiments, the heterologous moiety is polyethylene glycol (PEG), 50exadecenoic acid, hydrogels, nanoparticles, multimerization domains and carrier peptides. In some embodiments, the nanoparticle is a lipid nanoparticle. In some embodiments, the nanoparticle is a polymer nanoparticle. In some embodiments, the polymer is an amphiphilic polymer. In other embodiments, the polymer is a hydrophobic or hydrophilic polymer. Non-limiting examples of polymers include poly(lactic acid)-poly(ethylene glycol), poly(lactic-co-glycolic acid)-poly(ethylene glycol), poly(lactic-co-glycolic) acid (PLGA), poly(lactic-co-glycolic acid)-d-α-tocopheryl polyethylene glycol succinate, poly(lactic-co-glycolic acid)-ethylene oxide fumarate, poly(glycolic acid)-poly(ethylene glycol), polycaprolactone-poly(ethylene glycol), or any salts thereof. In some embodiments, the polymer nanoparticle comprises poly(lactic-co-glycolic) acid (PLGA).

[0196] In some embodiments, the composition (e.g., pharmaceutical composition) is formulated for a suitable administration schedule and route. Non-limiting examples of administration routes include oral, rectal, mucosal, intravenous, intramuscular, subcutaneous and topical, etc. In some embodiments, the composition (e.g., pharmaceutical composition) is stored in the form of an aqueous solution or a dried formulation (e.g., lyophilized). In some embodiments, the composition is formulated to be administered by infusion (e.g., intravenous infusion).

[0197] In some embodiments, the composition is formulated to be administered with one or more additional therapeutic agents (e.g., with a second therapeutic agent) as a combination therapy. As used herein, a “combination therapy” or “administered in combination” means that two (or more) different agents or treatments are administered to a subject as part of a defined treatment regimen for a particular disease or condition. Non-limiting examples of additional agents or treatments include biologics (e.g., antibodies, peptides), steroid hormones, protein replacement therapies, substrate therapies, enzyme therapies, cell therapies, gene therapies, small molecules and agents impacting metabolic activities.

[0198] The treatment regimen defines the doses and periodicity of administration of each agent such that the effects of the separate agents on the subject overlap. In some embodiments, the two or more agents are administered in a sequential manner as part of a prescribed regimen. In other embodiments, the delivery of the two or more agents is simultaneous or concurrent. In some embodiments, the two or more agents are co-formulated. In some embodiments, administration of two or more agents or treatments in combination is such that the reduction in a symptom, or other parameter related to the disorder is greater than what would be observed with one agent or treatment delivered alone or in the absence of the other. The effect of the two treatments can be partially additive, wholly additive, or greater than additive (e.g., synergistic). Each of the two or more therapeutic agents can be administered by any appropriate route including, but not limited to, oral routes, intravenous routes, intramuscular routes, and direct absorption through mucous membrane tissues. The two or more therapeutic agents can be administered by the same route or by different routes.

[0199] In some embodiments, the agent or pharmaceutical composition of the disclosure is delivered by a viral vector, e.g., by contacting a cell with a viral vector, locally administered (e.g., injected) to a tumor, or systemically (e.g., intravenously or orally) administered to a subject (e.g., a human patient).

[0200] Viral genomes provide a rich source of vectors that can be used for the efficient delivery of exogenous genes into a mammalian cell. Viral genomes are particularly useful vectors for gene delivery because the polynucleotides contained within such genomes are typically incorporated into the nuclear genome of a mammalian cell by generalized or specialized transduction. These processes occur as part of the natural viral replication cycle, and do not require added proteins or reagents to induce gene integration. Non-limiting examples of viral vectors include retrovirus (e.g., Retroviridae family viral vector), adenovirus (e.g., Ad5, Ad26, Ad34, Ad35, and Ad48), parvovirus (e.g., adeno-associated viruses), coronavirus, negative strand RNA viruses such as orthomyxovirus (e.g., influenza virus), rhabdovirus (e.g., rabies and vesicular stomatitis virus), paramyxovirus (e.g., measles and Sendai), positive strand RNA viruses, such as picornavirus and alphavirus, and double stranded DNA viruses including adenovirus, herpesvirus (e.g., Herpes Simplex virus types 1 and 2, Epstein-Barr virus, cytomegalovirus, replication deficient herpes virus), and poxvirus (e.g., vaccinia, modified vaccinia Ankara (MVA), fowlpox and canarypox). Additional non-limiting examples include Norwalk virus, togavirus, flavivirus, reoviruses, papovavirus, hepadnavirus, human papilloma virus, human foamy virus, and hepatitis virus, for example. Non-limiting examples of retroviruses include: avian leukosis-sarcoma, avian C-type viruses, mammalian C-type, B-type viruses, D-type viruses, oncoretroviruses, HTLV-BLV group, lentivirus, alpharetrovirus, gammaretrovirus, spumavirus (see, e.g., Coffin J M. Retroviridae: The viruses and their replication. In: Fields B N, Knipe D M, Howley P M et al, eds. Fundamental Virology. 3^{rd} ed. Philadelphia: Lippincott-Raven Publishers, 1996:763-843). Additional non-limiting examples include murine leukemia viruses, murine sarcoma viruses, mouse mammary tumor virus, bovine leukemia virus, feline leukemia virus, feline sarcoma virus, avian leukemia virus, human T-cell leukemia virus, baboon endogenous virus, Gibbon ape leukemia virus, Mason Pfizer monkey virus, simian immunodeficiency virus, simian sarcoma virus, Rous sarcoma virus and lentiviruses. Additional non-limiting examples of vectors are described, for example, in U.S. Pat. No. 5,801,030, the teachings of which are incorporated herein by reference.

[0201] In some embodiments, the agent or pharmaceutical composition of the disclosure is formulated to be delivered by a membrane-based carrier in vivo, in vitro, ex vivo, or in situ. In some embodiments, the membrane-based carrier is a cell-based carrier (e.g., mammalian such as human cells). In some embodiments, the membrane-based carrier is a vesicle-based carrier. In some embodiments, the membrane-based carrier comprises one or more vectors described herein (e.g., a plasmid, virus, viral-like particle or a virosome).

[0202] In some embodiments, the agent or pharmaceutical composition of the disclosure is formulated to be delivered by one or more liposomes. Liposomes are spherical vesicle structures composed of a uni- or multilamellar lipid bilayer surrounding internal aqueous compartments and a relatively impermeable outer lipophilic phospholipid bilayer. Liposomes may be anionic, neutral or cationic. Liposomes are biocompatible, nontoxic, can deliver both hydrophilic and lipophilic drug molecules, protect their cargo from degradation by plasma enzymes, and transport their load across biological membranes and the blood brain barrier (BBB) (see, e.g., Spuch and Navarro, J Drug Deliv. 2011: 469679 (2011)).

[0203] Vesicles can be made from several different types of lipids; however, phospholipids are most commonly used to generate liposomes as drug carriers. Methods for preparation of multilamellar vesicle lipids are known in the art (see for example U.S. Pat. No. 6,693,086, the teachings of which relating to multilamellar vesicle lipid preparation are incorporated herein by reference). Although vesicle formation can be spontaneous when a lipid film is mixed with an aqueous solution, it can also be expedited by applying force in the form of shaking by using a homogenizer, sonicator, or an extrusion apparatus (see, e.g., Spuch and Navarro, J Drug Deliv. 2011: 469679 (2011)). Extruded lipids can be prepared by extruding through filters of decreasing size, as described in Templeton et al., Nature Biotech, 15: 647-52 (1997), the teachings of which relating to extruded lipid preparation are incorporated herein by reference.

[0204] In some embodiments, the agent or pharmaceutical composition of the disclosure is formulated to be delivered by lipid nanoparticles (LNPs). In one embodiment, the LNP preparation comprising the agent or pharmaceutical composition of the disclosure has one or more of the following characteristics: (a) the LNP preparation comprises a cationic lipid, a neutral lipid, a cholesterol, and a PEG lipid, (b) the LNP preparation has a mean particle size of between 80 nm and 160 nm.

[0205] Nanostructured lipid carriers (NLCs) are modified solid lipid nanoparticles (SLNs) that retain the characteristics of the SLN, improve drug stability and loading capacity, and prevent drug leakage. Polymer nanoparticles (PNPs) are an important component of drug delivery. These nanoparticles can effectively direct drug delivery to specific targets and improve drug stability and controlled drug release. Lipid-polymer nanoparticles (PLNs), a new type of carrier that combines liposomes and polymers, may also be employed. These nanoparticles possess the complementary advantages of PNPs and liposomes. A PLN is composed of a core-shell structure; the polymer core provides a stable structure, and the phospholipid shell offers good biocompatibility. As such, the two components increase the drug encapsulation efficiency rate, facilitate surface modification, and prevent leakage of water-soluble drugs. See, e.g., Li et al., Nanomaterials 7(6): 122 (2017).

[0206] In some embodiments, the agent or pharmaceutical composition of the disclosure is formulated to be delivered by a carbohydrate carrier (e.g., an anhydride-μmodified phytoglycogen or glycogen-type material). Non-limiting examples of carbohydrate carriers include phytoglycogen octenyl succinate, phytoglycogen beta-dextrin and anhydride-modified phytoglycogen beta-dextrin.

[0207] In some embodiments, the agent or pharmaceutical composition of the disclosure is formulated to be delivered by a protein carrier (e.g., a protein covalently linked to the circular polyribonucleotide). Non-limiting examples of protein carriers include human serum albumin (HAS), low-density lipoprotein (LDL), high-density lipoprotein (HDL) and globulin.

[0208] In some embodiments, the agent or pharmaceutical composition of the disclosure is formulated to be delivered by a cationic carrier (e.g., a cationic lipopolymer or transfection reagent). Non-limiting examples of cationic carriers include lipofectamine, polyethylenimine, poly(trimethylenimine), poly(tetramethylenimine), polypropylenimine, aminoglycoside-polyamine, dideoxy-diamino-b-cyclodextrin, spermine, spermidine, poly(2-dimethylamino)ethyl methacrylate, poly(lysine), poly(histidine), poly(arginine), cationized gelatin, dendrimers, chitosan, 1,2-Dioleoyl-3-Trimethylammonium-Propane (DOTAP), N-[1-(2,3-dioleoyloxy) propyl]-N,N,N-trimethylammonium chloride (DOTMA), 1-[2-(oleoyloxy)ethyl]-2-oleyl-3-(2-hydroxyethyl)imidazolinium chloride (DOTIM), 2,3-dioleyloxy-N-[2(sperminecarboxamido) ethyl]-N,N-dimethyl-l-propanaminium trifluoroacetate (DOSPA), 3B—[N-(′\N′-Dimethylaminoethane)-carbamoyl]Cholesterol Hydrochloride (DC-Cholesterol HCl), diheptadecylamidoglycyl spermidine (DOGS), N,N-distearyl-N,N-dimethylammonium bromide (DDAB), N-(1,2-dimyristyloxyprop-3-yl)-N,N-dimethyl-N-hydroxyethyl ammonium bromide (DMRIE) and N,N-dioleyl-N,N-dimethylammonium chloride (DODAC).

[0209] In some embodiments, the agent or pharmaceutical composition of the disclosure is formulated to be delivered by exosomes, adipocytes and/or red blood cells. See, e.g., Ha et al., Acta Pharm Sin B. 6(4): 287-96 (2016).

[0210] In some embodiments, the agent or pharmaceutical composition of the disclosure is formulated to be delivered by one or more Fusosomes. Fusosomes have been engineered to confer target cell specificity for the fusion and payload delivery, allowing the creation of delivery vehicles with programmable cell specificity. See, e.g., Patent Application WO2020014209, the teachings of which relating to fusosome design, preparation, and usage are incorporated herein by reference.

[0211] In some embodiments, the agent or pharmaceutical composition of the disclosure is formulated to be delivered by ex vivo differentiated red blood cells. See, e.g., WO2015073587; WO2017123646; WO2017123644; WO2018102740; WO2016183482; WO2015153102; WO2018151829; WO2018009838; Shi et al., PNAS, 111(28): 10131-36 (2014); U.S. Pat. No. 9,644,180; Huang et al., Nature Communications 8: 423 (2017).

[0212] In some embodiments, the agent or pharmaceutical composition of the disclosure is formulated to be delivered by one or more microsomes, virus-like particles (VLPs) or plant nanovesicles and plant messenger packs (PMPs). See, e.g., WO2011097480, WO2013070324, WO2017004526 and WO2020041784.

[0213] In some embodiments, the agent or pharmaceutical composition of the disclosure is formulated to be delivered by one or more anellosomes. The making and use of anellosomes used for delivery of therapeutic products is described in U.S. Pat. No. 11,166,996, the teachings of which relating to anellosome design, preparation, and usage are incorporated herein by reference.

### Methods of Modulating Target Proteins

[0214] In another aspect, the disclosure provides a method of modulating the expression or activity of a target protein identified in the Sequence Listing, in Table A, or a variant of the foregoing in a cell (a target cell, a cell of a target tissue), comprising contacting the cell (e.g., in vitro, ex vivo, or in vivo) with an agent that comprises and/or modulates the expression or activity of a target protein identified herein, or a pharmaceutical composition comprising the agent.

[0215] The target cell can be of any cell type. In some embodiments, the target cell is a liver cell (e.g., a hepatocyte (HC), a hepatic stellate cell (HSC), a Kupffer cell (KC), and/or a liver sinusoidal endothelial cell (LSEC)); a pancreatic cell (e.g., an alpha cell, a beta cell, a delta cell, and/or a PP cell); a thyroid cell; a glandular cell; or a combination thereof. In particular embodiments, the target cell is a hepatocyte (HC), a Kupffer cell (KC), a pancreatic beta cell, a muscle cell, a cardiac cell, a brain cell, a kidney cell, an adipocyte, or a combination thereof.

[0216] In some embodiments, the target cell is implicated and/or involved in inflammation. In certain embodiments, the target cell is an epithelial cell, an endothelial cell, a stem cell, a non-immune cell, or a combination thereof.

[0217] In some embodiments, the target cell is implicated and/or involved in fibrosis, aging, senescence, or a combination thereof. In certain embodiments, the target cell is a stem cell, an epithelial cell, an endothelial cell, a non-immune cell, or a combination thereof.

[0218] In some embodiments, the target cell is an immune cell. In certain embodiments, the target cell is an effector T cell, a helper T cell, a Th1 cell, a Th2 cell, a Th17 cell, a B cell, a natural killer (NK) cell, an innate lymphoid cell (e.g., an ILC1 cell, an ILC2 cell, an ILC3 cell), a macrophage (e.g., an M1 macrophage, an M2 macrophage), a monocyte, and/or an antigen presenting cell (e.g., a dendritic cell), or a combination of the foregoing.

[0219] In some embodiments, a target protein of the disclosure is used to mediate depletion of a cell population (e.g., a population of cancer cells, such as tumor cells; a population of immune cells). In some embodiments, a target protein of the disclosure facilitates cell targeting (e.g., delivering a therapeutic in a cell type-specific manner), for example, as a binder of a surface marker.

[0220] The target tissue may be any tissue of the body.

[0221] The target tissue may be any gland (e.g., an adrenal gland, a pituitary gland, a parathyroid gland, and/or a pineal gland) or reproductive tissue (e.g., ovary, testes) of the body. In certain embodiments, the target tissue comprises liver, pancreas, thyroid, ovary, testes, muscle, heart, brain, kidney, an adipose tissue, or a combination thereof. In some embodiments, the target tissue comprises an adrenal gland, a pituitary gland, a parathyroid gland, a pineal gland, or a combination of the foregoing.

[0222] In some embodiments, the target tissue is an immune tissue. In some embodiments, the target cell is a non-immune tissue. In some embodiments, the target tissue comprises a lymph node, a spleen, a secondary lymphoid organ, a tertiary lymphoid organ, a barrier tissue, skin, gut, an airway, a wound, an immune tissue, a non-immune tissue, or a combination of the foregoing.

[0223] In certain embodiments, the effective amount is sufficient to reduce expression of the target protein in the target cell and/or target tissue. In some embodiments, said reduction is by at least about 10%, e.g., by at least about: 15%, 20%, 25%, 30%, 35%, 40%, 45%, 50%, 55%, 60%, 65%, 70%, 75%, 80%, 85%, 90%, 91%, 92%, 93%, 94%, 95%, 96%, 97%, 98% or 99%. In particular embodiments, said reduction is about 10-99%, e.g., about: 10-98%, 15-98%, 15-97%, 20-97%, 20-96%, 25-96%, 25-95%, 30-95%, 30-94%, 35-94%, 35-93%, 40-93%, 40-92%, 45-92%, 45-91%, 50-91%, 50-90%, 55-90%, 55-85%, 60-85%, 60-80%, 65-80%, 65-75%, or 70-75%.

[0224] In certain embodiments, the effective amount is sufficient to increase expression of the target protein in the target cell and/or target tissue. In some embodiments, said increase is by at least about 10%, e.g., by at least about: 15%, 20%, 25%, 30%, 35%, 40%, 45%, 50%, 55%, 60%, 65%, 70%, 75%, 80%, 85%, 90%, 91%, 92%, 93%, 94%, 95%, 96%, 97%, 98% or 99%. In particular embodiments, said increase is about 10-99%, e.g., about: 10-98%, 15-98%, 15-97%, 20-97%, 20-96%, 25-96%, 25-95%, 30-95%, 30-94%, 35-94%, 35-93%, 40-93%, 40-92%, 45-92%, 45-91%, 50-91%, 50-90%, 55-90%, 55-85%, 60-85%, 60-80%, 65-80%, 65-75%, or 70-75%. In some embodiments, said increase is by about 1-100 fold, e.g., by about: 1-75, 1-50, 1-25, 1-20, 1-15, 1-10, 1-8, 1-6, 1-5, 1-4, 1-3 or 1-2 fold.

[0225] In some embodiments, the effective amount is sufficient to modulate nuclear factor kappa B (NF-κB) signaling, growth-factor signaling, cell death (e.g., apoptosis), cell cycle (e.g., mitosis), cell migration, inflammation, or a combination of the foregoing. In some embodiments, the effective amount is sufficient to modulate a signaling pathway involving the Janus kinase (JAK)-signal transducer family (e.g., JAK1, JAK2, JAK3 and TYK2), a member of the signal transducer and activator of transcription (STAT) protein family (e.g., STAT1, STAT3), a member of the protein kinase B family (e.g., RAC-alpha, RAC-beta or RAC-gamma serine/threonine-protein kinase), a member of the interferon regulatory factor (IRF) family, a mitogen-activated protein kinase (MAPK), or a combination of the foregoing.

### Methods of Diagnosis and Treatment

[0226] In another aspect, the disclosure provides a method of detecting a disease or condition, or predicting a likelihood of (or risk level for) developing a disease or condition in a subject, comprising quantifying an expression or activity of a target protein in a sample from the subject, wherein the level of expression or activity of the target protein in the sample is indicative of the likelihood of developing the disease or condition in the subject, wherein the disease or condition is selected from aging, senescence, fibrosis, a metabolic disease, a cardiovascular disease, an endocrine-associated disorder, a genetic disease, cancer (e.g., tumor), and infection, an immunological disease (e.g., inflammation and/or an autoimmune disease), an indication treated with hormone, growth factor and/or protein replacement, or a combination thereof.

[0227] In another aspect, the disclosure provides a method of classifying a subject based on a predicted likelihood of developing a disease or condition, comprising quantifying an expression or activity of a target protein in a sample from the subject; predicting the likelihood of developing the disease or condition based on the expression or activity of the target protein in the sample; and classifying the patient based on the predicted likelihood, wherein the disease or condition is selected from aging, senescence, fibrosis, a metabolic disease, a cardiovascular disease, an endocrine-associated disorder, a genetic disease, cancer (e.g., tumor), and infection, an immunological disease (e.g., inflammation and/or an autoimmune disease), an indication treated with hormone, growth factor and/or protein replacement, or a combination thereof.

[0228] In another aspect, the disclosure provides a method of stratifying a set of subjects having a disease or condition, comprising: quantifying an expression and/or activity of a target protein in samples from individual subjects in the set; and stratifying the set of subjects for treatment according to the individual subjects' levels of the expression and/or activity of the target protein in the samples, wherein the disease or condition is selected from aging, senescence, fibrosis, a metabolic disease, a cardiovascular disease, an endocrine-associated disorder, a genetic disease, cancer (e.g., tumor), and infection, an immunological disease (e.g., inflammation and/or an autoimmune disease), an indication treated with hormone, growth factor and/or protein replacement, or a combination thereof.

[0229] In some embodiments, a higher expression or activity level of a target protein in a sample from the subject, relative to an appropriate control (e.g., reference standard) is indicative of the disease or condition or a likelihood of developing the disease or condition. In some embodiments, a lower expression or activity level of a target protein in a sample from the subject, relative to an appropriate control (e.g., reference standard) is indicative of the disease or condition or a likelihood of developing the disease or condition.

[0230] In some embodiments, the method further comprises administering to a subject who is determined to have or predicted to have a likelihood (or be at risk) of developing the disease or condition, an effective amount of an agent disclosed herein or a pharmaceutical composition disclosed herein.

[0231] In some embodiments, the method further comprises administering to a subject who is determined to have or predicted to have a likelihood of developing the disease or condition, an effective amount of an agent disclosed herein or a pharmaceutical composition disclosed herein.

[0232] In another aspect, the disclosure provides a method of preparing a sample that is useful for detecting a likelihood of developing the disease or condition in a subject, comprising:
[0233] a) obtaining or having obtained a sample from the subject;
[0234] b) adding a protease inhibitor, a control peptide, a standard peptide, or a combination thereof to the sample to prepare a sample that is useful for detecting a likelihood of developing cancer; and
[0235] c) quantifying an expression or activity of a target protein in the sample prepared in step b);
   wherein the disease or condition is selected from aging, senescence, fibrosis, a metabolic disease, a cardiovascular disease, an endocrine-associated disorder, a genetic disease, cancer (e.g., tumor), and infection, an immunological disease (e.g., inflammation and/or an autoimmune disease), an indication treated with hormone, growth factor and/or protein replacement, or a combination thereof.

[0236] In another aspect, the disclosure provides a method of treating a disease or condition in a subject in need thereof, comprising administering to the subject an effective amount of an agent disclosed herein or a pharmaceutical composition disclosed herein.

[0237] In another aspect, the disclosure provides a method of treating a disease or condition in a subject in need thereof, comprising administering to the subject an effective amount of an agent disclosed herein or a pharmaceutical composition disclosed herein, wherein the subject has an altered level of expression and/or activity of a target protein disclosed herein.

[0238] “Treatment” and “treating,” as used herein, refer to the medical management of a subject with the intent to improve, ameliorate, stabilize (i.e., not worsen), prevent or cure a disease, pathological condition, or disorder. “Treatment” includes active treatment (treatment directed to improve the disease, pathological condition, or disorder), causal treatment (treatment directed to the cause of the associated disease, pathological condition, or disorder), palliative treatment (treatment designed for the relief of symptoms), preventative treatment (treatment directed to minimizing or partially or completely inhibiting the development of the associated disease, pathological condition, or disorder); and supportive treatment (treatment employed to supplement another therapy). Treatment also includes diminishing the extent of the disease or condition; preventing spread of the disease or condition; delaying or slowing the progress of the disease or condition; ameliorating or palliating the disease or condition; and remission (whether partial or total), whether detectable or undetectable. “Ameliorating” or “palliating” a disease or condition means that the extent and/or undesirable clinical manifestations of the disease, disorder, or condition are lessened and/or time course of the progression is slowed or lengthened, as compared to the extent or time course in the absence of treatment. “Treatment” also includes prolonging survival as compared to expected survival if not receiving treatment. Those in need of treatment include those already with the condition or disorder, as well as those prone to have the condition or disorder or those in which the condition or disorder is to be prevented.

[0239] In some embodiments, the subject is an animal. In other embodiments the subject is a bird, e.g., a hen, rooster, turkey or parrot. In some embodiments, the subject is a mammal. In some embodiments, the subject is a non-human mammal. Non-limiting examples of a non-human mammal include cattle (e.g., dairy or beef cattle), sheep, goat, pig, horse, dog, cat, mouse, rat, etc. In some embodiments, the subject is a human. In some embodiments, the human is a neonate. In some embodiments, the human is a pediatric patient. In some embodiments, the human is a juvenile. In some embodiments, the human is an adult. In some embodiments, the human is less than 18 years old. In some embodiments, the human is at least 18 years old. In some embodiments, the human is between 18 and 25 years old. In some embodiments, the human is at least 25 years old, e.g., at least 30, 35, 40, 45, 50, 55, 60, 65, 70, 75, or 80 years old.

[0240] As used herein, the term “effective amount,” “therapeutically effective amount,” or “sufficient amount” refers to a quantity sufficient to, when administered to a subject (e.g., a mammal such as a human cancer patient), effect treatment (e.g., produce beneficial or desired results), including effects at cellular, tissue or clinical levels, etc. As such, the term depends upon the context in which it is being applied. For example, in the context of treating cancer, it is an amount of an agent sufficient to achieve a response as compared to the response obtained without administration of the agent. The amount of a given composition described herein that will correspond to such an amount will vary depending upon various factors, such as the given agent, the pharmaceutical formulation, the route of administration, the type of disease or disorder, the identity of the subject (e.g., age, sex, weight) or host being treated, and the like, but can nevertheless be routinely determined by one skilled in the art. In some embodiments, a “therapeutically effective amount” of a composition of the present disclosure is an amount that results in a beneficial or desired result in a subject (e.g., as compared to a control). A therapeutically effective amount of a composition of the present disclosure may be readily determined by one of ordinary skill by routine methods known in the art. Dosage regimen may be adjusted to provide the optimum therapeutic response.

[0241] A therapeutic agent described herein can be administered via a variety of routes of administration, including, for example, oral, dietary, topical, transdermal, rectal, parenteral (e.g., intra-arterial, intravenous, intramuscular, subcutaneous injection, intradermal injection), intravenous infusion and inhalation (e.g., intrabronchial, intranasal or oral inhalation, intranasal drops) routes of administration, depending on the compound and the particular disease or condition to be treated. Administration can be local or systemic as indicated. The preferred mode of administration can vary depending on the particular compound chosen.

[0242] In some embodiments, the method further comprises administering a therapeutically effective amount of one or more additional therapeutic agents (e.g., a second therapeutic agent) to the subject.

[0243] Administration of two or more therapeutic agents encompasses co-administration of the therapeutic agents in a substantially simultaneous manner, such as in a pharmaceutical combination. Alternatively, such administration encompasses co-administration in multiple containers, or separate containers (e.g., capsules, powders, and liquids) for each therapeutic agent. Such administration also encompasses use of the therapeutic agents in a sequential manner, either at approximately the same time or at different times. When two or more therapeutic agents are administered, the therapeutic agents can be administered via the same administration route or via different administration routes.

[0244] In another aspect, the disclosure provides a method of modulating the expression or activity of a target protein identified in the Sequence Listing, in Table A, or a variant of the foregoing in a cell, comprising contacting the cell with an agent disclosed herein or a pharmaceutical composition disclosed herein. In some embodiments, the cell is in a subject.

[0245] In another aspect, the disclosure provides a method of identifying an agent that modulates the expression and/or activity of a target protein (e.g., a target protein in the Sequence Listing, in Table A, or a variant of the foregoing), comprising:
[0246] a) contacting a sample (e.g., a biological sample, such as cells or a tissue) comprising the target protein with an agent (e.g., a candidate agent to be tested for its ability to modulate expression and/or activity of the target); and
[0247] b) determining whether the agent modulates the expression or activity of the target protein,
[0248] wherein a difference in the expression or activity of the target protein that has been contacted with the agent compared to a reference indicates that the agent modulates the expression or activity of the target protein.

[0249] In some embodiments, a difference of at least about 10% in the expression or activity of the protein that has been contacted with the agent compared to the reference indicates that the agent modulates the expression or activity of the protein. In some embodiments, the difference is at least about: 15%, 20%, 25%, 30%, 35%, 40%, 45% or 50% or more.

[0250] In some embodiments, a decrease in the expression or activity of the target protein that has been contacted with the agent compared to the reference indicates the agent inhibits the expression or activity of the target protein. In some embodiments, an increase in the expression or activity of the protein compared to the reference indicates the agent activates the expression or activity of the protein.

### Indications

### Aging

[0251] The methods described herein are applicable to the treatment of aging, age-related conditions, and/or age-related disorders or diseases. In some embodiments, the methods described herein include treatment of general health, body temperature, body weight, body height, waist circumference, reproductive ability, body fat, heart rate, blood pressure, pulse rate, blood oxygen level, respiratory rate, breathing pattern, blood glucose level, blood pH, cardiac output, cardiac rhythm, as well as concentration of certain substances in the blood. In some embodiments, treatment may be assessed by measurement of complete blood count, red blood cells, white blood cells, platelets, hemoglobin, hematocrit, mean corpuscular volume, basic metabolic panel, blood glucose, calcium, electrolyte test, kidney function, blood enzyme tests, troponin, creatine kinase, lipoprotein panel, total cholesterol, LDL cholesterol, HDL cholesterol, triglycerides, coagulation panel, and/or bone marrow tests.

### Senescence

[0252] In some embodiments, the methods disclosed herein are for the treatment of senescence. In still further embodiments, the method disclosed herein relate the treatment of senescent associated diseases or disorders. In some embodiments, the disease or disorder is selected from diabetes, metabolic syndrome, and obesity. In other embodiments, the disease or disorder is related to photosensitivity or photoaging. In still further embodiments, the disease or disorder is selected from arthritis, Alzheimer's disease, asthma, blindness, cancer, chronic brochitis, chronic kidney disease, chronic obstructive pulmonary disease, coronary heart disease, deep vein thrombosis, dementia, depression, diabetes, epilepsy, heart failure, high cholesterol, hypertension, motor neurone disease, multiple sclerosis, osteoporosis, Paget's disease of bone, Parkinson's diseases, shingles, and stroke.

### Fibrosis

[0253] In some embodiments, the methods of the disclosure relate to the treatment of fibrosis. In some embodiments, the fibrosis is pulmonary fibrosis, liver fibrosis, skin fibrosis, renal fibrosis, pancreas fibrosis, systemic sclerosis, cardiac fibrosis, mediastinal fibrosis, bone marrow fibrosis, retroperitoneal cavity fibrosis, and/or macular degeneration.

### Metabolic Disease

[0254] In some embodiments, the disclosure provides for treatment of metabolic diseases and/or disorders. In some embodiments, treatment relates to delaying or preventing the onset of metabolic disorders. In some embodiments, treatment relates to delaying or preventing the onset of complications related to one or more metabolic disorder. In still further embodiments, treatment relates to hormone or enzyme therapy. In some embodiments, the metabolic disorder is caused by a genetic defect. In still further embodiments, the metabolic disorder is selected from the group consisting of familial hypercholesterolemia, Gaucher disease, Hunter syndrome, Krabbe disease, Maple syrup urine disease, Metachromatic leukodystrophy, Mitochondrial encephalopathy lactic acidosis stroke-like episodes (MELAS), Niemann-Pick, Phenylketonuria (PKU), Porphyia, Tay-Sachs disease, and Wilson's disease.

### Cardiovascular Disease

[0255] In some embodiments of the disclosure, the methods of the disclosure relate to treatment of a cardiovascular disease. In some embodiments, the cardiovascular diseases is atherosclerosis, congestive heart failure, vulnerable plaque, stroke, or ischemia. In still further embodiments, the cardiovascular disease is coronary artery disease, peripheral artery disease, or carotid artery disease. In further embodiments of the disclosure, the methods relate to the treatment of cardiovascular disease or disorder related symptoms. In some embodiments, such symptoms include chest pressure or pain, shortness of breath, pain or discomfort in the arms or shoulder, pain or discomforted in the jaw, neck, or back, feeling weak, lightheaded, or nauseous. In some embodiments, the symptoms to be addressed may include unusual fatigue, sleep disturbance, shortness of breath, and/or indigestion.

### Endocrine-Associated Disorders

[0256] In some embodiments, the methods disclosed herein relate to the treatment of endocrine-associated diseases or disorders. In some embodiments, the methods relate to the treatment of endocrine glands. In still further embodiments, the endocrine glands include, but are not necessarily limited to, adrenal glands, hypothalamus, ovaries, islet cells of the pancreas, parathyroid, pineal gland, pituitary gland, testes, thymus, and/or thyroid. In some embodiments, treatment according to the disclosed methods is related to disease, problem with the endocrine feedback system, failure of a gland to stimulate another gland's release of hormone, genetic disorder, infection, injury to an endocrine gland, and/or tumor of an endocrine gland. In some embodiments, the endocrine-associated disorder is adrenal insufficiency, Cushing's disease, gigantism (acromegaly), hyperthyroidism, hypothyroidism, hypopituitarism, multiple endocrine neoplasia I and II, polycystic ovary syndrome, and precocious puberty.

### Genetic Diseases

[0257] In some embodiments, the methods relate to methods of treatment of genetic diseases. Genetic diseases amendable to the treatment method of the present disclosure include, without limitation, arrhythmogenic right ventricular dysplasia/cardiomyopathy, Alzheimer's disease, arthritis, Autism spectrum disorder, Brugada syndrome, Cancer, Charcot-Marie-Tooth disease, cleft lip and palate, cleidocrandial dyspladia, cystic fibrosis, diabetes, Down syndrome, FragileX syndrome, familial adenomatous polyposis, Hirshsprungs disease, Huntington's disease, Klienfelter syndrome, Kneist Syndrome, Marfan syndrome, Mucopolysaccharidoses, Muscular Dystrophy, Sickle Cell Disease, spina bifida, Tay-Sachs disease, Triple-X syndrome, Turner syndrome, Trisomy 18, Trisomy 13, and Von Hippel-Lindau. In some embodiments, the genetic diseases are chromosomal. In other embodiments, the genetic diseases are complex and stem from a combination of gene mutations and other factors (e.g., diet, certain medications, tobacco, alcohol use, etc.). In still further embodiments, the genetic disease is a monogenic disease.

### Oncology

[0258] In some embodiments of the disclosure, the methods relate to treatment of cancer. Cancer treatment provided by the disclosure includes carcinoma, sarcoma, melanoma, lymphoma, and/or leukemia. In some embodiments, the method of the disclosure may replace, proceed, or follow another treatment regimen. In some embodiments, another treatment regimen may include, but is not limited to, chemotherapy, radiation therapy, surgery, hormone therapy, biological response modifier therapy, immunotherapy, and/or bone marrow transplant.

### Immunity

[0259] In some embodiments, the methods of the disclosure relate to immunity. In some embodiments, the immunity is related to bacteria, parasites, viruses, fungi, and/or cancer cells. In some embodiments, the immunity is autoimmune and is the result of the immune system attacking self-molecules. In some embodiments, the methods relate to treatment of immunological tolerance.

### Inflammation

[0260] In some embodiments of the disclosure, the methods relate to treatment of inflammation. In some embodiments the inflammation is acute or of relatively short duration, lasting minutes to hours. In still other embodiments, the inflammation is chronic or of longer duration, lasting weeks to months, and possibly years. In some embodiments, the methods disclosed herein relate to the treatment or prevention of conditions associated with inflammation. In certain embodiments, such conditions include but are not limited to flushed skin, pain or tenderness, swelling, heat, fatigue, fever, joint pain or stiffness, mouth sores, rashes. In some embodiments, inflammation is resultant from another disease or disorder.

### Auto-Immunity

[0261] In some embodiments, the disclosed methods relate to the treatment of autoimmune diseases. In some embodiments, the autoimmune disease may include but is not limited to disease of the joint and muscles (e.g., psoriatic arthritis, rheumatoid arthritis, Sjogren's syndrome, systemic lupus erythematosus), diseases of the digestive track (e.g., Crohn's disease, celiac disease, ulcerative colitis, inflammatory bowel diseases), diseases of the endocrine system (e.g., Graves' disease, Hashimoto's thyroiditis, Addison's disease), diseases of the skin (e.g, dermatomyositis, psoriasis, scleroderma), disease of the nervous system (e.g., chronic inflammatory demyelinating polyneuropathy, Guillain-Barre syndrome, multiple sclerosis), and other diseases (e.g., myasthenia gravis, autoimmune vasculitis, pernicious anemia, vasculitis, autoimmune lymphoproliferative syndrome, type 1 diabetes).

### Additional Therapy

[0262] In still further embodiments, the methods of the disclosure relate to treatment of any indication where any hormone, growth factor, or protein replacement is currently utilized. Those skilled in the art will appreciate that the therapeutic effects need not be complete, as long as, a modicum of benefit is provided to the subject.

[0263] In some embodiments, an endocrine organ is any organ that secretes a protein that goes into the circulation.

[0264] In some embodiments, the effective amount is sufficient to modulate (e.g., increase or decrease) metabolic activity, cell proliferation, cell metastasis, cell migration, autophagy, apoptosis, endocrine function, or a combination thereof.

[0265] In some embodiments, the effective amount is sufficient to decrease (e.g., inhibit) metabolic activity, cell proliferation, cell metastasis, cell migration, apoptosis, endocrine function, or a combination thereof. In certain embodiments, the effective amount is sufficient to decrease metabolic activity, cell proliferation, cell metastasis, cell migration, apoptosis, endocrine function, or a combination thereof by at least about 10%, e.g., by at least about: 15%, 20%, 25%, 30%, 35%, 40%, 45%, 50%, 55%, 60%, 65%, 70%, 75%, 80%, 85%, 90%, 91%, 92%, 93%, 94%, 95%, 96%, 97%, 98% or 99%. In particular embodiments, said decrease is about 10-99%, e.g., about: 10-98%, 15-98%, 15-97%, 20-97%, 20-96%, 25-96%, 25-95%, 30-95%, 30-94%, 35-94%, 35-93%, 40-93%, 40-92%, 45-92%, 45-91%, 50-91%, 50-90%, 55-90%, 55-85%, 60-85%, 60-80%, 65-80%, 65-75%, or 70-75%.

[0266] In some embodiments, the effective amount is sufficient to increase (e.g., promote) cell proliferation, metabolic activity, autophagy, apoptosis, endocrine function, or a combination thereof. In certain embodiments, the effective amount is sufficient to increase metabolic activity, cell proliferation, cell metastasis, cell migration, apoptosis, endocrine function, or a combination thereof by at least about 10%, e.g., by at least about: 15%, 20%, 25%, 30%, 35%, 40%, 45%, 50%, 55%, 60%, 65%, 70%, 75%, 80%, 85%, 90%, 91%, 92%, 93%, 94%, 95%, 96%, 97%, 98% or 99%. In particular embodiments, said increase is about 10-99%, e.g., about: 10-98%, 15-98%, 15-97%, 20-97%, 20-96%, 25-96%, 25-95%, 30-95%, 30-94%, 35-94%, 35-93%, 40-93%, 40-92%, 45-92%, 45-91%, 50-91%, 50-90%, 55-90%, 55-85%, 60-85%, 60-80%, 65-80%, 65-75%, or 70-75%.

[0267] In some embodiments, the effective amount is sufficient to modulate (e.g., increase or decrease) organ and/or cell growth, cell proliferation, cell activation (e.g., T cell activation), cell migration, cell metabolic rate, cell death, cell autophagy, cell differentiation, cell polarization (e.g., polarization of epithelial cell or an immune cell such as Th1, Th2, M1/M2), cell maturation (e.g., stem cell maturation), enzymatic activity, or a combination thereof.

### Immunity/Inflammation

[0268] In some embodiments, the methods of the disclosure relate to immunity. In some embodiments, the immunity is related to bacteria, parasites, viruses, and/or cancer cells. In some embodiments, the immunity is autoimmune and is the result of the immune system attacking self-molecules. In some embodiments, the methods relate to treatment of immunological tolerance.

[0269] In some embodiments of the disclosure, the methods relate to treatment of inflammation. In some embodiments, the inflammation is acute or of relatively short duration, lasting minutes to hours. In still other embodiments, the inflammation is chronic or of longer duration, lasting weeks to months, and possibly years. In some embodiments, the methods disclosed herein relate to the treatment or prevention of conditions associated with inflammation. In certain embodiments, such conditions include but are not limited to flushed skin, pain or tenderness, swelling, heat, fatigue, fever, joint pain or stiffness, mouth sores, rashes. In some embodiments, inflammation is resultant from another disease or disorder.

[0270] In some embodiments, the disclosed methods relate to the treatment of autoimmune diseases. In some embodiments, the autoimmune disease may include but is not limited to disease of the joint and muscles (e.g., psoriatic arthritis, rheumatoid arthritis, Sjogren's syndrome, systemic lupus erythematosus), diseases of the digestive track (e.g., Crohn's disease, celiac disease, ulcerative colitis, inflammatory bowel diseases), diseases of the endocrine system (e.g., Graves' disease, Hashimoto's thyroiditis, Addison's disease), diseases of the skin (e.g., dermatomyositis, psoriasis, scleroderma), disease of the nervous system (e.g., chronic inflammatory demyelinating polyneuropathy, Guillain-Barre syndrome, multiple sclerosis), and other diseases (e.g., myasthenia gravis, autoimmune vasculitis, pernicious anemia, vasculitis, autoimmune lymphoproliferative syndrome, type 1 diabetes).

[0271] In some embodiments, the disease or condition is an inflammatory disease and/or an autoimmune disease. A wide variety of inflammatory and/or autoimmune diseases are treatable according to the methods described herein. In some embodiments, the inflammatory and/or autoimmune disease comprises Alzheimer's disease, asthma, endometriosis, inflammatory bowel disease (IBD) (e.g., Crohn's disease and ulcerative colitis), multiple sclerosis (MS), non-fatty liver disease (e.g., nonalcoholic fatty liver disease (NAFLD)), obesity, Parkinson's disease cancer, psoriasis, rheumatoid arthritis (RA), scleroderma, systemic lupus erythematosus (SLE), type 1 diabetes, type 2 diabetes, or a combination thereof.

[0272] In some embodiments, the target protein activates an immune response. In certain embodiments, the target protein inhibits an immune response. In some embodiments, the immune response is an innate immune response (e.g., a humoral and/or a cell-mediated immune response). In certain embodiments, the immune response is an adaptive immune response (e.g., a humoral and/or a cell-mediated immune response). Non-limiting examples of immune responses includes T-cell mediated immune responses (e.g., cytokine production and cellular cytotoxicity), B-cell mediated immune responses, humoral immune responses, and activation of cytokine responsive cells (e.g., macrophages).

[0273] In some embodiments, the target protein enhances a signal involved in T cell activation and/or survival. In certain embodiments, the target protein activates a stimulatory checkpoint molecule. Non-limiting examples of stimulatory checkpoint molecules include CD27, CD28, CD40, CD122, CD137, OX40, glucocorticoid-induced TNFR family related gene (GITR), inducible T-cell costimulator (ICOS). In particular embodiments, the target protein is an agonist to CD28.

[0274] In some embodiments, the target protein reduces a signal involved in T cell anergy and/or exhaustion. In certain embodiments, the target protein inhibits an inhibitory checkpoint molecule. Non-limiting examples of inhibitory checkpoint molecules include programmed cell death protein 1 (PD-1), PD-L1, PD-L2, T-cell immunoglobulin domain and mucin domain 3 (TIM-3), lymphocyte activation gene-3 (LAG-3), cytotoxic T-lymphocyte-associated protein 4 (CTLA-4), Adenosine A2A receptor (A2AR), B7-H3 (CD276), B7-H4 (VTCN1), B and T lymphocyte attenuator (BTLA), Indoleamine 2,3-dioxygenase (IDO), killer-cell immunoglobulin-like receptor (KIR), nicotinamide adenine dinucleotide phosphate NADPH oxidase isoform 2 (NOX2), V-domain Ig suppressor of T cell activation (VISTA), sialic acid-binding immunoglobulin-type lectin 7 (SIGLECs 7) and sialic acid-binding immunoglobulin-type lectin 9 (SIGLECs 9). In particular embodiments, the target protein is an inhibitor to PD-1.

[0275] In some embodiments, the effective amount is sufficient to modulate (e.g., increase or decrease):
[0276] a) development of high endothelial venules (HEVs) and/or tertiary lymphoid organs (TLOs);
[0277] b) immune-cell activation, degranulation, differentiation, maturation, migration of an immune cell (e.g. a macrophage, a monocyte, or a dendric cell), polarization, proliferation, and/or recruitment;
[0278] c) immune-cell lymph-node egress and/or homing;
[0279] d) immune-cell tumor egress and/or homing;
[0280] e) cytokine production;
[0281] f) antigen presentation;
[0282] g) target protein expression; or
[0283] h) auto-antibody levels, or a combination thereof.

[0284] In some embodiments, the effective amount is sufficient to increase:
[0285] a) development of HEVs and/or TLOs;
[0286] b) immune-cell activation, degranulation, differentiation, maturation, migration of an immune cell (e.g. a macrophage, a monocyte, or a dendric cell), polarization, proliferation, and/or recruitment;
[0287] c) immune-cell lymph-node egress and/or homing;
[0288] d) immune-cell tumor egress and/or homing;
[0289] e) cytokine production;
[0290] f) antigen presentation;
[0291] g) target protein expression; or
[0292] h) auto-antibody levels,
[0293] or a combination thereof.

[0294] In certain embodiments, said increase is by at least about 10%, e.g., by at least about: 15%, 20%, 25%, 30%, 35%, 40%, 45%, 50%, 55%, 60%, 65%, 70%, 75%, 80%, 85%, 90%, 91%, 92%, 93%, 94%, 95%, 96%, 97%, 98% or 99%. In particular embodiments, said increase is about 10-99%, e.g., about: 10-98%, 15-98%, 15-97%, 20-97%, 20-96%, 25-96%, 25-95%, 30-95%, 30-94%, 35-94%, 35-93%, 40-93%, 40-92%, 45-92%, 45-91%, 50-91%, 50-90%, 55-90%, 55-85%, 60-85%, 60-80%, 65-80%, 65-75%, or 70-75%.

[0295] In some embodiments, the effective amount is sufficient to decrease:
[0296] a) development of HEVs and/or TLOs;
[0297] b) immune-cell activation, degranulation, differentiation, maturation, migration of an immune cell (e.g. a macrophage, a monocyte, or a dendric cell), polarization, proliferation, and/or recruitment;
[0298] c) immune-cell lymph-node egress and/or homing;
[0299] d) immune-cell tumor egress and/or homing;
[0300] e) cytokine production;
[0301] f) antigen presentation;
[0302] g) target protein expression; or
[0303] h) auto-antibody levels,
[0304] or a combination thereof.

[0305] In certain embodiments, said decrease is by at least about 10%, e.g., by at least about: 15%, 20%, 25%, 30%, 35%, 40%, 45%, 50%, 55%, 60%, 65%, 70%, 75%, 80%, 85%, 90%, 91%, 92%, 93%, 94%, 95%, 96%, 97%, 98% or 99%. In particular embodiments, said decrease is about 10-99%, e.g., about: 10-98%, 15-98%, 15-97%, 20-97%, 20-96%, 25-96%, 25-95%, 30-95%, 30-94%, 35-94%, 35-93%, 40-93%, 40-92%, 45-92%, 45-91%, 50-91%, 50-90%, 55-90%, 55-85%, 60-85%, 60-80%, 65-80%, 65-75%, or 70-75%.

[0306] In some embodiments, the effective amount is sufficient to:
[0307] a) increase organ function;
[0308] b) modulate (e.g., increase or decrease) inflammation;
[0309] c) decrease the level of auto-antibody;
[0310] d) decrease rate and/or number of relapses and/or flare-ups;
[0311] e) decrease viral load; or
[0312] f) decrease (e.g., control) infection,
[0313] or a combination of the foregoing.

[0314] In some embodiments, the effective amount is sufficient to increase organ function, inflammation, or a combination thereof. In certain embodiments, said increase is by at least about 10%, e.g., by at least about: 15%, 20%, 25%, 30%, 35%, 40%, 45%, 50%, 55%, 60%, 65%, 70%, 75%, 80%, 85%, 90%, 91%, 92%, 93%, 94%, 95%, 96%, 97%, 98% or 99%. In particular embodiments, said increase is about 10-99%, e.g., about: 10-98%, 15-98%, 15-97%, 20-97%, 20-96%, 25-96%, 25-95%, 30-95%, 30-94%, 35-94%, 35-93%, 40-93%, 40-92%, 45-92%, 45-91%, 50-91%, 50-90%, 55-90%, 55-85%, 60-85%, 60-80%, 65-80%, 65-75%, or 70-75%.

[0315] In some embodiments, the effective amount is sufficient to decrease inflammation, the level of auto-antibody, rate and/or number of relapses and/or flare-ups, viral load or infection, or a combination of the foregoing. In certain embodiments, said decrease is by at least about 10%, e.g., by at least about: 15%, 20%, 25%, 30%, 35%, 40%, 45%, 50%, 55%, 60%, 65%, 70%, 75%, 80%, 85%, 90%, 91%, 92%, 93%, 94%, 95%, 96%, 97%, 98% or 99%. In particular embodiments, said decrease is about 10-99%, e.g., about: 10-98%, 15-98%, 15-97%, 20-97%, 20-96%, 25-96%, 25-95%, 30-95%, 30-94%, 35-94%, 35-93%, 40-93%, 40-92%, 45-92%, 45-91%, 50-91%, 50-90%, 55-90%, 55-85%, 60-85%, 60-80%, 65-80%, 65-75%, or 70-75%.

[0316] In some embodiments, the target protein activates an immune cell. In some embodiments, the target protein inhibits an immune cell (e.g., inhibits activation of an immune cell, induces immune cell death (e.g., apoptosis), or a combination thereof). Immune cells are cells that play a role in the immune response. Immune cells are of hematopoietic origin, including lymphocytes (e.g., B cells and T cells), natural killer cells, and myeloid cells (e.g., basophils, eosinophils, granulocytes, macrophages, mast cells, and monocytes). The target protein can be expressed on a cancer cell (e.g., a metastatic cancer cell), in the tumor microenvironment (e.g., on a stromal cell), or on a non-malignant cell (e.g., an immune cell).

[0317] In some embodiments, the effective amount is sufficient to increase an immune response. In certain embodiments, said increase is by at least about 10%, e.g., by at least about: 15%, 20%, 25%, 30%, 35%, 40%, 45%, 50%, 55%, 60%, 65%, 70%, 75%, 80%, 85%, 90%, 91%, 92%, 93%, 94%, 95%, 96%, 97%, 98% or 99%. In particular embodiments, said increase is about 10-99%, e.g., about: 10-98%, 15-98%, 15-97%, 20-97%, 20-96%, 25-96%, 25-95%, 30-95%, 30-94%, 35-94%, 35-93%, 40-93%, 40-92%, 45-92%, 45-91%, 50-91%, 50-90%, 55-90%, 55-85%, 60-85%, 60-80%, 65-80%, 65-75%, or 70-75%.

[0318] In some embodiments, the effective amount is sufficient to reduce an immune response. In certain embodiments, said reduction is by at least about 10%, e.g., by at least about: 15%, 20%, 25%, 30%, 35%, 40%, 45%, 50%, 55%, 60%, 65%, 70%, 75%, 80%, 85%, 90%, 91%, 92%, 93%, 94%, 95%, 96%, 97%, 98% or 99%. In particular embodiments, said reduction is about 10-99%, e.g., about: 10-98%, 15-98%, 15-97%, 20-97%, 20-96%, 25-96%, 25-95%, 30-95%, 30-94%, 35-94%, 35-93%, 40-93%, 40-92%, 45-92%, 45-91%, 50-91%, 50-90%, 55-90%, 55-85%, 60-85%, 60-80%, 65-80%, 65-75%, or 70-75%.

[0319] In some embodiments, the effective amount is sufficient to reduce an inflammatory response. In certain embodiments, said reduction is by at least about 10%, e.g., by at least about: 15%, 20%, 25%, 30%, 35%, 40%, 45%, 50%, 55%, 60%, 65%, 70%, 75%, 80%, 85%, 90%, 91%, 92%, 93%, 94%, 95%, 96%, 97%, 98% or 99%. In particular embodiments, said reduction is about 10-99%, e.g., about: 10-98%, 15-98%, 15-97%, 20-97%, 20-96%, 25-96%, 25-95%, 30-95%, 30-94%, 35-94%, 35-93%, 40-93%, 40-92%, 45-92%, 45-91%, 50-91%, 50-90%, 55-90%, 55-85%, 60-85%, 60-80%, 65-80%, 65-75%, or 70-75%.

[0320] In some embodiments, the effective amount is sufficient to reduce autoimmunity. In certain embodiments, said reduction is by at least about 10%, e.g., by at least about: 15%, 20%, 25%, 30%, 35%, 40%, 45%, 50%, 55%, 60%, 65%, 70%, 75%, 80%, 85%, 90%, 91%, 92%, 93%, 94%, 95%, 96%, 97%, 98% or 99%. In particular embodiments, said reduction is about 10-99%, e.g., about: 10-98%, 15-98%, 15-97%, 20-97%, 20-96%, 25-96%, 25-95%, 30-95%, 30-94%, 35-94%, 35-93%, 40-93%, 40-92%, 45-92%, 45-91%, 50-91%, 50-90%, 55-90%, 55-85%, 60-85%, 60-80%, 65-80%, 65-75%, or 70-75%.

[0321] In certain embodiments, the effective amount is sufficient to modulate expression of the target protein in an immune cell.

[0322] In some embodiments (e.g., immune and/or inflammation treatment), the effective amount is sufficient to modulate (e.g., increase or decrease) migration of an immune cell (e.g., an antigen presenting cell (such as a dendritic cell and/or a macrophage) and/or a T cell), proliferation of an immune cell, recruitment of an immune cell (e.g., an antigen presenting cell (such as a dendritic cell and/or a macrophage), a monocyte, a T cell, and/or a B cell), lymph node homing of an immune cell (e.g., a dendritic cell and/or a T cell), lymph node egress of an immune cell (e.g., a dendritic cell and/or a T cell), differentiation of an immune cell, activation of an immune cell, polarization of an immune cell, cytokine production (e.g., increase pro-inflammatory cytokine, decrease pro-inflammatory cytokine, increase anti-inflammatory cytokine, decrease anti-inflammatory cytokine), degranulation of an immune cell, maturation of an immune cell, antigen presentation, target protein expression, inflammation, an auto-antibody level; to increase an organ function; to decrease the rate and/or number of relapses or flare-ups, viral load; to control infection or a combination of the foregoing.

### Cancer

[0323] A wide variety of cancers is treatable according to the methods described herein. In some embodiments, the cancer comprises a solid tumor (e.g., a tumor of the breast, lung, prostate, colon, bladder, ovary, kidney, stomach, colon, rectum, testes, head and/or neck, pancreas, brain, skin). Accordingly, in some embodiments, the cancer is a solid tumor cancer. Solid tumor cancers that can be treated according to the methods described herein include breast cancer, lung cancer, prostate cancer, colon cancer, bladder cancer, ovarian cancer, renal cancer, gastric cancer, colon cancer, rectal cancer, colorectal cancer, testicular cancer, head and neck cancer, pancreatic cancer, brain cancer and skin cancer. In some embodiments, the cancer is a hematologic cancer (e.g., leukemia, lymphoma, myeloma). Hematologic cancers that can be treated according to the methods described herein include leukemias (e.g., acute leukemias, chronic leukemias), lymphomas (e.g., B-cell lymphoma, T-cell lymphoma) and multiple myeloma.

[0324] Examples of cancers treatable according to the methods described herein include Acute Lymphoblastic Leukemia (ALL); Acute Myeloid Leukemia (AML); Adrenocortical Carcinoma; Adrenocortical Carcinoma, Childhood; AIDS-Related Cancer (e.g., Kaposi Sarcoma, AIDS-Related Lymphoma, Primary CNS Lymphoma); Anal Cancer; Appendix Cancer; Astrocytomas, Childhood; Atypical Teratoid/Rhabdoid Tumor, Childhood, Central Nervous System; Basal Cell Carcinoma of the Skin; Bile Duct Cancer; Bladder Cancer; Bladder Cancer, Childhood; Bone Cancer (including Ewing Sarcoma, Osteosarcoma and Malignant Fibrous Histiocytoma); Brain Tumors/Cancer; Breast Cancer; Burkitt Lymphoma; Carcinoid Tumor (Gastrointestinal); Carcinoid Tumor, Childhood; Cardiac (Heart) Tumors, Childhood; Embryonal Tumors, Childhood; Germ Cell Tumor, Childhood; Primary CNS Lymphoma; Cervical Cancer; Childhood Cervical Cancer; Cholangiocarcinoma; Chordoma, Childhood; Chronic Lymphocytic Leukemia (CLL); Chronic Myelogenous Leukemia (CML); Chronic Myeloproliferative Neoplasms; Colorectal Cancer; Childhood Colorectal Cancer; Craniopharyngioma, Childhood; Cutaneous T-Cell Lymphoma (e.g., Mycosis Fungoides and Sezary Syndrome); Ductal Carcinoma In Situ (DCIS); Embryonal Tumors, Central Nervous System, Childhood; Endometrial Cancer (Uterine Cancer); Ependymoma, Childhood; Esophageal Cancer; Childhood Esophageal Cancer; Esthesioneuroblastoma; Ewing Sarcoma; Extracranial Germ Cell Tumor, Childhood; Extragonadal Germ Cell Tumor; Eye (Ocular) Cancer; Childhood Intraocular Melanoma; Intraocular Melanoma; Retinoblastoma; Fallopian Tube Cancer; Fibrous Histiocytoma of Bone, Malignant, and Osteosarcoma; Gallbladder Cancer; Gastric (Stomach) Cancer; Childhood Gastric (Stomach) Cancer; Gastrointestinal Carcinoid Tumor; Gastrointestinal Stromal Tumors (GIST); Childhood Gastrointestinal Stromal Tumors; Germ Cell Tumors; Childhood Central Nervous System Germ Cell Tumors (e.g., Childhood Extracranial Germ Cell Tumors, Extragonadal Germ Cell Tumors, Ovarian Germ Cell Tumors, Testicular Cancer); Gestational Trophoblastic Disease; Hairy Cell Leukemia; Head and Neck Cancer; Heart Tumors, Childhood; Hepatocellular (Liver) Cancer; Histiocytosis, Langerhans Cell; Hodgkin Lymphoma; Hypopharyngeal Cancer; Intraocular Melanoma; Childhood Intraocular Melanoma; Islet Cell Tumors, Pancreatic Neuroendocrine Tumors; Kaposi Sarcoma; Kidney (Renal Cell) Cancer; Langerhans Cell Histiocytosis; Laryngeal Cancer; Leukemia; Lip and Oral Cavity Cancer; Liver Cancer; Lung Cancer (Non-Small Cell and Small Cell); Childhood Lung Cancer; Lymphoma; Male Breast Cancer; Malignant Fibrous Histiocytoma of Bone and Osteosarcoma; Melanoma; Childhood Melanoma; Melanoma, Intraocular (Eye); Childhood Intraocular Melanoma; Merkel Cell Carcinoma; Mesothelioma, Malignant; Childhood Mesothelioma; Metastatic Cancer; Metastatic Squamous Neck Cancer with Occult Primary; Midline Tract Carcinoma With NUT Gene Changes; Mouth Cancer; Multiple Endocrine Neoplasia Syndromes; Multiple Myeloma/Plasma Cell Neoplasms; Mycosis Fungoides; Myelodysplastic Syndromes, Myelodysplastic/Myeloproliferative Neoplasms; Myelogenous Leukemia, Chronic (CML); Myeloid Leukemia, Acute (AML); Myeloproliferative Neoplasms, Chronic; Nasal Cavity and Paranasal Sinus Cancer; Nasopharyngeal Cancer; Neuroblastoma; Non-Hodgkin Lymphoma; Non-Small Cell Lung Cancer; Oral Cancer, Lip and Oral Cavity Cancer and Oropharyngeal Cancer; Osteosarcoma and Malignant Fibrous Histiocytoma of Bone; Ovarian Cancer; Childhood Ovarian Cancer; Pancreatic Cancer; Childhood Pancreatic Cancer; Pancreatic Neuroendocrine Tumors; Papillomatosis (Childhood Laryngeal); Paraganglioma; Childhood Paraganglioma; Paranasal Sinus and Nasal Cavity Cancer; Parathyroid Cancer; Penile Cancer; Pharyngeal Cancer; Pheochromocytoma; Childhood Pheochromocytoma; Pituitary Tumor; Plasma Cell Neoplasm/Multiple Myeloma; Pleuropulmonary Blastoma; Pregnancy and Breast Cancer; Primary Central Nervous System (CNS) Lymphoma; Primary Peritoneal Cancer; Prostate Cancer; Rectal Cancer; Recurrent Cancer; Renal Cell (Kidney) Cancer; Retinoblastoma; Rhabdomyosarcoma, Childhood; Salivary Gland Cancer; Sarcoma (e.g., Childhood Rhabdomyosarcoma, Childhood Vascular Tumors, Ewing Sarcoma, Kaposi Sarcoma, Osteosarcoma (Bone Cancer), Soft Tissue Sarcoma, Uterine Sarcoma); Sezary Syndrome; Skin Cancer; Childhood Skin Cancer; Small Cell Lung Cancer; Small Intestine Cancer; Soft Tissue Sarcoma; Squamous Cell Carcinoma of the Skin; Squamous Neck Cancer with Occult Primary, Metastatic; Stomach (Gastric) Cancer; Childhood Stomach (Gastric) Cancer; T-Cell Lymphoma, Cutaneous (e.g., Mycosis Fungoides and Sezary Syndrome); Testicular Cancer; Childhood Testicular Cancer; Throat Cancer (e.g., Nasopharyngeal Cancer, Oropharyngeal Cancer, Hypopharyngeal Cancer); Thymoma and Thymic Carcinoma; Thyroid Cancer; Transitional Cell Cancer of the Renal Pelvis and Ureter; Ureter and Renal Pelvis, Transitional Cell Cancer; Urethral Cancer; Uterine Cancer, Endometrial; Uterine Sarcoma; Vaginal Cancer; Childhood Vaginal Cancer; Vascular Tumors; Vulvar Cancer; and Wilms Tumor and Other Childhood Kidney Tumors.

[0325] Metastases of the aforementioned cancers can also be treated in accordance with the methods described herein. In some embodiments, the cancer is a metastatic cancer.

[0326] In some embodiments, the cancer is selected from lung cancer, breast cancer, Hodgkin's lymphoma, diffuse large B-cell lymphoma, follicular lymphoma, primary central nervous system lymphoma, chronic lymphocytic leukemia, epithelial ovarian cancer, prostate cancer, squamous cell carcinoma, non-melanoma skin cancer, nasal polyps, basal cell carcinoma, keratinocyte cancer, multiple myeloma, serous invasive ovarian cancer, hepatocellular carcinoma, small cell lung carcinoma, adenocarcinoma, lung adenocarcinoma, non-small cell lung cancer, ovarian cancer or colorectal cancer.

[0327] In some embodiments, the treatment:
[0328] a) inhibits cancer cell growth, proliferation, metastasis, invasion or migration, or a combination of the foregoing;
[0329] b) promotes cancer cell death;
[0330] c) induces cancer cell autophagy, or a combination of the foregoing.

[0331] In some embodiments, the effective amount is sufficient to:
[0332] a) inhibit cancer cell growth, proliferation, metastasis, invasion or migration, or a combination of the foregoing;
[0333] b) promote cancer cell death;
[0334] c) induce cancer cell autophagy,
[0335] d) or a combination of the foregoing.

[0336] In some embodiments, the effective amount is sufficient to reduce cancer (e.g., tumor) growth, proliferation, metastasis, invasion, migration, autophagy or a combination of the foregoing. In certain embodiments, said reduction is by at least about 10%, e.g., by at least about: 15%, 20%, 25%, 30%, 35%, 40%, 45%, 50%, 55%, 60%, 65%, 70%, 75%, 80%, 85%, 90%, 91%, 92%, 93%, 94%, 95%, 96%, 97%, 98% or 99%. In particular embodiments, said reduction is about 10-99%, e.g., about: 10-98%, 15-98%, 15-97%, 20-97%, 20-96%, 25-96%, 25-95%, 30-95%, 30-94%, 35-94%, 35-93%, 40-93%, 40-92%, 45-92%, 45-91%, 50-91%, 50-90%, 55-90%, 55-85%, 60-85%, 60-80%, 65-80%, 65-75%, or 70-75%.

[0337] In some embodiments, the effective amount is sufficient to reduce cancer cell proliferation or tumor growth in the subject. In some embodiments, the reduction in cancer cell proliferation or tumor growth is by at least about 10%, e.g., by at least about: 15%, 20%, 25%, 30%, 35%, 40%, 45%, 50%, 55%, 60%, 65%, 70%, 75%, 80%, 85%, 90%, 91%, 92%, 93%, 94%, 95%, 96%, 97%, 98% or 99%. In some embodiments, the reduction in cancer cell proliferation or tumor growth is about 10-99%, e.g., about: 10-98%, 15-98%, 15-97%, 20-97%, 20-96%, 25-96%, 25-95%, 30-95%, 30-94%, 35-94%, 35-93%, 40-93%, 40-92%, 45-92%, 45-91%, 50-91%, 50-90%, 55-90%, 55-85%, 60-85%, 60-80%, 65-80%, 65-75%, or 70-75%.

[0338] In some embodiments, the effective amount is sufficient to modulate (e.g., increase or reduce) tumor autophagy, for example, by increasing at least one tumor-inhibiting function of autophagy and/or reducing at least one tumor-promoting function of autophagy.

[0339] In some embodiments, the effective amount is sufficient to increase cancer autophagy. In certain embodiments, said increase is by at least about 10%, e.g., by at least about: 15%, 20%, 25%, 30%, 35%, 40%, 45%, 50%, 55%, 60%, 65%, 70%, 75%, 80%, 85%, 90%, 91%, 92%, 93%, 94%, 95%, 96%, 97%, 98% or 99%. In particular embodiments, said increase is about 10-99%, e.g., about: 10-98%, 15-98%, 15-97%, 20-97%, 20-96%, 25-96%, 25-95%, 30-95%, 30-94%, 35-94%, 35-93%, 40-93%, 40-92%, 45-92%, 45-91%, 50-91%, 50-90%, 55-90%, 55-85%, 60-85%, 60-80%, 65-80%, 65-75%, or 70-75%.

[0340] In some embodiments, the effective amount is sufficient to reduce cancer autophagy. In certain embodiments, said reduction is by at least about 10%, e.g., by at least about: 15%, 20%, 25%, 30%, 35%, 40%, 45%, 50%, 55%, 60%, 65%, 70%, 75%, 80%, 85%, 90%, 91%, 92%, 93%, 94%, 95%, 96%, 97%, 98% or 99%. In particular embodiments, said reduction is about 10-99%, e.g., about: 10-98%, 15-98%, 15-97%, 20-97%, 20-96%, 25-96%, 25-95%, 30-95%, 30-94%, 35-94%, 35-93%, 40-93%, 40-92%, 45-92%, 45-91%, 50-91%, 50-90%, 55-90%, 55-85%, 60-85%, 60-80%, 65-80%, 65-75%, or 70-75%.

[0341] In some embodiments, the effective amount is sufficient to prevent death of a subject thereby reducing the cancer (e.g., tumor) death rate. In certain embodiments, the reduction in cancer (e.g., tumor) death rate is by at least about 10%, e.g., by at least about: 15%, 20%, 25%, 30%, 35%, 40%, 45%, 50%, 55%, 60%, 65%, 70%, 75%, 80%, 85%, 90%, 91%, 92%, 93%, 94%, 95%, 96%, 97%, 98% or 99%. In particular embodiments, the reduction in cancer (e.g., tumor) death rate is about 10-99%, e.g., about: 10-98%, 15-98%, 15-97%, 20-97%, 20-96%, 25-96%, 25-95%, 30-95%, 30-94%, 35-94%, 35-93%, 40-93%, 40-92%, 45-92%, 45-91%, 50-91%, 50-90%, 55-90%, 55-85%, 60-85%, 60-80%, 65-80%, 65-75%, or 70-75%.

[0342] In some embodiments, the effective amount is sufficient to modulate (e.g., increases or reduce) expression of the target protein in a cancer (e.g., tumor) cell.

[0343] In some embodiments, the effective amount is sufficient to modulate the body's response to cancer, for example, by inhibiting the growth of cancer, reducing malignancy of cancer, inhibiting metastasis of cancer, promoting remission, modulating (increasing and/or decreasing) immune-mediated responses related to cancer, or a combination of the foregoing.

### Immuno-Oncology

[0344] In some embodiments, the disclosure provides for treatments that leverage the immune system. In some embodiments, the methods relate to immuno-oncology (e.g., cancer immunotherapy). In still further embodiments, the immune system is the innate immune system. In some embodiments, the immune system is the adaptive immune system. In still further embodiments, the treatment relates to humoral immunity or antibody-mediated immunity. In some embodiments, the treatment relates to cell-mediated immunity, such as cancer. In some embodiments, the methods relate to treatment at or before early-stage disease progression, while in other embodiments, the methods relate to treatment at or prevention of late-stage disease progression. In still further embodiments, the immune-oncological effect results from stimulation of the immune system.

[0345] In some embodiments, the effective amount is sufficient to modulate (e.g., increase) the subject's immune system against cancer. In certain embodiments, the effective amount is sufficient to modulate (e.g., increase or decrease):
[0346] a) an immune cell-related readout, an immune-cell activation, degranulation, maturation, migration of an immune cell (e.g. a macrophage, a monocyte, or a dendric cell), polarization, proliferation and recruitment;
[0347] b) lymph-node activation, differentiation, egress, homing;
[0348] c) cytokine production;
[0349] d) antibody-dependent cellular cytotoxicity (ADCC) and/or antibody-dependent cellular phagocytosis (ADCP);
[0350] e) antigen presentation;
[0351] f) target protein expression,
[0352] g) or a combination of the foregoing.

[0353] In some embodiments, the modulation is an increase. In certain embodiments, said increase is by at least about 10%, e.g., by at least about: 15%, 20%, 25%, 30%, 35%, 40%, 45%, 50%, 55%, 60%, 65%, 70%, 75%, 80%, 85%, 90%, 91%, 92%, 93%, 94%, 95%, 96%, 97%, 98% or 99%. In particular embodiments, said increase is about 10-99%, e.g., about: 10-98%, 15-98%, 15-97%, 20-97%, 20-96%, 25-96%, 25-95%, 30-95%, 30-94%, 35-94%, 35-93%, 40-93%, 40-92%, 45-92%, 45-91%, 50-91%, 50-90%, 55-90%, 55-85%, 60-85%, 60-80%, 65-80%, 65-75%, or 70-75%.

[0354] In some embodiments, the modulation is a reduction. In certain embodiments, said reduction is by at least about 10%, e.g., by at least about: 15%, 20%, 25%, 30%, 35%, 40%, 45%, 50%, 55%, 60%, 65%, 70%, 75%, 80%, 85%, 90%, 91%, 92%, 93%, 94%, 95%, 96%, 97%, 98% or 99%. In particular embodiments, said reduction is about 10-99%, e.g., about: 10-98%, 15-98%, 15-97%, 20-97%, 20-96%, 25-96%, 25-95%, 30-95%, 30-94%, 35-94%, 35-93%, 40-93%, 40-92%, 45-92%, 45-91%, 50-91%, 50-90%, 55-90%, 55-85%, 60-85%, 60-80%, 65-80%, 65-75%, or 70-75%.

[0355] In some embodiments (e.g., immuno-oncology specific treatment), the effective amount is sufficient to modulate (e.g., increase or decrease) an immune cell-related readout, migration of an immune cell (e.g., an antigen presenting cell (such as a dendritic cell and/or a macrophage) and/or a T cell), proliferation of an immune cell, recruitment of an immune cell (e.g., an antigen presenting cell (such as a dendritic cell and/or a macrophage), a monocyte, a T cell, and/or a B cell), lymph node homing of an immune cell (e.g., a dendritic cell and/or a T cell), lymph node egress of an immune cell (e.g., a dendritic cell and/or a T cell), differentiation of an immune cell, activation of an immune cell, polarization of an immune cell, cytokine production (e.g., increase pro-inflammatory cytokine, decrease pro-inflammatory cytokine, increase anti-inflammatory cytokine, decrease anti-inflammatory cytokine), degranulation of an immune cell, maturation of an immune cell, ADCC of an immune cell, ADCP of an immune cell, antigen presentation, tumor homing of an immune cell (e.g. a T cell); increase tumor egress of an immune cell (e.g., a regulatory T cell) decrease tumor egress of an immune cell (e.g., a CD8+ T cell), target protein expression, or a combination of the foregoing.

### Aging

[0356] The methods described herein are applicable to the treatment of aging, age-related conditions, and/or age-related disorders or diseases. In some embodiments, the methods described herein include treatment of general health, body temperature, body weight, body height, waist circumference, reproductive ability, body fat, heart rate, blood pressure, pulse rate, blood oxygen level, respiratory rate, breathing pattern, blood glucose level, blood pH, cardiac output, cardiac rhythm, as well as concentration of certain substances in the blood. In some embodiments, treatment may be assessed by measurement of complete blood count, red blood cells, white blood cells, platelets, hemoglobin, hematocrit, mean corpuscular volume, basic metabolic panel, blood glucose, calcium, electrolyte test, kidney function, blood enzyme tests, troponin, creatine kinase, lipoprotein panel, total cholesterol, LDL cholesterol, HDL cholesterol, triglycerides, coagulation panel, and/or bone marrow tests.

[0357] In some embodiments, the effective amount is sufficient to slow aging. In certain embodiments, said slowing is by at least about 10%, e.g., by at least about: 15%, 20%, 25%, 30%, 35%, 40%, 45%, 50%, 55%, 60%, 65%, 70%, 75%, 80%, 85%, 90%, 91%, 92%, 93%, 94%, 95%, 96%, 97%, 98% or 99%. In particular embodiments, said slowing is about 10-99%, e.g., about: 10-98%, 15-98%, 15-97%, 20-97%, 20-96%, 25-96%, 25-95%, 30-95%, 30-94%, 35-94%, 35-93%, 40-93%, 40-92%, 45-92%, 45-91%, 50-91%, 50-90%, 55-90%, 55-85%, 60-85%, 60-80%, 65-80%, 65-75%, or 70-75%.

### Senescence

[0358] In some embodiments, the methods disclosed herein are for the treatment of senescence. In still further embodiments, the method disclosed herein relate the treatment of senescent associated diseases or disorders. In some embodiments, the disease or disorder includes but it not limited to diabetes, metabolic syndrome, and obesity. In other embodiments, the disease or disorder is related to photosensitivity or photoaging. In still further embodiments, the disease or disorder may be selected from arthritis, Alzheimer's disease, asthma, blindness, cancer, chronic bronchitis, chronic kidney disease, chronic obstructive pulmonary disease, coronary heart disease, deep vein thrombosis, dementia, depression, diabetes, epilepsy, heart failure, high cholesterol, hypertension, motor neuron disease, multiple sclerosis, osteoporosis, Paget's disease of bone, Parkinson's diseases, shingles, and stroke.

[0359] In some embodiments, the effective amount is sufficient to reduce senescence. In certain embodiments, said reduction is by at least about 10%, e.g., by at least about: 15%, 20%, 25%, 30%, 35%, 40%, 45%, 50%, 55%, 60%, 65%, 70%, 75%, 80%, 85%, 90%, 91%, 92%, 93%, 94%, 95%, 96%, 97%, 98% or 99%. In particular embodiments, said reduction is about 10-99%, e.g., about: 10-98%, 15-98%, 15-97%, 20-97%, 20-96%, 25-96%, 25-95%, 30-95%, 30-94%, 35-94%, 35-93%, 40-93%, 40-92%, 45-92%, 45-91%, 50-91%, 50-90%, 55-90%, 55-85%, 60-85%, 60-80%, 65-80%, 65-75%, or 70-75%.

### Fibrosis

[0360] In some embodiments, the methods of the disclosure relate to the treatment of fibrosis. In some embodiments, the methods relate to treatment of conditions related to or resultant from fibrosis. In some embodiments, the fibrosis is pulmonary fibrosis, liver fibrosis, skin fibrosis, renal fibrosis, pancreas fibrosis, systemic sclerosis, cardiac fibrosis, mediastinal fibrosis, bone marrow fibrosis, retroperitoneal cavity fibrosis, and/or macular degeneration.

[0361] In some embodiments, the effective amount is sufficient to reduce fibrosis. In certain embodiments, said reduction is by at least about 10%, e.g., by at least about: 15%, 20%, 25%, 30%, 35%, 40%, 45%, 50%, 55%, 60%, 65%, 70%, 75%, 80%, 85%, 90%, 91%, 92%, 93%, 94%, 95%, 96%, 97%, 98% or 99%. In particular embodiments, said reduction is about 10-99%, e.g., about: 10-98%, 15-98%, 15-97%, 20-97%, 20-96%, 25-96%, 25-95%, 30-95%, 30-94%, 35-94%, 35-93%, 40-93%, 40-92%, 45-92%, 45-91%, 50-91%, 50-90%, 55-90%, 55-85%, 60-85%, 60-80%, 65-80%, 65-75%, or 70-75%.

### Infections

[0362] In some embodiments, the disclosure relates to treatment of infections. In some aspects, the infection is a bacterial infection, a protozoan infection, a viral infection, a fungal infection, or another pathogenic infection. In some embodiments, the infection is AIDS or HIV, viral hepatitis (e.g. hepatitis A, hepatitis B, hepatitis C), tuberculosis, salmonella, Lyme disease, meningococcal disease, influenza, measles, mumps, rubella (e.g. German measles), pneumonia, a sexually transmitted disease (e.g. syphilis, chlamydia, gonorrhea), chronic sinusitis, whooping cough, pertussis, or a combination thereof.

[0363] Unless otherwise defined, all terms of art, notations and other scientific terms or terminology used herein are intended to have the meanings commonly understood by those of skill in the art to which this disclosure pertains. In some cases, terms with commonly understood meanings are defined herein for clarity and/or for ready reference, and the inclusion of such definitions herein should not necessarily be construed to represent a substantial difference over what is generally understood in the art. It will be further understood that terms, such as those defined in commonly-used dictionaries, should be interpreted as having a meaning that is consistent with their meaning in the context of the relevant art and/or as otherwise defined herein.

[0364] The terminology used herein is for the purpose of describing particular embodiments only and is not intended to be limiting.

[0365] As used herein, the indefinite articles “a,” “an” and “the” should be understood to include plural reference unless the context clearly indicates otherwise.

[0366] Throughout this specification and the claims which follow, unless the context requires otherwise, the word “comprise,” and variations such as “comprises” and “comprising”, will be understood to imply the inclusion of, e.g., a stated integer or step or group of integers or steps, but not the exclusion of any other integer or step or group of integer or step. When used herein, the term “comprising” can be substituted with the term “containing” or “including.”

[0367] As used herein, “consisting of” excludes any element, step, or ingredient not specified in the claim element. When used herein, “consisting essentially of” does not exclude materials or steps that do not materially affect the basic and novel characteristics of the claim. Any of the terms “comprising,” “containing,” “including,” and “having,” whenever used herein in the context of an aspect or embodiment of the disclosure, can in some embodiments, be replaced with the term “consisting of,” or “consisting essentially of” to vary scopes of the disclosure.

[0368] As used herein, the conjunctive term “and/or” between multiple recited elements is understood as encompassing both individual and combined options. For instance, where two elements are conjoined by “and/or,” a first option refers to the applicability of the first element without the second. A second option refers to the applicability of the second element without the first. A third option refers to the applicability of the first and second elements together. Any one of these options is understood to fall within the meaning, and, therefore, satisfy the requirement of the term “and/or” as used herein. Concurrent applicability of more than one of the options is also understood to fall within the meaning, and, therefore, satisfy the requirement of the term “and/or.”

[0369] When a list is presented, unless stated otherwise, it is to be understood that each individual element of that list, and every combination of that list, is a separate embodiment. For example, a list of embodiments presented as “A, B, or C” is to be interpreted as including the embodiments, “A,” “B,” “C”, “A or B,” “A or C,” “B or C,” or “A, B, or C.”

### EXEMPLIFICATION

### Example 1: Validation of a Target Protein as a Circulating Factor in Human Plasma

[0370] This example demonstrates the ability to detect a target protein of the disclosure in human plasma to validate that it is a circulating factor. In this example, plasma samples are obtained and Agilent Multiple Affinity Removal Spin Cartridge is used for the depletion of the top six highly abundant proteins (albumin, IgG, IgA, antitrypsin, transferrin, and haptoglobin), followed by immuno-depletion (ProteoPrep20 Plasma Immunodepletion Kit) for the 20 highest abundant proteins (albumin, IgG, IgA, IgM, IgD, transferrin, fibrinogen, α2-macroglobulin, α1-antitrypsin, haptoglobin, α1-acid glycoprotein, ceruloplasmin, apolipoprotein A-I, apolipoprotein A-II, apolipoprotein B, complement C1q, complement C3, complement C4, plasminogen, and prealbumin). Samples are depleted, digested, and measured in triplicate.

[0371] Sample preparation is carried out as described (Geyer, et al., Cell Syst 2: 185-195, 2016) with an automated setup on an Agilent Bravo liquid handling platform. Plasma samples are diluted 1:10 with ddH₂O, and 10 μl of the sample is mixed with 10 μl twofold concentrated SDC buffer. Reduction and alkylation are carried out at 95° C. for 10 min. Trypsin and LysC (1:100 g of enzyme to micrograms of protein ratio) are added to the mixture after a 5-min cooling step at room temperature. Digestion is performed at 37° C. for 1 hr. The digest is acidified by adding 40 μl of 1% trifluoroacetic acid (TFA) in isopropanol. An amount of 20 g of peptides is loaded on two 14-gauge StageTip plugs, followed by the addition of 100 μl 1% trifluoroacetic acid (TFA) in isopropanol and strong mixing. The StageTips are centrifuged using a 3D-printed in-house-made StageTip centrifugal device at 1,500×g. After washing the StageTips two times using 100 μl 1% trifluoroacetic acid (TFA) in isopropanol and one time using 100 μl 0.2% TFA in ddH₂O, purified peptides are eluted with 60 μl of elution buffer into autosampler vials. The collected material is completely dried using a SpeedVac centrifuge at 60° C. (Eppendorf, Concentrator plus).

[0372] Samples are measured using LC-MS instrumentation consisting of an EASY-nLC 1000 ultra-high-pressure system (Thermo Fisher Scientific), which is combined with a Q Exactive HF Orbitrap (Thermo Fisher Scientific) and a nano-electrospray ion source (Thermo Fisher Scientific). MS data are acquired with a Top15 data-dependent MS/MS scan method (topN method). Target values for the full-scan MS spectra are 3×10⁶ charges in the 300-1,650 m/z range with a maximum injection time of 55 ms and a resolution of 60,000 at m/z 200. Proteins identified here are validated as circulating in plasma.

### Example 2: Validation of a Target Protein as a Circulating Factor (i.e, scRNAseq Hashing)

[0373] This example demonstrates the ability of a target protein of the disclosure to act as a circulated factor by single-cell RNA sequencing to look for shifts in cell populations after treatment with target protein. In this example, target proteins discovered in the example above are ordered through GenScript Biotech (Piscataway, NJ). Target proteins (e.g., listed in the Sequence Listing and Table A) are synthesized through Fluorenylmethyloxycarbonyl (Fmoc) protection group chemistry using Solid Phase Peptide Synthesis (SPPS). Human primary blood mononuclear cells are seeded at 1×10⁶ PBMC in each well of 12-well plate with 1 ml of RPMI-1640 (10% FBS). PBMCs are treated with 1 g/mL LPS (Sigma-Aldrich) for 24 hrs, plus or minus target proteins for a final concentration of 10 μM or left untreated.

[0374] The single cell suspensions are harvested and centrifuged at 400×g for 5 mins at 4° C. The media is discarded, and the cells are resuspended with 1 ml of cell staining buffer (BioLegend 420201). 5 μl of Human TruStain FcX (BioLegend 422301) is added to the cells and incubated at 4° C. for 10 mins. 1 μg of single cell hashing antibody (BioLegend TotalSeq-B #1-#10) is added to cells along with ˜50 μl of cell staining buffer to make 100 μl total volume. This is incubated for 4° C. for 30 mins then washed three times at 400×g. 10 different cell hashing samples are pooled in one tube with desired cell number (˜1000 cells/μl).

[0375] Single cells are processed through Chromium Next GEM Single Cell 3′ _Reagent Kit (Dual Index) (10× Genomics CG000317 Rev C) following the provided protocol from 10× Genomics. Briefly, samples are processed through GEM generation and barcoding, post GEM-RT Cleanup and cDNA amplification, 3′ gene expression library construction, cell surface protein library construction and finally sequencing.

[0376] Post sequencing, reads are aligned to the human reference genome (GENCODE34/GRCH38). Reads are demultiplexed using DNA-barcoded antibodies and run through quality control (e.g. doublets are removed, singlet cells are selected with less than 15% mitochondria contamination at RNA levels, and reads contain higher than 500 genes). The raw data is normalized. Principal component analysis is performed, and cell clusters are annotated. Differential gene expression analysis is performed between controls and treatment with target protein. Shifts in cell population dynamics observed by principal component analysis and/or shifts in gene expression post treatment with target protein in supernatant validates that target protein acts as a circulating factor.

### Example 3. Validation of a Target Protein as a Circulating Factor (i.e, scRNAseq Hashing)

[0377] Single cell RNA seq analysis of PBMC treated with the ORF.

[0378] In another aspect, this example demonstrates the validation of a Target Protein, SEQ ID NO: 38427, as a modulator of circulating factors. SEQ ID NO: 38427 is a novel, secreted peptide that inhibits the innate immune response caused by other circulating factors, toll-like receptor agonists. Thus, SEQ ID NO: 38427 will be suitable for the treatment of diseases caused by a pathological innate immune response such as lupus, multiple sclerosis, and rheumatoid arthritis.

[0379] To determine the effect of the Target Protein on TLR activity, the Target Protein, irrelevant proteins, and controls were applied+/−established TLR agonists to a commercial reporter cell line which monitors the two main signal transduction pathways that respond to TLR activation. To determine which immune cells are most responsive to the Target Proteins, the Target Proteins were applied to Peripheral Blood Mononuclear Cells (PBMCs) and then 24 hours later the PBMCs were subjected to single cell RNA-seq using cell hashing.

### Methods and Materials

[0380] Dual Reporter Assay: From example: NF-kB-SEAP and IRF-Lucia luciferase reporter monocyte (THP1) cells (InvivoGen) are cultured in RPMI 1640 media supplemented with HEPES buffer (10 mM), sodium pyruvate (1 mM), glucose (4.5 g/L), fetal bovine serum (10%), penicillin (100 U/mL), streptomycin (100 g/mL), and 2-mercaptoethanol (0.05 mM). THP1 cells are treated with 100 ng/mL LPS (Sigma-Aldrich) for 24 hrs, the target protein (final conc. 10 μM), or left untreated.

[0381] After treatment, THP1 cells are cultured for 24 hrs and then assayed for reporter activity. Both reporter proteins are measurable in the cell culture supernatant when using QUANTI-Blue (InvivoGen), a SEAP detection reagent, and QUANTI-Luc (InvivoGen), a luciferase detection reagent. QUANTI-Blue is a colorimetric enzyme assay developed to determine any alkaline phosphatase activity in a biological sample, such as cell culture supernatant. QUANTI-Luc is a lyophilized assay reagent containing all the components required to quantitatively measure the activity of Lucia Luciferase other coelenterazine-utilizing luciferases. Increased reporter activity after treatment with target protein is observed in cells where the target protein is immune stimulating. Additionally, decreased reporter activity after treatment with the target protein is observed in cells where the target protein is immune dampening.

[0382] scRNA-seq: Shifts in cell populations after treatment with Target Proteins are assessed by single cell RNA-seq (scRNA-seq). Target proteins (e.g., listed in Table 1) are synthesized through Fluorenylmethyloxycarbonyl (Fmoc) protection group chemistry using Solid Phase Peptide Synthesis (SPPS). Human primary blood mononuclear cells are seeded at 1×10 PBMC in each well of 12-well plate with 1 ml of RPMI-1640 (10% FBS). PBMCs are treated with 1 g/mL LPS (Sigma-Aldrich) for 24 hrs, plus or minus target proteins for a final concentration of 10 μM or left untreated. The single cell suspensions are harvested and centrifuged at 400×g for 5 mins at 4° C. The media is discarded, and the cells are resuspended with 1 ml of cell staining buffer (BioLegend). 5 μl of Human TruStain FcX (BioLegend) is added to the cells and incubated at 4° C. for 10 mins. 1 μg of single cell hashing antibody (BioLegend) is added to cells along with ˜50 μl of cell staining buffer to make 100 μl total volume. This is incubated for 4° C. for 30 mins then washed three times at 400×g. 10 different cell hashing samples are pooled in one tube with desired cell number (˜1000 cells/μl).

[0383] Single cells are processed through Chromium Next GEM Single Cell 3′ _Reagent Kit (Dual Index) (10× Genomics CG000317 Rev C) following the provided protocol from 10× Genomics. Briefly, samples are processed through GEM generation and barcoding, post GEM-RT Cleanup and cDNA amplification, 3′ gene expression library construction, cell surface protein library construction and finally sequencing.

[0384] Post sequencing, reads are aligned to the human reference genome (GENCODE34/GRCH38). Reads are demultiplexed using DNA-barcoded antibodies and run through quality control (g. doublets are removed, singlet cells are selected with less than 15% mitochondria contamination at RNA levels and reads contain higher than 500 genes). The raw data is normalized. Principal component analysis is performed, and cell clusters are annotated. Differential gene expression analysis is performed between controls and treatment with target protein. Shifts in cell population dynamics observed by principal component analysis and/or shifts in gene expression post treatment with target protein in supernatant validates that target protein acts as a circulating factor.

[0385] SEQ ID NO: 38427 significantly blocks the IRF signal transduction pathway response from several TLRs. Up-regulation of the IRF pathway is linked to many autoimmune diseases, especially to lupus. Consistent with a connection to innate immune related diseases like lupus, SEQ ID NO: 38427 strongly affected active monocytes and dendritic cells while having relatively small effects on T-cells, B-cells, and NK-cells (FIG. 1, FIG. 2, FIG. 3)

| ORF ID | Relative activity |
|---|---|
| SEQ ID NO: 54278 | +++ |

### Example 4: Validation of a Target Protein as a Circulating Factor by Morphological Profiling

[0386] This example demonstrates the ability of a target protein of the disclosure to act as a circulating factor (or secreted protein) through phenotypic screening on adipocytes. In this example, quantitative data are extracted from microscopy images of cells treated with target protein of interest in the supernatant to identify biologically relevant similarities and differences among samples based on these profiles. This assay uses Cell Painting, a morphological profiling assay multiplexing six fluorescent dyes imaged in five channels, to reveal broadly relevant cellular components or organelles (Bray et al., Nat. Protoc. 2016 September; 11(9): 1757-1774).

[0387] Briefly, human primary adipose-derived mesenchymal stem cells (AMSCs) are plated in 96-well CellCarrier plates (Perkinelmer #6005550). AMSCs are differentiated for 14 days in the presence or absence of target proteins, and high content imaging is performed at day 0, day 3, day 8 and day 14 of adipogenic differentiation. On the respective day of the assay, cell culture media is removed and replaced by 0.5 μM Mitotracker staining solution (1 mM MitoTracker Deep Red stock (Invitrogen #M22426) diluted in culture media) to each well followed by 30-mins incubation at 37° C. protected from light. After 30 mins, Mitotracker staining solution is removed and cells are washed twice with Dulbecco's Phosphate-Buffered Saline (1×), DPBS (Corning® #21-030-CV), and 2.9 μM BODIPY staining solution (3.8 mM BODIPY 505/515 stock (Thermofisher #D3921) diluted in DPBS) is added followed by 15-min incubation at 37° C., protected from light.

[0388] Subsequently, cells are fixed by adding 16% Methanol-free Paraformaldehyde, PFA (Electron Microscopy Sciences #15710-S) directly to the BODIPY staining solution to a final concentration of 3.2% and incubated for 20 mins at room temperature (RT), protected from light. PFA is removed and cells are washed once with Hank's Balanced Salt Solution (1×), HBSS (Gibco #14025076). To permeabilize cells, 0.1% Triton X-100 (Sigma Aldrich #X100) is added and incubated at RT for 10 mins, protected from light. After Permeabilization multi-stain solution (10 units of Alexa Fluor™ 568 Phalloidin (ThermoFisher #A12380), 0.01 mg/ml Hoechst 33342 (Invitrogen #H3570), 0.0015 mg/ml Wheat Germ Agglutinin, Alexa Fluor™ 555 Conjugate (ThermoFisher #W32464), 3 μM SYTO™ 14 Green Fluorescent Nucleic Acid Stain (Invitrogen #S7576) diluted in HBSS) are added, and cells are incubated at RT for 10 minutes, protected from light. Finally, staining solution is removed, and cells are washed three times with HBSS. Cells are imaged using Opera Phenix High content screening system using confocal, 20× objective. Per well, 25 fields are imaged.

[0389] Morphological profiles at days 0, 3, 8, and 14 using LipocyteProfiler are generated to validate differentiation in both depots by an increase of adipogenesis marker genes (LIPE, PPARG, PLIN1, GLUT4)). Concomitantly, RNA-sequencing is used to profile the transcriptome on the same differentiation timepoints.

### Example 5: Validation of a Target Protein as a Circulating Factor Wherein Target Protein is Mutated in Disease

[0390] This example demonstrates the validation of a target protein of the disclosure as a circulating factor that contains a mutation discovered in a Genome Wide Association Study (GWAS) to be linked to a Th17 autoimmune disease.

[0391] The circulating factor, a target protein and a mutant target protein are synthesized and applied to the media of activated primary T-cells (PHA Blasts) with or without the TH17, Th1, and TH2 cytokines; IL-23 (Th17), IL-12 (Th1), and IL-6 (Th2). The effects of the target protein and the mutant target protein on the activation status of STAT3, STAT1, and NF-kB, are assessed.

### Materials and Methods

[0392] Circulating Proteins: The mutant and wild-type target proteins are synthesized and purified to LPS free solutions by GenScript Inc. IL-23, IL-12, and IL-6 are purchased from Abcam or Cell Signaling Technology.

[0393] PHA Blast generation: Fresh or frozen primary human PBMCs are placed in PBMax Karyotyping media with 10 ng/ml of rhIL-2 added for 3-4 days.

[0394] STAT3, STAT1, and NF-κB activation assays: PHA Blast cells are placed in 96 well plates 80 μl at ˜10 million cells per/ml. The cells are serum starved for 3-4 hours, then IL-23, IL-12 or IL-6 are added for 30 minutes. The cells are harvested, and the cell extracts are assayed by phospho-STAT3, STAT1, or NF-κB ELISA.

[0395] Taken together these experiments demonstrate that the target protein containing the GWAS allele linked to autoimmune disease has a more pronounced activation effect on STAT3 but not STAT1 or NF-κB, and strongly suggest that the target protein is a potential target for amelioration of autoimmune diseases.

### Example 6. Validation of a Secreted Target Protein that Stimulates or Inhibits Cytokine Release

[0396] CBA (Cytometry) experiment looking at pro-inflammatory cytokines produced by PBMCs treated with secreted peptides.

[0397] This example demonstrates the validation of a Target Protein, SEQ ID NO: 72416, as modulator of circulating factors, including cytokines. Such a modulator will be suitable for the treatment of autoimmune diseases such as Psoriasis, Arthritis, and Multiple Sclerosis.

[0398] Peripheral Blood Mononuclear Cells were seeded+/−the T-cell activator CD3/CD8 and +/−peptides for 24-48 hours. Cytokines were measured from the supernatant after incubation by CBA Cytometer.

### Methods and Materials

[0399] ThawingPBMCs: PBMCs were thawed by pre-warming TexMACS media (Miltenyi Biotech) in 20 ml aliquots-1-50 ml conical per donor. After the media was warmed to 37° C., cells were removed from liquid nitrogen and brought to the tissue culture hood. For each donor, 1 ml of media from the warmed aliquot was added to the frozen vial and mixed up and down. The media plus thawed cells were then added back to the 50 ml conical. This was repeated until all the cells were thawed and added to the 50 ml tube. Continue with other donors if used. Spin cells for 5 min at 400×g. Supernatant was aspirated and cells resuspended at ˜10*10\hat{ }6 cells/ml (see vial for cell number).

[0400] PBMC Plating: Frozen PBMCs from normal, healthy, human volunteers (StemCell Technologies) were thawed and plated at 250,000 cells/well. After PBMCs were thawed and resuspended at 10*0\hat{ }6 cells/ml, cells were then counted (Countess III, Thermo Scientific) and adjusted based on counts to 10*10\hat{ }6 cell/well. Take the number of PBMCs determined by number of wells for the experiment-ex. 10 wells would need 2.5*10\hat{ }6 cells total or 0.250 ml. The cells needed for the experiment are then transferred to another conical tube. Warmed TexMACS media is added so that the final concentration is 250,000 cells/190 ul media-ex. 10 wells would need 1.9 ml (190 ul×10 wells) of media total minus 0.250 ml of cells (1.9 ml-0.250 ml) or 1.65 ml of media added to the 0.250 ml of cells. Add 190 ul of cells plus media to the 96 well U-bottom plate. Place in incubator until dilutions are made and ready.

[0401] Peptide Dilutions: Ideally, all peptides should be at a starting concentration of at least 10 mM, especially for those in DMSO (ATCC) to reach a final concentration of 1 uM (H2O) or 0.5 uM (DMSO). Dilutions of all test articles should be made at 20× the final concentration-ex. A final concentration of 1 uM peptide would need to be made at 20 uM.

[0402] Reagent Dilution: Dilutions are made in TexMACS media, enough for 10 ul/well in triplicate (30 ul of a 20×). Activator—CD3/CD28 (TransAct; Miltenyi Biotech) or cytokine will be at 21× and added after the 45-minute incubation with peptides. Be sure to include relevant controls—Positive: TransAct+Cells, Negative: Vehicle+Cells. Dilutions should also be made in a ultra-low binding plate (Corning).

[0403] Assay Procedure: Peptide Treatment: Start assay by thawing the cells and plating in a 96 well, U-bottom tissue culture plate (Corning) as described above. Cell plates are placed in a tissue culture incubator (5% CO2, 37° C.). While cells are in the incubator, start making dilutions (optimally 1 hr or less) as described above. Cell plates are removed from the incubator and 10 ul of the 20× dilutions are added to the relevant wells. After the addition of inhibitors, cell plates are placed in the tissue culture incubator for 45 minutes. The plates are removed from the incubator and 10 ul of 21× TransAct is added to the relevant wells*. Plates are then returned to the incubator and incubated for 24 hours. After 24 hours, plates are spun for 5 minutes at 400×g.

[0404] * Activation: This assay can be run in two different formats—Activation and Inhibition. The procedure is the same except no TransAct is needed in the peptide wells. TransAct is only needed in the control wells. The purpose of this procedure is to determine the possible response from peptides alone.

[0405] Cytometric BeadArray (CBA): After the spin, supernatants (˜150 ul) are transferred to a new, ultra-low binding U-bottom plate. Supernatants are then frozen at −20° C. until thawed for CBA (BD) to determine levels of human IL-2, TNFa, IL-1b, IP-10, IL-10, and IFNg. CBA was run according to the manufacturers protocol.

[0406] SEQ ID NO: 72416 significantly blocks the release of the cytokine TNF-alpha from activated PBMCs but does not block the release of another inflammatory cytokine, IL-1b. Specific inhibition of TNF-alpha release will decrease the inflammatory response (FIG. 4 and FIG. 5).

| | Activation by Analyte | | | | |
|---|---|---|---|---|---|
| | IL-2 | IL-1b | IP-10 | IL-10 | TNF |
| SEQ ID NO: 49310 | | | X | X | |
| SEQ ID NO: 74404 | | | X | | |
| SEQ ID NO: 75159 | | | X | | |
| SEQ ID NO: 74648 | X | | | | |
| SEQ ID NO: 74756 | | X | | | |
| SEQ ID NO: 72114 | | | X | | |
| SEQ ID NO: 72319 | | | X | | |
| SEQ ID NO: 71935 | | | X | | |
| SEQ ID NO: 72297 | | | X | | |
| SEQ ID NO: 73372 | | | X | | |
| SEQ ID NO: 74227 | | | X | | |
| SEQ ID NO: 20738 | | | X | | |
| | Inhibition by Analyte | | | | |
| | IL-2 | TNF | IL-1b | IP-10 | IL-10 |
| SEQ ID NO: 38331 | | | X | | |
| SEQ ID NO: 42306 | X | X | | | |
| SEQ ID NO: 66086 | | | X | | |
| SEQ ID NO: 49310 | | X | X | | |
| SEQ ID NO: 32584 | | X | X | X | |
| SEQ ID NO: 32584 | | | | | X |
| SEQ ID NO: 74401 | X | X | | | |
| SEQ ID NO: 72416 | X | X | X | | |
| SEQ ID NO: 54278 | X | X | X | X | |
| SEQ ID NO: 25123 | X | X | X | X | |

Table of Hits: X = a hit with significant activation or inhibition of relevant cytokine release.
Inhibition occurs when the peptide is applied with anti-CD3/CD28 T-cell activator.
Activation occurs when the peptide is applied to PBMCs alone (see Materials and Methods).
Significance = P = 0.05

### Example 7

[0407] This example demonstrates the validation of 4 genetic versions (V, A, G, D) of SEQ ID NO: 24296 as novel peptides capable of increasing glucose uptake in adipocytes. SEQ ID NO: 24296 contains human genetic variants associated with metabolic diseases, namely type 2 diabetes. These peptides may be suitable for the treatment of metabolic diseases, such as type 2 diabetes.

[0408] The effects of putative stimulators of glucose uptake are assessed using adipocytes differentiated from primary adipocytes. Pre-adipocytes are differentiated into mature adipocytes in vitro and treated+/−peptides, and 24 hours after treatment glucose uptake capacity is determined via glucose uptake glow assay.

### Materials and Methods

[0409] Pre-adipocytes were seeded into opaque 96-well plates at 10K/well density and differentiated using a standard adipogenic differentiation cocktail. When terminally differentiated, adipocytes were serum starved and treated with 0.5 uM peptide, 5 uM peptide or null control (DMSO) and incubated for 24 h in a 37 C incubator with 5% CO2. On the day of the assay, medium was replaced with 100p DMEM without serum or glucose (Life Technologies, Cat. #11966) containing a range of insulin concentrations and incubate for 1 hour at 37° C. in 5% CO2. Medium was removed and 50p of 2DG (1 mM) in PBS added and incubated for 10 minutes at 25° C. 2-deoxyglucose (2DG) is transported into cells and phosphorylated to produce 2-deoxyglucose-6-phosphate (2DG6P). 25 pl of Stop Buffer was added and plates briefly shaken. 25 pl of Neutralization Buffer was added and plates shaken briefly. 100p of 2DG6P Detection Reagent was added, plates shaken briefly and incubated for 1 hour at 25° C. The addition of Stop Buffer stops 2DG transport, lyses cells, destroys any NADPH within the cells and inactivates proteins. The addition of Neutralization Buffer neutralizes the solution before addition of the 2DG6P Detection Reagent. The glucose-6-phosphate dehydrogenase (G6PDH) within the reagent oxidizes 2DG6P to 6-phosphodeoxygluconate (6PDG) and reduces NADP+ to NADPH. The reductase uses the NADPH to convert the proluciferin to luciferin, which is then used by luciferase to produce light. Luminescence was recorded with 0.3-1 second integration on a luminometer.

[0410] As seen in FIG. 6, peptides SEQ ID NO: 24296 were confirmed as increasing glucose uptake in adipocytes at 5 uM concentration.

### Example 8

[0411] This example demonstrates the ability to detect a target protein of the disclosure in human plasma to validate that it is a circulating factor. Sample preparation is carried out as described Keshishian et al Mol Cell Proteomics. 2015 September; 14(9):2375-93. Detailed description of the methods is below.

[0412] Plasma Depletion and Enzymatic Digestion. Four hundred microliters peripheral plasma from four patients collected at baseline and 10, 60, and 240 min postalcohol ablation was immunoaffinity depleted of 14 most abundant proteins followed by the next ˜50 moderately abundant proteins using IgY14 LC20 and Supermix LC10 columns (Sigma-Aldrich, St. Louis, MO). Tandem depletion was performed on Agilent 1100 HPLC (Agilent, Santa Clara, CA) system using Dilution, Stripping, and Neutralization buffers provided by the manufacturer and following manufacturer's instructions (Sigma-Aldrich). Flow through of the Supermix column representing depleted plasma was concentrated and buffer exchanged to 50 mm Ammonium Bicarbonate to the original volume (400 μl) using Amicon 3K concentrators (Millipore, Billerica, MA). Protein concentrations of depleted plasma were determined by BCA protein assay (Thermo Fisher Scientific, Waltham, MA).

[0413] Four hundred microliters of IgY14/Supermix depleted peripheral plasma per time point and patient was denatured with 6 m Urea, reduced with 20 mm dithiothreitol at 37° C. for 30 min, and alkylated with 50 mm iodoacetamide at room temperature in the dark for 30 min. Urea concentration was diluted to 2 m with 50 mm ammonium bicarbonate prior to Lys-C digestion (Wako, Richmond, VA) at 1:50 (w:w) enzyme to substrate ratio at 30° C. for 2 h with mixing on the shaker at 850 rpm. Urea was further diluted to less than 1 m prior to overnight digestion with trypsin (Promega, Madison, WI) with 1:50 (w:w) enzyme to substrate ratio at 37° C. with shaking at 850 rpm. Digestion was terminated with formic acid to a final concentration of 1%. The digests were desalted using Oasis HLB 1 cc (30 mg) reversed phase cartridges (Waters, Milford, MA) with 0.1% Formic acid and 0.1% Formic acid/80% Acetonitrile as buffers A and B, respectively, using a vacuum manifold. Cartridges were conditioned with 3×500 μl buffer B followed by equilibration with 4×500 μl buffer A. After loading the digests at a reduced flow rate, they were washed with 3×750 μl buffer A and eluted with 3×500 μl buffer B. Eluates were frozen and dried by vacuum centrifugation. Digests were reconstituted in 400 μl of 0.1% formic acid and post-digestion concentrations were determined by BCA. Based on the post-digestion concentration, 80 g aliquots were prepared, frozen, dried to dryness by vacuum centrifugation and stored at −80° C.

[0414] iTRAQ Labeling of Plasma Samples. Eighty micrograms dried aliquots of the four time points (baseline, 10, 60 and 240 min post-injury) for each PMI patient were labeled with iTRAQ four-plex reagent following manufacturer's instructions for labeling plasma (AB Sciex, Framingham, MA), which calls for use of two-fold more reagent for plasma than other samples (cell lysates, tissues, etc). In an effort to eliminate bias toward any iTRAQ channel, different iTRAQ channel layout was used for the different time points of the four PMI patient samples. After reconstituting samples in 30 μl 1 m triethylammoniumbicarbonate (TEAB) 100 μl ethanol was added to each sample. Pooled iTRAQ reagent from two vials was added to each sample, mixed and incubated at room temperature for 1 h. Three microliters of each sample was used to check label incorporation by LC-MS/MS prior to quenching the reaction. Once satisfied with labeling efficiency (>95% label incorporation) the reactions were quenched by adding Tris pH 8 for a final concentration of 100 mm and incubating at room temperature for 15 min. Labeled samples representing four different time points of a PMI patient were mixed together, dried down and desalted using Oasis HLB 1 cc (30 mg) reversed phase cartridges as described above. Eluates were frozen, dried to dryness, and stored at −80° C.

[0415] Fractionation of Peptides by Reversed Phase Chromatography at High pH (Basic pHRP). Digested and iTRAQ labeled plasma sample for each patient was reconstituted in 540 μl of 20 mm ammonium formate/2% acetonitrile pH 10, loaded on a Zorbax 300 Extend 2.1×150 mm column (Agilent Technologies, Santa Clara, CA), and fractionated on an Agilent 1100 Series HPLC instrument by basic reversed-phase chromatography at a flow rate of 200 μl/min. Mobile phase consisted of 20 mm ammonium formate/2% acetonitrile pH 10 (buffer A) and 20 mm ammonium formate 90% acetonitrile pH 10 (buffer B). After loading 500 μl of sample (300 g) onto the column, the peptides were separated using the following gradient: 5 min isocratic hold at 0% B, 0 to 15% solvent B in 8 min; 15 to 28.5% solvent B in 33 min; 28.5 to 34% solvent B in 5.5 min; 34 to 60% solvent B in 13 min, for a total gradient time of 64.5 min. Using 96×2 ml well plates, fractions were collected every 0.6 min for a total of 84 fractions through the main elution profile of the separation. In addition, the extreme early and late portions of the gradient were collected into two additional larger volume fractions. All fractions were acidified to a final concentration of 1% formic acid and the internal 84 fractions were then recombined by pooling early, mid and late fractions together resulting in a total of 28 fractions using concatenation strategy. These 28 fractions along with the additional 2 fractions representing early and late eluting peptides constructed a total of 30 fractions to be analyzed by LC-MS/MS. All fractions were dried to dryness by vacuum centrifugation and stored at −80 C until mass spectrometric analysis.

[0416] NanoLC-MS/MS analysis. For plasma samples from individual patients each of the 30 fractions was reconstituted in 16 μl of 5% formic acid/3% Acetonitrile and 2 μl were analyzed on Q Exactive mass spectrometer (Thermo Fisher Scientific) equipped with a nanoflow ionization source (James A. Hill Instrument Services, Arlington, MA) and coupled to an EASY-nLC 1000 UHPLC system (Thermo Fisher Scientific). Chromatography was performed on a 75 m ID picofrit column (New Objective, Woburn, MA) packed in house with Reprosil-Pur C18 AQ 1.9 m beads (Dr. Maisch, GmbH, Entringen, Germany) to a length of 20 cm. Columns were heated to 50° C. using column heater sleeves (Phoenix-ST, Chester, PA) to prevent overpressuring of columns during UHPLC separation. The LC system, column, and platinum wire to deliver electrospray source voltage were connected via a stainless-steel cross (360 m, IDEX Health & Science, UH-906x). Mobile phases consisted of 0.1% formic acid/3% acetonitrile as solvent A, and 0.1% formic acid/90% acetonitrile as solvent B. Peptides were eluted at 200 nL/min with a gradient of 6 to 35% B in 150 min, 35 to 60% B in 8 min, 60 to 90% B in 3 min, hold at 90% B for 10 min, 90% B to 50% B in 1 min, followed by isocratic conditions at 50% B for 10 min. A single Orbitrap MS scan from 300 to 1800 m/z at a resolution of 70,000 with AGC set at 3e6 was followed by up to 12 ms/ms scans at a resolution of 17,500 with AGC set at 5e4. MS/MS spectra were collected with normalized collision energy of 27 and isolation width of 2.5 amu. Dynamic exclusion was set to 20 s, and peptide match was set to on.

[0417] For samples of plasma pooled from multiple patients and used in the iTRAQ/TMT comparison some of the above parameters were revised. Analyses were performed on a Q Exactive Plus mass spectrometer (Thermo Fisher Scientific) with an isolation width of 2.0 amu. For TMT labeled peptides the normalized collision energy was decreased to 26. For TMT-10 labeled peptides MS/MS spectra were collected at a resolution of 35,000.

[0418] Raw data processing of human proteins (at ProFound Tx). The raw data were downloaded from ftp://MSV000079033:a@massive.ucsd.edu. We used the Spectromine search engine (Biognosys, version 3.2) to search the detected features in raw MS files against the FL690RF proteome database (updated on 1 Nov. 2022; 800 K protein entries). Only tryptic peptides that were at least seven amino acids in length with up to two missed cleavages were considered. The initial allowed mass tolerance was set to 10 ppm at the MS level and 0.02 Da at the MS/MS level. We set N-acetylation of proteins' N-termini (42.010565 Da) and oxidation of methionine (15.994915 Da) as variable modifications and iTRAQ 4-plex labels at peptide N termini and carbamido-methylation of cysteine as a fixed modification (57.021464 Da). A false discovery rate (FDR) of 1% was imposed for peptide-spectrum matches (PSMs) and protein identification using a target-decoy approach. ITEAQ 4-plex quantification was performed using the default parameters of the Biognosys method (quantitative, iTRAQ 4-plex).

[0419] Novel ORFs identified from plasma samples of myocardial injury patients and healthy donors

| | |
|---|---|
| Fl69ORF_0112028 | SEQ ID NO: 20756 |
| Fl69ORF_0164565 | SEQ ID NO: 24651 |
| Fl69ORF_0287048 | SEQ ID NO: 30850 |
| Fl69ORF_0350943 | SEQ ID NO: 33807 |
| Fl69ORF_0370819 | SEQ ID NO: 35201 |
| Fl69ORF_0402863 | SEQ ID NO: 75389 |
| Fl69ORF_0184162 | SEQ ID NO: 75390 |
| Fl69ORF_0180774 | SEQ ID NO: 75391 |
| Fl69ORF_0182692 | SEQ ID NO: 75392 |
| Fl69ORF_0186568 | SEQ ID NO: 75393 |
| Fl69ORF_0199976 | SEQ ID NO: 75394 |
| Fl69ORF_0171302 | SEQ ID NO: 73312 |
| Fl69ORF_0218921 | SEQ ID NO: 27864 |
| Fl69ORF_0255287 | SEQ ID NO: 75395 |
| Fl69ORF_0258132 | SEQ ID NO: 29725 |
| Fl69ORF_0278345 | SEQ ID NO: 30508 |
| Fl69ORF_0285433 | SEQ ID NO: 30780 |
| Fl69ORF_0318795 | SEQ ID NO: 32072 |
| Fl69ORF_0897205 | SEQ ID NO: 75396 |
| Fl69ORF_0101086 | SEQ ID NO: 75397 |
| Fl69ORF_0190436 | SEQ ID NO: 75398 |
| Fl69ORF_0237864 | SEQ ID NO: 75399 |
| Fl69ORF_0422956 | SEQ ID NO: 75400 |

### Example 9

[0420] This example demonstrates the ability to detect a target protein of the disclosure in human saliva to validate that it is a circulating and secreted factor. Sample preparation is carried out as described Grassl et al Genome Medicine volume 8, 44 (2016). Detailed description of the methods is below.

[0421] Protein digestion and peptide purification. Following collection, the swabs were transferred to an Eppendorf tube containing 200 μl of lysis buffer (1% sodium dodecyl carbonate (v/v), 10 mM tris (2-carboxyethyl) phosphine, 40 mM 2-chloroacetamide, 100 mM Tris buffer pH 8.5), thoroughly squeezed against the inner wall of the Eppendorf tube, and removed. We reproducibly recovered more than 100 g of protein in this way as estimated by the Bradford protein assay. Sample preparation followed essentially the in-StageTip protocol. Briefly, a total of 20 g of protein was digested by adding 0.4 g trypsin and LysC to our lysis buffer and incubating for 60 min at 37° C. while shaking. Following this short digestion, we acidified the peptides to a final concentration of 1% trifluoroacetic acid (TFA) and loaded them on an SDB-RPS StageTip. The filter was then washed and peptides were finally eluted with 60 μl 80% acetonitrile (ACN) (v/v) and 1% ammonium (v/v), dried in a SpeedVac concentrator, and resuspended in A* buffer (2% ACN (v/v), 0.1% TFA (v/v), pH 2) to a concentration of 1 g/l.

[0422] Single run and perfectionated liquid chromatography-MS measurement. To obtain a deep saliva proteome, we used basic reversed phase chromatography to fractionate our eight waking samples prior to liquid chromatography (LC)-MS measurement. Approximately 15 g of peptides were separated in an 80-min gradient on a 20-cm, 75-μm inner diameter column that was in-house packed with ReproSil-Pur C18 beads (Dr. Maisch GmbH, Germany). Concatenated fractions were dried in the SpeedVac concentrator and resuspended in A buffer to a concentration of 1 g/l. Both the fractionated and the single run samples were subjected to a 100-min chromatography gradient using an EASY-nLC 1000 ultra-high pressure system (Thermo Fisher Scientific) and an in-house-made 40-cm column of the type described above. The chromatography was on-line coupled to a Q Exactive HF mass spectrometer (Thermo Fisher Scientific) by applying a spray voltage of 2.2 kV. The MS scan resolution was set to 120,000 at m/z 200, the scan range to 300 to 1650 m/z, and the maximum injection time to 55 ms. The 15 most intense ions per MS scan were selected for higher-energy collisional dissociation (HCD) fragmentation with an isolation width of 1.5 m/z and were measured at a resolution of 30,000. Dynamic exclusion was used with an exclusion time of 30 s.

[0423] Raw data processing of human proteins (at ProFound Tx). The raw data were downloaded from https://www.ebi/ac/uk/pride/archive/projects/PXD003028. We used the Spectromine search engine (Biognosys, version 3.2) to search the detected features in raw MS files against the FL690RF proteome database (updated on 1 Nov. 2022; 800 K protein entries). Only tryptic peptides that were at least seven amino acids in length with up to two missed cleavages were considered. The initial allowed mass tolerance was set to 10 ppm at the MS level and 0.02 Da at the MS/MS level. We set N-acetylation of proteins' N-termini (42.010565 Da) and oxidation of methionine (15.994915 Da) as variable modifications and carbamido-methylation of cysteine as a fixed modification (57.021464 Da). A false discovery rate (FDR) of 1% was imposed for peptide-spectrum matches (PSMs) and protein identification using a target-decoy approach. Relative quantification was performed using the default parameters of the Biognosys method.

[0424] Novel ORFs identified from saliva samples from four female and four male, healthy, non-smoking individuals

SEQ ID NO: 75401; SEQ ID NO: 75402; SEQ ID NO: 75403
SEQ ID NO: 75404
SEQ ID NO: 75405
SEQ ID NO: 75406; SEQ ID NO: 75407; SEQ ID NO: 75408
SEQ ID NO: 75409
SEQ ID NO: 27033; SEQ ID NO: 30355; SEQ ID NO: 75410
SEQ ID NO: 75411; SEQ ID NO: 75412; SEQ ID NO: 75413
SEQ ID NO: 75414
SEQ ID NO: 30660
SEQ ID NO: 75415
SEQ ID NO: 75416
SEQ ID NO: 75417; SEQ ID NO: 75418
SEQ ID NO: 72772
SEQ ID NO: 75419; SEQ ID NO: 75420
SEQ ID NO: 73696
SEQ ID NO: 25880; SEQ ID NO: 25881
SEQ ID NO: 75421
SEQ ID NO: 75422
SEQ ID NO: 75423
SEQ ID NO: 75424
SEQ ID NO: 75425
SEQ ID NO: 75426; SEQ ID NO: 75427; SEQ ID NO: 75428
SEQ ID NO: 75429; SEQ ID NO: 75430; SEQ ID NO: 75450;
SEQ ID NO: 75431; SEQ ID NO: 75432; SEQ ID NO: 75433;
SEQ ID NO: 75434; SEQ ID NO: 75435; SEQ ID NO: 75436
SEQ ID NO: 75437; SEQ ID NO: 75438
SEQ ID NO: 33599
SEQ ID NO: 75439
SEQ ID NO: 75440
SEQ ID NO: 75441; SEQ ID NO: 75442
SEQ ID NO: 75443
SEQ ID NO: 75444; SEQ ID NO: 75445; SEQ ID NO: 75446
SEQ ID NO: 75447; SEQ ID NO: 75448
SEQ ID NO: 75449
SEQ ID NO: 27026

### Example 10. Validation of a Target Protein that Modulates Cellular Uptake of a Disease Associated Circulating Factor

[0425] This exampled demonstrates the validation of SEQ TD NO: 26888, SEQ ID NO: 36277, and SEQ TD NO: 75353 as novel peptides capable of increasing LDL uptake in hepatocytes. All three peptides contain human genetic variants associated with metabolic diseases, namely SEQ ID NO: 26888 contains a variant associated with cholesterol, LDL cholesterol, fat free mass, fat mass and BMI; SEQ TD NO: 36277, contains a genetic variant associated with HDL cholesterol and triglycerides; and SEQ ID NO: 75353 contains a variant associated with HDL cholesterol level. These peptides may be suitable for both primary prevention (reducing CVD risk in patients without known CVD) and secondary prevention (preventing subsequent heart attacks, strokes, and other CVD events in patients with established CVD).

[0426] The effects of putative cholesterol lowering peptides was assessed using LDL uptake assays in primary human hepatocytes from a pool of 10 healthy donors. Hepatocytes were treated with peptides as well as LDL-labelled BODIPY for 4 h. Cells were then fixed, permeabilized and imaged on an Opera Phenix high content imaging platform. LDL uptake was determined using BODIPY stain intensity.

### Materials and Methods

[0427] Human primary hepatocytes were seeded into 96-well PhenoVue plates at 37K/well density and recovered overnight. The next say, hepatocytes were treated with 5 uM peptide or null control (DMSO) as well as a BODIPY-labelled LDL (Invitrogen™ Image-iT™ Low Density Lipoprotein Uptake Kit, Bodipy FL, I34359). This assay is designed to specifically detect binding and uptake of LDL through the LDL receptor internalization pathway, allowing maximum control and flexibility in experimental design. Two controls were built into the system, unlabeled LDL and heparin. Unlabeled LDL provides an optional pre-treatment to occlude cell surface receptors in advance of probing with the labeled construct, while heparin is provided as an additional control to chelate the LDL in the solution phase outside of the cells, thus preventing binding and uptake of the labeled LDL. Metformin, a type 2 diabetes drug with cholesterol lowering effects, was used as a positive control for increased LDL uptake (FIG. 1). Following peptide, control, and LDL-BODIPY treatment, cells were incubated for 4 h in a 37 C incubator with 5% CO2. Following incubation, cells were fixed with 4% paraformaldehyde for 15 min. Cells were then permeabilized and stained with DAPI to visualize nuclei. Wells were then washed with HBSS and imaged using a Perkin Elmer Opera Phenix high content imaging platform (fluorescence) at 20× magnification with 9 fields per well. BODIPY spot intensity was quantified using the Harmony image analysis software.

[0428] As seen in FIG. 9, peptides SEQ ID NO: 26888, SEQ ID NO: 36277, and SEQ ID NO: 75353 were confirmed as increasing LDL uptake in hepatocytes at 5 uM concentration.

| | |
|---|---|
| SEQ ID NO: | hit |
| SEQ ID NO: 26888 | hit |
| SEQ ID NO: 74164 | No hit |
| SEQ ID NO: 74164 | No hit |
| SEQ ID NO: 75353 | No hit |
| SEQ ID NO: 75353 | Hit |
| SEQ ID NO: 75353 | No hit |
| SEQ ID NO: 36277 | No hit |
| SEQ ID NO: 36277 | hit |
| SEQ ID NO: 36277 | No hit |
| SEQ ID NO: 32262 | No hit |

### Example 11. Discovery of Secreted Proteins that are Relevant to Systemic Lupus Erythematosus (SLE) Disease

[0429] This example presents novel findings on the identification of multiple Open Reading Frame (ORF) proteins, such as SEQ ID NO: 75451, SEQ ID NO: 75452, SEQ ID NO: 75453, and SEQ ID NO: 74932, that exhibit differential expression patterns in plasma samples obtained from individuals with Systemic Lupus Erythematosus (SLE) as compared to those from healthy donors. The ORF proteins identified in this study hold significant potential as therapeutic agents or targets for the management of SLE.

[0430] This research aimed to perform deep plasma proteomics profiling of healthy and Systemic Lupus Erythematosus (SLE) plasma samples using a highly optimized workflow. Low molecular weight proteins (LMWP) were enriched through a combination of protein precipitation and sequential solubilization developed by ProFound Tx. The LMWP fractions were digested using a trypsin/Lys-C mixture. In the initial study, two pooled samples were generated, one from 5 healthy donors and the other from 5 SLE patients. Peptides from these two samples were fractionated using online reversed-phase liquid chromatography (RPLC) and analyzed using the timsTOF Pro 2 MS coupled with an EvoSep nanoLC using a data-independent acquisition (DIA) method. The MS spectra were searched against the FL690RF_DB database, containing approximately 800K ORF entries based on RiboSeq studies at ProFound Tx. The newly discovered ORF proteins were categorized by ORF types, including annotated, ncRNA, polycistronic, and no transcript. The quantitative analysis was performed using the combined peptide intensities from each protein and differentially expressed proteins between SLE and healthy samples were identified based on a threshold of at least two-fold changes in plasma samples.

### Materials and Methods

[0431] Sample collection: Plasma samples were collected from SLE patients according to the standard procedures. Briefly, about 2 mL of whole blood samples from each patient were drawn to an EDTA-coated collection tube. Gently invert the tube 8-10 times, and let the tube sit in an upright position on ice for 5 minutes to allow the blood cell to settle. The blood sample was centrifuged at 1000×g (RCF) for 10 min. Isolate the upper plasma layer (about 1 mL) to a new sample tube containing 10 μL of a cocktail of protease inhibitors (Thermo) to prevent protein degradation. For each SLE patient, a healthy donor with matched age, ethnic group, and gender was selected. Plasma samples were collected with the same protocol. After sample collection onsite, plasma samples were stored in −80° C. for the proteomics analysis.

[0432] Sample preparation: Protein Precipitation and Differential Solubilization (PP+DS): An aliquot of 50 μL plasma sample was diluted 1:2 (v/v) with 100 μL of denaturation solution (8 M urea), heat denaturing at 70° C. for 3 min. Add additional 50 μL water and then slowly dropped into 1800 μL of ice-cold acetone, and immediately stirred at −20° C. for 2 h, followed by centrifugation at 19,000 g for 15 min at 4° C. The precipitate was taken up in 300 μL of 80% ACN containing 12 mM HCl and sonicated for 10 sec at 40% power of probe. Then samples were mixed at 4° C. overnight. Samples were centrifuged again at 19 000 g for 15 min at 4° C. The low-molecular-weight proteins (LMWP) were extracted into the supernatant. Dry samples in SpeedVac to complete dryness and save the samples at 4° C. for later use.

[0433] Protein denaturing, reduction, and alkylation: Add 1/25 volume of 25× of TCEP stock solution and 1/10 vol of 10×CAA stock solution into each sample vial. Heat samples to 37° C. and incubate the samples for 1 hour to reduce and alkylate proteins.

[0434] In-solution digestion: Dilute the denatured protein samples by adding 8-volume L of digestion buffer, such as 100 mM Tris-HCl in water (pH8.0). Add 2 g of sequencing-grade trypsin/Lys-C mix to each sample at an enzyme:protein ratio of 1:50. Incubate the samples overnight at 37° C. with mixing at 800 rpm in a table-top thermomixer.

[0435] Basic Reversed-Phase (HpH) High-Pressure Liquid Chromatography (HPLC) Fractionation: An equal amount (˜10 μg) of digested samples from five healthy or five SLE donors were pooled separately into two mixtures (representing healthy and SLE plasma digests) for the HPLC fractionation. Centrifuge the samples at 16,000 xg for 10 minutes at room temperature. Following the protocol below to fractionate 50 g of peptide mixture of each pooled peptide digests into 48 fractions. Briefly, about 50 g of peptide mixture was loaded onto a Waters XBridge BEH130 C18 3.5 μm 3 mm ID×150 mm Length column on an Agilent 1290 HPLC operating at 0.6 mL/min. Buffer A consisted of 0.1% ammonium hydroxide in water and buffer B consisted of 0.1% ammonium hydroxide in 93% ACN and 7% water. The same injection protocol and gradient were used for all fractionation experiments. All fractions were collected using an Agilent fraction collector in a 96-deep well plate at 0.5 min intervals. Samples were initially loaded onto the column at 0.8 mL/min for 10 min, after which the fractionation gradient commenced at 0.6 mL/min as follows: 3% B to 45% B in 35 min, 60% B in 4 min, and ramped to 90% B in 2 min. Fraction collection was started 10 min after sample loading. The gradient was held at 90% B for 5 min before being ramped back to 3% B, where the column was then washed and equilibrated. The total number of fractions concatenated was set to 96 throughout all experiments. For the optimized results, the first 48 fractions were pooled with +49-well fraction, (i.e. pool well A1+E1, A2+E2, . . . , B1+F1, . . . , D12+H12) and resulted in final 48 fractions. Prior to concatenation, ammonium hydroxide was evaporated in a SpeedVac operating at 40° C.

[0436] NanoLC-MS analysis: Reconstitute dried peptide fractions by 0.1% formic acid in water. Load 20% of each fraction (about 200 ng of digest) for each nanoLC injection on EvoTip. IonOpticks column (Aurora ELITE, 75 um ID×150 mm L) was used for peptide separation, with a standard separation method, 40SPD from EvoSep. EvoSep nanoLC coupled to timTOF pro 2 MS (Bruker) was running at DIA modes for data acquisition.

[0437] Database search and data analysis: The Spectronaut search engine (Biognosys, version 17.1) and directDIA search algorithm were used to search the detected features in raw MS files against the FL690RF proteome database (updated on November 2022; 800 K protein entries). Only full tryptic peptides that were at least seven amino acids in length with up to two missed cleavages were considered. The initial allowed mass tolerance was set to 20 ppm at the MS level and 0.05 Da at the MS/MS level. We set N-acetylation of proteins' N-termini (42.010565 Da) and oxidation of methionine (15.994915 Da) as variable modifications and carbamidomethylation of cysteine as a fixed modification (57.021464 Da). A false discovery rate (FDR) of 1% was imposed for peptide-spectrum matches (PSMs) and protein identification using a target-decoy approach. Label-free quantification was performed using the default parameters of the Biognosys quantitation method (MS/MS-based peak integration and combined area). For each protein, the sum of peak area of all identified peptides from all fractions of healthy or SLE samples were combined. Differentially expressed proteins between SLE and healthy samples were identified based on a threshold of at least two-fold changes in plasma samples (i.e. log 2 fold of change>1 for up-regulation and <−1 for down regulation).

[0438] About 984 secreted proteins (or protein groups) were identified from the LMWP fractions of healthy or SLE plasma samples. After the removal of annotated proteins, 23 non-canonical proteins were identified, including different types of ORFs (11 polycistronic (2 dORFs, and 9 other types), 11 ncRNA (1 incRNA and 10 pseudogene), and one no transcript). Among these novel ORF proteins, 7 ORFs showed up-regulated expression, and 3 ORF proteins showed down-regulated expression in SLE samples versus healthy controls. For example, SEQ ID NO: 75451 (dORF of SOD2) and SEQ ID NO: 75452 (polycistronic ORF of CISH), and SEQ ID NO: 75453 (overlapping uORF of TMED2) showed higher expression level in SLE plasma samples. These ORF proteins and the up-regulated annotated proteins showed significantly enriched GO terms of adaptive immune response and neutrophil degranulation and signaling by interleukins. Inhibition of these ORF targets might lead to weak immune responses in SLE patients. A lncRNA, SEQ ID NO: 74932 (NIPBL-DT) showed down-regulated in SLE samples, which was reported to be conserved in protein sequences and associated with immune response in mammals. SEQ ID NO: 74932 could be potentially used as a therapeutic agent to release the SLE symptoms (FIG. 10, FIG. 11A and FIG. 11B).

TABLE C
Novel ORF proteins identified secreted proteins
in human plasma of SLE and healthy donors and
differential expression changes (in log2 scale).

| ORF_IDs | MW | log2FC |
|---|---|---|
| SEQ ID NO: 75451 | 3652.57 | 3.346 |
| SEQ ID NO: 75454 | 3809.3 | 3.225 |
| SEQ ID NO: 75455 | 6350.16 | 3.123 |
| SEQ ID NO: 75456 | 32526.75 | 1.854 |
| SEQ ID NO: 75452 | 2544.9 | 1.589 |
| SEQ ID NO: 75457 | 46574.24 | 1.164 |
| SEQ ID NO: 75453 | 4204.8 | 1.159 |
| SEQ ID NO: 75458 | 1494.7 | 0.659 |
| SEQ ID NO: 75459 | 1930.07 | 0.503 |
| SEQ ID NO: 75460 | 4550.23 | 0.329 |
| SEQ ID NO: 75461 | 2714.22 | 0.322 |
| SEQ ID NO: 75462 | 1396.63 | 0.313 |
| SEQ ID NO: 75463 | 3670.33 | 0.292 |
| SEQ ID NO: 75464 | 11940.75 | 0.194 |
| SEQ ID NO: 75465 | 72283.21 | 0.163 |
| SEQ ID NO: 75466 | 11042.51 | −0.363 |
| SEQ ID NO: 75467 | 3044.6 | −0.422 |
| SEQ ID NO: 75468 | 1913.21 | −0.671 |
| SEQ ID NO: 75469 | 10290.44 | −0.758 |
| SEQ ID NO: 75470 | 4699.42 | −0.973 |
| SEQ ID NO: 75471 | 7921.92 | −1.035 |
| SEQ ID NO: 75472 | 3934.26 | −1.496 |
| SEQ ID NO: 75473 | 12204.95 | −2.774 |

### Example 12. Validation of Two Target Proteins as Novel G Protein-Coupled Receptor (GPCR) Ligands

[0439] This example demonstrates the validation of two novel peptides SEQ ID NO: 49310 and SEQ ID NO: 42382 that act as a GPCR ligand. SEQ ID NO: 49310 blocks CXCR4 and cancer cell migration, making it suitable in the treatment of multiple cancers. Whereas SEQ ID NO: 42382 agonizes C3AR1, a key regulator of immune response and inflammation. The target proteins SEQ ID NO: 49310 and SEQ ID NO: 42382 were treated with gpcrMAX, which is a comprehensive panel covering 168 G protein-coupled receptors (GPCRs) from over 60 distinct receptor families. This panel utilizes PathHunter® β-Arrestin technology (Eurofins DiscoverX). PathHunter β-Arrestin GPCR cell lines are engineered to co-express the ProLink™ (PK) tagged GPCR and the Enzyme Acceptor (EA) tagged (3-Arrestin. Activation of the GPCR-PK induces β-Arrestin-EA recruitment, forcing complementation of the two β-galactosidase enzyme fragments (EA and PK). The resulting functional enzyme hydrolyzes substrate to generate a chemiluminescent signal.

### Materials and Methods

[0440] Cell Handling: PathHunter® cell lines were expanded from freezer stocks according to standard procedures. Cells were seeded in a total volume of 20 μL into white walled, 384-well microplates and incubated at 37° C. for the appropriate time prior to testing.

[0441] Peptide Treatment: Target proteins SEQ ID NO: 49310, SEQ ID NO: 42382 and irrelevant peptides were synthesized through Fluorenylmethyloxycarbonyl (Fmoc) protection group chemistry using Solid Phase Peptide Synthesis (SPPS). For screening: Target proteins SEQ ID NO: 49310, SEQ ID NO: 42382 and 8 irrelevant peptides were treated on gpcrMAX panel at a final top testing concentration of 0.12 μM. For hit-confirmation: Target protein SEQ ID NO: 49310 and irrelevant peptides were tested on CXCR4 Human Chemokine GPCR cell-based antagonist arrestin assay at top testing concentrations of 1p M and 0.3p M.

[0442] Assay Design: AgonistFormat: For agonist determination, cells were incubated with sample to induce response. Intermediate dilution of sample stocks was performed to generate 5× sample in assay buffer. 5 μL of 5× sample was added to cells and incubated at 37° C. or room temperature for 90 to 180 minutes. Vehicle concentration was 1%. Antagonist Format: For antagonist determination, cells were pre-incubated with antagonist followed by agonist challenge at the EC80 concentration. Intermediate dilution of sample stocks was performed to generate 5× sample in assay buffer. 5 μL of 5× sample was added to cells and incubated at 37° C. or room temperature for 30 minutes. Vehicle concentration was 1%. 5 μL of 6×EC80 agonist in assay buffer was added to the cells and incubated at 37° C. or room temperature for 90 or 180 minutes.

[0443] CXCR4 Human Chemokine GPCR Cell Based Antagonist Arrestin Assay: For hit-confirmation, PathHunter® β-Arrestin cell line for CXCR4 human chemokine GPCR antagonist assay was used with CXCL12/SDF-1a as activator and Plerixafor as inhibitor.

[0444] C3aR Human Complement Peptide GPCR Cell Based Agonist Arrestin Assay: For hit-confirmation, PathHunter® β-Arrestin cell line for C3AR1 human complement peptide GPCR agonist assay was used with C3A Receptor Agonist (Short Fragment) as control activator.

[0445] SignalDetection: Assay signal was generated through a single addition of 12.5 or 15 μL (50% v/v) of PathHunter® Detection reagent cocktail, followed by a one-hour incubation at room temperature. Microplates were read following signal generation with a PerkinElmer Envision™ instrument for chemiluminescent signal detection.

[0446] Data Analysis: Compound activity was analyzed using CBIS data analysis suite (ChemInnovation, CA). For agonist mode assays, percentage activity was calculated using the following formula: % Activity=100%×(mean RLU of test sample−mean RLU of vehicle control)/(mean MAX control ligand−mean RLU of vehicle control). For antagonist mode assays, percentage inhibition was calculated using the following formula: % Inhibition=100%×(1−(mean RLU of test sample−mean RLU of vehicle control)/(mean RLU of EC80 control−mean RLU of vehicle control)).

[0447] Chemotaxis Assay: NAMALWA cells (human Burkitt lymphoma cell line, ATCC) were cultured in serum-free ATCC formulated RPMI for 24 hr prior to the assay. After starvation, harvest cells and centrifuge at 1,000×g, for 5 minutes to pellet them. Resuspend the cell in a serum-free media. Using Cell Migration/Chemotaxis Assay Kit (96-well, 8 μm) from Abcam, add 150 μL of serum-free media containing desired chemoattractant to the bottom chamber. Then add 50,000 cells and desired inhibitor (or peptides) to each well of the top chamber. Place the plate and incubate at 37° C. in CO2 incubator for 24 hours. After incubation, add 110 μL of Cell Dye+Cell Dissociation Solution mix to each bottom well and incubate at 37° C. in CO2 incubator for an hour. After incubation remove the top chamber and read the plate at Ex/Em=530/590 nm.

[0448] Results: Two target peptides, SEQ ID NO: 49310 and SEQ ID NO: 42382 were identified as novel GPCR ligands using Eurofins's gpcrMAX panel. The target peptide SEQ ID NO: 42382 is an agonist of C3AR1, a key anaphylatoxin receptor that plays a critical role in inflammation. The target peptide, SEQ ID NO: 49310 blocked CXCR4, a chemokine receptor involved in cell migration and homing. Additionally, SEQ ID NO: 49310 was able to significantly inhibit the chemotactic migration of human Burkitt lymphoma cells, suggesting its potential as a chemokine for the treatment of cancer (FIG. 12, FIG. 13, FIG. 14, FIG. 15).

[0449] The teachings of all patents, published applications and references cited herein are incorporated by reference in their entirety.

[0450] While example embodiments have been particularly shown and described, it will be understood by those skilled in the art that various changes in form and details may be made therein without departing from the scope of the embodiments encompassed by the appended claims.

The application's sequence listing, which the Patent Office published only in electronic form, follows.

SEQUENCE LISTING (75473 sequences)

SEQ ID NO: 1 - protein, 180 aa, Homo sapiens
MGLTVSALFSRIFGKKQMRILMVGLDAAGKTTILYKLKLGEIVTTIPTIGFNVETVEYKNICFTVWDVGGQDKIRPLWRHYFQNTQGLIFVVDSNDRERVQESADELQKMLQEDELRDAVLLVFANKQDMPNAMPVSELTDKLGLQHLRSRTWYVQATCATQGTGLYDGLDWLSHELSKR

SEQ ID NO: 2 - protein, 277 aa, Homo sapiens
MFPFYSCWRTGLLLLLLAVAVRESWQTEEKTCDLVGEKGKESEKELALVKRLKPLFNKSFESTVGQGSDTYIYIFRVCREAGNHTSGAGLVQINKSNGKETVVGRLNETHIFNGSNWIMLIYKGGDEYDNHCGKEQRRAVVMISCNRHTLADNFNPVSEERGKVQDCFYLFEMDSSLACSPEISHLSVGSILLVTFASLVAVYVVGGFLYQRLVVGAKGMEQFPHLAFWQDLGNLVADGCDFVCRSKPRNVPAAYRGVGDDQLGEESEERDDHLLPM

SEQ ID NO: 3 - protein, 459 aa, Homo sapiens
MTAEEMKATESGAQSAPLPMEGVDISPKQDEGVLKVIKREGTGTEMPMIGDRVFVHYTGWLLDGTKFDSSLDRKDKFSFDLGKGEVIKAWDIAIATMKVGEVCHITCKPEYAYGSAGSPPKIPPNATLVFEVELFEFKGEDLTEEEDGGIIRRIQTRGEGYAKPNEGAIVEVALEGYYKDKLFDQRELRFEIGEGENLDLPYGLERAIQRMEKGEHSIVYLKPSYAFGSVGKEKFQIPPNAELKYELHLKSFEKAKESWEMNSEEKLEQSTIVKERGTVYFKEGKYKQALLQYKKIVSWLEYESSFSNEEAQKAQALRLASHLNLAMCHLKLQAFSAAIESCNKALELDSNNEKGLFRRGEAHLAVNDFELARADFQKVLQLYPNNKAAKTQLAVCQQRIRRQLAREKKLYANMFERLAEEENKAKAEASSGDHPTDTEMKEEQKSNTAGSQSQVETEA

SEQ ID NO: 4 - protein, 512 aa, Homo sapiens
MLFEGLDLVSALATLAACLVSVTLLLAVSQQLWQLRWAATRDKSCKLPIPKGSMGFPLIGETGHWLLQGSGFQSSRREKYGNVFKTHLLGRPLIRVTGAENVRKILMGEHHLVSTEWPRSTRMLLGPNTVSNSIGDIHRNKRKVFSKIFSHEALESYLPKIQLVIQDTLRAWSSHPEAINVYQEAQKLTFRMAIRVLLGFSIPEEDLGHLFEVYQQFVDNVFSLPVDLPFSGYRRGIQARQILQKGLEKAIREKLQCTQGKDYLDALDLLIESSKEHGKEMTMQELKDGTLELIFAAYATTASASTSLIMQLLKHPTVLEKLRDELRAHGILHSGGCPCEGTLRLDTLSGLRYLDCVIKEVMRLFTPISGGYRTVLQTFELDGFQIPKGWSVMYSIRDTHDTAPVFKDVNVFDPDRFSQARSEDKDGRFHYLPFGGGVRTCLGKHLAKLFLKVLAVELASTSRFELATRTFPRITLVPVLHPVDGLSVKFFGLDSNQNEILPETEAMLSATV

SEQ ID NO: 5 - protein, 467 aa, Homo sapiens
MRPQELPRLAFPLLLLLLLLLPPPPCPAHSATRFDPTWESLDARQLPAWFDQAKFGIFIHWGVFSVPSFGSEWFWWYWQKEKIPKYVEFMKDNYPPSFKYEDFGPLFTAKFFNANQWADIFQASGAKYIVLTSKHHEGFTLWGSEYSWNWNAIDEGPKRDIVKELEVAIRNRTDLRFGLYYSLFEWFHPLFLEDESSSFHKRQFPVSKTLPELYELVNNYQPEVLWSDGDGGAPDQYWNSTGFLAWLYNESPVRGTVVTNDRWGAGSICKHGGFYTCSDRYNPGHLLPHKWENCMTIDKLSWGYRREAGISDYLTIEELVKQLVETVSCGGNLLMNIGPTLDGTISVVFEERLRQMGSWLKVNGEAIYETHTWRSQNDTVTPDVWYTSKPKEKLVYAIFLKWPTSGQLFLGHPKAILGATEVKLLGHGQPLNWISLEQNGIMVELPQLTIHQMPCKWGWALALTNVI

SEQ ID NO: 6 - protein, 307 aa, Homo sapiens
MAALLLGAVLLVAQPQLVPSRPAELGQQELLRKAGTLQDDVRDGVAPNGSAQQLPQTIIIGVRKGGTRALLEMLSLHPDVAAAENEVHFFDWEEHYSHGLGWYLSQMPFSWPHQLTVEKTPAYFTSPKVPERVYSMNPSIRLLLILRDPSERVLSDYTQVFYNHMQKHKPYPSIEEFLVRDGRLNVDYKALNRSLYHVHMQNWLRFFPLRHIHIVDGDRLIRDPFPEIQKVERFLKLSPQINASNFYFNKTKGFYCLRDSGRDRCLHESKGRAHPQVDPKLLNKLHEYFHEPNKKFFELVGRTFDWH

SEQ ID NO: 7 - protein, 785 aa, Homo sapiens
MLVAGLLLWASLLTGAWPSFPTQDHLPATPRVRLSFKELKATGTAHFFNFLLNTTDYRILLKDEDHDRMYVGSKDYVLSLDLHDINREPLIIHWAASPQRIEECVLSGKDVNGECGNFVRLIQPWNRTHLYVCGTGAYNPMCTYVNRGRRAQATPWTQTQAVRGRGSRATDGALRPMPTAPRQDYIFYLEPERLESGKGKCPYDPKLDTASALINEELYAGVYIDFMGTDAAIFRTLGKQTAMRTDQYNSRWLNDPSFIHAELIPDSAERNDDKLYFFFRERSAEAPQSPAVYARIGRICLNDDGGHCCLVNKWSTFLKARLVCSVPGEDGIETHFDELQDVFVQQTQDVRNPVIYAVFTSSGSVFRGSAVCVYSMADIRMVFNGPFAHKEGPNYQWMPFSGKMPYPRPGTCPGGTFTPSMKSTKDYPDEVINFMRSHPLMYQAVYPLQRRPLVVRTGAPYRLTTIAVDQVDAADGRYEVLFLGTDRGTVQKVIVLPKDDQELEELMLEEVEVFKDPAPVKTMTISSKRQQLYVASAVGVTHLSLHRCQAYGAACADCCLARDPYCAWDGQACSRYTASSKRRSRRQDVRHGNPIRQCRGFNSNANKNAVESVQYGVAGSAAFLECQPRSPQATVKWLFQRDPGDRRREIRAEDRFLRTEQGLLLRALQLSDRGLYSCTATENNFKHVVTRVQLHVLGRDAVHAALFPPLSMSAPPPPGAGPPTPPYQELAQLLAQPEVGLIHQYCQGYWRHVPPSPREAPGAPRSPEPQDQKKPRNRRHHPPDT

SEQ ID NO: 8 - protein, 509 aa, Homo sapiens
MAAAAGMLLLGLLQAGGSVLGQAMEKVTGGNLLSMLLIACAFTLSLVYLIRLAAGHLVQLPAGVKSPPYIFSPIPFLGHAIAFGKSPIEFLENAYEKYGPVFSFTMVGKTFTYLLGSDAAALLFNSKNEDLNAEDVYSRLTTPVFGKGVAYDVPNPVFLEQKKMLKSGLNIAHFKQHVSIIEKETKEYFESWGESGEKNVFEALSELIILTASHCLHGKEIRSQLNEKVAQLYADLDGGFSHAAWLLPGWLPLPSFRRRDRAHREIKDIFYKAIQKRRQSQEKIDDILQTLLDATYKDGRPLTDDEVAGMLIGLLLAGQHTSSTTSAWMGFFLARDKTLQKKCYLEQKTVCGENLPPLTYDQLKDLNLLDRCIKETLRLRPPIMIMMRMARTPQTVAGYTIPPGHQVCVSPTVNQRLKDSWVERLDFNPDRYLQDNPASGEKFAYVPFGAGRHRCIGENFAYVQIKTIWSTMLRLYEFDLIDGYFPTVNYTTMIHTPENPVIRYKRRSK

SEQ ID NO: 9 - protein, 287 aa, Homo sapiens
MNALANIPDVPVKYRKNDIPGPGFYNVIHQSPVSNSVSLSKKGTCMFPSMCARLDTIISKYPAANAYTIPSDFISKRDFSNSCSSMFQLPSFMKALKFETPAPNYYNASVSCCKQRNNVCTRAGFMSKTQRGSFAFADKGPPPGHYDINESLVKQSPNTLMSCFKSKTNRGLKLTSTGPGPGYYNPSDCTKVPKKTLFPKNPILNFSAQPSPLPPKPPFPGPGQYEIVDYLGPRKHFISSASFVSNTSRWTAAPPQPGLPGPATYKPELPGKQSFLYNEDKKWIPVL

SEQ ID NO: 10 - protein, 235 aa, Homo sapiens
MGTADSDEMAPEAPQHTHIDVHIHQESALAKLLLTCCSALRPRATQARGSSRLLVASWVMQIVLGILSAVLGGFFYIRDYTLLVTSGAAIWTGAVAVLAGAAAFIYEKRGGTYWALLRTLLTLAAFSTAIAALKLWNEDFRYGYSYYNSACRISSSSDWNTPAPTQSPEEVRRLHLCTSFMDMLKALFRTLQAMLLGVWILLLLASLTPLWLYCWRMFPTKGKRDQKEMLEVSGI

SEQ ID NO: 11 - protein, 160 aa, Homo sapiens
MEIPVPVQPSWLRRASAPLPGLSAPGRLFDQRFGEGLLEAELAALCPTTLAPYYLRAPSVALPVAQVPTDPGHFSVLLDVKHFSPEEIAVKVVGEHVEVHARHEERPDEHGFVAREFHRRYRLPPGVDPAAVTSALSPEGVLSIQAAPASAQAPPPAAAK

SEQ ID NO: 12 - protein, 411 aa, Homo sapiens
MKAARFVLRSAGSLNGAGLVPREVEHFSRYSPSPLSMKQLLDFGSENACERTSFAFLRQELPVRLANILKEIDILPTQLVNTSSVQLVKSWYIQSLMDLVEFHEKSPDDQKALSDFVDTLIKVRNRHHNVVPTMAQGIIEYKDACTVDPVTNQNLQYFLDRFYMNRISTRMLMNQHILIFSDSQTGNPSHIGSIDPNCDVVAVVQDAFECSRMLCDQYYLSSPELKLTQVNGKFPDQPIHIVYVPSHLHHMLFELFKNAMRATVEHQENQPSLTPIEVIVVLGKEDLTIKISDRGGGVPLRIIDRLFSYTYSTAPTPVMDNSRNAPLAGFGYGLPISRLYAKYFQGDLNLYSLSGYGTDAIIYLKALSSESIEKLPVFNKSAFKHYQMSSEADDWCIPSREPKNLAKEVAM

SEQ ID NO: 13 - protein, 94 aa, Homo sapiens
MMGLSLASAVLLASLLSLHLGTATRGSDISKTCCFQYSHKPLPWTWVRSYEFTSNSCSQRAVIFTTKRGKKVCTHPRKKWVQKYISLLKTPKQL

SEQ ID NO: 14 - protein, 206 aa, Homo sapiens
MAANKPKGQNSLALHKVIMVGSGGVGKSALTLQFMYDEFVEDYEPTKADSYRKKVVLDGEEVQIDILDTAGQEDYAAIRDNYFRSGEGFLCVFSITEMESFAATADFREQILRVKEDENVPFLLVGNKSDLEDKRQVSVEEAKNRAEQWNVNYVETSAKTRANVDKVFFDLMREIRARKMEDSKEKNGKKKRKSLAKRIRERCCIL

SEQ ID NO: 15 - protein, 241 aa, Homo sapiens
MTLQWAAVATFLYAEIGLILIFCLPFIPPQRWQKIFSFNVWGKIATFWNKAFLTIIILLIVLFLDAVREVRKYSSVHTIEKSSTSRPDAYEHTQMKLFRSQRNLYISGFSLFFWLVLRRLVTLITQLAKELSNKGVLKTQAENTNKAAKKFMEENEKLKRILKSHGKDEECVLEAENKKLVEDQEKLKTELRKTSDALSKAQNDVMEMKMQSERLSKEYDQLLKEHSELQDRLERGNKKRL

SEQ ID NO: 16 - protein, 511 aa, Homo sapiens
MSRGPEEVNRLTESTYRNVMEQFNPGLRNLINLGKNYEKAVNAMILAGKAYYDGVAKIGEIATGSPVSTELGHVLIEISSTHKKLNESLDENFKKFHKEIIHELEKKIELDVKYMNATLKRYQTEHKNKLESLEKSQAELKKIRRKSQGSRNALKYEHKEIEYVETVTSRQSEIQKFIADGCKEALLEEKRRFCFLVDKHCGFANHIHYYHLQSAELLNSKLPRWQETCVDAIKVPEKIMNMIEEIKTPASTPVSGTPQASPMIERSNVVRKDYDTLSKCSPKMPPAPSGRAYTSPLIDMFNNPATAAPNSQRVNNSTGTSEDPSLQRSVSVATGLNMMKKQKVKTIFPHTAGSNKTLLSFAQGDVITLLIPEEKDGWLYGEHDVSKARGWFPSSYTKLLEENETEAVTVPTPSPTPVRSISTVNLSENSSVVIPPPDYLECLSMGAAADRRADSARTTSTFKAPASKPETAAPNDANGTAKPPFLSGENPFATVKLRPTVTNDRSAPIIR

SEQ ID NO: 17 - protein, 1024 aa, Homo sapiens
MCARMAGRTTAAPRGPYGPWLCLLVALALDVVRVDCGQAPLDPVYLPAALELLDAPEHFRVQQVGHYPPANSSLSSRSETFLLLQPWPRAQPLLRASYPPFATQQVVPPRVTEPHQRPVPWDVRAVSVEAAVTPAEPYARVLFHLKGQDWPPGSGSLPCARLHATHPAGTAHQACRFQPSLGACVVELELPSHWFSQASTTRAELAYTLEPAAEGPGGCGSGEENDPGEQALPVGGVELRPADPPQYQEVPLDEAVTLRVPDMPVRPGQLFSATLLLRHNFTASLLTLRIKVKKGLHVTAARPAQPTLWTAKLDRFKGSRHHTTLITCHRAGLTEPDSSSPLELSEFLWVDFVVENSTGGGVAVTRPVTWQLEYPGQAPEAEKDKMVWEILVSERDIRALIPLAKAEELVNTAPLTGVPQHVPVRLVTVDGGGALVEVTEHVGCESANTQVLQVSEACDAVFVAGKESRGARGVRVDFWWRRLRASLRLTVWAPLLPLRIELTDTTLEQVRGWRVPGPAEGPAEPAAEASDEAERRARGCHLQYQRAGVRFLAPFAAHPLDGGRRLTHLLGPDWLLDVSHLVAPHARVLDSRVASLEGGRVVVGREPGVTSIEVRSPLSDSILGEQALAVTDDKVSVLELRVQPVMGISLTLSRGTAHPGEVTATCWAQSALPAPKQEVALSLWLSFSDHTVAPAELYDRRDLGLSVSAEEPGAILPAEEQGAQLGVVVSGAGAEGLPLHVALHPPEPCRRGRHRVPLASGTAWLGLPPASTPAPALPSSPAWSPPATEATMGGKRQVAGSVGGNTGVRGKFERAEEEARKEETEAREEEEEEEEEMVPAPQHVTELELGMYALLGVFCVAIFIFLVNGVVFVLRYQRKEPPDSATDPTSPQPHNWVWLGTDQEELSRQLDRQSPGPPKGEGSCPCESGGGGEAPTLAPGPPGGTTSSSSTLARKEAGGRRKRVEFVTFAPAPPAQSPEEPVGAPAVQSILVAGEEDIRWVCEDMGLKDPEELRNYMERIRGSS

SEQ ID NO: 18 - protein, 736 aa, Homo sapiens
MAGSSTGGGGVGETKVIYHLDEEETPYLVKIPVPAERITLGDFKSVLQRPAGAKYFFKSMDQDFGVVKEEISDDNARLPCFNGRVVSWLVSSDNPQPEMAPPVHEPRAELAPPAPPLPPLPPERTSGIGDSRPPSFHPNVSSSHENLEPETETESVVSLRRERPRRRDSSEHGAGGHRTGGPSRLERHLAGYESSSTLMTSELESTSLGDSDEEDTMSRFSSSTEQSSASRLLKRHRRRRKQRPPRLERTSSFSSVTDSTMSLNIITVTLNMEKYNFLGISIVGQSNERGDGGIYIGSIMKGGAVAADGRIEPGDMLLQVNDMNFENMSNDDAVRVLRDIVHKPGPIVLTVAKCWDPSPQAYFTLPRNEPIQPIDPAAWVSHSAALTGTFPAYPGSSSMSTITSGSSLPDGCEGRGLSVHTDMASVTKAMAAPESGLEVRDRMWLKITIPNAFLGSDVVDWLYHHVEGFPERREARKYASGLLKAGLIRHTVNKITFSEQCYYVFGDLSGGCESYLVNLSLNDNDGSSGASDQDTLAPLPGATPWPLLPTFSYQYPAPHPYSPQPPPYHELSSYTYGGGSASSQHSEGSRSSGSTRSDGGAGRTGRPEERAPESKSGSGSESEPSSRGGSLRRGGEASGTSDGGPPPSRGSTGGAPNLRAHPGLHPYGPPPGMALPYNPMMVVMMPPPPPPVPPAVQPPGAPPVRDLGSVPPELTASRQSFHMAMGNPSEFFVDVM

SEQ ID NO: 19 - protein, 665 aa, Homo sapiens
MTSANKAIELQLQVKQNAEELQDFMRDLENWEKDIKQKDMELRRQNGVPEENLPPIRNGNFRKKKKGKAKESSKKTREENTKNRIKSYDYEAWAKLDVDRILDELDKDDSTHESLSQESESEEDGIHVDSQKALVLKEKGNKYFKQGKYDEAIDCYTKGMDADPYNPVLPTNRASAYFRLKKFAVAESDCNLAVALNRSYTKAYSRRGAARFALQKLEEAKKDYERVLELEPNNFEATNELRKISQALASKENSYPKEADIVIKSTEGERKQIEAQQNKQQAISEKDRGNGFFKEGKYERAIECYTRGIAADGANALLPANRAMAYLKIQKYEEAEKDCTQAILLDGSYSKAFARRGTARTFLGKLNEAKQDFETVLLLEPGNKQAVTELSKIKKELIEKGHWDDVFLDSTQRQNVVKPIDNPPHPGSTKPLKKVIIEETGNLIQTIDVPDSTTAAAPENNPINLANVIAATGTTSKKNSSQDDLFPTSDTPRAKVLKIEEVSDTSSLQPQASLKQDVCQSYSEKMPIEIEQKPAQFATTVLPPIPANSFQLESDFRQLKSSPDMLYQYLKQIEPSLYPKLFQKNLDPDVFNQIVKILHDFYIEKEKPLLIFEILQRLSELKRFDMAVMFMSETEKKIARALFNHIDKSGLKDSSVEELKKRYGG

SEQ ID NO: 20 - protein, 451 aa, Homo sapiens
MPKNKKRNTPHRGSSAGGGGSGAAAATAATAGGQHRNVQPFSDEDASIETMSHCSGYSDPSSFAEDGPEVLDEEGTQEDLEYKLKGLIDLTLDKSAKTRQAALEGIKNALASKMLYEFILERRMTLTDSIERCLKKGKSDEQRAAAALASVLCIQLGPGIESEEILKTLGPILKKIICDGSASMQARQTCATCFGVCCFIATDDITELYSTLECLENIFTKSYLKEKDTTVICSTPNTVLHISSLLAWTLLLTICPINEVKKKLEMHFHKLPSLLSCDDVNMRIAAGESLALLFELARGIESDFFYEDMESLTQMLRALATDGNKHRAKVDKRKQRSVFRDVLRAVEERDFPTETIKFGPERMYIDCWVKKHTYDTFKEVLGSGMQYHLQSNEFLRNVFELGPPVMLDAATLKTMKISRFERHLYNSAAFKARTKARSKCRDKRADVGEFF

SEQ ID NO: 21 - protein, 359 aa, Homo sapiens
MPNPSSTSSPYPLPEEIRNLLADVETFVADILKGENLSKKAKEKRESLIKKIKDVKSIYLQEFQDKGDAEDGEEYDDPFAGPPDTISLASERYDKDDEAPSDGAQFPPIAAQDLPFVLKAGYLEKRRKDHSFLGFEWQKRWCALSKTVFYYYGSDKDKQQKGEFAIDGYSVRMNNTLRKDGKKDCCFEISAPDKRIYQFTAASPKDAEEWVQQLKFVLQDMESDIIPEDYDERGELYDDVDHPLPISNPLTSSQPIDDEIYEELPEEEEDSAPVKVEEQRKMSQDSVHHTSGDKSTDYANFYQGLWDCTGAFSDELSFKRGDVIYILSKEYNRYGWWVGEMKGAIGLVPKAYIMEMYDI

SEQ ID NO: 22 - protein, 314 aa, Homo sapiens
MGARGALLLALLLARAGLRKPESQEAAPLSGPCGRRVITSRIVGGEDAELGRWPWQGSLRLWDSHVCGVSLLSHRWALTAAHCFETYSDLSDPSGWMVQFGQLTSMPSFWSLQAYYTRYFVSNIYLSPRYLGNSPYDIALVKLSAPVTYTKHIQPICLQASTFEFENRTDCWVTGWGYIKEDEALPSPHTLQEVQVAIINNSMCNHLFLKYSFRKDIFGDMVCAGNAQGGKDACFGDSGGPLACNKNGLWYQIGVVSWGVGCGRPNRPGVYTNISHHFEWIQKLMAQSGMSQPDPSWPLLFFPLLWALPLLGPV

SEQ ID NO: 23 - protein, 313 aa, Homo sapiens
MDFDERGPCSSNMYLPSCTYYVSGPDFSSLPSFLPQTPSSRPMTYSYSSNLPQVQPVREVTFREYAIEPATKWHPRGNLAHCYSAEELVHRDCLQAPSAAGVPGDVLAKSSANVYHHPTPAVSSNFYSTVGRNGVLPQAFDQFFETAYGTPENLASSDYPGDKSAEKGPPAATATSAAAAAAATGAPATSSSDSGGGGGCRETAAAAEEKERRRRPESSSSPESSSGHTEDKAGGSSGQRTRKKRCPYTKYQIRELEREFFFSVYINKEKRLQLSRMLNLTDRQVKIWFQNRRMKEKKINRDRLQYYSANPLL

SEQ ID NO: 24 - protein, 397 aa, Homo sapiens
MAPISLSWLLRLATFCHLTVLLAGQHHGVTKCNITCSKMTSKIPVALLIHYQQNQASCGKRAIILETRQHRLFCADPKEQWVKDAMQHLDRQAAALTRNGGTFEKQIGEVKPRTTPAAGGMDESVVLEPEATGESSSLEPTPSSQEAQRALGTSPELPTGVTGSSGTRLPPTPKAQDGGPVGTELFRVPPVSTAATWQSSAPHQPGPSLWAEAKTSEAPSTQDPSTQASTASSPAPEENAPSEGQRVWGQGQSPRPENSLEREEMGPVPAHTDAFQDWGPGSMAHVSVVPVSSEGTPSREPVASGSWTPKAEEPIHATMDPQRLGVLITPVPDAQAATRRQAVGLLAFLGLLFCLGVAMFTYQSLQGCPRKMAGEMAEGLRYIPRSCGSNSYVLVPV

SEQ ID NO: 25 - protein, 379 aa, Homo sapiens
MSSPSLSDLGKREPAAAADERGTQQRRACANATWNSIHNGVIAVFQRKGLPDQELFSLNEGVRQLLKTELGSFFTEYLQNQLLTKGMVILRDKIRFYEGQKLLDSLAETWDFFFSDVLPMLQAIFYPVQGKEPSVRQLALLHFRNAITLSVKLEDALARAHARVPPAIVQMLLVLQGVHESRGVTEDYLRLETLVQKVVSPYLGTYGLHSSEGPFTHSCILEKRLLRRSRSGDVLAKNPVVRSKSYNTPLLNPVQEHEAEGAAAGGTSIRRHSVSEMTSCPEPQGFSDPPGQGPTGTFRSSPAPHSGPCPSRLYPTTQPPEQGLDPTRSSLPRSSPENLVDQILESVDSDSEGIFIDFGRGRGSGMSDLEGSGGRQSVV

SEQ ID NO: 26 - protein, 334 aa, Homo sapiens
MFRWERSIPLRGSAAALCNNLSVLQLPARNLTYFGVVHGPSAQLLSAAPEGVPLAQRQLHAKEGAGVSPPLITQVHWCVLPFRVLLVLTSHRGIQMYESNGYTMVYWHALDSGDASPVQAVFARGIAASGHFICVGTWSGRVLVFDIPAKGPNIVLSEELAGHQMPITDIATEPAQGQDCVADMVTADDSGLLCVWRSGPEFTLLTRIPGFGVPCPSVQLWQGIIAAGYGNGQVHLYEATTGNLHVQINAHARAICALDLASEVGKLLSAGEDTFVHIWKLSRNPESGYIEVEHCHGECVADTQLCGARFCDSSGNSFAVTGYDLAEIRRFSSV

SEQ ID NO: 27 - protein, 229 aa, Homo sapiens
MARLALSPVPSHWMVALLLLLSAEPVPAARSEDRYRNPKGSACSRIWQSPRFIARKRGFTVKMHCYMNSASGNVSWLWKQEMDENPQQLKLEKGRMEESQNESLATLTIQGIRFEDNGIYFCQQKCNNTSEVYQGCGTELRVMGFSTLAQLKQRNTLKDGIIMIQTLLIILFIIVPIFLLLDKDDSKAGMEEDHTYEGLDIDQTATYEDIVTLRTGEVKWSVGEHPGQE

SEQ ID NO: 28 - protein, 364 aa, Homo sapiens
MAASGPGCRSWCLCPEVPSATFFTALLSLLVSGPRLFLLQQPLAPSGLTLKSEALRNWQVYRLVTYIFVYENPISLLCGAIIIWRFAGNFERTVGTVRHCFFTVIFAIFSAIIFLSFEAVSSLSKLGEVEDARGFTPVAFAMLGVTTVRSRMRRALVFGMVVPSVLVPWLLLGASWLIPQTSFLSNVCGLSIGLAYGLTYCYSIDLSERVALKLDQTFPFSLMRRISVFKYVSGSSAERRAAQSRKLNPVPGSYPTQSCHPHLSPSHPVSQTQHASGQKLASWPSCTPGHMPTLPPYQPASGLCYVQNHFGPNPTSSSVYPASAGTSLGIQPPTPVNSPGTVYSGALGTPGAAGSKESSRVPMP

SEQ ID NO: 29 - protein, 312 aa, Homo sapiens
MEPGSVENLSIVYRSRDFLVVNKHWDVRIDSKAWRETLTLQKQLRYRFPELADPDTCYGFRFCHQLDFSTSGALCVALNKAAAGSAYRCFKERRVTKAYLALLRGHIQESRVTISHAIGRNSTEGRAHTMCIEGSQGCENPKPSLTDLVVLEHGLYAGDPVSKVLLKPLTGRTHQLRVHCSALGHPVVGDLTYGEVSGREDRPFRMMLHAFYLRIPTDTECVEVCTPDPFLPSLDACWSPHTLLQSLDQLVQALRATPDPDPEDRGPRPGSPSALLPGPGRPPPPPTKPPETEAQRGPCLQWLSEWTLEPDS

SEQ ID NO: 30 - protein, 312 aa, Homo sapiens
MGRRRAARGPGAEGGRPRHLPTRSLEAFAEEVGAALQASVEPGAADGEGGPGPAALPCTLAMWELGHCDPRRCTGRKLARLGLVRCLRLGHRFGGLVLSPVGKQYASPADRQLVAQSGVAVIDCSWARLDETPFGKMRGSHLRLLPYLVAANPVNYGRPYRLSCVEAFAATFCIVGFPDLAVILLRKFKWGKGFLDLNRQLLDKYAACGSPEEVLQAEQEFLANAKESPQEEEIDPFDVDSGREFGNPNRPVASTRLPSDTDDSDASEDPGPGAERGGASSSCCEEEQTQGRGAEARAPAEVWKGIKKRQRD

SEQ ID NO: 31 - protein, 156 aa, Homo sapiens
MASRVLSAYVSRLPAAFAPLPRVRMLAVARPLSTALCSAGTQTRLGTLQPALVLAQVPGRVTQLCRQYSDMPPLTLEGIQDRVLYVLKLYDKIDPEKLSVNSHFMKDLGLDSLDQVEIIMAMEDEFGFEIPDIDAEKLMCPQEIVDYIADKKDVYE

SEQ ID NO: 32 - protein, 343 aa, Homo sapiens
MKEINLLPDRVLSTPSVQLVQSWYVQSLLDIMEFLDKDPEDHRTLSQFTDALVTIRNRHNDVVPTMAQGVLEYKDTYGDDPVSNQNIQYFLDRFYLSRISIRMLINQHTLIFDGSTNPAHPKHIGSIDPNCNVSEVVKDAYDMAKLLCDKYYMASPDLEIQEINAANSKQPIHMVYVPSHLYHMLFELFKNAMRATVESHESSLILPPIKVMVALGEEDLSIKMSDRGGGVPLRKIERLFSYMYSTAPTPQPGTGGTPLAGFGYGLPISRLYAKYFQGDLQLFSMEGFGTDAVIYLKALSTDSVERLPVYNKSAWRHYQTIQEAGDWCVPSTEPKNTSTYRVS

SEQ ID NO: 33 - protein, 586 aa, Homo sapiens
MGVNAVHWFRKGLRLHDNPALKECIQGADTIRCVYILDPWFAGSSNVGINRWRFLLQCLEDLDANLRKLNSRLFVIRGQPADVFPRLFKEWNITKLSIEYDSEPFGKERDAAIKKLATEAGVEVIVRISHTLYDLDKIIELNGGQPPLTYKRFQTLISKMEPLEIPVETITSEVIEKCTTPLSDDHDEKYGVPSLEELGFDTDGLSSAVWPGGETEALTRLERHLERKAWVANFERPRMNANSLLASPTGLSPYLRFGCLSCRLFYFKLTDLYKKVKKNSSPPLSLYGQLLWREFFYTAATNNPRFDKMEGNPICVQIPWDKNPEALAKWAEGRTGFPWIDAIMTQLRQEGWIHHLARHAVACFLTRGDLWISWEEGMKVFEELLLDADWSINAGSWMWLSCSSFFQQFFHCYCPVGFGRRTDPNGDYIRRYLPVLRGFPAKYIYDPWNAPEGIQKVAKCLIGVNYPKPMVNHAEASRLNIERMKQIYQQLSRYRGLGLLASVPSNPNGNGGFMGYSAENIPGCSSSGSCSQGSGILHYAHGDSQQTHLLKQGRSSMGTGLSGGKRPSQEEDTQSIGPKVQRQSTN

SEQ ID NO: 34 - protein, 196 aa, Homo sapiens
MSRRSMLLAWALPSLLRLGAAQETEDPACCSPIVPRNEWKALASECAQHLSLPLRYVVVSHTAGSSCNTPASCQQQARNVQHYHMKTLGWCDVGYNFLIGEDGLVYEGRGWNFTGAHSGHLWNPMSIGISFMGNYMDRVPTPQAIRAAQGLLACGVAQGALRSNYVLKGHRDVQRTLSPGNQLYHLIQNWPHYRSP

SEQ ID NO: 35 - protein, 234 aa, Homo sapiens
MNHLPEDMENALTGSQSSHASLRNIHSINPTQLMARIESYEGREKKGISDVRRTFCLFVTFDLLFVTLLWIIELNVNGGIENTLEKEVMQYDYYSSYFDIFLLAVFRFKVLILAYAVCRLRHWWAIALTTAVTSAFLLAKVILSKLFSQGAFGYVLPIISFILAWIETWFLDFKVLPQEAEEENRLLIVQDASERAALIPGGLSDGQFYSPPESEAGSEEAEEKQDSEKPLLEL

SEQ ID NO: 36 - protein, 228 aa, Homo sapiens
MPVKGGTKCIKYLLFGFNFIFWLAGIAVLAIGLWLRFDSQTKSIFEQETNNNNSSFYTGVYILIGAGALMMLVGFLGCCGAVQESQCMLGLFFGFLLVIFAIEIAAAIWGYSHKDEVIKEVQEFYKDTYNKLKTKDEPQRETLKAIHYALNCCGLAGGVEQFISDICPKKDVLETFTVKSCPDAIKEVFDNKFHIIGAVGIGIAVVMIFGMIFSMILCCAIRRNREMV

SEQ ID NO: 37 - protein, 119 aa, Homo sapiens [sequence omitted]

SEQ ID NO: 38 - protein, 155 aa, Homo sapiens
MVDLTQVMDDEVFMAFASYATIILSKMMLMSTATAFYRLTRKVFANPEDCVAFGKGENAKKYLRTDDRVERVRRAHLNDLENIIPFLGIGLLYSLSGPDPSTAILHFRLFVGARIYHTIAYLTPLPQPNRALSFFVGYGVTLSMAYRLLKSKLYL

SEQ ID NO: 39 - protein, 419 aa, Homo sapiens
MRGLLVLSVLLGAVFGKEDFVGHQVLRISVADEAQVQKVKELEDLEHLQLDFWRGPAHPGSPIDVRVPFPSIQAVKIFLESHGISYETMIEDVQSLLDEEQEQMFAFRSRARSTDTFNYATYHTLEEIYDFLDLLVAENPHLVSKIQIGNTYEGRPIYVLKFSTGGSKRPAIWIDTGIHSREWVTQASGVWFAKKITQDYGQDAAFTAILDTLDIFLEIVTNPDGFAFTHSTNRMWRKTRSHTAGSLCIGVDPNRNWDAGFGLSGASSNPCSETYHGKFANSEVEVKSIVDFVKDHGNIKAFISIHSYSQLLMYPYGYKTEPVPDQDELDQLSKAAVTALASLYGTKFNYGSIIKAIYQASGSTIDWTYSQGIKYSFTFELRDTGRYGFLLPASQIIPTAKETWLALLTIMEHTLNHPY

SEQ ID NO: 40 - protein, 729 aa, Homo sapiens
MSGQPPPPPPQQQQQQQQLSPPPPAALAPVSGVVLPAPPAVSAGSSPAGSPGGGAGGEGLGAAAAALLLHPPPPPPPATAAPPPPPPPPPPPASAAAPASGPPAPPGLAAGPGPAGGAPTPALVAGSSAAAPFPHGDSALNEQEKELQRRLKRLYPAVDEQETPLPRSWSPKDKFSYIGLSQNNLRVHYKGHGKTPKDAASVRATHPIPAACGIYYFEVKIVSKGRDGYMGIGLSAQGVNMNRLPGWDKHSYGYHGDDGHSFCSSGTGQPYGPTFTTGDVIGCCVNLINNTCFYTKNGHSLGIAFTDLPPNLYPTVGLQTPGEVVDANFGQHPFVFDIEDYMREWRTKIQAQIDRFPIGDREGEWQTMIQKMVSSYLVHHGYCATAEAFARSTDQTVLEELASIKNRQRIQKLVLAGRMGEAIETTQQLYPSLLERNPNLLFTLKVRQFIEMVNGTDSEVRCLGGRSPKSQDSYPVSPRPFSSPSMSPSHGMNIHNLASGKGSTAHFSGFESCSNGVISNKAHQSYCHSNKHQSSNLNVPELNSINMSRSQQVNNFTSNDVDMETDHYSNGVGETSSNGFLNGSSKHDHEMEDCDTEMEVDSSQLRRQLCGGSQAAIERMIHFGRELQAMSEQLRRDCGKNTANKKMLKDAFSLLAYSDPWNSPVGNQLDPIQREPVCSALNSAILETHNLPKQPPLALAMGQATQCLGLMARSGIGSCAFATVEDYLH

SEQ ID NO: 41 - protein, 458 aa, Homo sapiens
MNRGVPFRHLLLVLQLALLPAATQGKKVVLGKKGDTVELTCTASQKKSIQFHWKNSNQIKILGNQGSFLTKGPSKLNDRADSRRSLWDQGNFPLIIKNLKIEDSDTYICEVEDQKEEVQLLVFGLTANSDTHLLQGQSLTLTLESPPGSSPSVQCRSPRGKNIQGGKTLSVSQLELQDSGTWTCTVLQNQKKVEFKIDIVVLAFQKASSIVYKKEGEQVEFSFPLAFTVEKLTGSGELWWQAERASSSKSWITFDLKNKEVSVKRVTQDPKLQMGKKLPLHLTLPQALPQYAGSGNLTLALEAKTGKLHQEVNLVVMRATQLQKNLTCEVWGPTSPKLMLSLKLENKEAKVSKREKAVWVLNPEAGMWQCLLSDSGQVLLESNIKVLPTWSTPVQPMALIVLGGVAGLLLFIGLGIFFCVRCRHRRRQAERMSQIKRLLSEKKTCQCPHRFQKTCSPI

SEQ ID NO: 42 - protein, 77 aa, Homo sapiens
MSVAFVPDWLRGKAEVNQETIQRLLEENDQLIRCIVEYQNKGRGNECVQYQHVLHRNLIYLATIADASPTSTSKAME

SEQ ID NO: 43 - protein, 239 aa, Homo sapiens
MARGCLCCLKYMMFLFNLIFWLCGCGLLGVGIWLSVSQGNFATFSPSFPSLSAANLVIAIGTIVMVTGFLGCLGAIKENKCLLLSFFIVLLVILLAELILLILFFVYMDKVNENAKKDLKEGLLLYHTENNVGLKNAWNIIQAEMRCCGVTDYTDWYPVLGENTVPDRCCMENSQGCGRNATTPLWRTGCYEKVKMWFDDNKHVLGTVGMCILIMQILGMAFSMTLFQHIHRTGKKYDA

SEQ ID NO: 44 - protein, 382 aa, Homo sapiens
MRSGGRGRPRLRLGERGLMEPLLPPKRRLLPRVRLLPLLLALAVGSAFYTIWSGWHRRTEELPLGRELRVPLIGSLPEARLRRVVGQLDPQRLWSTYLRPLLVVRTPGSPGNLQVRKFLEATLRSLTAGWHVELDPFTASTPLGPVDFGNVVATLDPRAARHLTLACHYDSKLFPPGSTPFVGATDSAVPCALLLELAQALDLELSRAKKQAAPVTLQLLFLDGEEALKEWGPKDSLYGSRHLAQLMESIPHSPGPTRIQAIELFMLLDLLGAPNPTFYSHFPRTVRWFHRLRSIEKRLHRLNLLQSHPQEVMYFQPGEPFGSVEDDHIPFLRRGVPVLHLISTPFPAVWHTPADTEVNLHPPTVHNLCRILAVFLAEYLGL

SEQ ID NO: 45 - protein, 499 aa, Homo sapiens
MAMAEGERTECAEPPRDEPPADGALKRAEELKTQANDYFKAKDYENAIKFYSQAIELNPSNAIYYGNRSLAYLRTECYGYALGDATRAIELDKKYIKGYYRRAASNMALGKFRAALRDYETVVKVKPHDKDAKMKYQECNKIVKQKAFERAIAGDEHKRSVVDSLDIESMTIEDEYSGPKLEDGKVTISFMKELMQWYKDQKKLHRKCAYQILVQVKEVLSKLSTLVETTLKETEKITVCGDTHGQFYDLLNIFELNGLPSETNPYIFNGDFVDRGSFSVEVILTLFGFKLLYPDHFHLLRGNHETDNMNQIYGFEGEVKAKYTAQMYELFSEVFEWLPLAQCINGKVLIMHGGLFSEDGVTLDDIRKIERNRQPPDSGPMCDLLWSDPQPQNGRSISKRGVSCQFGPDVTKAFLEENNLDYIIRSHEVKAEGYEVAHGGRCVTVFSAPNYCDQMGNKASYIHLQGSDLRPQFHQFTAVPHPNVKPMAYANTLLQLGMM

SEQ ID NO: 46 - protein, 425 aa, Homo sapiens
MAGAEGAAGRQSELEPVVSLVDVLEEDEELENEACAVLGGSDSEKCSYSQGSVKRQALYACSTCTPEGEEPAGICLACSYECHGSHKLFELYTKRNFRCDCGNSKFKNLECKLLPDKAKVNSGNKYNDNFFGLYCICKRPYPDPEDEIPDEMIQCVVCEDWFHGRHLGAIPPESGDFQEMVCQACMKRCSFLWAYAAQLAVTKISTEDDGLVRNIDGIGDQEVIKPENGEHQDSTLKEDVPEQGKDDVREVKVEQNSEPCAGSSSESDLQTVFKNESLNAESKSGCKLQELKAKQLIKKDTATYWPLNWRSKLCTCQDCMKMYGDLDVLFLTDEYDTVLAYENKGKIAQATDRSDPLMDTLSSMNRVQQVELICEYNDLKTELKDYLKRFADEGTVVKREDIQQFFEEFQSKKRRRVDGMQYYCS

SEQ ID NO: 47 - protein, 846 aa, Homo sapiens
MEAPLRPAADILRRNPQQDYELVQRVGSGTYGDVYKARNVHTGELAAVKIIKLEPGDDFSLIQQEIFMVKECKHCNIVAYFGSYLSREKLWICMEYCGGGSLQDIYHVTGPLSELQIAYVCRETLQGLAYLHTKGKMHRDIKGANILLTDHGDVKLADFGVAAKITATIAKRKSFIGTPYWMAPEVAAVEKNGGYNQLCDIWAVGITAIELGELQPPMFDLHPMRALFLMSKSNFQPPKLKDKTKWSSTFHNFVKIALTKNPKKRPTAERLLTHTFVAQPGLSRALAVELLDKVNNPDNHAHYTEADDDDFEPHAIIRHTIRSTNRNARAERTASEINFDKLQFEPPLRKETEARDEMGLSSDPNFMLQWNPFVDGANTGKSTSKRAIPPPLPPKPRISSYPEDNFPDEEKASTIKHCPDSESRAPQILRRQSSPSCGPVAETSSIGNGDGISKLMSENTEGSAQAPQLPRKKDKRDFPKPAINGLPPTPKVLMGACFSKVFDGCPLKINCATSWIHPDTKDQYIIFGTEDGIYTLNLNELHEATMEQLFPRKCTWLYVINNTLMSLSVGKTFQLYSHNLIALFEHAKKPGLAAHIQTHRFPDRILPRKFALTTKIPDTKGCHKCCIVRNPYTGHKYLCGALQSGIVLLQWYEPMQKFMLIKHFDFPLPSPLNVFEMLVIPEQEYPMVCVAISKGTESNQVVQFETINLNSASSWFTEIGAGSQQLDSIHVTQLERDTVLVCLDKFVKIVNLQGKLKSSKKLASELSFDFRIESVVCLQDSVLAFWKHGMQGKSFKSDEVTQEISDETRVFRLLGSDRVVVLESRPTENPTAHSNLYILAGHENSY

SEQ ID NO: 48 - protein, 263 aa, Homo sapiens
MKGGFTGGDEYQKHFLPRDYLATYYSFDGSPSPEAEMLKFNLECLHKTFGPGGLQGDTLIDIGSGPTIYQVLAACDSFQDITLSDFTDRNREELEKWLKKEPGAYDWTPAVKFACELEGNSGRWEEKEEKLRAAVKRVLKCDVHLGNPLAPAVLPLADCVLTLLAMECACCSLDAYRAALCNLASLLKPGGHLVTTVTLRLPSYMVGKREFSCVALEKEEVEQAVLDAGFDIEQLLHSPQSYSVTNAANNGVCFIVARKKPGP

SEQ ID NO: 49 - protein, 323 aa, Homo sapiens
MDPGKDKEGVPQPSGPPARKKFVIPLDEDEVPPGVAKPLFRSTQSLPTVDTSAQAAPQTYAEYAISQPLEGAGATCPTGSEPLAGETPNQALKPGAKSNSIIVSPRQRGNPVLKFVRNVPWEFGDVIPDYVLGQSTCALFLSLRYHNLHPDYIHGRLQSLGKNFALRVLLVQVDVKDPQQALKELAKMCILADCTLILAWSPEEAGRYLETYKAYEQKPADLLMEKLEQDFVSRVTECLTTVKSVNKTDSQTLLTTFGSLEQLIAASREDLALCPGLGPQKVRALGKNPRSWGKERAPNKHNLRPQSFKVKKEPKTRHSGFRL

SEQ ID NO: 50 - protein, 531 aa, Homo sapiens
MDGIVPDIAVGTKRGSDELFSTCVTNGPFIMSSNSASAANGNDSKKFKGDSRSAGVPSRVIHIRKLPIDVTEGEVISLGLPFGKVTNLLMLKGKNQAFIEMNTEEAANTMVNYYTSVTPVLRGQPIYIQFSNHKELKTDSSPNQARAQAALQAVNSVQSGNLALAASAAAVDAGMAMAGQSPVLRIIVENLFYPVTLDVLHQIFSKFGTVLKIITFTKNNQFQALLQYADPVSAQHAKLSLDGQNIYNACCTLRIDFSKLTSLNVKYNNDKSRDYTRPDLPSGDSQPSLDQTMAAAFGLSVPNVHGALAPLAIPSAAAAAAAAGRIAIPGLAGAGNSVLLVSNLNPERVTPQSLFILFGVYGDVQRVKILFNKKENALVQMADGNQAQLAMSHLNGHKLHGKPIRITLSKHQNVQLPREGQEDQGLTKDYGNSPLHRFKKPGSKNFQNIFPPSATLHLSNIPPSVSEEDLKVLFSSNGGVVKGFKFFQKDRKMALIQMGSVEEAVQALIDLHNHDLGENHHLRVSFSKSTI

SEQ ID NO: 51 - protein, 357 aa, Homo sapiens
MATTVPDGCRNGLKSKYYRLCDKAEAWGIVLETVATAGVVTSVAFMLTLPILVCKVQDSNRRKMLPTQFLFLLGVLGIFGLTFAFIIGLDGSTGPTRFFLFGILFSICFSCLLAHAVSLTKLVRGRKPLSLLVILGLAVGFSLVQDVIAIEYIVLTMNRTNVNVFSELSAPRRNEDFVLLLTYVLFLMALTFLMSSFTFCGSFTGWKRHGAHIYLTMLLSIAIWVAWITLLMLPDFDRRWDDTILSSALAANGWVFLLAYVSPEFWLLTKQRNPMDYPVEDAFCKPQLVKKSYGVENRAYSQEEITQGFEETGDTLYAPYSTHFQLQNQPPQKEFSIPRAHAWPSPYKDYEVKKEGS

SEQ ID NO: 52 - protein, 189 aa, Homo sapiens
MLGMIKNSLFGSVETWPWQVLSKGDKEEVAYEERACEGGKFATVEVTDKPVDEALREAMPKVAKYAGGTNDKGIGMGMTVPISFAVFPNEDGSLQKKLKVWFRIPNQFQSDPPAPSDKSVKIEEREGITVYSMQFGGYAKEADYVAQATRLRAALEGTATYRGDIYFCTGYDPPMKPYGRRNEIWLLKT

SEQ ID NO: 53 - protein, 302 aa, Homo sapiens
MHYPTALLFLILANGAQAFRICAFNAQRLTLAKVAREQVMDTLVRILARCDIMVLQEVVDSSGSAIPLLLRELNRFDGSGPYSTLSSPQLGRSTYMETYVYFYRSHKTQVLSSYVYNDEDDVFAREPFVAQFSLPSNVLPSLVLVPLHTTPKAVEKELNALYDVFLEVSQHWQSKDVILLGDFNADCASLTKKRLDKLELRTEPGFHWVIADGEDTTVRASTHCTYDRVVLHGERCRSLLHTAAAFDFPTSFQLTEEEALNISDHYPVEVELKLSQAHSVQPLSLTVLLLLSLLSPQLCPAA

SEQ ID NO: 54 - protein, 701 aa, Homo sapiens
MDIEDEENMSSSSTDVKENRNLDNVSPKDGSTPGPGEGSQLSNGGGGGPGRKRPLEEGSNGHSKYRLKKRRKTPGPVLPKNALMQLNEIKPGLQYTLLSQTGPVHAPLFVMSVEVNGQVFEGSGPTKKKAKLHAAEKALRSFVQFPNASEAHLAMGRTLSVNTDFTSDQADFPDTLFNGFETPDKAEPPFYVGSNGDDSFSSSGDLSLSASPVPASLAQPPLPVLPPFPPPSGKNPVMILNELRPGLKYDFLSESGESHAKSFVMSVVVDGQFFEGSGRNKKLAKARAAQSALAAIFNLHLDQTPSRQPIPSEGLQLHLPQVLADAVSRLVLGKFGDLTDNFSSPHARRKVLAGVVMTTGTDVKDAKVISVSTGTKCINGEYMSDRGLALNDCHAEIISRRSLLRFLYTQLELYLNNKDDQKRSIFQKSERGGFRLKENVQFHLYISTSPCGDARIFSPHEPILEEPADRHPNRKARGQLRTKIESGEGTIPVRSNASIQTWDGVLQGERLLTMSCSDKIARWNVVGIQGSLLSIFVEPIYFSSIILGSLYHGDHLSRAMYQRISNIEDLPPLYTLNKPLLSGISNAEARQPGKAPNFSVNWTVGDSAIEVINATTGKDELGRASRLCKHALYCRWMRVHGKVPSHLLRSKITKPNVYHESKLAAKEYQAAKARLFTAFIKAGLGAWVEKPTEQDQFSLTP

SEQ ID NO: 55 - protein, 410 aa, Homo sapiens
MQRLLFPPLRALKGRQYLPLLAPRAAPRAQCDCIRRPLRPGQYSTISEVALQSGRGTVSLPSKAAERVVGRWLLVCSGTVAGAVILGGVTRLTESGLSMVDWHLIKEMKPPTSQEEWEAEFQRYQQFPEFKILNHDMTLTEFKFIWYMEYSHRMWGRLVGLVYILPAAYFWRKGWLSRGMKGRVLALCGLVCFQGLLGWYMVKSGLEEKSDSHDIPRVSQYRLAAHLGSALVLYCASLWTSLSLLLPPHKLPETHQLLQLRRFAHGTAGLVFLTALSGAFVAGLDAGLVYNSFPKMGESWIPEDLFTFSPILRNVFENPTMVQFDHRILGITSVTAITVLYFLSRRIPLPRRTKMAAVTLLALAYTQVGLGISTLLMYVPTPLAATHQSGSLALLTGALWLMNELRRVPK

SEQ ID NO: 56 - protein, 865 aa, Homo sapiens [sequence omitted]

SEQ ID NO: 57 - protein, 440 aa, Homo sapiens
MRPHLSPPLQQLLLPVLLACAAHSTGALPRLCDVLQVLWEEQDQCLQELSREQTGDLGTEQPVPGCEGMWDNISCWPSSVPGRMVEVECPRFLRMLTSRNGSLFRNCTQDGWSETFPRPNLACGVNVNDSSNEKRHSYLLKLKVMYTVGYSSSLVMLLVALGILCAFRRLHCTRNYIHMHLFVSFILRALSNFIKDAVLFSSDDVTYCDAHRAGCKLVMVLFQYCIMANYSWLLVEGLYLHTLLAISFFSERKYLQGFVAFGWGSPAIFVALWAIARHFLEDVGCWDINANASIWWIIRGPVILSILINFILFINILRILMRKLRTQETRGNEVSHYKRLARSTLLLIPLFGIHYIVFAFSPEDAMEIQLFFELALGSFQGLVVAVLYCFLNGEVQLEVQKKWQQWHLREFPLHPVASFSNSTKASHLEQSQGTCRTSII

SEQ ID NO: 58 - protein, 268 aa, Homo sapiens
MPRSFLVKKHFNASKKPNYSELDTHTVIISPYLYESYSMPVIPQPEILSSGAYSPITVWTTAAPFHAQLPNGLSPLSGYSSSLGRVSPPPPSDTSSKDHSGSESPISDEEERLQSKLSDPHAIEAEKFQCNLCNKTYSTFSGLAKHKQLHCDAQSRKSFSCKYCDKEYVSLGALKMHIRTHTLPCVCKICGKAFSRPWLLQGHIRTHTGEKPFSCPHCNRAFADRSNLRAHLQTHSDVKKYQCKNCSKTFSRMSLLHKHEESGCCVAH

SEQ ID NO: 59 - protein, 283 aa, Homo sapiens
MCNTPTYCDLGKAAKDVFNKGYGFGMVKIDLKTKSCSGVEFSTSGHAYTDTGKASGNLETKYKVCNYGLTFTQKWNTDNTLGTEISWENKLAEGLKLTLDTIFVPNTGKKSGKLKASYKRDCFSVGSNVDIDFSGPTIYGWAVLAFEGWLAGYQMSFDTAKSKLSQNNFALGYKAADFQLHTHVNDGTEFGGSIYQKVNEKIETSINLAWTAGSNNTRFGIAAKYMLDCRTSLSAKVNNASLIGLGYTQTLRPGVKLTLSALIDGKNFSAGGHKVGLGFELEA

SEQ ID NO: 60 - protein, 456 aa, Homo sapiens
MRKSPGLSDCLWAWILLLSTLTGRSYGQPSLQDELKDNTTVFTRILDRLLDGYDNRLRPGLGERVTEVKTDIFVTSFGPVSDHDMEYTIDVFFRQSWKDERLKFKGPMTVLRLNNLMASKIWTPDTFFHNGKKSVAHNMTMPNKLLRITEDGTLLYTMRLTVRAECPMHLEDFPMDAHACPLKFGSYAYTRAEVVYEWTREPARSVVVAEDGSRLNQYDLLGQTVDSGIVQSSTGEYVVMTTHFHLKRKIGYFVIQTYLPCIMTVILSQVSFWLNRESVPARTVFGVTTVLTMTTLSISARNSLPKVAYATAMDWFIAVCYAFVFSALIEFATVNYFTKRGYAWDGKSVVPEKPKKVKDPLIKKNNTYAPTATSYTPNLARGDPGLATIAKSATIEPKEVKPETKPPEPKKTFNSVSKIDRLSRIAFPLLFGIFNLVYWATYLNREPQLKAPTPHQ

SEQ ID NO: 61 - protein, 336 aa, Homo sapiens
MGCDGGTIPKRHELVKGPKKVEKIWHLKNGKEWCSLHSEGKNKNGKEWDMEYDVDKDAELVAQWNYCTLSQEILRRPIVACELGRLYNKDAVIEFLLDKSAEKALGKAASHIKSIKNVTELKLSDNPAWEGDKGNTKGDKHDDLQRARFICPVVGLEMNGRHRFCFLRCCGCVFSERALKEIKAEVCHTCGAAFQEDDVIMLNGTKEDVDVLKTRMEERRLRAKLEKKTKKPKAAESVSKPDVSEEAPGPSKVKTGKPEEASLDSREKKTNLAPKSTAMNESSSGKAGKPPCGATKRSIADSEESEAYKSLFTTHSSAKRSKEESAHWVTHTSYCF

SEQ ID NO: 62 - protein, 1594 aa, Homo sapiens
MKLYVFLVNTGTTLTFDTELTVQTVADLKHAIQSKYKIAIQHQVLVVNGGECMAADRRVCTYSAGTDTNPIFLFNKEMILCDRPPAIPKTTFSTENDMEIKVEESLMMPAVFHTVASRTQLALEMYEVAKKLCSFCEGLVHDEHLQHQGWAAIMANLEDCSNSYQKLLFKFESIYSNYLQSIEDIKLKLTHLGTAVSVMAKIPLLECLTRHSYRECLGRLDSLPEHEDSEKAEMKRSTELVLSPDMPRTTNESLLTSFPKSVEHVSPDTADAESGKEIRESCQSTVHQQDETTIDTKDGDLPFFNVSLLDWINVQDRPNDVESLVRKCFDSMSRLDPRIIRPFIAECRQTIAKLDNQNMKAIKGLEDRLYALDQMIASCGRLVNEQKELAQGFLANQKRAENLKDASVLPDLCLSHANQLMIMLQNHRKLLDIKQKCTTAKQELANNLHVRLKWCCFVMLHADQDGEKLQALLRLVIELLERVKIVEALSTVPQMYCLAVVEVVRRKMFIKHYREWAGALVKDGKRLYEAEKSKRESFGKLFRKSFLRNRLFRGLDSWPPSFCTQKPRKFDCELPDISLKDLQFLQSFCPSEVQPFLRVPLLCDFEPLHQHVLALHNLVKAAQSLDEMSQTITDLLSEQKASVSQTSPQSASSPRMESTAGITTTTSPRTPPPLTVQDPLCPAVCPLEELSPDSIDAHTFDFETIPHPNIEQTIHQVSLDLDSLAESPESDFMSAVNEFVIEENLSSPNPISDPQSPEMMVESLYSSVINAIDSRRMQDTNVCGKEDFGDHTSLNVQLERCRVVAQDSHFSIQTIKEDLCHFRTFVQKEQCDFSNSLKCTAVEIRNIIEKVKCSLEITLKEKHQKELLSLKNEYEGKLDGLIKETEENENKIKKLKGELVCLEEVLQNKDNEFALVKHEKEAVICLQNEKDQKLLEMENIMHSQNCEIKELKQSREIVLEDLKKLHVENDEKLQLLRAELQSLEQSHLKELEDTLQVRHIQEFEKVMTDHRVSLEELKKENQQIINQIQESHAEIIQEKEKQLQELKLKVSDLSDTRCKLEVELALKEAETDEIKILLEESRAQQKETLKSLLEQETENLRTEISKLNQKIQDNNENYQVGLAELRTLMTIEKDQCISELISRHEEESNILKAELNKVTSLHNQAFEIEKNLKEQIIELQSKLDSELSALERQKDEKITQQEEKYEAIIQNLEKDRQKLVSSQEQDREQLIQKLNCEKDEAIQTALKEFKLEREVVEKELLEKVKHLENQIAKSPAIDSTRGDSSSLVAELQEKLQEEKAKFLEQLEEQEKRKNEEMQNVRTSLIAEQQTNFNTVLTREKMRKENIINDLSDKLKSTMQQQERDKDLIESLSEDRARLLEEKKKLEEEVSKLRSSSFVPSPYVATAPELYGACAPELPGESDRSAVETADEGRVDSAMETSMMSVQENIHMLSEEKQRIMLLERTLQLKEEENKRLNQRLMSQSMSSVSSRHSEKIAIRDFQVGDLVLIILDERHDNYVLFTVSPTLYFLHSESLPALDLKPGEGASGASRRPWVLGKVMEKEYCQAKKAQNRFKVPLGTKFYRVKAVSWNKKV

SEQ ID NO: 63 - protein, 1901 aa, Homo sapiens
MATFRNNHMKTKASVRKSFSEDVFQSVKSLLQSQKELCSVTAEDCLQQDEHANLTEVTFLGFNEETDAAHIQDLAAVSLELPDILNSLHFCSLNENEIICMKNINKPLDISSDPLNQSHPSGMLCVMRVSPTSPRLRIDFIFSLLSKYATGIRYTLDTFLHQKHQLETTDEDDDDTNQSVSSIEDDFVTAFEHLEEEETSKPYNDGMNITVLRSQCDAASQTVTGHHLETHDLKILISSGQQKSLAKPSTSSVNVLGHKELPSVKTSVTTSISEPWTQRSFYRSSNASDKDSDLQKTFFSSSPAYSSESECSSPSPVIFLDEEGYQKSLKAKLELPKIPVMKDDIEDSDSEVSEFFDSFDQFDELEQTLETCLFNKDPVIGKSSQRKGHKHGKSCMNPQKFKFDRPALPANVRKPTPRKPESPYGNLCDAPDSPRPVKASREDSGLFSPIRSSAFSPLGGCTPAECFCQTDIGGDRIHENHDSVYYTYEDYAKSISCEVLGSVLRTHHTNTLSNINSIKHGENKTVTFKHGNLDQKNKSKNKSLMIKDSIQKFAADLVEKSFGSAFKDLQKGVSSCTNALYHLAIKLTSSVLQMAFDELRRQRAFSLKERAISGLANFLVSEALSNALKDLQYVKKQIFTNTVARFAADLAEELVFEGIMEVCQFSYPQTPASPQCGSFDFEDKVVKLYAKDLSESVIQEAFIELSQVDVTFTTKAAVSVSTDNIKYVSAESVVPSTQAVTFSPSFHNQAIMVTKPVQEYKKEYTVQQALFCTSGIVTSIPVPLAGSALLPYHISSTACQAKAHLSSDDSNSNGDSAQVHIATKNREEKAACLRNICLPSEHNPGNQNDFKPTNDDIEMQSSSKLPNDPAIISNFSAAVVHTIVNETLESMTSLEVTKMVDERTDYLTKSLKEKTPPFSHCDQAVLQCSEASSNKDMFADRLSKSIIKHSIDKSKSVIPNIDKNAVYKESLPVSGEESQLTPEKSPKFPDSQNQLTHCSLSAAKDCVPECKVSMVHGSSLETLPSCPAVTGQKSDLKESAKDQPLKKHNLNSTSLEALSFGQENPFPHSHTFSSTALTCVDGLHVEDKQKVRDRNVIPDTPPSTPLVPSRASSEWDIKKLTKKLKGELAKEFAPATPPSTPHNSSVGSLSENEQNTIEKEEFMLKLMRSLSEEVESSESGELPEVDVKSEHSGKKVQFAEALATHILSLATEMAASHLDNKIIQEPKVKNPCLNVQSQRSVSPTFLNPSDENLKTLCNFAGDLAAEVITEAEKIAKVRNCMLFKQKKNSCYADGDEDYKVEEKLDIEAVVHPREVDPFILSLPPSSCMSGLMYKYPSCESVTDEYAGHLIQILKQEGGNSELIMDQYANRLAYRSVKSGLQEAAKTTKVQCNSRMFPVPSSQVKTNKELLMFSNKEHHQEADKKRQSKRNEGYFCKNQTCERTLDPYRNEVSQLYSFSTSLVHSITKDAKEELTASLVGLPKSLTDSCLFEKSGYEEDNECHVTPELPKSLQPSSQNHRFYHSTGSLNGYGCGDNVVQAVEQYAKKVVDDTLELTLGSTVFRVSETTKSADRVTYAEKLSPLTGQACRYCDLKELHNCTGNSSQHFFRQGSLASSKPASNPKFSSRYQKSRIFHLSVPQIHVNLDKKAVLAEKIVAEAIEKAERELSSTSLAADSGIGQEGASFAESLATETMTAAVTNVGHAVSSSKEIEDFQSTESVSSQQMNLSIGDDSTGSWSNLSFEDEHQDESSSFHHLSESNGNSSSWSSLGLEGDLYEDNLSFPTSDSDGPDDKDEEHEDEVEGLGQDGKTLLITNIDMEPCTVDPQLRIILQWLIASEAEVAELYFHDSANKEFMLLSKQLQEKGWKVGDLLQAVLQYYEVMEKASSEERCKSLFDWLLENA

SEQ ID NO: 64 - protein, 760 aa, Homo sapiens
MVLKAFFPTCCVSTDSGLLVGRWVPEQSSAVVLAVLHFPFIPIQVKQLLAQVRQASQVGVAVLGTWCHCRQEPEESLGRFLESLGAVFPHEPWLRLCRERGGTFWSCEATHRQAPTAPGAPGEDQVMLIFYDQRQVLLSQLHLPTVLPDRQAGATTASTGGLAAVFDTVARSEVLFRSDRFDEGPVRLSHWQSEGVEASILAELARRASGPICLLLASLLSLVSAVSACRVFKLWPLSFLGSKLSTCEQLRHRLEHLTLIFSTRKAENPAQLMRKANTVASVLLDVALGLMLLSWLHGRSRIGHLADALVPVADHVAEELQHLLQWLMGAPAGLKMNRALDQVLGRFFLYHIHLWISYIHLMSPFVEHILWHVGLSACLGLTVALSLLSDIIALLTFHIYCFYVYGARLYCLKIHGLSSLWRLFRGKKWNVLRQRVDSCSYDLDQLFIGTLLFTILLFLLPTTALYYLVFTLLRLLVVAVQGLIHLLVDLINSLPLYSLGLRLCRPYRLADKPTALQPRGAHLPPPQLWLPPQALLGRPVPQAVPWGAHLPLEAERGQAGLRELLARLAPPHGHSQPSALPGWHQLSWRMSCALWTLLCAPEHGRPCYHTLGLEVIGSEQMWGWPARLAALHHWHCLPWDPLPTCCGHHGGEHSNPRCPEHCPMPTLCTQVQRVRPPQQPQVEGWSPWGLPSGSALAVGVEGPCQDEPPSPRHPLAPSAEQHPASGGLKQSLTPVPSGPGPSLPEPHGVYLRMFPGEVAL

SEQ ID NO: 65 - protein, 832 aa, Homo sapiens
MILQAHLHSLCLLMLYLATGYGQEGKFSGPLKPMTFSIYEGQEPSQIIFQFKANPPAVTFELTGETDNIFVIEREGLLYYNRALDRETRSTHNLQVAALDANGIIVEGPVPITIKVKDINDNRPTFLQSKYEGSVRQNSRPGKPFLYVNATDLDDPATPNGQLYYQIVIQLPMINNVMYFQINNKTGAISLTREGSQELNPAKNPSYNLVISVKDMGGQSENSFSDTTSVDIIVTENIWKAPKPVEMVENSTDPHPIKITQVRWNDPGAQYSLVDKEKLPRFPFSIDQEGDIYVTQPLDREEKDAYVFYAVAKDEYGKPLSYPLEIHVKVKDINDNPPTCPSPVTVFEVQENERLGNSIGTLTAHDRDEENTANSFLNYRIVEQTPKLPMDGLFLIQTYAGMLQLAKQSLKKQDTPQYNLTIEVSDKDFKTLCFVQINVIDINDQIPIFEKSDYGNLTLAEDTNIGSTILTIQATDADEPFTGSSKILYHIIKGDSEGRLGVDTDPHTNTGYVIIKKPLDFETAAVSNIVFKAENPEPLVFGVKYNASSFAKFTLIVTDVNEAPQFSQHVFQAKVSEDVAIGTKVGNVTAKDPEGLDISYSLRGDTRGWLKIDHVTGEIFSVAPLDREAGSPYRVQVVATEVGGSSLSSVSEFHLILMDVNDNPPRLAKDYTGLFFCHPLSAPGSLIFEATDDDQHLFRGPHFTFSLGSGSLQNDWEVSKINGTHARLSTRHTEFEEREYVVLIRINDGGRPPLEGIVSLPVTFCSCVEGSCFRPAGHQTGIPTVGMAVGILLTTLLVIGIILAVVFIRIKKDKGKDNVESAQASEVKPLRS

SEQ ID NO: 66 - protein, 71 aa, Homo sapiens
MRPAALRGALLGCLCLALLCLGGADKRLRDNHEWKKLIMVQHWPETVCEKIQNDCRDPPDYWTIHGLWQAR

SEQ ID NO: 67 - protein, 499 aa, Homo sapiens
MADLANEEKPAIAPPVFVFQKDKGQKRSAGGSSPEGGEDSDREDGNYCPPVKRERTSSLTQFPPSQSEERSSGFRLKPPTLIHGQAPSAGLPSQKPKEQQRSVLRPAVLQAPQPKALSQTVPSSGTNGVSLPADCTGAVPAASPDTAAWRSPSEAADEVCALEEKEPQKNESSNASEEEACEKKDPATQQAFVFGQNLRDRVKLINESVDEADMENAGHPSADTPTATNYFLQYISSSLENSTNSADASSNKFVFGQNMSERVLSPPKLNEVSSDANRENAAAESGSESSSQEATPEKESLAESAAAYTKATARKCLLEKVEVITGEEAESNVLQMQCKLFVFDKTSQSWVERGRGLLRLNDMASTDDGTLQSRLVMRTQGSLRLILNTKLWAQMQIDKASEKSIRITAMDTEDQGVKVFLISASSKDTGQLYAALHHRILALRSRVEQEQEAKMPAPEPGAAPSNEEDDSDDDDVLAPSGATAAGAGDEGDGQTTGST

SEQ ID NO: 68 - protein, 772 aa, Homo sapiens
MRLSSLLALLRPALPLILGLSLGCSLSLLRVSWIQGEGEDPCVEAVGERGGPQNPDSRARLDQSDEDFKPRIVPYYRDPNKPYKKVLRTRYIQTELGSRERLLVAVLTSRATLSTLAVAVNRTVAHHFPRLLYFTGQRGARAPAGMQVVSHGDERPAWLMSETLRHLHTHFGADYDWFFIMQDDTYVQAPRLAALAGHLSINQDLYLGRAEEFIGAGEQARYCHGGFGYLLSRSLLLRLRPHLDGCRGDILSARPDEWLGRCLIDSLGVGCVSQHQGQQYRSFELAKNRDPEKEGSSAFLSAFAVHPVSEGTLMYRLHKRFSALELERAYSEIEQLQAQIRNLTVLTPEGEAGLSWPVGLPAPFTPHSRFEVLGWDYFTEQHTFSCADGAPKCPLQGASRADVGDALETALEQLNRRYQPRLRFQKQRLLNGYRRFDPARGMEYTLDLLLECVTQRGHRRALARRVSLLRPLSRVEILPMPYVTEATRVQLVLPLLVAEAAAAPAFLEAFAANVLEPREHALLTLLLVYGPREGGRGAPDPFLGVKAAAAELERRYPGTRLAWLAVRAEAPSQVRLMDVVSKKHPVDTLFFLTTVWTRPGPEVLNRCRMNAISGWQAFFPVHFQEFNPALSPQRSPPGPPGAGPDPPSPPGADPSRGAPIGGRFDRQASAEGCFYNADYLAARARLAGELAGQEEEEALEGLEVMDVFLRFSGLHLFRAVEPGLVQKFSLRDCSPRLSEELYHRCRLSNLEGLGGRAQLAMALFEQEQANST

SEQ ID NO: 69 - protein, 117 aa, Homo sapiens
MKWMFKEDHSLEHRCVESAKIRAKYPDRVPVIVEKVSGSQIVDIDKRKYLVPSDITVAQFMWIIRKRIQLPSEKAIFLFVDKTVPQSSLTMGQLYEKEKDEDGFLYVAYSGENTFGF

SEQ ID NO: 70 - protein, 504 aa, Homo sapiens
MRFFCARCCSFGPEMPAVQLLLLACLVWDVGARTAQLRKANDQSGRCQYTFSVASPNESSCPEQSQAMSVIHNLQRDSSTQRLDLEATKARLSSLESLLHQLTLDQAARPQETQEGLQRELGTLRRERDQLETQTRELETAYSNLLRDKSVLEEEKKRLRQENENLARRLESSSQEVARLRRGQCPQTRDTARAVPPGSREVSTWNLDTLAFQELKSELTEVPASRILKESPSGYLRSGEGDTGCGELVWVGEPLTLRTAETITGKYGVWMRDPKPTYPYTQETTWRIDTVGTDVRQVFEYDLISQFMQGYPSKVHILPRPLESTGAVVYSGSLYFQGAESRTVIRYELNTETVKAEKEIPGAGYHGQFPYSWGGYTDIDLAVDEAGLWVIYSTDEAKGAIVLSKLNPENLELEQTWETNIRKQSVANAFIICGTLYTVSSYTSADATVNFAYDTGTGISKTLTIPFKNRYKYSSMIDYNPLEKKLFAWDNLNMVTYDIKLSKM

SEQ ID NO: 71 - protein, 138 aa, Homo sapiens
MAELQQLRVQEAVESMVKSLERENIRKMQGLMFRCSASCCEDSQASMKQVHQCIERCHVPLAQAQALVTSELEKFQDRLARCTMHCNDKAKDSIDAGSKELQVKQQLDSCVTKCVDDHMHLIPTMTKKMKEALLSIGK

SEQ ID NO: 72 - protein, 369 aa, Homo sapiens
MTLEAIRYSRGSLQILDQLLLPKQSRYEAVGSVHQAWEAIRAMKVRGAPAIALVGCLSLAVELQAGAGGPGLAALVAFVRDKLSFLVTARPTAVNMARAARDLADVAAREAEREGATEEAVRERVICCTEDMLEKDLRDNRSIGDLGARHLLERVAPSGGKVTVLTHCNTGALATAGYGTALGVIRSLHSLGRLEHAFCTETRPYNQGARLTAFELVYEQIPATLITDSMVAAAMAHRGVSAVVVGADRVVANGDTANKVGTYQLAIVAKHHGIPFYVAAPSSSCDLRLETGKEIIIEERPGQELTDVNGVRIAAPGIGVWNPAFDVTPHDLITGGIITELGVFAPEELRTALTTTISSRDGTLDGPQM

SEQ ID NO: 73 - protein, 3051 aa, Homo sapiens
MATNPQPQPPPPAPPPPPPQPQPQPPPPPPGPGAGPGAGGAGGAGAGAGDPQLVAMIVNHLKSQGLFDQFRRDCLADVDTKPAYQNLRQRVDNFVANHLATHTWSPHLNKNQLRNNIRQQVLKSGMLESGIDRIISQVVDPKINHTFRPQVEKAVHEFLATLNHKEEGSGNTAPDDEKPDTSLITQGVPTPGPSANVANDAMSILETITSLNQEASAARASTETSNAKTSERASKKLPSQPTTDTSTDKERTSEDMADKEKSTADSGGEGLETAPKSEEFSDLPCPVEEIKNYTKEHNNLILLNKDVQQESSEQKNKSTDKGEKKPDSNEKGERKKEKKEKTEKKFDHSKKSEDTQKVKDEKQAKEKEVESLKLPSEKNSNKAKTVEGTKEDFSLIDSDVDGLTDITVSSVHTSDLSSFEEDTEEEVVTSDSMEEGEITSDDEEKNKQNKTKTQTSDSSEGKTKSVRHAYVHKPYLYSKYYSDSDDELTVEQRRQSIAKEKEERLLRRQINREKLEEKRKQKAEKTKSSKTKGQGRSSVDLEESSTKSLEPKAARIKEVLKERKVLEKKVALSKKRKKDSRNVEENSKKKQQYEEDSKETLKTSEHCEKEKISSSKELKHVHAKSEPSKPARRLSESLHVVDENKNESKLEREHKRRTSTPVIMEGVQEETDTRDVKRQVERSEICTEEPQKQKSTLKNEKHLKKDDSETPHLKSLLKKEVKSSKEKPEREKTPSEDKLSVKHKYKGDCMHKTGDETELHSSEKGLKVEENIQKQSQQTKLSSDDKTERKSKHRNERKLSVLGKDGKPVSEYIIKTDENVRKENNKKERRLSAEKTKAEHKSRRSSDSKIQKDSLGSKQHGITLQRRSESYSEDKCDMDSTNMDSNLKPEEVVHKEKRRTKSLLEEKLVLKSKSKTQGKQVKVVETELQEGATKQATTPKPDKEKNTEENDSEKQRKSKVEDKPFEETGVEPVLETASSSAHSTQKDSSHRAKLPLAKEKYKSDKDSTSTRLERKLSDGHKSRSLKHSSKDIKKKDENKSDDKDGKEVDSSHEKARGNSSLMEKKLSRRLCENRRGSLSQEMAKGEEKLAANTLSTPSGSSLQRPKKSGDMTLIPEQEPMEIDSEPGVENVFEVSKTQDNRNNNSQQDIDSENMKQKTSATVQKDELRTCTADSKATAPAYKPGRGTGVNSNSEKHADHRSTLTKKMHIQSAVSKMNPGEKEPIHRGTTEVNIDSETVHRMLLSAPSENDRVQKNLKNTAAEEHVAQGDATLEHSTNLDSSPSLSSVTVVPLRESYDPDVIPLFDKRTVLEGSTASTSPADHSALPNQSLTVRESEVLKTSDSKEGGEGFTVDTPAKASITSKRHIPEAHQATLLDGKQGKVIMPLGSKLTGVIVENENITKEGGLVDMAKKENDLNAEPNLKQTIKATVENGKKDGIAVDHVVGLNTEKYAETVKLKHKRSPGKVKDISIDVERRNENSEVDTSAGSGSAPSVLHQRNGQTEDVATGPRRAEKTSVATSTEGKDKDVTLSPVKAGPATTTSSETRQSEVALPCTSIEADEGLIIGTHSRNNPLHVGAEASECTVFAAAEEGGAVVTEGFAESETFLTSTKEGESGECAVAESEDRAADLLAVHAVKIEANVNSVVTEEKDDAVTSAGSEEKCDGSLSRDSEIVEGTITFISEVESDGAVTSAGTEIRAGSISSEEVDGSQGNMMRMGPKKETEGTVTCTGAEGRSDNFVICSVTGAGPREERMVTGAGVVLGDNDAPPGTSASQEGDGSVNDGTEGESAVTSTGITEDGEGPASCTGSEDSSEGFAISSESEENGESAMDSTVAKEGTNVPLVAAGPCDDEGIVTSTGAKEEDEEGEDVVTSTGRGNEIGHASTCTGLGEESEGVLICESAEGDSQIGTVVEHVEAEAGAAIMNANENNVDSMSGTEKGSKDTDICSSAKGIVESSVTSAVSGKDEVTPVPGGCEGPMTSAASDQSDSQLEKVEDTTISTGLVGGSYDVLVSGEVPECEVAHTSPSEKEDEDIITSVENEECDGLMATTASGDITNQNSLAGGKNQGKVLIISTSTTNDYTPQVSAITDVEGGLSDALRTEENMEGTRVTTEEFEAPMPSAVSGDDSQLTASRSEEKDECAMISTSIGEEFELPISSATTIKCAESLQPVAAAVEERATGPVLISTADFEGPMPSAPPEAESPLASTSKEEKDECALISTSIAEECEASVSGVVVESENERAGTVMEEKDGSGIISTSSVEDCEGPVSSAVPQEEGDPSVTPAEEMGDTAMISTSTSEGCEAVMIGAVLQDEDRLTITRVEDLSDAAIISTSTAECMPISASIDRHEENQLTADNPEGNGDLSATEVSKHKVPMPSLIAENNCRCPGPVRGGKEPGPVLAVSTEEGHNGPSVHKPSAGQGHPSAVCAEKEEKHGKECPEIGPFAGRGQKESTLHLINAEEKNVLLNSLQKEDKSPETGTAGGSSTASYSAGRGLEGNANSPAHLRGPEQTSGQTAKDPSVSIRYLAAVNTGAIKADDMPPVQGTVAEHSFLPAEQQGSEDNLKTSTTKCITGQESKIAPSHTMIPPATYSVALLAPKCEQDLTIKNDYSGKWTDQASAEKTGDDNSTRKSFPEEGDIMVTVSSEENVCDIGNEESPLNVLGGLKLKANLKMEAYVPSEEEKNGEILAPPESLCGGKPSGIAELQREPLLVNESLNVENSGFRTNEEIHSESYNKGEISSGRKDNAEAISGHSVEADPKEVEEEERHMPKRKRKQHYLSSEDEPDDNPDVLDSRIETAQRQCPETEPHDTKEENSRDLEELPKTSSETNSTTSRVMEEKDEYSSSETTGEKPEQNDDDTIKSQEEDQPIIIKRKRGRPRKYPVETTLKMKDDSKTDTGIVTVEQSPSSSKLKVMQTDESNKETANLQERSISNDDGEEKIVTSVRRRGRKPKRSLTVSDDAESSEPERKRQKSVSDPVEDKKEQESDEEEEEEEEDEPSGATTRSTTRSEAQRSKTQLSPSIKRKREVSPPGARTRGQQRVEEAPVKKAKR

SEQ ID NO: 74 - protein, 1621 aa, Homo sapiens
MEWVLAEALLSQSRDPRALLGALCQGEASAERVETLRFLLQRLEDEEARGSGGAGALPEAAREVAAGYLVPLLRSLRGRPAGGPDPSLQPRHRRRVLRAAGAALRSCVRLAGRPQLAAALAEEALRDLLAGWRAPGAEAAVEVLAAVGPCLRPREDGPLLERVAGTAVALALGGGGDGDEAGPAEDAAALVAGRLLPVLVQCGGAALRAVWGGLAAPGASLGSGRVEEKLLVLSALAEKLLPEPGGDRARGAREAGPDARRCWRFWRTVQAGLGQADALTRKRARYLLQRAVEVSAELGADCTCGPQEGNGPSLFWWSERKKDELLKFWENYILIMETLEGNQIHVIKPVLPKLNNLFEYAVSEENGCWLFHPSWHMCIYKRMFESENKILSKEGVIHFLELYETKILPFSPEFSEFIIGPLMDALSESSLYSRSPGQPIGSCSPLGLKLQKFLVTYISLLPEEIKSSFLLKFIRKMTSRHWCAVPILFLSKALANVPRHKALGIDGLLALRDVIHCTMITHQILLRGAAQCYLLQTAMNLLDVEKVSLSDVSTFLMSLRQEESLGRGTSLWTELCDWLRVNESYFKPSPTCSSIGLHKTSLNAYVKSIVQEYVKSSAWETGENCFMPDWFEAKLVSLMVLLAVDVEGMKTQYSGKQRTENVLRIFLDPLLDVLMKFSTNAYMPLLKTDRCLQLLLKLLNTCRLKGSSAQDDEVSTVLQNFFMSTTESISEFILRRLTMNELNSVSDLDRCHLYLMVLTELINLHLKVGWKRGNPIWRVISLLKNASIQHLQEMDSGQEPTVGSQIQRVVSMAALAMVCEAIDQKPELQLDSLHAGPLESFLSSLQLNQTLQKPHAEEQSSYAHPLECSSVLEESSSSQGWGKIVAQYIHDQWVCLSFLLKKYHTLIPTTGSEILEPFLPAVQMPIRTLQSALEALTVLSSDQVLPVFHCLKVLVPKLLTSSESLCIESFDMAWKIISSLSNTQLIFWANLKAFVQFVFDNKVLTIAAKIKGQAYFKIKEIMYKIIEMSAIKTGVFNTLISYCCQSWIVSASNVSQGSLSSAKNYSELILEACIFGTVFRRDQRLVQDVQTFIENLGHDCAANIVMENTKREDHYVRICAVKFLCLLDGSNMSHKLFIEDLAIKLLDKDELVSKSKKRYYVNSLQHRVKNRVWQTLLVLFPRLDQNFLNGIIDRIFQAGFTNNQASIKYFIEWIIILILHKFPQFLPKFWDCFSYGEENLKTSICTFLAVLSHLDIITQNIPEKKLILKQALIVVLQWCFNHNFSVRLYALVALKKLWTVCKVLSVEEFDALTPVIESSLHQVESMHGAGNAKKNWQRIQEHFFFATFHPLKDYCLETIFYILPRLSGLIEDEWITIDKFTRFTDVPLAAGFQWYLSQTQLSKLKPGDWSQQDIGTNLVEADNQAEWTDVQKKIIPWNSRVSDLDLELLFQDRAARLGKSISRLIVVASLIDKPTNLGGLCRTCEVFGASVLVVGSLQCISDKQFQHLSVSAEQWLPLVEVKPPQLIDYLQQKKTEGYTIIGVEQTAKSLDLTQYCFPEKSLLLLGNEREGIPANLIQQLDVCVEIPQQGIIRSLNVHVSGALLIWEYTRQQLLSHGDTKP

SEQ ID NO: 75 - protein, 1219 aa, Homo sapiens
MMSLSVRPQRRLLSARVNRSQSFAGVLGSHERGPRSFPVFSPPGPPRKPPALSRVSRMFSVAHPAAKVPQPERLDLVYTALKRGLTAYLEVHQQEQEKLQGQIRESKRNSRLGFLYDLDKQVKSIERFLRRLEFHASKIDELYEAYCVQRRLRDGAYNMVRAYTTGSPGSREARDSLAEATRGHREYTESMCLLESELEAQLGEFHLRMKGLAGFARLCVGDQYEICMKYGRQRWKLRGRIEGSGKQVWDSEETIFLPLLTEFLSIKVTELKGLANHVVVGSVSCETKDLFAALPQVVAVDINDLGTIKLSLEVTWSPFDKDDQPSAASSVNKASTVTKRFSTYSQSPPDTPSLREQAFYNMLRRQEELENGTAWSLSSESSDDSSSPQLSGTARHSPAPRPLVQQPEPLPIQVAFRRPETPSSGPLDEEGAVAPVLANGHAPYSRTLSHISEASVDAALAEASVEAVGPESLAWGPSPPTHPAPTHGEHPSPVPPALDPGHSATSSTLGTTGSVPTSTDPAPSAHLDSVHKSTDSGPSELPGPTHTTTGSTYSAITTTHSAPSPLTHTTTGSTHKPIISTLTTTGPTLNIIGPVQTTTSPTHTMPSPTHTTASPTHTSTSPTHTPTSPTHKTSMSPPTTTSPTPSGMGLVQTATSPTHPTTSPTHPTTSPILINVSPSTSLELATLSSPSKHSDPTLPGTDSLPCSPPVSNSYTQADPMAPRTPHPSPAHSSRKPLTSPAPDPSESTVQSLSPTPSPPTPAPQHSDLCLAMAVQTPVPTAAGGSGDRSLEEALGALMAALDDYRGQFPELQGLEQEVTRLESLLMQRQGLTRSRASSLSITVEHALESFSFLNEDEDEDNDVPGDRPPSSPEAGAEDSIDSPSARPLSTGCPALDAALVRHLYHCSRLLLKLGTFGPLRCQEAWALERLLREARVLEAVCEFSRRWEIPASSAQEVVQFSASRPGFLTFWDQCTERLSCFLCPVERVLLTFCNQYGARLSLRQPGLAEAVCVKFLEDALGQKLPRRPQPGPGEQLTVFQFWSFVETLDSPTMEAYVTETAEEVLLVRNLNSDDQAVVLKALRLAPEGRLRRDGLRALSSLLVHGNNKVMAAVSTQLRSLSLGPTFRERALLCFLDQLEDEDVQTRVAGCLALGCIKAPEGIEPLVYLCQTDTEAVREAARQSLQQCGEEGQSAHRRLEESLDALPRIFGPGSMASTAF

SEQ ID NO: 76 - protein, 473 aa, Homo sapiens
MKRASAGGSRLLAWVLWLQAWQVAAPCPGACVCYNEPKVTTSCPQQGLQAVPVGIPAASQRIFLHGNRISHVPAASFRACRNLTILWLHSNVLARIDAAAFTGLALLEQLDLSDNAQLRSVDPATFHGLGRLHTLHLDRCGLQELGPGLFRGLAALQYLYLQDNALQALPDDTFRDLGNLTHLFLHGNRISSVPERAFRGLHSLDRLLLHQNRVAHVHPHAFRDLGRLMTLYLFANNLSALPTEALAPLRALQYLRLNDNPWVCDCRARPLWAWLQKFRGSSSEVPCSLPQRLAGRDLKRLAANDLQGCAVATGPYHPIWTGRATDEEPLGLPKCCQPDAADKASVLEPGRPASAGNALKGRVPPGDSPPGNGSGPRHINDSPFGTLPGSAEPPLTAVRPEGSEPPGFPTSGPRRRPGCSRKNRTRSHCRLGQAGSGGGGTGDSEGSGALPSLTCSLTPLGLALVLWTVLGPC

SEQ ID NO: 77 - protein, 261 aa, Homo sapiens
MSRRYDSRTTIFSPEGRLYQVEYAMEAIGHAGTCLGILANDGVLLAAERRNIHKLLDEVFFSEKIYKLNEDMACSVAGITSDANVLTNELRLIAQRYLLQYQEPIPCEQLVTALCDIKQAYTQFGGKRPFGVSLLYIGWDKHYGFQLYQSDPSGNYGGWKATCIGNNSAAAVSMLKQDYKEGEMTLKSALALAIKVLNKTMDVSKLSAEKVEIATLTRENGKTVIRVLKQKEVEQLIKKHEEEEAKAEREKKEKEQKEKDK

SEQ ID NO: 78 - protein, 367 aa, Homo sapiens
MIRNWLTIFILFPLKLVEKCESSVSLTVPPVVKLENGSSTNVSLTLRPPLNATLVITFEITFRSKNITILELPDEVVVPPGVTNSSFQVTSQNVGQLTVYLHGNHSNQTGPRIRFLVIRSSAISIINQVIGWIYFVAWSISFYPQVIMNWRRKSVIGLSFDFVALNLTGFVAYSVFNIGLLWVPYIKEQFLLKYPNGVNPVNSNDVFFSLHAVVLTLIIIVQCCLYERGGQRVSWPAIGFLVLAWLFAFVTMIVAAVGVTTWLQFLFCFSYIKLAVTLVKYFPQAYMNFYYKSTEGWSIGNVLLDFTGGSFSLLQMFLQSYNNDQWTLIFGDPTKFGLGVFSIVFDVVFFIQHFCLYRKRPGYDQLN

SEQ ID NO: 79 - protein, 454 aa, Homo sapiens
MSAGGPCPAAAGGGPGGASCSVGAPGGVSMFRWLEVLEKEFDKAFVDVDLLLGEIDPDQADITYEGRQKMTSLSSCFAQLCHKAQSVSQINHKLEAQLVDLKSELTETQAEKVVLEKEVHDQLLQLHSIQLQLHAKTGQSADSGTIKAKLERELEANKKEKMKEAQLEAEVKLLRKENEALRRHIAVLQAEVYGARLAAKYLDKELAGRVQQIQLLGRDMKGPAHDKLWNQLEAEIHLHRHKTVIRACRGRNDLKRPMQAPPGHDQDSLKKSQGVGPIRKVLLLKEDHEGLGISITGGKEHGVPILISEIHPGQPADRCGGLHVGDAILAVNGVNLRDTKHKEAVTILSQQRGEIEFEVVYVAPEVDSDDENVEYEDESGHRYRLYLDELEGGGNPGASCKDTSGEIKVLQGFNKKAVTDTHENGDLGTASETPLDDGASKLDDLHTLYHKKSY

SEQ ID NO: 80 - protein, 359 aa, Homo sapiens
MKATIILLLLAQVSWAGPFQQRGLFDFMLEDEASGIGPEVPDDRDFEPSLGPVCPFRCQCHLRVVQCSDLGLDKVPKDLPPDTTLLDLQNNKITEIKDGDFKNLKNLHALILVNNKISKVSPGAFTPLVKLERLYLSKNQLKELPEKMPKTLQELRAHENEITKVRKVTFNGLNQMIVIELGTNPLKSSGIENGAFQGMKKLSYIRIADTNITSIPQGLPPSLTELHLDGNKISRVDAASLKGLNNLAKLGLSFNSISAVDNGSLANTPHLRELHLDNNKLTRVPGGLAEHKYIQVVYLHNNNISVVGSSDFCPPGHNTKKASYSGVSLFSNPVQYWEIQPSTFRCVYVRSAIQLGNYK

SEQ ID NO: 81 - protein, 201 aa, Homo sapiens
MAARTAFGAVCRRLWQGLGNFSVNTSKGNTAKNGGLLLSTNMKWVQFSNLHVDVPKDLTKPVVTISDEPDILYKRLSVLVKGHDKAVLDSYEYFAVLAAKELGISIKVHEPPRKIERFTLLQSVHIYKKHRVQYEMRTLYRCLELEHLTGSTADVYLEYIQRNLPEGVAMEVTKTQLEQLPEHIKEPIWETLSEEKEESKS

SEQ ID NO: 82 - protein, 593 aa, Homo sapiens
MWTLVSWVALTAGLVAGTRCPDGQFCPVACCLDPGGASYSCCRPLLDKWPTTLSRHLGGPCQVDAHCSAGHSCIFTVSGTSSCCPFPEAVACGDGHHCCPRGFHCSADGRSCFQRSGNNSVGAIQCPDSQFECPDFSTCCVMVDGSWGCCPMPQASCCEDRVHCCPHGAFCDLVHTRCITPTGTHPLAKKLPAQRTNRAVALSSSVMCPDARSRCPDGSTCCELPSGKYGCCPMPNATCCSDHLHCCPQDTVCDLIQSKCLSKENATTDLLTKLPAHTVGDVKCDMEVSCPDGYTCCRLQSGAWGCCPFTQAVCCEDHIHCCPAGFTCDTQKGTCEQGPHQVPWMEKAPAHLSLPDPQALKRDVPCDNVSSCPSSDTCCQLTSGEWGCCPIPEAVCCSDHQHCCPQGYTCVAEGQCQRGSEIVAGLEKMPARRASLSHPRDIGCDQHTSCPVGQTCCPSLGGSWACCQLPHAVCCEDRQHCCPAGYTCNVKARSCEKEVVSAQPATFLARSPHVGVKDVECGEGHFCHDNQTCCRDNRQGWACCPYRQGVCCADRRHCCPAGFRCAARGTKCLRREAPRWDAPLRDPALRQLL

SEQ ID NO: 83 - protein, 245 aa, Homo sapiens
MKKTQTWILTCIYLQLLLFNPLVKTEGICRNRVTNNVKDVTKLVANLPKDYMITLKYVPGMDVLPSHCWISEMVVQLSDSLTDLLDKFSNISEGLSNYSIIDKLVNIVDDLVECVKENSSKDLKKSFKSPEPRLFTPEEFFRIFNRSIDAFKDFVVASETSDCVVSSTLSPEKGKAKNPPGDSSLHWAAMALPALFSLIIGFAFGALYWKKRQPSLTRAVENIQINEEDNEISMLQEKEREFQEV

SEQ ID NO: 84 - protein, 239 aa, Homo sapiens
MPKSCAARQCCNRYSSRRKQLTFHRFPFSRPELLKEWVLNIGRGNFKPKQHTVICSEHFRPECFSAFGNRKNLKHNAVPTVFAFQDPTQQVRENTDPASERGNASSSQKEKVLPEAGAGEDSPGRNMDTALEELQLPPNAEGHVKQVSPRRPQATEAVGRPTGPAGLRRTPNKQPSDHSYALLDLDSLKKKLFLTLKENEKLRKRLQAQRLVMRRMSSRLRACKGHQGLQARLGPEQQS

SEQ ID NO: 85 - protein, 100 aa, Homo sapiens
MSTGPTAATGSNRRLQQTQNQVDEVVDIMRVNVDKVLERDQKLSELDDRADALQAGASQFETSAAKLKRKYWWKNCKMWAIGITVLVIFIIIIIVWVVSS

SEQ ID NO: 86 - protein, 331 aa, Homo sapiens
MARGGRGRRLGLALGLLLALVLAPRVLRAKPTVRKERVVRPDSELGERPPEDNQSFQYDHEAFLGKEDSKTFDQLTPDESKERLGKIVDRIDNDGDGFVTTEELKTWIKRVQKRYIFDNVAKVWKDYDRDKDDKISWEEYKQATYGYYLGNPAEFHDSSDHHTFKKMLPRDERRFKAADLNGDLTATREEFTAFLHPEEFEHMKEIVVLETLEDIDKNGDGFVDQDEYIADMFSHEENGPEPDWVLSEREQFNEFRDLNKDGKLDKDEIRHWILPQDYDHAQAEARHLVYESDKNKDEKLTKEEILENWNMFVGSQATNYGEDLTKNHDEL

SEQ ID NO: 87 - protein, 354 aa, Homo sapiens
MEVEAVCGGAGEVEAQDSDPAPAFSKAPGSAGHYELPWVEKYRPVKLNEIVGNEDTVSRLEVFAREGNVPNIIIAGPPGTGKTTSILCLARALLGPALKDAMLELNASNDRGIDVVRNKIKMFAQQKVTLPKGRHKIIILDEADSMTDGAQQALRRTMEIYSKTTRFALACNASDKIIEPIQSRCAVLRYTKLTDAQILTRLMNVIEKERVPYTDDGLEAIIFTAQGDMRQALNNLQSTFSGFGFINSENVFKVCDEPHPLLVKEMIQHCVNANIDEAYKILAHLWHLGYSPEDIIGNIFRVCKTFQMAEYLKLEFIKEIGYTHMKIAEGVNSLLQMAGLLARLCQKTMAPVAS

SEQ ID NO: 88 - protein, 694 aa, Homo sapiens
MKHLKRWWSAGGGLLHLTLLLSLAGLRVDLDLYLLLPPPTLLQDELLFLGGPASSAYALSPFSASGGWGRAGHLHPKGRELDPAAPPEGQLLREVRALGVPFVPRTSVDAWLVHSVAAGSADEAHGLLGAAAASSTGGAGASVDGGSQAVQGGGGDPRAARSGPLDAGEEEKAPAEPTAQVPDAGGCASEENGVLREKHEAVDHSSQHEENEERVSAQKENSLQQNDDDENKIAEKPDWEAEKTTESRNERHLNGTDTSFSLEDLFQLLSSQPENSLEGISLGDIPLPGSISDGMNSSAHYHVNFSQAISQDVNLHEAILLCPNNTFRRDPTARTSQSQEPFLQLNSHTTNPEQTLPGTNLTGFLSPVDNHMRNLTSQDLLYDLDINIFDEINLMSLATEDNFDPIDVSQLFDEPDSDSGLSLDSSHNNTSVIKSNSSHSVCDEGAIGYCTDHESSSHHDLEGAVGGYYPEPSKLCHLDQSDSDFHGDLTFQHVFHNHTYHLQPTAPESTSEPFPWPGKSQKIRSRYLEDTDRNLSRDEQRAKALHIPFSVDEIVGMPVDSFNSMLSRYYLTDLQVSLIRDIRRRGKNKVAAQNCRKRKLDIILNLEDDVCNLQAKKETLKREQAQCNKAINIMKQKLHDLYHDIFSRLRDDQGRPVNPNHYALQCTHDGSILIVPKELVASGHKKETQKGKRK

SEQ ID NO: 89 - protein, 207 aa, Homo sapiens
MSCTIEKILTDAKTLLERLREHDAAAESLVDQSAALHRRVAAMREAGTALPDQYQEDASDMKDMSKYKPHILLSQENTQIRDLQQENRELWISLEEHQDALELIMSKYRKQMLQLMVAKKAVDAEPVLKAHQSHSAEIESQIDRICEMGEVMRKAVQVDDDQFCKIQEKLAQLELENKELRELLSISSESLQARKENSMDTASQAIK

SEQ ID NO: 90 - protein, 1013 aa, Homo sapiens
MGLGTLSPRMLVWLVASGIVFYGELWVCAGLDYDYTFDGNEEDKTETIDYKDPCKAAVFWGDIALDDEDLNIFQIDRTIDLTQNPFGNLGHTTGGLGDHAMSKKRGALYQLIDRIRRIGFGLEQNNTVKGKVPLQFSGQNEKNRVPRAATSRTERIWPGGVIPYVIGGNFTGSQRAMFKQAMRHWEKHTCVTFIERSDEESYIVFTYRPCGCCSYVGRRGNGPQAISIGKNCDKFGIVVHELGHVIGFWHEHTRPDRDNHVTIIRENIQPGQEYNFLKMEPGEVNSLGERYDFDSIMHYARNTFSRGMFLDTILPSRDDNGIRPAIGQRTRLSKGDIAQARKLYRCPACGETLQESNGNLSSPGFPNGYPSYTHCIWRVSVTPGEKIVLNFTTMDLYKSSLCWYDYIEVRDGYWRKSPLLGRFCGDKLPEVLTSTDSRMWIEFRSSSNWVGKGFAAVYEAICGGEIRKNEGQIQSPNYPDDYRPMKECVWKITVSESYHVGLTFQSFEIERHDNCAYDYLEVRDGTSENSPLIGRFCGYDKPEDIRSTSNTLWMKFVSDGTVNKAGFAANFFKEEDECAKPDRGGCEQRCLNTLGSYQCACEPGYELGPDRRSCEAACGGLLTKLNGTITTPGWPKEYPPNKNCVWQVVAPTQYRISVKFEFFELEGNEVCKYDYVEIWSGLSSESKLHGKFCGAEVPEVITSQFNNMRIEFKSDNTVSKKGFKAHFFSDKDECSKDNGGCQHECVNTMGSYMCQCRNGFVLHDNKHDCKEAECEQKIHSPSGLITSPNWPDKYPSRKECTWEISATPGHRIKLAFSEFEIEQHQECAYDHLEVFDGETEKSPILGRLCGNKIPDPLVATGNKMFVRFVSDASVQRKGFQATHSTECGGRLKAESKPRDLYSHAQFGDNNYPGQVDCEWLLVSERGSRLELSFQTFEVEEEADCGYDYVELFDGLDSTAVGLGRFCGSGPPEEIYSIGDSVLIHFHTDDTINKKGFHIRYKSIRYPDTTHTKK

SEQ ID NO: 91 - protein, 201 aa, Homo sapiens
MGSGRRALSAVPAVLLVLTLPGLPVWAQNDTEPIVLEGKCLVVCDSNPATDSKGSSSSPLGISVRAANSKVAFSAVRSTNHEPSEMSNKTRIIYFDQILVNVGNFFTLESVFVAPRKGIYSFSFHVIKVYQSQTIQVNLMLNGKPVISAFAGDKDVTREAATNGVLLYLDKEDKVYLKLEKGNLVGGWQYSTFSGFLVFPL

SEQ ID NO: 92 - protein, 207 aa, Homo sapiens
MVATCLQVVGFVTSFVGWIGVIVTTSTNDWVVTCGYTIPTCRKLDELGSKGLWADCVMATGLYHCKPLVDILILPGYVQACRALMIAASVLGLPAILLLLTVLPCIRMGQEPGVAKYRRAQLAGVLLILLALCALVATIWFPVCAHRETTIVSFGYSLYAGWIGAVLCLVGGCVILCCAGDAQAFGENRFYYTAGSSSPTHAKSAHV

SEQ ID NO: 93 - protein, 244 aa, Homo sapiens
MNPVYSPVQPGAPYGNPKNMAYTGYPTAYPAAAPAYNPSLYPTNSPSYAPEFQFLHSAYATLLMKQAWPQNSSSCGTEGTFHLPVDTGTENRTYQASSAAFRYTAGTPYKVPPTQSNTAPPPYSPSPNPYQTAMYPIRSAYPQQNLYAQGAYYTQPVYAAQPHVIHHTTVVQPNSIPSAIYPAPVAAPRTNGVAMGMVAGTTMAMSAGTLLTTPQHTAIGAHPVSMPTYRAQGTPAYSYVPPHW

SEQ ID NO: 94 - protein, 430 aa, Homo sapiens
MKPSLLCRPLSCFLMLLPWPLATLTSTTLWQCPPGEEPDLDPGQGTLCRPCPPGTFSAAWGSSPCQPHARCSLWRRLEAQVGMATRDTLCGDCWPGWFGPWGVPRVPCQPCSWAPLGTHGCDEWGRRARRGVEVAAGASSGGETRQPGNGTRAGGPEETAAQYAVIAIVPVFCLMGLLGILVCNLLKRKGYHCTAHKEVGPGPGGGGSGINPAYRTEDANEDTIGVLVRLITEKKENAAALEELLKEYHSKQLVQTSHRPVSKLPPAPPNVPHICPHRHHLHTVQGLASLSGPCCSRCSQKKWPEVLLSPEAVAATTPVPSLLPNPTRVPKAGAKAGRQGEITILSVGRFRVARIPEQRTSSMVSEVKTITEAGPSWGDLPDSPQPGLPPEQQALLGSGGSRTKWLKPPAENKAEENRYVVRLSESNLVI

SEQ ID NO: 95 - protein, 824 aa, Homo sapiens
MTVLQEPVQAAIWQALNHYAYRDAVFLAERLYAEVHSEEALFLLATCYYRSGKAYKAYRLLKGHSCTTPQCKYLLAKCCVDLSKLAEGEQILSGGVFNKQKSHDDIVTEFGDSACFTLSLLGHVYCKTDRLAKGSECYQKSLSLNPFLWSPFESLCEIGEKPDPDQTFKFTSLQNFSNCLPNSCTTQVPNHSLSHRQPETVLTETPQDTIELNRLNLESSNSKYSLNTDSSVSYIDSAVISPDTVPLGTGTSILSKQVQNKPKTGRSLLGGPAALSPLTPSFGILPLETPSPGDGSYLQNYTNTPPVIDVPSTGAPSKKSVARIGQTGTKSVFSQSGNSREVTPILAQTQSSGPQTSTTPQVLSPTITSPPNALPRRSSRLFTSDSSTTKENSKKLKMKFPPKIPNRKTKSKTNKGGITQPNINDSLEITKLDSSIISEGKISTITPQIQAFNLQKAAAEGLMSLLREMGKGYLALCSYNCKEAINILSHLPSHHYNTGWVLCQIGRAYFELSEYMQAERIFSEVRRIENYRVEGMEIYSTTLWHLQKDVALSVLSKDLTDMDKNSPEAWCAAGNCFSLQREHDIAIKFFQRAIQVDPNYAYAYTLLGHEFVLTEELDKALACFRNAIRVNPRHYNAWYGLGMIYYKQEKFSLAEMHFQKALDINPQSSVLLCHIGVVQHALKKSEKALDTLNKAIVIDPKNPLCKFHRASVLFANEKYKSALQELEELKQIVPKESLVYFLIGKVYKKLGQTHLALMNFSWAMDLDPKGANNQIKEAIDKRYLPDDEEPITQEEQIMGTDESQESSMTDADDTQLHAAESDEF

SEQ ID NO: 96 - protein, 570 aa, Homo sapiens
MTLLWCVVSLYFYGILQSDASERCDDWGLDTMRQIQVFEDEPARIKCPLFEHFLKFNYSTAHSAGLTLIWYWTRQDRDLEEPINFRLPENRISKEKDVLWFRPTLLNDTGNYTCMLRNTTYCSKVAFPLEVVQKDSCFNSPMKLPVHKLYIEYGIQRITCPNVDGYFPSSVKPTITWYMGCYKIQNFNNVIPEGMNLSFLIALISNNGNYTCVVTYPENGRTFHLTRTLTVKVVGSPKNAVPPVIHSPNDHVVYEKEPGEELLIPCTVYFSFLMDSRNEVWWTIDGKKPDDITIDVTINESISHSRTEDETRTQILSIKKVTSEDLKRSYVCHARSAKGEVAKAAKVKQKVPAPRYTVELACGFGATVLLVVILIVVYHVYWLEMVLFYRAHFGTDETILDGKEYDIYVSYARNAEEEEFVLLTLRGVLENEFGYKLCIFDRDSLPGGIVTDETLSFIQKSRRLLVVLSPNYVLQGTQALLELKAGLENMASRGNINVILVQYKAVKETKVKELKRAKTVLTVIKWKGEKSKYPQGRFWKQLQVAMPVKKSPRRSSSDEQGLSYSSLKNV

SEQ ID NO: 97 - protein, 306 aa, Homo sapiens
MAAVDDLQFEEFGNAATSLTANPDATTVNIEDPGETPKHQPGSPRGSGREEDDELLGNDDSDKTELLAGQKKSSPFWTFEYYQTFFDVDTYQVFDRIKGSLLPIPGKNFVRLYIRSNPDLYGPFWICATLVFAIAISGNLSNFLIHLGEKTYHYVPEFRKVSIAATIIYAYAWLVPLALWGFLMWRNSKVMNIVSYSFLEIVCVYGYSLFIYIPTAILWIIPQKAVRWILVMIALGISGSLLAMTFWPAVREDNRRVALATIVTIVLLHMLLSVGCLAYFFDAPEMDHLPTTTATPNQTVAAAKSS

SEQ ID NO: 98 - protein, 626 aa, Homo sapiens
MVAPWRVSVRVCLSHLRCFELRQGLSLLRPSECPRDARLCWLLLGTLPKVVSLCGDVGEGAPDVLSRRRVRCSGAAGAGPAESLPRAGPLGGVFLHLRLWLRAGALLVKFFPLLLLYPLTYLAPSVSTLWLHLLLKATETSGPTYIKLGQWASTRRDLFSEAFCAQFSKLHVRVTPHPWTHTERFLRQAFGDDWGSILSFENREPVGSGCVAQVYKAYANTAFLETDSVQRLGRASCLPPFSHTGAVGGLRELFGYLGNGRKPPENLADQSFLERLLLPKADLVGSNAGVSRAQVPGHQPEATNLISVAVKVLHPGLLAQVHMDLLLMKIGSRVLGVLPGIKWLSLPEIVEEFEKLMVQQIDLRYEAQNLEHFQVNFRNVKAVKFPTPLRPFVTREVLVETYEESVPVSSYQQAGIPVDLKRKIARLGINMLLKMIFVDNFVHADLHPGNILVQGANGLSSSQEAQLQQADICDTLVVAVPSSLCPLRLVLLDAGIVAELQAPDLRNFRAVFMAVVMGQGQRVAELILHHARASECRDVEGFKTEMAMLVTQARKNTITLEKLHVSSLLSSVFKLLMTHKVKLESNFASIVFAIMVLEGLGRSLDPKLDILEAARPFLLTGPVCPP

SEQ ID NO: 99 - protein, 496 aa, Homo sapiens
MGTQKVTPALIFAITVATIGSFQFGYNTGVINAPEKIIKEFINKTLTDKGNAPPSEVLLTSLWSLSVAIFSVGGMIGSFSVGLFVNRFGRRNSMLIVNLLAVTGGCFMGLCKVAKSVEMLILGRLVIGLFCGLCTGFVPMYIGEISPTALRGAFGTLNQLGIVVGILVAQIFGLEFILGSEELWPLLLGFTILPAILQSAALPFCPESPRFLLINRKEEENAKQILQRLWGTQDVSQDIQEMKDESARMSQEKQVTVLELFRVSSYRQPIIISIVLQLSQQLSGINAVFYYSTGIFKDAGVQEPIYATIGAGVVNTIFTVVSLFLVERAGRRTLHMIGLGGMAFCSTLMTVSLLLKDNYNGMSFVCIGAILVFVAFFEIGPGPIPWFIVAELFSQGPRPAAMAVAGCSNWTSNFLVGLLFPSAAHYLGAYVFIIFTGFLITFLAFTFFKVPETRGRTFEDITRAFEGQAHGADRSGKDGVMEMNSIEPAKETTTNV

SEQ ID NO: 100 - protein, 863 aa, Homo sapiens
MARRSSFQSCQIISLFTFAVGVNICLGFTAHRIKRAEGWEEGPPTVLSDSPWTNISGSCKGRCFELQEAGPPDCRCDNLCKSYTSCCHDFDELCLKTARGWECTKDRCGEVRNEENACHCSEDCLARGDCCTNYQVVCKGESHWVDDDCEEIKAAECPAGFVRPPLIIFSVDGFRASYMKKGSKVMPNIEKLRSCGTHSPYMRPVYPTKTFPNLYTLATGLYPESHGIVGNSMYDPVFDATFHLRGREKFNHRWWGGQPLWITATKQGVKAGTFFWSVVIPHERRILTILQWLTLPDHERPSVYAFYSEQPDFSGHKYGPFGPEMTNPLREIDKIVGQLMDGLKQLKLHRCVNVIFVGDHGMEDVTCDRTEFLSNYLTNVDDITLVPGTLGRIRSKFSNNAKYDPKAIIANLTCKKPDQHFKPYLKQHLPKRLHYANNRRIEDIHLLVERRWHVARKPLDVYKKPSGKCFFQGDHGFDNKVNSMQTVFVGYGSTFKYKTKVPPFENIELYNVMCDLLGLKPAPNNGTHGSLNHLLRTNTFRPTMPEEVTRPNYPGIMYLQSDFDLGCTCDDKVEPKNKLDELNKRLHTKGSTEERHLLYGRPAVLYRTRYDILYHTDFESGYSEIFLMPLWTSYTVSKQAEVSSVPDHLTSCVRPDVRVSPSFSQNCLAYKNDKQMSYGFLFPPYLSSSPEAKYDAFLVTNMVPMYPAFKRVWNYFQRVLVKKYASERNGVNVISGPIFDYDYDGLHDTEDKIKQYVEGSSIPVPTHYYSIITSCLDFTQPADKCDGPLSVSSFILPHRPDNEESCNSSEDESKWVEELMKMHTARVRDIEHLTSLDFFRKTSRSYPEILTLKTYLHTYESEI

SEQ ID NO: 101 - protein, 359 aa, Homo sapiens
MTLESMMACCLSDEVKESKRINAEIEKQLRRDKRDARRELKLLLLGTGESGKSTFIKQMRIIHGAGYSEEDKRGFTKLVYQNIFTAMQAMIRAMETLKILYKYEQNKANALLIREVDVEKVTTFEHQYVSAIKTLWEDPGIQECYDRRREYQLSDSAKYYLTDVDRIATLGYLPTQQDVLRVRVPTTGIIEYPFDLENIIFRMVDVGGQRSERRKWIHCFENVTSIMFLVALSEYDQVLVESDNENRMEESKALFRTIITYPWFQNSSVILFLNKKDLLEDKILYSHLVDYFPEFDGPQRDAQAAREFILKMFVDLNPDSDKIIYSHFTCATDTENIRFVFAAVKDTILQLNLKEYNLV

SEQ ID NO: 102 - protein, 323 aa, Homo sapiens
MAAAALPAWLSLQSRARTLRAFSTAVYSATPVPTPSLPERTPGNERPPRRKALPPRTEKMAVDQDWPSVYPVAAPFKPSAVPLPVRMGYPVKKGVPMAKEGNLELLKIPNFLHLTPVAIKKHCEALKDFCTEWPAALDSDEKCEKHFPIEIDSTDYVSSGPSVRNPRARVVVLRVKLSSLNLDDHAKKKLIKLVGERYCKTTDVLTIKTDRCPLRRQNYDYAVYLLTVLYHESWNTEEWEKSKTEADMEEYIWENSSSERNILETLLQMKAAEKNMEINKEELLGTKEIEEYKKSVVSLKNEEENENSISQYKESVKRLLNVT

SEQ ID NO: 103 - protein, 585 aa, Homo sapiens
MAAVELEWIPETLYNTAISAVVDNYIRSRRDIRSLPENIQFDVYYKLYQQGRLCQLGSEFCELEVFAKVLRALDKRHLLHHCFQALMDHGVKVASVLAYSFSRRCSYIAESDAAVKEKAIQVGFVLGGFLSDAGWYSDAEKVFLSCLQLCTLHDEMLHWFRAVECCVRLLHVRNGNCKYHLGEETFKLAQTYMDKLSKHGQQANKAALYGELCALLFAKSHYDEAYKWCIEAMKEITAGLPVKVVVDVLRQASKACVVKREFKKAEQLIKHAVYLARDHFGSKHPKYSDTLLDYGFYLLNVDNICQSVAIYQAALDIRQSVFGGKNIHVATAHEDLAYSSYVHQYSSGKFDNALFHAERAIGIITHILPEDHLLLASSKRVKALILEEIAIDCHNKETEQRLLQEAHDLHLSSLQLAKKAFGEFNVQTAKHYGNLGRLYQSMRKFKEAEEMHIKAIQIKEQLLGQEDYEVALSVGHLASLYNYDMNQYENAEKLYLRSIAIGKKLFGEGYSGLEYDYRGLIKLYNSIGNYEKVFEYHNVLSNWNRLRDRQYSVTDALEDVSTSPQSTEEVVQSFLISQNVEGPSC

SEQ ID NO: 104 - protein, 328 aa, Homo sapiens
MGAAARLSAPRALVLWAALGAAAHIGPAPDPEDWWSYKDNLQGNFVPGPPFWGLVNAAWSLCAVGKRQSPVDVELKRVLYDPFLPPLRLSTGGEKLRGTLYNTGRHVSFLPAPRPVVNVSGGPLLYSHRLSELRLLFGARDGAGSEHQINHQGFSAEVQLIHFNQELYGNFSAASRGPNGLAILSLFVNVASTSNPFLSRLLNRDTITRISYKNDAYFLQDLSLELLFPESFGFITYQGSLSTPPCSETVTWILIDRALNITSLQMHSLRLLSQNPPSQIFQSLSGNSRPLQPLAHRALRGNRDPRHPERRCRGPNYRLHVDGVPHGR

SEQ ID NO: 105 - protein, 221 aa, Homo sapiens
MAAARPSLGRVLPGSSVLFLCDMQEKFRHNIAYFPQIVSVAARMLKVARLLEVPVMLTEQYPQGLGPTVPELGTEGLRPLAKTCFSMVPALQQELDSRPQLRSVLLCGIEAQACILDPRSYPGLALTSLYPQNTTLDLLDRGLQVHVVVDACSSRSQVDRLVALARMRQSGAFLSTSEGLILQLVGDAVHPQFKEIQKLIKEPAPDSGLLGLFQGQNSLLH

SEQ ID NO: 106 - protein, 550 aa, Homo sapiens
MSTSSLRRQMKNIVHNYSEAEIKVREATSNDPWGPSSSLMSEIADLTYNVVAFSEIMSMIWKRLNDHGKNWRHVYKAMTLMEYLIKTGSERVSQQCKENMYAVQTLKDFQYVDRDGKDQGVNVREKAKQLVALLRDEDRLREERAHALKTKEKLAQTATASSAAVGSGPPPEAEQAWPQSSGEEELQLQLALAMSKEEADQEERIRRGDDLRLQMAIEESKRETGGKEESSLMDLADVFTAPAPAPTTDPWGGPAPMAAAVPTAAPTSDPWGGPPVPPAADPWGGPAPTPASGDPWRPAAPAGPSVDPWGGTPAPAAGEGPTPDPWGSSDGGVPVSGPSASDPWTPAPAFSDPWGGSPAKPSTNGTTAGGFDTEPDEFSDFDRLRTALPTSGSSAGELELLAGEVPARSPGAFDMSGVRGSLAEAVGSPPPAATPTPTPPTRKTPESFLGPNAALVDLDSLVSRPGPTPPGAKASNPFLPGGGPATGPSVTNPFQPAPPATLTLNQLRLSPVPPVPGAPPTYISPLGGGPGLPPMMPPGPPAPNTNPFLL

SEQ ID NO: 107 - protein, 847 aa, Homo sapiens
MHLLGPWLLLLVLEYLAFSDSSKWVFEHPETLYAWEGACVWIPCTYRALDGDLESFILFHNPEYNKNTSKFDGTRLYESTKDGKVPSEQKRVQFLGDKNKNCTLSIHPVHLNDSGQLGLRMESKTEKWMERIHLNVSERPFPPHIQLPPEIQESQEVTLTCLLNFSCYGYPIQLQWLLEGVPMRQAAVTSTSLTIKSVFTRSELKFSPQWSHHGKIVTCQLQDADGKFLSNDTVQLNVKHTPKLEIKVTPSDAIVREGDSVTMTCEVSSSNPEYTTVSWLKDGTSLKKQNTFTLNLREVTKDQSGKYCCQVSNDVGPGRSEEVFLQVQYAPEPSTVQILHSPAVEGSQVEFLCMSLANPLPTNYTWYHNGKEMQGRTEEKVHIPKILPWHAGTYSCVAENILGTGQRGPGAELDVQYPPKKVTTVIQNPMPIREGDTVTLSCNYNSSNPSVTRYEWKPHGAWEEPSLGVLKIQNVGWDNTTIACAACNSWCSWASPVALNVQYAPRDVRVRKIKPLSEIHSGNSVSLQCDFSSSHPKEVQFFWEKNGRLLGKESQLNFDSISPEDAGSYSCWVNNSIGQTASKAWTLEVLYAPRRLRVSMSPGDQVMEGKSATLTCESDANPPVSHYTWFDWNNQSLPYHSQKLRLEPVKVQHSGAYWCQGTNSVGKGRSPLSTLTVYYSPETIGRRVAVGLGSCLAILILAICGLKLQRRWKRTQSQQGLQENSSGQSFFVRNKKVRRAPLSEGPHSLGCYNPMMEDGISYTTLRFPEMNIPRTGDAESSEMQRPPPDCDDTVTYSALHKRQVGDYENVIPDFPEDEGIHYSELIQFGVGERPQAQENVDYVILKH

SEQ ID NO: 108 - protein, 343 aa, Homo sapiens
MNIHRSTPITIARYGRSRNKTQDFEELSSIRSAEPSQSFSPNLGSPSPPETPNLSHCVSCIGKYLLLEPLEGDHVFRAVHLHSGEELVCKVFDISCYQESLAPCFCLSAHSNINQITEIILGETKAYVFFERSYGDMHSFVRTCKKLREEEAARLFYQIASAVAHCHDGGLVLRDLKLRKFIFKDEERTRVKLESLEDAYILRGDDDSLSDKHGCPAYVSPEILNTSGSYSGKAADVWSLGVMLYTMLVGRYPFHDIEPSSLFSKIRRGQFNIPETLSPKAKCLIRSILRREPSERLTSQEILDHPWFSTDFSVSNSAYGAKEVSDQLVPDVNMEENLDPFFN

SEQ ID NO: 109 - protein, 476 aa, Homo sapiens
MADSKEGVLPLTAASTAPISFGFTRTSARRRLADSGDGAGPSPEEKDFLKTVEGRELQSVKPQEAPKELVIPLIQNGHRRQPPARPPGPSTDTGALADGVVSQAVKELIAESKKSLEERENAGVDPTLAIPMIQKGCTPSGEGADSEPRAETVPEEANYEAVPVEAYGLAMLRGMGWKPGEGIGRTFNQVVKPRVNSLRPKGLGLGANLTEAQALTPTGPSRMPRPDEEQEKDKEDQPQGLVPGGAVVVLSGPHRGLYGKVEGLDPDNVRAMVRLAVGSRVVTVSEYYLRPVSQQEFDKNTLDLRQQNGTASSRKTLWNQELYIQQDNSERKRKHLPDRQDGPAAKSEKAAPRSQHWLHRDLRVRFVDNMYKGGQYYNTKMIIEDVLSPDTCVCRTDEGRVLEGLREDMLETLVPKAEGDRVMVVLGPQTGRVGHLLSRDRARSRALVQLPRENQVVELHYDAICQYMGPSDTDDD

SEQ ID NO: 110 - protein, 1485 aa, Homo sapiens
MAAPAQPKKIVAPTVSQINAEFVTQLACKYWAPHIKKKSPFDIKVIEDIYEKEIVKSRFAIRKIMLLEFSQYLENYLWMNYSPEVSSKAYLMSICCMVNEKFRENVPAWEIFKKKPDHFPFFFKHILKAALAETDGEFSLHEQTVLLLFLDHCFNSLEVDLIRSQVQQLISLPMWMGLQLARLELELKKTPKLRKFWNLIKKNDEKMDPEAREQAYQERRFLSQLIQKFISVLKSVPLSEPVTMDKVHYCERFIELMIDLEALLPTRRWFNTILDDSHLLVHCYLSNLVRREEDGHLFSQLLDMLKFYTGFEINDQTGNALTENEMTTIHYDRITSLQRAAFAHFPELYDFALSNVAEVDTRESLVKFFGPLSSNTLHQVASYLCLLPTLPKNEDTTFDKEFLLELLVSRHERRISQIQQLNQMPLYPTEKIIWDENIVPTEYYSGEGCLALPKLNLQFLTLHDYLLRNFNLFRLESTYEIRQDIEDSVSRMKPWQSEYGGVVFGGWARMAQPIVAFTVVEVAKPNIGENWPTRVRADVTINLNVRDHIKDEWEGLRKHDVCFLITVRPTKPYGTKFDRRRPFIEQVGLVYVRGCEIQGMLDDKGRVIEDGPEPRPNLRGESRTFRVFLDPNQYQQDMTNTIQNGAEDVYETFNIIMRRKPKENNFKAVLETIRNLMNTDCVVPDWLHDIILGYGDPSSAHYSKMPNQIATLDFNDTFLSIEHLKASFPGHNVKVTVEDPALQIPPFRITFPVRSGKGKKRKDADVEDEDTEEAKTLIVEPHVIPNRGPYPYNQPKRNTIQFTHTQIEAIRAGMQPGLTMVVGPPGTGKTDVAVQIISNIYHNFPEQRTLIVTHSNQALNQLFEKIMALDIDERHLLRLGHGEEELETEKDFSRYGRVNYVLARRIELLEEVKRLQKSLGVPGDASYTCETAGYFFLYQVMSRWEEYISKVKNKGSTLPDVTEVSTFFPFHEYFANAPQPIFKGRSYEEDMEIAEGCFRHIKKIFTQLEEFRASELLRSGLDRSKYLLVKEAKIIAMTCTHAALKRHDLVKLGFKYDNILMEEAAQILEIETFIPLLLQNPQDGFSRLKRWIMIGDHHQLPPVIKNMAFQKYSNMEQSLFTRFVRVGVPTVDLDAQGRARASLCNLYNWRYKNLGNLPHVQLLPEFSTANAGLLYDFQLINVEDFQGVGESEPNPYFYQNLGEAEYVVALFMYMCLLGYPADKISILTTYNGQKHLIRDIINRRCGNNPLIGRPNKVTTVDRFQGQQNDYILLSLVRTRAVGHLRDVRRLVVAMSRARLGLYIFARVSLFQNCFELTPAFSQLTARPLHLHIIPTEPFPTTRKNGERPSHEVQIIKNMPQMANFVYNMYMHLIQTTHHYHQTLLQLPPAMVEEGEEVQNQETELETEEEAMTVQADIIPSPTDTSCRQETPAFQTDTTPSETGATSTPEAIPALSETTPTVVGAVSAPAEANTPQDATSAPEETK

SEQ ID NO: 111 - protein, 99 aa, Homo sapiens
MWPLALVIASLTLALSGGVSQESSKVLNTNGTSGFLPGGYTCFPHSQPWQAALLVQGRLLCGGVLVHPKWVLTAAHCLKEGLKVYLGKHALGRVEAGEQ

SEQ ID NO: 112 - protein, 251 aa, Homo sapiens
MFLLLTALQVLAIAMTQSQEDENKIIGGHTCTRSSQPWQAALLAGPRRRFLCGGALLSGQWVITAAHCGRPILQVALGKHNLRRWEATQQVLRVVRQVTHPNYNSRTHDNDLMLLQLQQPARIGRAVRPIEVTQACASPGTSCRVSGWGTISSPIARYPASLQCVNINISPDEVCQKAYPRTITPGMVCAGVPQGGKDSCQGDSGGPLVCRGQLQGLVSWGMERCALPGYPGVYTNLCKYRSWIEETMRDK

SEQ ID NO: 113 - protein, 259 aa, Homo sapiens
MERKSPSGKKFRSKPQLARYLGGSMDLSTFDFRTGKMLMSKMNKSRQRVRYDSSNQVKGKPDLNTALPVRQTASIFKQPVTKITNHPSNKVKSDPQKAVDQPRQLFWEKKLSGLNAFDIAEELVKTMDLPKGLQGVGPGCTDETLLSAIASALHTSTMPITGQLSAAVEKNPGVWLNTTQPLCKAFMVTDEDIRKQEELVQQVRKRLEEALMADMLAHVEELARDGEAPLDKACAEDDDEEDEEEEEEEPDPDPEMEHV

SEQ ID NO: 114 - protein, 365 aa, Homo sapiens
MAKVAKDLNPGVKKMSLGQLQSARGVACLGCKGTCSGFEPHSWRKICKSCKCSQEDHCLTSDLEDDRKIGRLLMDSKYSTLTARVKGGDGIRIYKRNRMIMTNPIATGKDPTFDTITYEWAPPGVTQKLGLQYMELIPKEKQPVTGTEGAFYRRRQLMHQLPIYDQDPSRCRGLLENELKLMEEFVKQYKSEALGVGEVALPGQGGLPKEEGKQQEKPEGAETTAATTNGSLSDPSKEVEYVCELCKGAAPPDSPVVYSDRAGYNKQWHPTCFVCAKCSEPLVDLIYFWKDGAPWCGRHYCESLRPRCSGCDEIIFAEDYQRVEDLAWHRKHFVCEGCEQLLSGRAYIVTKGQLLCPTCSKSKRS

SEQ ID NO: 115 - protein, 418 aa, Homo sapiens
MEEIGILVEKAQDEIPALSVSRPQTGLSFLGPEPEDLEDLYSRYKKLQQELEFLEVQEEYIKDEQKNLKKEFLHAQEEVKRIQSIPLVIGQFLEAVDQNTAIVGSTTGSNYYVRILSTIDRELLKPNASVALHKHSNALVDVLPPEADSSIMMLTSDQKPDVMYADIGGMDIQKQEVREAVELPLTHFELYKQIGIDPPRGVLMYGPPGCGKTMLAKAVAHHTTAAFIRVVGSEFVQKYLGEGPRMVRDVFRLAKENAPAIIFIDEIDAIATKRFDAQTGADREVQRILLELLNQMDGFDQNVNVKVIMATNRADTLDPALLRPGRLDRKIEFPLPDRRQKRLIFSTITSKMNLSEEVDLEDYVARPDKISGADINSICQESGMLAVRENRYIVLAKDFEKAYKTVIKKDEQEHEFYK

SEQ ID NO: 116 - protein, 239 aa, Homo sapiens
MAYQSLRLEYLQIPPVSRAYTTACVLTTAAVQLELITPFQLYFNPELIFKHFQIWRLITNFLFFGPVGFNFLFNMIFLYRYCRMLEEGSFRGRTADFVFMFLFGGFLMTLFGLFVSLVFLGQAFTIMLVYVWSRRNPYVRMNFFGLLNFQAPFLPWVLMGFSLLLGNSIIVDLLGIAVGHIYFFLEDVFPNQPGGIRILKTPSILKAIFDTPDEDPNYNPLPEERPGGFAWGEGQRLGG

SEQ ID NO: 117 - protein, 547 aa, Homo sapiens
MATMVPSVLWPRACWTLLVCCLLTPGVQGQEFLLRVEPQNPVLSAGGSLFVNCSTDCPSSEKIALETSLSKELVASGMGWAAFNLSNVTGNSRILCSVYCNGSQITGSSNITVYRLPERVELAPLPPWQPVGQNFTLRCQVEDGSPRTSLTVVLLRWEEELSRQPAVEEPAEVTATVLASRDDHGAPFSCRTELDMQPQGLGLFVNTSAPRQLRTFVLPVTPPRLVAPRFLEVETSWPVDCTLDGLFPASEAQVYLALGDQMLNATVMNHGDTLTATATATARADQEGAREIVCNVTLGGERREARENLTVFSFLGPIVNLSEPTAHEGSTVTVSCMAGARVQVTLDGVPAAAPGQPAQLQLNATESDDGRSFFCSATLEVDGEFLHRNSSVQLRVLYGPKIDRATCPQHLKWKDKTRHVLQCQARGNPYPELRCLKEGSSREVPVGIPFFVNVTHNGTYQCQASSSRGKYTLVVVMDIEAGSSHFVPVFVAVLLTLGVVTIVLALMYVFREHQRSGSYHVREESTYLPLTSMQPTEAMGEEPSRAE

SEQ ID NO: 118 - protein, 665 aa, Homo sapiens
MAAGGSTQQRRREMAAASAAAISGAGRCRLSKIGATRRPPPARVRVAVRLRPFVDGTAGASDPPCVRGMDSCSLEIANWRNHQETLKYQFDAFYGERSTQQDIYAGSVQPILRHLLEGQNASVLAYGPTGAGKTHTMLGSPEQPGVIPRALMDLLQLTREEGAEGRPWALSVTMSYLEIYQEKVLDLLDPASGDLVIREDCRGNILIPGLSQKPISSFADFERHFLPASRNRTVGATRLNQRSSRSHAVLLVKVDQRERLAPFRQREGKLYLIDLAGSEDNRRTGNKGLRLKESGAINTSLFVLGKVVDALNQGLPRVPYRDSKLTRLLQDSLGGSAHSILIANIAPERRFYLDTVSALNFAARSKEVINRPFTNESLQPHALGPVKLSQKELLGPPEAKRARGPEEEEIGSPEPMAAPASASQKLSPLQKLSSMDPAMLERLLSLDRLLASQGSQGAPLLSTPKRERMVLMKTVEEKDLEIERLKTKQKELEAKMLAQKAEEKENHCPTMLRPLSHRTVTGAKPLKKAVVMPLQLIQEQAASPNAEIHILKNKGRKRKLESLDALEPEEKAEDCWELQISPELLAHGRQKILDLLNEGSARDLRSLQRIGPKKAQLIVGWRELHGPFSQVEDLERVEGITGKQMESFLKANILGLAAGQRCGAS

SEQ ID NO: 119 - protein, 526 aa, Homo sapiens
MGHLSAPLHRVRVPWQGLLLTASLLTFWNPPTTAQLTTESMPFNVAEGKEVLLLVHNLPQQLFGYSWYKGERVDGNRQIVGYAIGTQQATPGPANSGRETIYPNASLLIQNVTQNDTGFYTLQVIKSDLVNEEATGQFHVYPELPKPSISSNNSNPVEDKDAVAFTCEPETQDTTYLWWINNQSLPVSPRLQLSNGNRTLTLLSVTRNDTGPYECEIQNPVSANRSDPVTLNVTYGPDTPTISPSDTYYRPGANLSLSCYAASNPPAQYSWLINGTFQQSTQELFIPNITVNNSGSYTCHANNSVTGCNRTTVKTIIVTELSPVVAKPQIKASKTTVTGDKDSVNLTCSTNDTGISIRWFFKNQSLPSSERMKLSQGNTTLSINPVKREDAGTYWCEVFNPISKNQSDPIMLNVNYNALPQENGLSPGAIAGIVIGVVALVALIAVALACFLHFGKTGRASDQRDLTEHKPSVSNHTQDHSNDPPNKMNEVTYSTLNFEAQQPTQPTSASPSLTATEIIYSEVKKQ

SEQ ID NO: 120 - protein, 1430 aa, Homo sapiens
MSRPSSVSPRQPAPGGGGGGGPSPCGPGGGGRAKGLKDIRIDEEVKIAVNIALERFRYGDQREMEFPSSLTSTERAFIHRLSQSLGLVSKSKGKGANRYLTVKKKDGSETAHAMMTCNLTHNTKHAVRSLIQRFPVTNKERTELLPKTERGNVFAVEAENREMSKTSGRLNNGIPQIPVKRGESEFDSFRQSLPVFEKQEEIVKIIKENKVVLIVGETGSGKTTQIPQFLLDDCFKNGIPCRIFCTQPRRLAAIAVAERVAAERRERIGQTIGYQIRLESRVSPKTLLTFCTNGVLLRTLMAGDSTLSTVTHVIVDEVHERDRFSDFLLTKLRDLLQKHPTLKLILSSAALDVNLFIRYFGSCPVIYIQGRPFEVKEMFLEDILRTTGYTNKEMLKYKKEKQQEEKQQTTLTEWYSAQENSFKPESQRQRTVLNVTDEYDLLDDGGDAVFSQLTEKDVNCLEPWLIKEMDACLSDIWLHKDIDAFAQVFHLILTENVSVDYRHSETSATALMVAAGRGFASQVEQLISMGANVHSKASNGWMALDWAKHFGQTEIVDLLESYSATLEFGNLDESSLVQTNGSDLSAEDRELLKAYHHSFDDEKVDLDLIMHLLYNICHSCDAGAVLIFLPGYDEIVGLRDRILFDDKRFADSTHRYQVFMLHSNMQTSDQKKVLKNPPAGVRKIILSTNIAETSITVNDVVFVIDSGKVKEKSFDALNFVTMLKMVWISKASAIQRKGRAGRCRPGICFRLFSRLRFQNMLEFQTPELLRMPLQELCLHTKLLAPVNCPIADFLMKAPEPPPALIVRNAVQMLKTIDAMDTWEDLTELGYHLADLPVEPHLGKMVLCAVVLKCLDPILTIACTLAYRDPFVLPTQASQKRAAMLCRKRFTAGAFSDHMALLRAFQAWQKARSDGWERAFCEKNFLSQATMEIIIGMRTQLLGQLRASGFVRARGGGDIRDVNTNSENWAVVKAALVAGMYPNLVHVDRENLVLTGPKEKKVRFHPASVLSQPQYKKIPPANGQAAAIKALPTDWLIYDEMTRAHRIANIRCCSAVTPVTILVFCGPARLASNALQEPSSFRVDGIPNDSSDSEMEDKTTANLAALKLDEWLHFTLEPEAASLLLQLRQKWHSLFLRRMRAPSKPWSQVDEATIRAIIAVLSTEEQSAGLQQPSGIGQRPRPMSSEELPLASSWRSNNSRKSSADTEFSDECTTAERVLMKSPSPALHPPQKYKDRGILHPKRGTEDRSDQSSLKSTDSSSYPSPCASPSPPSSGKGSKSPSPRPNMPVRYFIMKSSNLRNLEISQQKGIWSTTPSNERKLNRAFWESSIVYLVFSVQGSGHFQGFSRMSSEIGREKSQDWGSAGLGGVFKVEWIRKESLPFQFAHHLLNPWNDNKKVQISRDGQELEPLVGEQLLQLWERLPLGEKNTTD

SEQ ID NO: 121 - protein, 479 aa, Homo sapiens
MAVLGVQLVVTLLTATLMHRLAPHCSFARWLLCNGSLFRYKHPSEEELRALAGKPRPRGRKERWANGLSEEKPLSVPRDAPFQLETCPLTTVDALVLRFFLEYQWFVDFAVYSGGVYLFTEAYYYMLGPAKETNIAVFWCLLTVTFSIKMFLTVTRLYFSAEEGGERSVCLTFAFLFLLLAMLVQVVREETLELGLEPGLASMTQNLEPLLKKQGWDWALPVAKLAIRVGLAVVGSVLGAFLTFPGLRLAQTHRDALTMSEDRPMLQFLLHTSFLSPLFILWLWTKPIARDFLHQPPFGETRFSLLSDSAFDSGRLWLLVVLCLLRLAVTRPHLQAYLCLAKARVEQLRREAGRIEAREIQQRVVRVYCYVTVVSLQYLTPLILTLNCTLLLKTLGGYSWGLGPAPLLSPDPSSASAAPIGSGEDEVQQTAARIAGALGGLLTPLFLRGVLAYLIWWTAACQLLASLFGLYFHQHLAGS

SEQ ID NO: 122 - protein, 870 aa, Homo sapiens
MNHLNVLAKALYDNVAESPDELSFRKGDIMTVLEQDTQGLDGWWLCSLHGRQGIVPGNRLKILVGMYDKKPAGPGPGPPATPAQPQPGLHAPAPPASQYTPMLPNTYQPQPDSVYLVPTPSKAQQGLYQVPGPSPQFQSPPAKQTSTFSKQTPHHPFPSPATDLYQVPPGPGGPAQDIYQVPPSAGMGHDIYQVPPSMDTRSWEGTKPPAKVVVPTRVGQGYVYEAAQPEQDEYDIPRHLLAPGPQDIYDVPPVRGLLPSQYGQEVYDTPPMAVKGPNGRDPLLEVYDVPPSVEKGLPPSNHHAVYDVPPSVSKDVPDGPLLREETYDVPPAFAKAKPFDPARTPLVLAAPPPDSPPAEDVYDVPPPAPDLYDVPPGLRRPGPGTLYDVPRERVLPPEVADGGVVDSGVYAVPPPAEREAPAEGKRLSASSTGSTRSSQSASSLEVAGPGREPLELEVAVEALARLQQGVSATVAHLLDLAGSAGATGSWRSPSEPQEPLVQDLQAAVAAVQSAVHELLEFARSAVGNAAHTSDRALHAKLSRQLQKMEDVHQTLVAHGQALDAGRGGSGATLEDLDRLVACSRAVPEDAKQLASFLHGNASLLFRRTKATAPGPEGGGTLHPNPTDKTSSIQSRPLPSPPKFTSQDSPDGQYENSEGGWMEDYDYVHLQGKEEFEKTQKELLEKGSITRQGKSQLELQQLKQFERLEQEVSRPIDHDLANWTPAQPLAPGRTGGLGPSDRQLLLFYLEQCEANLTTLTNAVDAFFTAVATNQPPKIFVAHSKFVILSAHKLVFIGDTLSRQAKAADVRSQVTHYSNLLCDLLRGIVATTKAAALQYPSPSAAQDMVERVKELGHSTQQFRRVLGQLAAA

SEQ ID NO: 123 - protein, 574 aa, Homo sapiens
MASDLESSLTSIDWLPQLTLRATIEKLGSASQAGPPGSSRKCSPGSPTDPNATLSKDEAAVHQDGKPRYSYATLITYAINSSPAKKMTLSEIYRWICDNFPYYKNAGIGWKNSIRHNLSLNKCFRKVPRPRDDPGKGSYWTIDTCPDISRKRRHPPDDDLSQDSPEQEASKSPRGGVAGSGEASLPPEGNPQMSLQSPTSIASYSQGTGSVDGGAVAAGASGRESAEGPPPLYNTNHDFKFSYSEINFQDLSWSFRNLYKSMLEKSSSSSQHGFSSLLGDIPPSNNYYMYQQQQPPPPQQQQQQQQPPQPPPQQSQPQQQQAPAQGPSAVGGAPPLHTPSTDGCTPPGGKQAGAEGYGPPPVMAMHPPPLQHGGYHPHQHHPHSHPAQQPPPPQPQAQGQAPINNTGFAFPSDWCSNIDSLKESFKMVNRLNWSSIEQSQFSELMESLRQAEQKNWTLDQHHIANLCDSLNHFLTQTGHVPPQGGTHRPPAPARIADSCALTSGKQESAMSQVNSYGHPQAPHLYPGPSPMYPIPTQDSAGYNRPAHHMVPRPSVPPPGANEEIPDDFDWDLIT

SEQ ID NO: 124 - protein, 455 aa, Homo sapiens
MGLSTVPDLLLPLVLLELLVGIYPSGVIGLVPHLGDREKRDSVCPQGKYIHPQNNSICCTKCHKGTYLYNDCPGPGQDTDCRECESGSFTASENHLRHCLSCSKCRKEMGQVEISSCTVDRDTVCGCRKNQYRHYWSENLFQCFNCSLCLNGTVHLSCQEKQNTVCTCHAGFFLRENECVSCSNCKKSLECTKLCLPQIENVKGTEDSGTTVLLPLVIFFGLCLLSLLFIGLMYRYQRWKSKLYSIVCGKSTPEKEGELEGTTTKPLAPNPSFSPTPGFTPTLGFSPVPSSTFTSSSTYTPGDCPNFAAPRREVAPPYQGADPILATALASDPIPNPLQKWEDSAHKPQSLDTDDPATLYAVVENVPPLRWKEFVRRLGLSDHEIDRLELQNGRCLREAQYSMLATWRRRTPRREATLELLGRVLRDMDLLGCLEDIEEALCGPAALPPAPSLLR

SEQ ID NO: 125 - protein, 731 aa, Homo sapiens
MSWFVDLAGKAEDLLNRVDQGAATALSRKDNASNIYSKNTDYTELHQQNTDLIYQTGPKSTYISSAADNIRNQKATILAGTANVKVGSRTPVEASHPVENASVPRPSSHFVRRKKSEPDDELLFDFLNSSQKEPTGRVEIRKEKGKTPVFQSSQTSSVSSVNPSVTTIKTIEENSFGSQTHEAASNSDSSHEGQEESSKENVSSNAACPDHTPTPNDDGKSHELSNLRLENQLLRNEVQSLNQEMASLLQRSKETQEELNKARARVEKWNADHSKSDRMTRGLRAQVDDLTEAVAAKDSQLAVLKVRLQEADQLLSTRTEALEALQSEKSRIMQDQSEGNSLQNQALQTFQERLHEADATLKREQESYKQMQSEFAARLNKVEMERQNLAEAITLAERKYSDEKKRVDELQQQVKLYKLNLESSKQELIDYKQKATRILQSKEKLINSLKEGSGFEGLDSSTASSMELEELRHEKEMQREEIQKLMGQIHQLRSELQDMEAQQVNEAESAREQLQDLHDQIAGQKASKQELETELERLKQEFHYIEEDLYRTKNTLQSRIKDRDEEIQKLRNQLTNKTLSNSSQSELENRLHQLTETLIQKQTMLESLSTEKNSLVFQLERLEQQMNSASGSSSNGSSINMSGIDNGEGTRLRNVPVLFNDTETNLAGMYGKVRKAASSIDQFSIRLGIFLRRYPIARVFVIIYMALLHLWVMIVLLTYTPEMHHDQPYGK

SEQ ID NO: 126 - protein, 3312 aa, Homo sapiens
MMARRPPWRGLGGRSTPILLLLLLSLFPLSQEELGGGGHQGWDPGLAATTGPRAHIGGGALALCPESSGVREDGGPGLGVREPIFVGLRGRRQSARNSRGPPEQPNEELGIEHGVQPLGSRERETGQGPGSVLYWRPEVSSCGRTGPLQRGSLSPGALSSGVPGSGNSSPLPSDFLIRHHGPKPVSSQRNAGTGSRKRVGTARCCGELWATGSKGQGERATTSGAERTAPRRNCLPGASGSGPELDSAPRTARTAPASGSAPRESRTAPEPAPKRMRSRGLFRCRFLPQRPGPRPPGLPARPEARKVTSANRARFRRAANRHPQFPQYNYQTLVPENEAAGTAVLRVVAQDPDAGEAGRLVYSLAALMNSRSLELFSIDPQSGLIRTAAALDRESMERHYLRVTAQDHGSPRLSATTMVAVTVADRNDHSPVFEQAQYRETLRENVEEGYPILQLRATDGDAPPNANLRYRFVGPPAARAAAAAAFEIDPRSGLISTSGRVDREHMESYELVVEASDQGQEPGPRSATVRVHITVLDENDNAPQFSEKRYVAQVREDVRPHTVVLRVTATDRDKDANGLVHYNIISGNSRGHFAIDSLTGEIQVVAPLDFEAEREYALRIRAQDAGRPPLSNNTGLASIQVVDINDHIPIFVSTPFQVSVLENAPLGHSVIHIQAVDADHGENARLEYSLTGVAPDTPFVINSATGWVSVSGPLDRESVEHYFFGVEARDHGSPPLSASASVTVTVLDVNDNRPEFTMKEYHLRLNEDAAVGTSVVSVTAVDRDANSAISYQITGGNTRNRFAISTQGGVGLVTLALPLDYKQERYFKLVLTASDRALHDHCYVHINITDANTHRPVFQSAHYSVSVNEDRPMGSTIVVISASDDDVGENARITYLLEDNLPQFRIDADSGAITLQAPLDYEDQVTYTLAITARDNGIPQKADTTYVEVMVNDVNDNAPQFVASHYTGLVSEDAPPFTSVLQISATDRDAHANGRVQYTFQNGEDGDGDFTIEPTSGIVRTVRRLDREAVSVYELTAYAVDRGVPPLRTPVSIQVMVQDVNDNAPVFPAEEFEVRVKENSIVGSVVAQITAVDPDEGPNAHIMYQIVEGNIPELFQMDIFSGELTALIDLDYEARQEYVIVVQATSAPLVSRATVHVRLVDQNDNSPVLNNFQILFNNYVSNRSDTFPSGIIGRIPAYDPDVSDHLFYSFERGNELQLLVVNQTSGELRLSRKLDNNRPLVASMLVTVTDGLHSVTAQCVLRVVIITEELLANSLTVRLENMWQERFLSPLLGRFLEGVAAVLATPAEDVFIFNIQNDTDVGGTVLNVSFSALAPRGAGAGAAGPWFSSEELQEQLYVRRAALAARSLLDVLPFDDNVCLREPCENYMKCVSVLRFDSSAPFLASASTLFRPIQPIAGLRCRCPPGFTGDFCETELDLCYSNPCRNGGACARREGGYTCVCRPRFTGEDCELDTEAGRCVPGVCRNGGTCTDAPNGGFRCQCPAGGAFEGPRCEVAARSFPPSSFVMFRGLRQRFHLTLSLSFATVQQSGLLFYNGRLNEKHDFLALELVAGQVRLTYSTGESNTVVSPTVPGGLSDGQWHTVHLRYYNKPRTDALGGAQGPSKDKVAVLSVDDCDVAVALQFGAEIGNYSCAAAGVQTSSKKSLDLTGPLLLGGVPNLPENFPVSHKDFIGCMRDLHIDGRRVDMAAFVANNGTMAGCQAKLHFCDSGPCKNSGFCSERWGSFSCDCPVGFGGKDCQLTMAHPHHFRGNGTLSWNFGSDMAVSVPWYLGLAFRTRATQGVLMQVQAGPHSTLLCQLDRGLLSVTVTRGSGRASHLLLDQVTVSDGRWHDLRLELQEEPGGRRGHHVLMVSLDFSLFQDTMAVGSELQGLKVKQLHVGGLPPGSAEEAPQGLVGCIQGVWLGSTPSGSPALLPPSHRVNAEPGCVVTNACASGPCPPHADCRDLWQTFSCTCQPGYYGPGCVDACLLNPCQNQGSCRHLPGAPHGYTCDCVGGYFGHHCEHRMDQQCPRGWWGSPTCGPCNCDVHKGFDPNCNKTNGQCHCKEFHYRPRGSDSCLPCDCYPVGSTSRSCAPHSGQCPCRPGALGRQCNSCDSPFAEVTASGCRVLYDACPKSLRSGVWWPQTKFGVLATVPCPRGALGAAVRLCDEAQGWLEPDLFNCTSPAFRELSLLLDGLELNKTALDTMEAKKLAQRLREVTGHTDHYFSQDVRVTARLLAHLLAFESHQQGFGLTATQDAHFNENLLWAGSALLAPETGDLWAALGQRAPGGSPGSAGLVRHLEEYAATLARNMELTYLNPMGLVTPNIMLSIDRMEHPSSPRGARRYPRYHSNLFRGQDAWDPHTHVLLPSQSPRPSPSEVLPTSSSIENSTTSSVVPPPAPPEPEPGISIIILLVYRTLGGLLPAQFQAERRGARLPQNPVMNSPVVSVAVFHGRNFLRGILESPISLEFRLLQTANRSKAICVQWDPPGLAEQHGVWTARDCELVHRNGSHARCRCSRTGTFGVLMDASPRERLEGDLELLAVFTHVVVAVSVAALVLTAAILLSLRSLKSNVRGIHANVAAALGVAELLFLLGIHRTHNQLVCTAVAILLHYFFLSTFAWLFVQGLHLYRMQVEPRNVDRGAMRFYHALGWGVPAVLLGLAVGLDPEGYGNPDFCWISVHEPLIWSFAGPVVLVIVMNGTMFLLAARTSCSTGQREAKKTSALTLRSSFLLLLLVSASWLFGLLAVNHSILAFHYLHAGLCGLQGLAVLLLFCVLNADARAAWMPACLGRKAAPEEARPAPGLGPGAYNNTALFEESGLIRITLGASTVSSVSSARSGRTQDQDSQRGRSYLRDNVLVRHGSAADHTDHSLQAHAGPTDLDVAMFHRDAGADSDSDSDLSLEEERSLSIPSSESEDNGRTRGRFQRPLCRAAQSERLLTHPKDVDGNDLLSYWPALGECEAAPCALQTWGSERRLGLDTSKDAANNNQPDPALTSGDETSLGRAQRQRKGILKNRLQYPLVPQTRGAPELSWCRAATLGHRAVPAASYGRIYAGGGTGSLSQPASRYSSREQLDLLLRRQLSRERLEEAPAPVLRPLSRPGSQECMDAAPGRLEPKDRGSTLPRRQPPRDYPGAMAGRFGSRDALDLGAPREWLSTLPPPRRTRDLDPQPPPLPLSPQRQLSRDPLLPSRPLDSLSRSSNSREQLDQVPSRHPSREALGPLPQLLRAREDSVSGPSHGPSTEQLDILSSILASFNSSALSSVQSSSTPLGPHTTATPSATASVLGPSTPRSATSHSISELSPDSEVPRSEGHS

SEQ ID NO: 127 - protein, 842 aa, Homo sapiens
MSRPLSDQEKRKQISVRGLAGVENVTELKKNFNRHLHFTLVKDRNVATPRDYYFALAHTVRDHLVGRWIRTQQHYYEKDPKRIYYLSLEFYMGRTLQNTMVNLALENACDEATYQLGLDMEELEEIEEDAGLGNGGLGRLAACFLDSMATLGLAAYGYGIRYEFGIFNQKISGGWQMEEADDWLRYGNPWEKARPEFTLPVHFYGHVEHTSQGAKWVDTQVVLAMPYDTPVPGYRNNVVNTMRLWSAKAPNDFNLKDFNVGGYIQAVLDRNLAENISRVLYPNDNFFEGKELRLKQEYFVVAATLQDIIRRFKSSKFGCRDPVRTNFDAFPDKVAIQLNDTHPSLAIPELMRILVDLERMDWDKAWDVTVRTCAYTNHTVLPEALERWPVHLLETLLPRHLQIIYEINQRFLNRVAAAFPGDVDRLRRMSLVEEGAVKRINMAHLCIAGSHAVNGVARIHSEILKKTIFKDFYELEPHKFQNKTNGITPRRWLVLCNPGLAEVIAERIGEDFISDLDQLRKLLSFVDDEAFIRDVAKVKQENKLKFAAYLEREYKVHINPNSLFDIQVKRIHEYKRQLLNCLHVITLYNRIKREPNKFFVPRTVMIGGKAAPGYHMAKMIIRLVTAIGDVVNHDPAVGDRLRVIFLENYRVSLAEKVIPAADLSEQISTAGTEASGTGNMKFMLNGALTIGTMDGANVEMAEEAGEENFFIFGMRVEDVDKLDQRGYNAQEYYDRIPELRQVIEQLSSGFFSPKQPDLFKDIVNMLMHHDRFKVFADYEDYIKCQEKVSALYKNPREWTRMVIRNIATSGKFSSDRTIAQYAREIWGVEPSRQRLPAPDEAI

SEQ ID NO: 128 - protein, 367 aa, Homo sapiens
MYPESTTGSPARLSLRQTGSPGMIYSTRYGSPKRQLQFYRNLGKSGLRVSCLGLGTWVTFGGQITDEMAEQLMTLAYDNGINLFDTAEVYAAGKAEVVLGNIIKKKGWRRSSLVITTKIFWGGKAETERGLSRKHIIEGLKASLERLQLEYVDVVFANRPDPNTPMEETVRAMTHVINQGMAMYWGTSRWSSMEIMEAYSVARQFNLTPPICEQAEYHMFQREKVEVQLPELFHKIGVGAMTWSPLACGIVSGKYDSGIPPYSRASLKGYQWLKDKILSEEGRRQQAKLKELQAIAERLGCTLPQLAIAWCLRNEGVSSVLLGASNADQLMENIGAIQVLPKLSSSIIHEIDSILGNKPYSKKDYRS

SEQ ID NO: 129 - protein, 87 aa, Homo sapiens
MKVLRAWLLCLLMLGLALRGAASRTHRHSMEIRTPDINPAWYASRGIRPVGRFGRRRATLGDVPKPGLRPRLTCFPLEGGAMSSQDG

SEQ ID NO: 130 - protein, 263 aa, Homo sapiens
MRPGAPGPLWPLPWGALAWAVGFVSSMGSGNPAPGGVCWLQQGQEATCSLVLQTDVTRAECCASGNIDTAWSNLTHPGNKINLLGFLGLVHCLPCKDSCDGVECGPGKACRMLGGRPRCECAPDCSGLPARLQVCGSDGATYRDECELRAARCRGHPDLSVMYRGRCRKSCEHVVCPRPQSCVVDQTGSAHCVVCRAAPCPVPSSPGQELCGNNNVTYISSCHMRQATCFLGRSIGVRHAGSCAGTPEEPPGGESAEEEENFV

SEQ ID NO: 131 - protein, 1005 aa, Homo sapiens
MAPARGRLPPALWVVTAAAAAATCVSAARGEVNLLDTSTIHGDWGWLTYPAHGWDSINEVDESFQPIHTYQVCNVMSPNQNNWLRTSWVPRDGARRVYAEIKFTLRDCNSMPGVLGTCKETFNLYYLESDRDLGASTQESQFLKIDTIAADESFTGADLGVRRLKLNTEVRSVGPLSKRGFYLAFQDIGACLAILSLRIYYKKCPAMVRNLAAFSEAVTGADSSSLVEVRGQCVRHSEERDTPKMYCSAEGEWLVPIGKCVCSAGYEERRDACVACELGFYKSAPGDQLCARCPPHSHSAAPAAQACHCDLSYYRAALDPPSSACTRPPSAPVNLISSVNGTSVTLEWAPPLDPGGRSDITYNAVCRRCPWALSRCEACGSGTRFVPQQTSLVQASLLVANLLAHMNYSFWIEAVNGVSDLSPEPRRAAVVNITTNQAAPSQVVVIRQERAGQTSVSLLWQEPEQPNGIILEYEIKYYEKDKEMQSYSTLKAVTTRATVSGLKPGTRYVFQVRARTSAGCGRFSQAMEVETGKPRPRYDTRTIVWICLTLITGLVVLLLLLICKKRHCGYSKAFQDSDEEKMHYQNGQAPPPVFLPLHHPPGKLPEPQFYAEPHTYEEPGRAGRSFTREIEASRIHIEKIIGSGDSGEVCYGRLRVPGQRDVPVAIKALKAGYTERQRRDFLSEASIMGQFDHPNIIRLEGVVTRGRLAMIVTEYMENGSLDTFLRTHDGQFTIMQLVGMLRGVGAGMRYLSDLGYVHRDLAARNVLVDSNLVCKVSDFGLSRVLEDDPDAAYTTTGGKIPIRWTAPEAIAFRTFSSASDVWSFGVVMWEVLAYGERPYWNMTNRDVISSVEEGYRLPAPMGCPHALHQLMLDCWHKDRAQRPRFSQIVSVLDALIRSPESLRATATVSRCPPPAFVRSCFDLRGGSGGGGGLTVGDWLDSIRMGRYRDHFAAGGYSSLGMVLRMNAQDVRALGITLMGHQKKILGSIQTMRAQLTSTQGPRRHL

SEQ ID NO: 132 - protein, 432 aa, Homo sapiens
MDEAVGDLKQALPCVAESPTVHVEVHQRGSSTAKKEDINLSVRKLLNRHNIVFGDYTWTEFDEPFLTRNVQSVSIIDTELKVKDSQPIDLSACTVALHIFQLNEDGPSSENLEEETENIIAANHWVLPAAEFHGLWDSLVYDVEVKSHLLDYVMTTLLFSDKNVNSNLITWNRVVLLHGPPGTGKTSLCKALAQKLTIRLSSRYRYGQLIEINSHSLFSKWFSESGKLVTKMFQKIQDLIDDKDALVFVLIDEVESLTAARNACRAGTEPSDAIRVVNAVLTQIDQIKRHSNVVILTTSNITEKIDVAFVDRADIKQYIGPPSAAAIFKIYLSCLEELMKCQIIYPRQQLLTLRELEMIGFIENNVSKLSLLLNDISRKSEGLSGRVLRKLPFLAHALYVQAPTVTIEGFLQALSLAVDKQFEERKKLAAYI

SEQ ID NO: 133 - protein, 535 aa, Homo sapiens
MKLWVSALLMAWFGVLSCVQAEFFTSIGHMTDLIYAEKELVQSLKEYILVEEAKLSKIKSWANKMEALTSKSAADAEGYLAHPVNAYKLVKRLNTDWPALEDLVLQDSAAGFIANLSVQRQFFPTDEDEIGAAKALMRLQDTYRLDPGTISRGELPGTKYQAMLSVDDCFGMGRSAYNEGDYYHTVLWMEQVLKQLDAGEEATTTKSQVLDYLSYAVFQLGDLHRALELTRRLLSLDPSHERAGGNLRYFEQLLEEEREKTLTNQTEAELATPEGIYERPVDYLPERDVYESLCRGEGVKLTPRRQKRLFCRYHHGNRAPQLLIAPFKEEDEWDSPHIVRYYDVMSDEEIERIKEIAKPKLARATVRDPKTGVLTVASYRVSKSSWLEEDDDPVVARVNRRMQHITGLTVKTAELLQVANYGVGGQYEPHFDFSRNDERDTFKHLGTGNRVATFLNYMSDVEAGGATVFPDLGAAIWPKKGTAVFWYNLLRSGEGDYRTRHAACPVLVGCKWVSNKWFHERGQEFLRPCGSTEVD

SEQ ID NO: 134 - protein, 221 aa, Homo sapiens
MAAAGARPVELGFAESAPAWRLRSEQFPSKVGGRPAWLGAAGLPGPQALACELCGRPLSFLLQVYAPLPGRPDAFHRCIFLFCCREQPCCAGLRVFRNQLPRKNDFYSYEPPSENPPPETGESVCLQLKSGAHLCRVCGCLGPKTCSRCHKAYYCSKEHQTLDWRLGHKQACAQPDHLDHIIPDHNFLFPEFEIVIETEDEIMPEVVEKEDYSEIIGSMDS

SEQ ID NO: 135 - protein, 472 aa, Homo sapiens
MTTCSRQFTSSSSMKGSCGIGGGIGGGSSRISSVLAGGSCRAPSTYGGGLSVSSSRFSSGGACGLGGGYGGGFSSSSSSFGSGFGGGYGGGLGAGLGGGFGGGFAGGDGLLVGSEKVTMQNLNDRLASYLDKVRALEEANADLEVKIRDWYQRQRPAEIKDYSPYFKTIEDLRNKILTATVDNANVLLQIDNARLAADDFRTKYETELNLRMSVEADINGLRRVLDELTLARADLEMQIESLKEELAYLKKNHEEEMNALRGQVGGDVNVEMDAAPGVDLSRILNEMRDQYEKMAEKNRKDAEEWFFTKTEELNREVATNSELVQSGKSEISELRRTMQNLEIELQSQLSMKASLENSLEETKGRYCMQLAQIQEMIGSVEEQLAQLRCEMEQQNQEYKILLDVKTRLEQEIATYRRLLEGEDAHLSSSQFSSGSQSSRDVTSSSRQIRTKVMDVHDGKVVSTHEQVLRTKN

SEQ ID NO: 136 - protein, 261 aa, Homo sapiens
MAAACRSVKGLVAVITGGASGLGLATAERLVGQGASAVLLDLPNSGGEAQAKKLGNNCVFAPADVTSEKDVQTALALAKGKFGRVDVAVNCAGIAVASKTYNLKKGQTHTLEDFQRVLDVNLMGTFNVIRLVAGEMGQNEPDQGGQRGVIINTASVAAFEGQVGQAAYSASKGGIVGMTLPIARDLAPIGIRVMTIAPGLFGTPLLTSLPEKVCNFLASQVPFPSRLGDPAEYAHLVQAIIENPFLNGEVIRLDGAIRMQP

SEQ ID NO: 137 - protein, 206 aa, Homo sapiens
MSGPGTAAVALLPAVLLALLAPWAGRGGAAAPTAPNGTLEAELERRWESLVALSLARLPVAAQPKEAAVQSGAGDYLLGIKRLRRLYCNVGIGFHLQALPDGRIGGAHADTRDSLLELSPVERGVVSIFGVASRFFVAMSSKGKLYGSPFFTDECTFKEILLPNNYNAYESYKYPGMFIALSKNGKTKKGNRVSPTMKVTHFLPRL

SEQ ID NO: 138 - protein, 380 aa, Homo sapiens
MRWLLLYYALCFSLSKASAHTVELNNMFGQIQSPGYPDSYPSDSEVTWNITVPDGFRIKLYFMHFNLESSYLCEYDYVKVETEDQVLATFCGRETTDTEQTPGQEVVLSPGSFMSITFRSDFSNEERFTGFDAHYMAVDVDECKEREDEELSCDHYCHNYIGGYYCSCRFGYILHTDNRTCRVECSDNLFTQRTGVITSPDFPNPYPKSSECLYTIELEEGFMVNLQFEDIFDIEDHPEVPCPYDYIKIKVGPKVLGPFCGEKAPEPISTQSHSVLILFHSDNSGENRGWRLSYRAAGNECPELQPPVHGKIEPSQAKYFFKDQVLVSCDTGYKVLKDNVEMDTFQIECLKDGTWSNKIPTCKKNEIDLESELKSEQVTE

SEQ ID NO: 139 - protein, 406 aa, Homo sapiens
MIHTNLKKKFSCCVLVFLLFAVICVWKEKKKGSYYDSFKLQTKEFQVLKSLGKLAMGSDSQSVSSSSTQDPHRGRQTLGSLRGLAKAKPEASFQVWNKDSSSKNLIPRLQKIWKNYLSMNKYKVSYKGPGPGIKFSAEALRCHLRDHVNVSMVEVTDFPFNTSEWEGYLPKESIRTKAGPWGRCAVVSSAGSLKSSQLGREIDDHDAVLRFNGAPTANFQQDVGTKTTIRLMNSQLVTTEKRFLKDSLYNEGILIVWDPSVYHSDIPKWYQNPDYNFFNNYKTYRKLHPNQPFYILKPQMPWELWDILQEISPEEIQPNPPSSGMLGIIIMMTLCDQVDIYEFLPSKRKTDVCYYYQKFFDSACTMGAYHPLLYEKNLVKHLNQGTDEDIYLLGKATLPGFRTIHC

SEQ ID NO: 140 - protein, 248 aa, Homo sapiens
MICTFLRAVQYTEKLHRSSAKRLLLPYIVLNKACLKTEPSLRCGLQYQKKTLRPRCILGVTQKTIWTQGPSPRKAKEDGSKQVSVHRSQRGGTAVPTSQKVKEAGRDFTYLIVVLFGISITGGLFYTIFKELFSSSSPSKIYGRALEKCRSHPEVIGVFGESVKGYGEVTRRGRRQHVRFTEYVKDGLKHTCVKFYIEGSEPGKQGTVYAQVKENPGSGEYDFRYIFVEIESYPRRTIIIEDNRSQDD

SEQ ID NO: 141 - protein, 458 aa, Homo sapiens
MAWASRLGLLLALLLPVVGASTPGTVVRLNKAALSYVSEIGKAPLQRALQVTVPHFLDWSGEALQPTRIRILNVHVPRLHLKFIAGFGVRLLAAANFTFKVFRAPEPLELTLPVELLADTRVTQSSIRTPVVSISACSLFSGHANEFDGSNSTSHALLVLVQKHIKAVLSNKLCLSISNLVQGVNVHLGTLIGLNPVGPESQIRYSMVSVPTVTSDYISLEVNAVLFLLGKPIILPTDATPFVLPRHVGTEGSMATVGLSQQLFDSALLLLQKAGALNLDITGQLRSDDNLLNTSALGRLIPEVARQFPEPMPVVLKVRLGATPVAMLHTNNATLRLQPFVEVLATASNSAFQSLFSLDVVVNLRLQLSVSKVKLQGTTSVLGDVQLTVASSNVGFIDTDQVRTLMGTVFEKPLLDHLNALLAMGIALPGVVNLHYVAPEIFVYEGYVVISSGLFYQS

SEQ ID NO: 142 - protein, 1221 aa, Homo sapiens
MLRSTGFFRAIDCPYWSGAPGGPCRRPYCHFRHRGARGSGAPGDGGEAPPAAGLGYDPYNPELPKPPAQRENGTLGLGEEPRPDVLELELVNQAIEAVRSEVELEQRRYRELLETTREHRSAEAPALAPRGPNASPTVGPDEDAFPLAFDYSPGSHGLLSPDAGYQPTPLAAPAEPGSKYSLASLDRGQGRGGGGGGALEYVPKAVSQPRRHSRPVPSGKYVVDNSRPPTDLEYDPLSNYSARHLSRASSRDERAAKRPRGSRGSEPYTPAPKKLCDPFGSCDARFSDSEDEAATVPGNEPTTASTPKARADPEIKATGQPPSKEGLEAEGGGLRETKETAVQCDVGDLQPPPAKPASPAQVQSSQDGGCPKEGKPKKKKTGAPPAPSCKDGAQGKDKTKDKGRGRPVEKPRADKKGPQASSPRRKAERPEGTKKKPSSATPVATSGKGRPDRPARRPSPTSGDSRPAAGRGPPRPLQLPDRKSTKAPSGKLVERKARSLDEGASQDAPKLKKRALSHADLFGDESEDEAAGPGVPSVWPSALPSLSSDSDSDSDSSLGFPEAQGPPKRLKASPPPSPAPSSSSSSSSSTSSAGADVDYSALEKEVDFDSDPMEECLRIFNESTSVKTEDRGRLARQPPKEEKSEEKGLSGLTTLFPGQKRRISHLSKQGQEVEPPRRGPAVPPARPPTAQEVCYLRAQQAQRASASLLQAPARLAEKSPSVHISAPGEKRRIAHIPNPRLAAAPTGAKRTLAASGSQSSNGPEPGGQQLKTRTLSGMASKTTTTIIPKRIAHSPSLQSLKKPIIPKEFGGKVPTVIRQRYLNLFIEECLKFCTSNQEAIEKALNEEKVAYDRSPSKNIYLNVAVNTLKKLRGLAPSAVPGLSKTSGRRVVSHEVVLGGRLAAKTSFSLSRPSSPRVEDLKGAALYSRLREYLLTQDQLKENGYPFPHPERPGGAIIFTAEEKRPKDSSCRTCCRCGTEYLVSSSGRCIRDEECYYHWGRLRRNRVAGGWETQYMCCSAAAGSVGCQVAKQHVQDGRKERLEGFVKTFEKELSGDTHPGIYALDCEMSYTTYGLELTRVTVVDTDVHVVYDTFVKPDNEIVDYNTRFSGVTEADLADTSVTLRDVQAVLLSMFSADTILIGHSLESDLLALKVIHSTVVDTSVLFPHRLGLPYKRSLRNLMADYLRQIIQDNVDGHSSSEDAGACMHLVIWKVREDAKTKR

SEQ ID NO: 143 - protein, 416 aa, Homo sapiens
MSTKQITCRYFMHGVCREGSQCLFSHDLANSKPSTICKYYQKGYCAYGTRCRYDHTRPSAAAGGAVGTMAHSVPSPAFHSPHPPSEVTASIVKTNSHEPGKREKRTLVLRDRNLSGMAERKTQPSMVSNPGSCSDPQPSPEMKPHSYLDAIRSGLDDVEASSSYSNEQQLCPYAAAGECRFGDACVYLHGEVCEICRLQVLHPFDPEQRKAHEKICMLTFEHEMEKAFAFQASQDKVCSICMEVILEKASASERRFGILSNCNHTYCLSCIRQWRCAKQFENPIIKSCPECRVISEFVIPSVYWVEDQNKKNELIEAFKQGMGKKACKYFEQGKGTCPFGSKCLYRHAYPDGRLAEPEKPRKQLSSQGTVRFFNSVRLWDFIENRESRHVPNNEDVDMTELGDLFMHLSGVESSEP

SEQ ID NO: 144 - protein, 931 aa, Homo sapiens
MAARDSDSEEDLVSYGTGLEPLEEGERPKKPIPLQDQTVRDEKGRYKRFHGAFSGGFSAGYFNTVGSKEGWTPSTFVSSRQNRADKSVLGPEDFMDEEDLSEFGIAPKAIVTTDDFASKTKDRIREKARQLAAATAPIPGATLLDDLITPAKLSVGFELLRKMGWKEGQGVGPRVKRRPRRQKPDPGVKIYGCALPPGSSEGSEGEDDDYLPDNVTFAPKDVTPVDFTPKDNVHGLAYKGLDPHQALFGTSGEHFNLFSGGSERAGDLGEIGLNKGRKLGISGQAFGVGALEEEDDDIYATETLSKYDTVLKDEEPGDGLYGWTAPRQYKNQKESEKDLRYVGKILDGFSLASKPLSSKKIYPPPELPRDYRPVHYFRPMVAATSENSHLLQVLSESAGKATPDPGTHSKHQLNASKRAELLGETPIQGSATSVLEFLSQKDKERIKEMKQATDLKAAQLKARSLAQNAQSSRAQLSPAAAAGHCSWNMALGGGTATLKASNFKPFAKDPEKQKRYDEFLVHMKQGQKDALERCLDPSMTEWERGRERDEFARAALLYASSHSTLSSRFTHAKEEDDSDQVEVPRDQENDVGDKQSAVKMKMFGKLTRDTFEWHPDKLLCKRFNVPDPYPDSTLVGLPRVKRDKYSVFNFLTLPETASLPTTQASSEKVSQHRGPDKSRKPSRWDTSKHEKKEDSISEFLSLARSKAEPPKQQSSPLVNKEEEHAPELSANQTVNKDVDAQAEGEGSRPSMDLFRAIFASSSDEKSSSSEDEQGDSEDDQAGSGEANFQSSQDTDLGETSSVAHALVPAPQEPPPSFPIQKMQIDEREEFGPRLPPVFCPNARQTLEVPQKEKHKKNKDKHKAKKEHRRKKEKKKKHRKHKHKGKQKNKKPEKSSSSESSDSSDSQSDEETADVSPQELLRRLKSLPLRRQ

SEQ ID NO: 145 - protein, 624 aa, Homo sapiens
MQPDPRPSGAGACCRFLPLQSQCPEGAGDAVMYASTECKAEVTPSQHGNRTFSYTLEDHTKQAFGIMNELRLSQQLCDVTLQVKYQDAPAAQFMAHKVVLASSSPVFKAMFTNGLREQGMEVVSIEGIHPKVMERLIEFAYTASISMGEKCVLHVMNGAVMYQIDSVVRACSDFLVQQLDPSNAIGIANFAEQIGCVELHQRAREYIYMHFGEVAKQEEFFNLSHCQLVTLISRDDLNVRCESEVFHACINWVKYDCEQRRFYVQALLRAVRCHSLTPNFLQMQLQKCEILQSDSRCKDYLVKIFEELTLHKPTQVMPCRAPKVGRLIYTAGGYFRQSLSYLEAYNPSDGTWLRLADLQVPRSGLAGCVVGGLLYAVGGRNNSPDGNTDSSALDCYNPMTNQWSPCAPMSVPRNRIGVGVIDGHIYAVGGSHGCIHHNSVERYEPERDEWHLVAPMLTRRIGVGVAVLNRLLYAVGGFDGTNRLNSAECYYPERNEWRMITAMNTIRSGAGVCVLHNCIYAAGGYDGQDQLNSVERYDVETETWTFVAPMKHRRSALGITVHQGRIYVLGGYDGHTFLDSVECYDPDTDTWSEVTRMTSGRSGVGVAVTMEPCRKQIDQQNCTC

SEQ ID NO: 146 - protein, 427 aa, Homo sapiens
MGAGATGRAMDGPRLLLLLLLGVSLGGAKEACPTGLYTHSGECCKACNLGEGVAQPCGANQTVCEPCLDSVTFSDVVSATEPCKPCTECVGLQSMSAPCVEADDAVCRCAYGYYQDETTGRCEACRVCEAGSGLVFSCQDKQNTVCEECPDGTYSDEANHVDPCLPCTVCEDTERQLRECTRWADAECEEIPGRWITRSTPPEGSDSTAPSTQEPEAPPEQDLIASTVAGVVTTVMGSSQPVVTRGTTDNLIPVYCSILAAVVVGLVAYIAFKRWNSCKQNKQGANSRPVNQTPPPEGEKLHSDSGISVDSQSLHDQQPHTQTASGQALKGDGGLYSSLPPAKREEVEKLLNGSAGDTWRHLAGELGYQPEHIDSFTHEACPVRALLASWATQDSATLDALLAALRRIQRADLVESLCSESTATSPV

SEQ ID NO: 147 - protein, 604 aa, Homo sapiens
MMRAVWEALAALAAVACLVGAVRGGPGLSMFAGQAAQPDPCSDENGHPRRCIPDFVNAAFGKDVRVSSTCGRPPARYCVVSERGEERLRSCHLCNASDPKKAHPPAFLTDLNNPHNLTCWQSENYLQFPHNVTLTLSLGKKFEVTYVSLQFCSPRPESMAIYKSMDYGRTWVPFQFYSTQCRKMYNRPHRAPITKQNEQEAVCTDSHTDMRPLSGGLIAFSTLDGRPSAHDFDNSPVLQDWVTATDIRVAFSRLHTFGDENEDDSELARDSYFYAVSDLQVGGRCKCNGHAARCVRDRDDSLVCDCRHNTAGPECDRCKPFHYDRPWQRATAREANECVACNCNLHARRCRFNMELYKLSGRKSGGVCLNCRHNTAGRHCHYCKEGYYRDMGKPITHRKACKACDCHPVGAAGKTCNQTTGQCPCKDGVTGITCNRCAKGYQQSRSPIAPCIKIPVAPPTTAASSVEEPEDCDSYCKASKGKLKINMKKYCKKDYAVQIHILKADKAGDWWKFTVNIISVYKQGTSRIRRGDQSLWIRSRDIACKCPKIKPLKKYLLLGNAEDSPDQSGIVADKSSLVIQWRDTWARRLRKFQQREKKGKCKKA

SEQ ID NO: 148 - protein, 298 aa, Homo sapiens
MAAAEPAVLALPNSGAGGAGAPSGTVPVLFCFSVFARPSSVPHGAGYELLIQKFLSLYGDQIDMHRKFVVQLFAEEWGQYVDLPKGFAVSERCKVRLVPLQIQLTTLGNLTPSSTVFFCCDMQERFRPAIKYFGDIISVGQRLLQGARILGIPVIVTEQYPKGLGSTVQEIDLTGVKLVLPKTKFSMVLPEVEAALAEIPGVRSVVLFGVETHVCIQQTALELVGRGVEVHIVADATSSRSMMDRMFALERLARTGIIVTTSEAVLLQLVADKDHPKFKEIQNLIKASAPESGLLSKV

SEQ ID NO: 149 - protein, 1431 aa, Homo sapiens
MDRRNDYGYRVPLFQGPLPPPGSLGLPFPPDIQTETTEEDSVLLMHTLLAATKDSLAMDPPVVNRPKKSKTKKAPIKTITKAAPAAPPVPAANEIATNKPKITWQALNLPVITQISQALPTTEVTNTQASSVTAQPKKANKMKRVTAKAAQGSQSPTGHEGGTIQLKSPLQVLKLPVISQNIHAPIANESASSQALITSIKPKKASKAKKAANKAIASATEVSLAATATHTATTQGQITNETASIHTTAASIRTKKASKARKTIAKVINTDTEHIEALNVTDAATRQIEASVVAIRPKKSKGKKAASRGPNSVSEISEAPLATQIVTNQALAATLRVKRGSRARKAATKARATESQTPNADQGAQAKIASAQTNVSALETQVAAAVQALADDYLAQLSLEPTTRTRGKRNRKSKHLNGDERSGSNYRRIPWGRRPAPPRDVAILQERANKLVKYLLVKDQTKIPIKRSDMLRDVIQEYDEYFPEIIERASYTLEKMFRVNLKEIDKQSSLYILISTQESSAGILGTTKDTPKLGLLMVILSVIFMNGNKASEAVIWEVLRKLGLRPGVRHSLFGEVRKLITDEFVKQKYLEYKRVPNSRPPEYEFFWGLRSYHETSKMKVLKFACRVQKKDPKDWAVQYREAVEMEVQAAAVAVAEAEARAEARAQMGIGEEAVAGPWNWDDMDIDCLTREELGDDAQAWSRFSFEIEARAQENADASTNVNFSRGASTRAGFSDGASISFNGAPSSSGGFSGGPGITFGVAPSTSASFSNTASISFGGTLSTSSSFSSAASISFGCAHSTSTSFSSEASISFGGMPCTSASFSGGVSSSFSGPLSTSATFSGGASSGFGGTLSTTAGFSGVLSTSTSFGSAPTTSTVFSSALSTSTGFGGILSTSVCFGGSPSSSGSFGGTLSTSICFGGSPCTSTGFGGTLSTSVSFGGSSSTSANFGGTLSTSICFDGSPSTGAGFGGALNTSASFGSVLNTSTGFGGAMSTSADFGGTLSTSVCFGGSPGTSVSFGSALNTNAGYGGAVSTNTDFGGTLSTSVCFGGSPSTSAGFGGALNTNASFGCAVSTSASFSGAVSTSACFSGAPITNPGFGGAFSTSAGFGGALSTAADFGGTPSNSIGFGAAPSTSVSFGGAHGTSLCFGGAPSTSLCFGSASNTNLCFGGPPSTSACFSGATSPSFCDGPSTSTGFSFGNGLSTNAGFGGGLNTSAGFGGGLGTSAGFSGGLSTSSGFDGGLGTSAGFGGGPGTSTGFGGGLGTSAGFSGGLGTSAGFGGGLVTSDGFGGGLGTNASFGSTLGTSAGFSGGLSTSDGFGSRPNASFDRGLSTIIGFGSGSNTSTGFTGEPSTSTGFSSGPSSIVGFSGGPSTGVGFCSGPSTSGFSGGPSTGAGFGGGPNTGAGFGGGPSTSAGFGSGAASLGACGFSYG

SEQ ID NO: 150 - protein, 582 aa, Homo sapiens
MSIETLLEAARFLEWQAQQQQRAREEQERLRLEQEREQEQKKANSLARLAHTLPVEEPRMEAPPLPLSPPAPPPAPPPPLATPAPLTVIPIPVVTNSPQPLPPPPPLPAAAQPLPLAPRQPALVGAPGLSIKEPAPLPSRPQVPTPAPLLPDSKATIPPNGSPKPLQPLPTPVLTIAPHPGVQPQLAPQQPPPPTLGTLKLAPAEEVKSSEQKKRPGGIGTREVHNKLEKNRRAHLKECFETLKRNIPNVDDKKTSNLSVLRTALRYIQSLKRKEKEYEHEMERLAREKIATQQRLAELKHELSQWMDVLEIDRVLRQTGQPEDDQASTSTASEGEDNIDEDMEEDRAGLGPPKLSHRPQPELLKSTLPPPSTTPAPLPPHPHPHPHSVALPPAHLPVQQQQPQQKTPLPAPPPPPAAPAQTLVPAPAHLVATAGGGSTVIAHTATTHASVIQTVNHVLQGPGGKHIAHIAPSAPSPAVQLAPATPPIGHITVHPATLNHVAHLGSQLPLYPQPVAVSHIAHTLSHQQVNGTAGLGPPATVMAKPAVGAQVVHHPQLVGQTVLNPVTMVTMPSFPVSTLKLA

SEQ ID NO: 151 - protein, 418 aa, Homo sapiens
MIHSLFLINSSGDIFLEKHWKSVVSRSVCDYFFEAQERATEAENVPPVIPTPHHYLLSVYRHKIFFVAVIQTEVPPLFVIEFLHRVVDTFQDYFGVCSEPVIKDNVVVVYEVLEEMLDNGFPLATESNILKELIKPPTILRTVVNTITGSTNVGDQLPTGQLSVVPWRRTGVKYTNNEAYFDVIEEIDAIIDKSGSTITAEIQGVIDACVKLTGMPDLTLSFMNPRLLDDVSFHPCVRFKRWESERILSFIPPDGNFRLLSYHVSAQNLVAIPVYVKHNISFRDSSSLGRFEITVGPKQTMGKTIEGVTVTSQMPKGVLNMSLTPSQGTHTFDPVTKMLSWDVGKINPQKLPSLKGTMSLQAGASKPDENPTINLQFKIQQLAISGLKVNRLDMYGEKYKPFKGIKYMTKAGKFQVRT

SEQ ID NO: 152 - protein, 233 aa, Homo sapiens
MVSMSFKRNRSDRFYSTRCCGCCHVRTGTIILGTWYMVVNLLMAILLTVEVTHPNSMPAVNIQYEVIGNYYSSERMADNACVLFAVSVLMFIISSMLVYGAISYQVGWLIPFFCYRLFDFVLSCLVAISSLTYLPRIKEYLDQLPDFPYKDDLLALDSSCLLFIVLVFFALFIIFKAYLINCVWNCYKYINNRNVPEIAVYPAFEAPPQYVLPTYEMAVKMPEKEPPPPYLPA

SEQ ID NO: 153 - protein, 754 aa, Homo sapiens
MLPGCIFLMILLIPQVKEKFILGVEGQQLVRPKKLPLIQKRDTGHTHDDDILKTYEEELLYEIKLNRKTLVLHLLRSREFLGSNYSETFYSMKGEAFTRHPQIMDHCFYQGSIVHEYDSAASISTCNGLRGFFRINDQRYLIEPVKYSDEGEHLVFKYNLRVPYGANYSCTELNFTRKTVPGDNESEEDSKIKGIHDEKYVELFIVADDTVYRRNGHPHNKLRNRIWGMVNFVNMIYKTLNIHVTLVGIEIWTHEDKIELYSNIETTLLRFSFWQEKILKTRKDFDHVVLLSGKWLYSHVQGISYPGGMCLPYYSTSIIKDLLPDTNIIANRMAHQLGHNLGMQHDEFPCTCPSGKCVMDSDGSIPALKFSKCSQNQYHQYLKDYKPTCMLNIPFPYNFHDFQFCGNKKLDEGEECDCGPAQECTNPCCDAHTCVLKPGFTCAEGECCESCQIKKAGSICRPAKDECDFPEMCTGHSPACPKDQFRVNGFPCKNSEGYCFMGKCPTREDQCSELFDDEAIESHDICYKMNTKGNKFGYCKNKENRFLPCEEKDVRCGKIYCTGGELSSLLGEDKTYHLKDPQKNATVKCKTIFLYHDSTDIGLVASGTKCGEGMVCNNGECLNMEKVYISTNCPSQCNENPVDGHGLQCHCEEGQAPVACEETLHVTNITILVVVLVLVIVGIGVLILLVRYRKCIKLKQVQSPPTETLGVENKGYFGDEQQIRTEPILPEIHFLNKPASKDSRGIADPNQSAK

SEQ ID NO: 154 - protein, 561 aa, Homo sapiens
MCGIWALFGSDDCLSVQCLSAMKIAHRGPDAFRFENVNGYTNCCFGFHRLAVVDPLFGMQPIRVKKYPYLWLCYNGEIYNHKKMQQHFEFEYQTKVDGEIILHLYDKGGIEQTICMLDGVFAFVLLDTANKKVFLGRDTYGVRPLFKAMTEDGFLAVCSEAKGLVTLKHSATPFLKVEPFLPGHYEVLDLKPNGKVASVEMVKYHHCRDVPLHALYDNVEKLFPGFEIETVKNNLRILFNNAVKKRLMTDRRIGCLLSGGLDSSLVAATLLKQLKEAQVQYPLQTFAIGMEDSPDLLAARKVADHIGSEHYEVLFNSEEGIQALDEVIFSLETYDITTVRASVGMYLISKYIRKNTDSVVIFSGEGSDELTQGYIYFHKAPSPEKAEEESERLLRELYLFDVLRADRTTAAHGLELRVPFLDHRFSSYYLSLPPEMRIPKNGIEKHLLRETFEDSNLIPKEILWRPKEAFSDGITSVKNSWFKILQEYVEHQVDDAMMANAAQKFPFNTPKTKEGYYYRQVFERHYPGRADWLSHYWMPKWINATDPSARTLTHYKSAVKA

SEQ ID NO: 155 - protein, 121 aa, Homo sapiens
MAPRPLLLLLLLLGGSAARPAPPRARRHSDGTFTSELSRLREGARLQRLLQGLVGKRSEQDAENSMAWTRLSAGLLCPSGSNMPILQAWMPLDGTWSPWLPPGPMVSEPAGAAAEGTLRPR

SEQ ID NO: 156 - protein, 968 aa, Homo sapiens
MAFANFRRILRLSTFEKRKSREYEHVRRDLDPNEVWEIVGELGDGAFGKVYKAKNKETGALAAAKVIETKSEEELEDYIVEIEILATCDHPYIVKLLGAYYHDGKLWIMIEFCPGGAVDAIMLELDRGLTEPQIQVVCRQMLEALNFLHSKRIIHRDLKAGNVLMTLEGDIRLADFGVSAKNLKTLQKRDSFIGTPYWMAPEVVMCETMKDTPYDYKADIWSLGITLIEMAQIEPPHHELNPMRVLLKIAKSDPPTLLTPSKWSVEFRDFLKIALDKNPETRPSAAQLLEHPFVSSITSNKALRELVAEAKAEVMEEIEDGRDEGEEEDAVDAASTLENHTQNSSEVSPPSLNADKPLEESPSTPLAPSQSQDSVNEPCSQPSGDRSLQTTSPPVVAPGNENGLAVPVPLRKSRPVSMDARIQVAQEKQVAEQGGDLSPAANRSQKASQSRPNSSALETLGGEKLANGSLEPPAQAAPGPSKRDSDCSSLCTSESMDYGTNLSTDLSLNKEMGSLSIKDPKLYKKTLKRTRKFVVDGVEVSITTSKIISEDEKKDEEMRFLRRQELRELRLLQKEEHRNQTQLSNKHELQLEQMHKRFEQEINAKKKFFDTELENLERQQKQQVEKMEQDHAVRRREEARRIRLEQDRDYTRFQEQLKLMKKEVKNEVEKLPRQQRKESMKQKMEEHTQKKQLLDRDFVAKQKEDLELAMKRLTTDNRREICDKERECLMKKQELLRDREAALWEMEEHQLQERHQLVKQQLKDQYFLQRHELLRKHEKEREQMQRYNQRMIEQLKVRQQQEKARLPKIQRSEGKTRMAMYKKSLHINGGGSAAEQREKIKQFSQQEEKRQKSERLQQQQKHENQMRDMLAQCESNMSELQQLQNEKCHLLVEHETQKLKALDESHNQNLKEWRDKLRPRKKALEEDLNQKKREQEMFFKLSEEAECPNPSTPSKAAKFFPYSSADAS

SEQ ID NO: 157 - protein, 1244 aa, Homo sapiens
MNNQKVVAVLLQECKQVLDQLLLEAPDVSEEDKSEDQRCRALLPSELRTLIQEAKEMKWPFVPEKWQYKQAVGPEDKTNLKDVIGAGLQQLLASLRASILARDCAAAAAIVFLVDRFLYGLDVSGKLLQVAKGLHKLQPATPIAPQVVIRQARISVNSGKLLKAEYILSSLISNNGATGTWLYRNESDKVLVQSVCIQIRGQILQKLGMWYEAAELIWASIVGYLALPQPDKKGLSTSLGILADIFVSMSKNDYEKFKNNPQINLSLLKEFDHHLLSAAEACKLAAAFSAYTPLFVLTAVNIRGTCLLSYSSSNDCPPELKNLHLCEAKEAFEIGLLTKRDDEPVTGKQELHSFVKAAFGLTTVHRRLHGETGTVHAASQLCKEAMGKLYNFSTSSRSQDREALSQEVMSVIAQVKEHLQVQSFSNVDDRSYVPESFECRLDKLILHGQGDFQKILDTYSQHHTSVCEVFESDCGNNKNEQKDAKTGVCITALKTEIKNIDTVSTTQEKPHCQRDTGISSSLMGKNVQRELRRGGRRNWTHSDAFRVSLDQDVETETEPSDYSNGEGAVFNKSLSGSQTSSAWSNLSGFSSSASWEEVNYHVDDRSARKEPGKEHLVDTQCSTALSEELENDREGRAMHSLHSQLHDLSLQEPNNDNLEPSQNQPQQQMPLTPFSPHNTPGIFLAPGAGLLEGAPEGIQEVRNMGPRNTSAHSRPSYRSASWSSDSGRPKNMGTHPSVQKEEAFEIIVEFPETNCDVKDRQGKEQGEEISERGAGPTFKASPSWVDPEGETAESTEDAPLDFHRVLHNSLGNISMLPCSSFTPNWPVQNPDSRKSGGPVAEQGIDPDASTVDEEGQLLDSMDVPCTNGHGSHRLCILRQPPGQRAETPNSSVSGNILFPVLSEDCTTTEEGNQPGNMLNCSQNSSSSSVWWLKSPAFSSGSSEGDSPWSYLNSSGSSWVSLPGKMRKEILEARTLQPDDFEKLLAGVRHDWLFQRLENTGVFKPSQLHRAHSALLLKYSKKSELWTAQETIVYLGDYLTVKKKGRQRNAFWVHHLHQEEILGRYVGKDYKEQKGLWHHFTDVERQMTAQHYVTEFNKRLYEQNIPTQIFYIPSTILLILEDKTIKGCISVEPYILGEFVKLSNNTKVVKTEYKATEYGLAYGHFSYEFSNHRDVVVDLQGWVTGNGKGLIYLTDPQIHSVDQKVFTTNFGKRGIFYFFNNQHVECNEICHRLSLTRPSMEKPCT

SEQ ID NO: 158 - protein, 225 aa, Homo sapiens
MARKKVRPRLIAELARRVRALREQLNRPRDSQLYAVDYETLTRPFSGRRLPVRAWADVRRESRLLQLLGRLPLFGLGRLVTRKSWLWQHDEPCYWRLTRVRPDYTAQNLDHGKAWGILTFKDASFSSSGKTESEAREIEHVMYHDWRLVPKHEEEAFTAFTPAPEDSLASVPYPPLLRAMIIAERQKNGDTSTEEPMLNVQRIRMEPWDYPAKQEDKGRAKGTPV

SEQ ID NO: 159 - protein, 354 aa, Homo sapiens
MPRRSLHAAAVLLLVILKEQPSSPAPVNGSKWTYFGPDGENSWSKKYPSCGGLLQSPIDLHSDILQYDASLTPLEFQGYNLSANKQFLLTNNGHSVKLNLPSDMHIQGLQSRYSATQLHLHWGNPNDPHGSEHTVSGQHFAAELHIVHYNSDLYPDASTASNKSEGLAVLAVLIEMGSFNPSYDKIFSHLQHVKYKGQEAFVPGFNIEELLPERTAEYYRYRGSLTTPPCNPTVLWTVFRNPVQISQEQLLALETALYCTHMDDPSPREMINNFRQVQKFDERLVYTSFSQVQVCTAAGLSLGIILSLALAGILGICIVVVVSIWLFRRKSIKKGDNKGVIYKPATKMETEAHA

SEQ ID NO: 160 - protein, 270 aa, Homo sapiens
MARFALTVVRHGETRFNKEKIIQGQGVDEPLSETGFKQAAAAGIFLNNVKFTHAFSSDLMRTKQTMHGILERSKFCKDMTVKYDSRLRERKYGVVEGKALSELRAMAKAAREECPVFTPPGGETLDQVKMRGIDFFEFLCQLILKEADQKEQFSQGSPSNCLETSLAEIFPLGKNHSSKVNSDSGIPGLAASVLVVSHGAYMRSLFDYFLTDLKCSLPATLSRSELMSVTPNTGMSLFIINFEEGREVKPTVQCICMNLQDHLNGLTETR

SEQ ID NO: 161 - protein, 423 aa, Homo sapiens
MKLCSLAVLVPIVLFCEQHVFAFQSGQVLAALPRTSRQVQVLQNLTTTYEIVLWQPVTADLIVKKKQVHFFVNASDVDNVKAHLNVSGIPCSVLLADVEDLIQQQISNDTVSPRASASYYEQYHSLNEIYSWIEFITERHPDMLTKIHIGSSFEKYPLYVLKVSGKEQAAKNAIWIDCGIHAREWISPAFCLWFIGHITQFYGIIGQYTNLLRLVDFYVMPVVNVDGYDYSWKKNRMWRKNRSFYANNHCIGTDLNRNFASKHWCEEGASSSSCSETYCGLYPESEPEVKAVASFLRRNINQIKAYISMHSYSQHIVFPYSYTRSKSKDHEELSLVASEAVRAIEKISKNTRYTHGHGSETLYLAPGGGDDWIYDLGIKYSFTIELRDTGTYGFLLPERYIKPTCREAFAAVSKIAWHVIRNV

SEQ ID NO: 162 - protein, 1512 aa, Homo sapiens
MPSSSDTALGGGGGLSWAEKKLEERRKRRRFLSPQQPPLLLPLLQPQLLQPPPPPPPLLFLAAPGTAAAAAAAAAASSSCFSPGPPLEVKRLARGKRRAGGRQKRRRGPRAGQEAEKRRVFSLPQPQQDGGGGASSGGGVTPLVEYEDVSSQSEQGLLLGGASAATAATAAGGTGGSGGSPASSSGTQRRGEGSERRPRRDRRSSSGRSKERHREHRRRDGQRGGSEASKSRSRHSHSGEERAEVAKSGSSSSSGGRRKSASATSSSSSSRKDRDSKAHRSRTKSSKEPPSAYKEPPKAYREDKTEPKAYRRRRSLSPLGGRDDSPVSHRASQSLRSRKSPSPAGGGSSPYSRRLPRSPSPYSRRRSPSYSRHSSYERGGDVSPSPYSSSSWRRSRSPYSPVLRRSGKSRSRSPYSSRHSRSRSRHRLSRSRSRHSSISPSTLTLKSSLAAELNKNKKARAAEAARAAEAAKAAEATKAAEAAAKAAKASNTSTPTKGNTETSASASQTNHVKDVKKIKIEHAPSPSSGGTLKNDKAKTKPPLQVTKVENNLIVDKATKKAVIVGKESKSAATKEESVSLKEKTKPLTPSIGAKEKEQHVALVTSTLPPLPLPPMLPEDKEADSLRGNISVKAVKKEVEKKLRCLLADLPLPPELPGGDDLSKSPEEKKTATQLHSKRRPKICGPRYGETKEKDIDWGKRCVDKFDIIGIIGEGTYGQVYKARDKDTGEMVALKKVRLDNEKEGFPITAIREIKILRQLTHQSIINMKEIVTDKEDALDFKKDKGAFYLVFEYMDHDLMGLLESGLVHFNENHIKSFMRQLMEGLDYCHKKNFLHRDIKCSNILLNNRGQIKLADFGLARLYSSEESRPYTNKVITLWYRPPELLLGEERYTPAIDVWSCGCILGELFTKKPIFQANQELAQLELISRICGSPCPAVWPDVIKLPYFNTMKPKKQYRRKLREEFVFIPAAALDLFDYMLALDPSKRCTAEQALQCEFLRDVEPSKMPPPDLPLWQDCHELWSKKRRRQKQMGMTDDVSTIKAPRKDLSLGLDDSRTNTPQGVLPSSQLKSQGSSNVAPVKTGPGQHLNHSELAILLNLLQSKTSVNMADFVQVLNIKVNSETQQQLNKINLPAGILATGEKQTDPSTPQQESSKPLGGIQPSSQTIQPKVETDAAQAAVQSAFAVLLTQLIKAQQSKQKDVLLEERENGSGHEASLQLRPPPEPSTPVSGQDDLIQHQDMRILELTPEPDRPRILPPDQRPPEPPEPPPVTEEDLDYRTENQHVPTTSSSLTDPHAGVKAALLQLLAQHQPQDDPKREGGIDYQAGDTYVSTSDYKDNFGSSSFSSAPYVSNDGLGSSSAPPLERRSFIGNSDIQSLDNYSTASSHSGGPPQPSAFSESFPSSVAGYGDIYLNAGPMLFSGDKDHRFEYSHGPIAVLANSSDPSTGPESTHPLPAKMHNYNYGGNLQENPSGPSLMHGQTWTSPAQGPGYSQGYRGHISTSTGRGRGRGLPY

SEQ ID NO: 163 - protein, 515 aa, Homo sapiens
MSTIAAFYGGKSILITGATGFLGKVLMEKLFRTSPDLKVIYILVRPKAGQTLQQRVFQILDSKLFEKVKEVCPNVHEKIRAIYADLNQNDFAISKEDMQELLSCTNIIFHCAATVRFDDTLRHAVQLNVTATRQLLLMASQMPKLEAFIHISTAYSNCNLKHIDEVIYPCPVEPKKIIDSLEWLDDAIIDEITPKLIRDWPNIYTYTKALGEMVVQQESRNLNIAIIRPSIVGATWQEPFPGWVDNINGPNGIIIATGKGFLRAIKATPMAVADVIPVDTVVNLMLAVGWYTAVHRPKSTLVYHITSGNMNPCNWHKMGVQVLATFEKIPFERPFRRPNANFTSNSFTSQYWNAVSHRAPAIIYDCYLRLTGRKPRMTKLMNRLLRTVSMLEYFINRSWEWSTYNTEMLMSELSPEDQRVFNFDVRQLNWLEYIENYVLGVKKYLLKEDMAGIPKAKQRLKRLRNIHYLFNTALFLIAWRLLIARSQMARNVWFFIVSFCYKFLSYFRASSTLKV

SEQ ID NO: 164 - protein, 370 aa, Homo sapiens
MAFRRRTKSYPLFSQEFVIHNHADIGFCLVLCVLIGLMFEVTAKTAFLFILPQYNISVPTADSETVHYHYGPKDLVTILFYIFITIILHAVVQEYILDKISKRLHLSKVKHSKFNESGQLVVFHFTSVIWCFYVVVTEGYLTNPRSLWEDYPHVHLPFQVKFFYLCQLAYWLHALPELYFQKVRKEEIPRQLQYICLYLVHIAGAYLLNLSRLGLILLLLQYSTEFLFHTARLFYFADENNEKLFSAWAAVFGVTRLFILTLAVLAIGFGLARMENQAFDPEKGNFNTLFCRLCVLLLVCAAQAWLMWRFIHSQLRHWREYWNEQSAKRRVPATPRLPARLIKRESGYHENGVVKAENGTSPRTKKLKSP

SEQ ID NO: 165 - protein, 129 aa, Homo sapiens
MSFPKYKPSSLRTLPETLDPAEYNISPETRRAQAERLAIRAQLKREYLLQYNDPNRRGLIENPALLRWAYARTINVYPNFRPTPKNSLMGALCGFGPLIFIYYIIKTERDRKEKLIQEGKLDRTFHLSY

SEQ ID NO: 166 - protein, 1181 aa, Homo sapiens
MAAVQVVGSWPSVQPREAPREAIPERGNGFRLLSARLCALRPDDSSSARTEIHLLFDQLISENYSEGSGVAPEDVSALLVQACRLVPLNQNHLVSKVSQLIHHLLNRLQVIVDEQHLDFLLAYTISAIHQCSSWTHREILQALAALVYCNGSKCQKYLPELLGNTGLLMKLSDLAQSDPEVRRAAVHCMANLCLSVPGQPYLEEPYQNVCFQAFLTILQSPKSSDMDDITFCMLLQNALKGIQSLLNGGRMKLTQTDELGALLAVLKKFMFHGLPGLNIEMPTVLYPTPLPQYDGRTPIKPQQSESSASRPTLNKKKKSKVKPKKIQQGEEEEKESSGEIEAAPVTGTGRVNLHEGNTWCPSSLGVQSLPLDGSGAAEKDGVSSSFSSSSWKRVSSSESDFSDAEGGMQSKMRSYQAKVRQGALVCFLSTIKSIEKKVLYGYWSAFIPDTPELGSPQSVSLMTLTLKDPSPKTRACALQVLSAILEGSKQFLSVAEDTSDHRRAFTPFSVMIACSIRELHRCLLLALVAESSSQTVTQIIKCLANLVSNAPYDRLKLSLLTKVWNQIKPYIRHKDVNVRVSSLTLLGAIVSTHAPLPEVQLLLQQPCSSGLGNSNSATPHLSPPDWWKKAPAGPSLEETSVSSPKGSSEPCWLIRLCISIVVLPKEDSCSGSDAGSAAGSTYEPSPMRLEALQVLTLLARGYFSMTQAYLMELGEVICKCMGEADPSIQLHGAKLLEELGTGLIQQYKPDSTAAPDQRAPVFLVVMFWTMMLNGPLPRALQNSEHPTLQASACDALSSILPEAFSNLPNDRQMLCITVLLGLNDSKNRLVKAATSRALGVYVLFPCLRQDVIFVADAANAILMSLEDKSLNVRAKAAWSLGNLTDTLIVNMETPDPSFQEEFSGLLLLKMLRSAIEASKDKDKVKSNAVRALGNLLHFLQPSHIEKPTFAEIIEESIQALISTVLTEAAMKVRWNACYAMGNVFKNPALPLGTAPWTSQAYNALTSVVTSCKNFKVRIRSAAALSVPGKREQYGSVDQYARIWNALVTALQKSEDTIDFLEFKYCVSLRTQICQALIHLLSLASASDLPCMKETLELSGNMVQSYILQFLKSGAEGDDTGAPHSPQERDQMVRMALKHMGSIQAPTGDTARRAIMGFLEEILAVCFDSSGSQGALPGLTNQ

SEQ ID NO: 167 - protein, 483 aa, Homo sapiens
MEEGGGGVRSLVPGGPVLLVLCGLLEASGGGRALPQLSDDIPFRVNWPGTEFSLPTTGVLYKEDNYVIMTTAHKEKYKCILPLVTSGDEEEEKDYKGPNPRELLEPLFKQSSCSYRIESYWTYEVCHGKHIRQYHEEKETGQKINIHEYYLGNMLAKNLLFEKEREAEEKEKSNEIPTKNIEGQMTPYYPVGMGNGTPCSLKQNRPRSSTVMYICHPESKHEILSVAEVTTCEYEVVILTPLLCSHPKYRFRASPVNDIFCQSLPGSPFKPLTLRQLEQQEEILRVPFRRNKEEDLQSTKEERFPAIHKSIAIGSQPVLTVGTTHISKLTDDQLIKEFLSGSYCFRGGVGWWKYEFCYGKHVHQYHEDKDSGKTSVVVGTWNQEEHIEWAKKNTARAYHLQDDGTQTVRMVSHFYGNGDICDITDKPRQVTVKLKCKESDSPHAVTVYMLEPHSCQYILGVESPVICKILDTADENGLLSLPN

SEQ ID NO: 168 - protein, 709 aa, Homo sapiens
MSFPKAPLKRFNDPSGCAPSPGAYDVKTLEVLKGPVSFQKSQRFKQQKESKQNLNVDKDTTLPASARKVKSSESKIRVLLQERGAQDRRIQDLETELEKMEARLNAALREKTSLSANNATLEKQLIELTRTNELLKSKFSENGNQKNLRILSLELMKLRNKRETKMRGMMAKQEGMEMKLQVTQRSLEESQGKIAQLEGKLVSIEKEKIDEKSETEKLLEYIEEISCASDQVEKYKLDIAQLEENLKEKNDEILSLKQSLEENIVILSKQVEDLNVKCQLLEKEKEDHVNRNREHNENLNAEMQNLKQKFILEQQEREKLQQKELQIDSLLQQEKELSSSLHQKLCSFQEEMVKEKNLFEEELKQTLDELDKLQQKEEQAERLVKQLEEEAKSRAEELKLLEEKLKGKEAELEKSSAAHTQATLLLQEKYDSMVQSLEDVTAQFESYKALTASEIEDLKLENSSLQEKAAKAGKNAEDVQHQILATESSNQEYVRMLLDLQTKSALKETEIKEITVSFLQKITDLQNQLKQQEEDFRKQLEDEEGRKAEKENTTAELTEEINKWRLLYEELYNKTKPFQLQLDAFEVEKQALLNEHGAAQEQLNKIRDSYAKLLGHQNLKQKIKHVVKLKDENSQLKSEVSKLRCQLAKKKQSETKLQEELNKVLGIKHFDPSKAFHHESKENFALKTPLKEGNTNCYRAPMECQESWK

SEQ ID NO: 169 - protein, 299 aa, Homo sapiens
MELLSALSLGELALSFSRVPLFPVFDLSYFIVSILYLKYEPGAVELSRRHPIASWLCAMLHCFGSYILADLLLGEPLIDYFSNNSSILLASAVWYLIFFCPLDLFYKCVCFLPVKLIFVAMKEVVRVRKIAVGIHHAHHHYHHGWFVMIATGWVKGSGVALMSNFEQLLRGVWKPETNEILHMSFPTKASLYGAILFTLQQTRWLPVSKASLIFIFTLFMVSCKVFLTATHSHSSPFDALEGYICPVLFGSACGGDHHHDNHGGSHSGGGPGAQHSAMPAKSKEELSEGSRKKKAKKAD

SEQ ID NO: 170 - protein, 44 aa, Homo sapiens
MARAMAAAWPLLLVALLVLSWPPPGTGAQHGGDACVTADLGAAW

SEQ ID NO: 171 - protein, 396 aa, Homo sapiens
MTTLVLDNGAYNAKIGYSHENVSVIPNCQFRSKTARLKTFTANQIDEIKDPSGLFYILPFQKGYLVNWDVQRQVWDYLFGKEMYQVDFLDTNIIITEPYFNFTSIQESMNEILFEEYQFQAVLRVNAGALSAHRYFRDNPSELCCIIVDSGYSFTHIVPYCRSKKKKEAIIRINVGGKLLTNHLKEIISYRQLHVMDETHVINQVKEDVCYVSQDFYRDMDIAKLKGEENTVMIDYVLPDFSTIKKGFCKPREEMVLSGKYKSGEQILRLANERFAVPEILFNPSDIGIQEMGIPEAIVYSIQNLPEEMQPHFFKNIVLTGGNSLFPGFRDRVYSEVRCLTPTDYDVSVVLPENPITYAWEGGKLISENDDFEDMVVTREDYEENGHSVCEEKFDI

SEQ ID NO: 172 - protein, 361 aa, Homo sapiens
MFSSVAHLARANPFNTPHLQLVHDGLGDLRSSSPGPTGQPRRPRNLAAAAVEEYSCEFGSAKYYALCGFGGVLSCGLTHTAVVPLDLVKCRMQVDPQKYKGIFNGFSVTLKEDGVRGLAKGWAPTFLGYSMQGLCKFGFYEVFKVLYSNMLGEENTYLWRTSLYLAASASAEFFADIALAPMEAAKVRIQTQPGYANTLRDAAPKMYKEEGLKAFYKGVAPLWMRQIPYTMMKFACFERTVEALYKFVVPKPRSECSKPEQLVVTFVAGYIAGVFCAIVSHPADSVVSVLNKEKGSSASLVLKRLGFKGVWKGLFARIIMIGTLTALQWFIYDSVKVYFRLPRPPPPEMPESLKKKLGLTQ

SEQ ID NO: 173 - protein, 760 aa, Homo sapiens
MKTWVKIVFGVATSAVLALLVMCIVLRPSRVHNSEENTMRALTLKDILNGTFSYKTFFPNWISGQEYLHQSADNNIVLYNIETGQSYTILSNRTMKSVNASNYGLSPDRQFVYLESDYSKLWRYSYTATYYIYDLSNGEFVRGNELPRPIQYLCWSPVGSKLAYVYQNNIYLKQRPGDPPFQITFNGRENKIFNGIPDWVYEEEMLATKYALWWSPNGKFLAYAEFNDTDIPVIAYSYYGDEQYPRTINIPYPKAGAKNPVVRIFIIDTTYPAYVGPQEVPVPAMIASSDYYFSWLTWVTDERVCLQWLKRVQNVSVLSICDFREDWQTWDCPKTQEHIEESRTGWAGGFFVSTPVFSYDAISYYKIFSDKDGYKHIHYIKDTVENAIQITSGKWEAINIFRVTQDSLFYSSNEFEEYPGRRNIYRISIGSYPPSKKCVTCHLRKERCQYYTASFSDYAKYYALVCYGPGIPISTLHDGRTDQEIKILEENKELENALKNIQLPKEEIKKLEVDEITLWYKMILPPQFDRSKKYPLLIQVYGGPCSQSVRSVFAVNWISYLASKEGMVIALVDGRGTAFQGDKLLYAVYRKLGVYEVEDQITAVRKFIEMGFIDEKRIAIWGWSYGGYVSSLALASGTGLFKCGIAVAPVSSWEYYASVYTERFMGLPTKDDNLEHYKNSTVMARAEYFRNVDYLLIHGTADDNVHFQNSAQIAKALVNAQVDFQAMWYSDQNHGLSGLSTNHLYTHMTHFLKQCFSLSD

SEQ ID NO: 174 - protein, 899 aa, Homo sapiens
MESCYNPGLDGIIEYDDFKLNSSIVEPKEPAPETADGPYLVIVEQPKQRGFRFRYGCEGPSHGGLPGASSEKGRKTYPTVKICNYEGPAKIEVDLVTHSDPPRAHAHSLVGKQCSELGICAVSVGPKDMTAQFNNLGVLHVTKKNMMGTMIQKLQRQRLRSRPQGLTEAEQRELEQEAKELKKVMDLSIVRLRFSAFLRASDGSFSLPLKPVISQPIHDSKSPGASNLKISRMDKTAGSVRGGDEVYLLCDKVQKDDIEVRFYEDDENGWQAFGDFSPTDVHKQYAIVFRTPPYHKMKIERPVTVFLQLKRKRGGDVSDSKQFTYYPLVEDKEEVQRKRRKALPTFSQPFGGGSHMGGGSGGAAGGYGGAGGGGSLGFFPSSLAYSPYQSGAGPMGCYPGGGGGAQMAATVPSRDSGEEAAEPSAPSRTPQCEPQAPEMLQRAREYNARLFGLAQRSARALLDYGVTADARALLAGQRHLLTAQDENGDTPLHLAIIHGQTSVIEQIVYVIHHAQDLGVVNLTNHLHQTPLHLAVITGQTSVVSFLLRVGADPALLDRHGDSAMHLALRAGAGAPELLRALLQSGAPAVPQLLHMPDFEGLYPVHLAVRARSPECLDLLVDSGAEVEATERQGGRTALHLATEMEELGLVTHLVTKLRANVNARTFAGNTPLHLAAGLGYPTLTRLLLKAGADIHAENEEPLCPLPSPPTSDSDSDSEGPEKDTRSSFRGHTPLDLTCSTKVKTLLLNAAQNTMEPPLTPPSPAGPGLSLGDTALQNLEQLLDGPEAQGSWAELAERLGLRSLVDTYRQTTSPSGSLLRSYELAGGDLAGLLEALSDMGLEEGVRLLRGPETRDKLPSTEVKEDSAYGSQSVEQEAEKLGPPPEPPGGLCHGHPQPQVH

SEQ ID NO: 175 - protein, 783 aa, Homo sapiens
MRELVNIPLVHILTLVAFSGTEKLPKAPVITTPLETVDALVEEVATFMCAVESYPQPEISWTRNKILIKLFDTRYSIRENGQLLTILSVEDSDDGIYCCTANNGVGGAVESCGALQVKMKPKITRPPINVKIIEGLKAVLPCTTMGNPKPSVSWIKGDSPLRENSRIAVLESGSLRIHNVQKEDAGQYRCVAKNSLGTAYSKVVKLEVEEESEPEQDTKVFARILRAPESHNVTFGSFVTLHCTATGIPVPTITWIENGNAVSSGSIQESVKDRVIDSRLQLFITKPGLYTCIATNKHGEKFSTAKAAATISIAEWREYCLAVKELFCAKEWLVMEEKTHRGLYRSEMHLLSVPECSKLPSMHWDPTACARLPHLAFPPMTSSKPSVDIPNLPSSSSSSFSVSPTYSMTVIISIMSSFAIFVLLTITTLYCCRRRKQWKNKKRESAAVTLTTLPSELLLDRLHPNPMYQRMPLLLNPKLLSLEYPRNNIEYVRDIGEGAFGRVFQARAPGLLPYEPFTMVAVKMLKEEASADMQADFQREAALMAEFDNPNIVKLLGVCAVGKPMCLLFEYMAYGDLNEFLRSMSPHTVCSLSHSDLSMRAQVSSPGPPPLSCAEQLCIARQVAAGMAYLSERKFVHRDLATRNCLVGENMVVKIADFGLSRNIYSADYYKANENDAIPIRWMPPESIFYNRYTTESDVWAYGVVLWEIFSYGLQPYYGMAHEEVIYYVRDGNILSCPENCPVELYNLMRLCWSKLPADRPSFTSIHRILERMCERAEGTVSV

SEQ ID NO: 176 - protein, 250 aa, Homo sapiens
MRGTPKTHLLAFSLLCLLSKVRTQLCPTPCTCPWPPPRCPLGVPLVLDGCGCCRVCARRLGEPCDQLHVCDASQGLVCQPGAGPGGRGALCLLAEDDSSCEVNGRLYREGETFQPHCSIRCRCEDGGFTCVPLCSEDVRLPSWDCPHPRRVEVLGKCCPEWVCGQGGGLGTQPLPAQGPQFSGLVSSLPPGVPCPEWSTAWGPCSTTCGLGMATRVSNQNRFCRLETQRRLCLSRPCPPSRGRSPQNSAF

SEQ ID NO: 177 - protein, 480 aa, Homo sapiens
MIRAAPPPLFLLLLLLLLLVSWASRGEAAPDQDEIQRLPGLAKQPSFRQYSGYLKGSGSKHLHYWFVESQKDPENSPVVLWLNGGPGCSSLDGLLTEHGPFLVQPDGVTLEYNPYSWNLIANVLYLESPAGVGFSYSDDKFYATNDTEVAQSNFEALQDFFRLFPEYKNNKLFLTGESYAGIYIPTLAVLVMQDPSMNLQGLAVGNGLSSYEQNDNSLVYFAYYHGLLGNRLWSSLQTHCCSQNKCNFYDNKDLECVTNLQEVARIVGNSGLNIYNLYAPCAGGVPSHFRYEKDTVVVQDLGNIFTRLPLKRMWHQALLRSGDKVRMDPPCTNTTAASTYLNNPYVRKALNIPEQLPQWDMCNFLVNLQYRRLYRSMNSQYLKLLSSQKYQILLYNGDVDMACNFMGDEWFVDSLNQKMEVQRRPWLVKYGDSGEQIAGFVKEFSHIAFLTIKGAGHMVPTDKPLAAFTMFSRFLNKQPY

SEQ ID NO: 178 - protein, 1440 aa, Homo sapiens
MAGIIKKQILKHLSRFTKNLSPDKINLSTLKGEGQLTNLELDEEVLQNVLELPTWLAITRVYCNRASIRIQWTKLKTHPICLCLDKVEVEMKTCEDPRPPNGQSPIALASGQSEYGFAEKVVEGMFIIVNSITIKIHSKAFHASFELWQLQGYSVNPNWQQSDLRLTRITDPCRGEVLTFKEITWQTLRIEADATDNGDQDPVTTPLRLITNQGRIQIALKRRTKDCNVISSKLMFLLDDLLWVLTDSQLKAMMKYAESLSEAMEKSAHQRKSLAPEPVQITPPAPSAQQSWAQAFGGSQGNSNSSSSRLSQYFEKFDVKESSYHLLISRLDLHICDDSQSREPGVSANRLMGGAMQLTFRKMAFDYYPFHWAGDSCKHWVRHCEAMETRGQWAQKLVMEFQSKMEKWHEETGLKPPWHLGVDSLFRRKADSLSSPRKNPLERSPSQGRQPAFQPPAWNRLRSSCMVVRVDDLDIHQVSTAGQPSKKPSTLLSCSRKLHNLPTQVSAIHIEFTEYYFPDNQELPVPCPNLYIQLNGLTFTMDPVSLLWGNLFCLDLYRSLEQFKAIYKLEDSSQKDEHLDIRLDAFWLKVSFPLEKRERAELHRPQALVFSASGMIATNTRHAPHCSCSDLQSLFRGFAAAEFFHSNYDHFPKVPGGFSLLHMLFLHHAFQMDSCLPQPNTLPPQRPKASWDLWSVHFTQISLDFEGTENFKGHTLNFVAPFPLSIWACLPLRWQQAQARKLLLASEGRLKPSASFGSPVQSEALAPDSMSHPRSKTEHDLKSLSGLTEVMEILKEGSSGMDNKGPLTELEDVADVHMLVHSPAHVRVRLDHYQYLALLRLKEVLQRLQEQLTKDTESMTGSPLQNQTACIGVLFPSAEVALLMHPAPGAVDADSAGSDSTSLVDSELSPSEDRELKSDASSDQGPASPEKVLEESSIENQDVSQERPHSNGELQDSGPLAQQLAGKGHEAVESLQAKKLSRTQASSSPAALKPPAGRETAVNGQGELIPLKNIEGELSSAIHMTKDATKEALHATMDLTKEAVSLTKDAFSLGRDRMTSTMHKMLSLPPAKEPMAKTDEGVAAPVSGGAARLRFFSMKRTVSQQSFDGVSLDSSGPEDRISVDSDGSDSFVMLLESESGPESVPPGSLSNVSDNAGVQGSPLVNNYGQGSPAANSSVSPSGEDLIFHPVSVLVLKVNEVSFGIEVRGEDLTVALQAEELTLQQLGTVGLWQFLHGQCPGTCFQESSTLKTGHIRPAVGLRFEVGPGAAVHSPLASQNGFLHLLLHGCDLELLTSVLSGLGPFLEDEEIPVVVPMQIELLNSSITLKDDIPPIYPTSPGPIPITLAMEHVVLKRSDDGVFHIGAAAQDKPSAEVLKSEKRQPPKEQVFLVPTGEVFEQQVKELPILQKELIETKQALANANQDKEKLLQEIRKYNPFFEL

SEQ ID NO: 179 - protein, 334 aa, Homo sapiens
MEPGPTAAQRRCSLPPWLPLGLLLWSGLALGALPFGSSPHRVFHDLLSEQQLLEVEDLSLSLLQGGGLGPLSLPPDLPDLDPECRELLLDFANSSAELTGCLVRSARPVRLCQTCYPLFQQVVSKMDNISRAAGNTSESQSCARSLLMADRMQIVVILSEFFNTTWQEANCANCLTNNSEELSNSTVYFLNLFNHTLTCFEHNLQGNAHSLLQTKNYSEVCKNCREAYKTLSSLYSEMQKMNELENKAEPGTHLCIDVEDAMNITRKLWSRTFNCSVPCSDTVPVIAVSVFILFLPVVFYLSSFLHSEQKKRKLILPKRLKSSTSFANIQENSN

SEQ ID NO: 180 - protein, 1241 aa, Homo sapiens
MIMFPLFGKISLGILIFVLIEGDFPSLTAQTYLSIEEIQEPKSAVSFLLPEESTDLSLATKKKQPLDRRETERQWLIRRRRSILFPNGVKICPDESVAEAVANHVKYFKVRVCQEAVWEAFRTFWDRLPGREEYHYWMNLCEDGVTSIFEMGTNFSESVEHRSLIMKKLTYAKETVSSSELSSPVPVGDTSTLGDTTLSVPHPEVDAYEGASESSLERPEESISNEIENVIEEATKPAGEQIAEFSIHLLGKQYREELQDSSSFHHQHLEEEFISEVENAFTGLPGYKEIRVLEFRSPKENDSGVDVYYAVTFNGEAISNTTWDLISLHSNKVENHGLVELDDKPTVVYTISNFRDYIAETLQQNFLLGNSSLNPDPDSLQLINVRGVLRHQTEDLVWNTQSSSLQATPSSILDNTFQAAWPSADESITSSIPPLDFSSGPPSATGRELWSESPLGDLVSTHKLAFPSKMGLSSSPEVLEVSSLTLHSVTPAVLQTGLPVASEERTSGSHLVEDGLANVEESEDFLSIDSLPSSSFTQPVPKETIPSMEDSDVSLTSSPYLTSSIPFGLDSLTSKVKDQLKVSPFLPDASMEKELIFDGGLGSGSGQKVDLITWPWSETSSEKSAEPLSKPWLEDDDSLLPAEIEDKKLVLVDKMDSTDQISKHSKYEHDDRSTHFPEEEPLSGPAVPIFADTAAESASLTLPKHISEVPGVDDYSVTKAPLILTSVAISASTDKSDQADAILREDMEQITESSNYEWFDSEVSMVKPDMQTLWTILPESERVWTRTSSLEKLSRDILASTPQSADRLWLSVTQSTKLPPTTISTLLEDEVIMGVQDISLELDRIGTDYYQPEQVQEQNGKVGSYVEMSTSVHSTEMVSVAWPTEGGDDLSYTQTSGALVVFFSLRVTNMMFSEDLFNKNSLEYKALEQRFLELLVPYLQSNLTGFQNLEILNFRNGSIVVNSRMKFANSVPPNVNNAVYMILEDFCTTAYNTMNLAIDKYSLDVESGDEANPCKFQACNEFSECLVNPWSGEAKCRCFPGYLSVEERPCQSLCDLQPDFCLNDGKCDIMPGHGAICRCRVGENWWYRGKHCEEFVSEPVIIGITIASVVGLLVIFSAIIYFFIRTLQAHHDRSERESPFSGSSRQPDSLSSIENAVKYNPVYESHRAGCEKYEGPYPQHPFYSSASGDVIGGLSREEIRQMYESSELSREEIQERMRVLELYANDPEFAAFVREQQVEEV

SEQ ID NO: 181 - protein, 892 aa, Homo sapiens
MDHYDSQQTNDYMQPEEDWDRDLLLDPAWEKQQRKTFTAWCNSHLRKAGTQIENIEEDFRDGLKLMLLLEVISGERLAKPERGKMRVHKISNVNKALDFIASKGVKLVSIGAEEIVDGNVKMTLGMIWTIILRFAIQDISVEETSAKEGLLLWCQRKTAPYKNVNIQNFHISWKDGLGFCALIHRHRPELIDYGKLRKDDPLTNLNTAFDVAEKYLDIPKMLDAEDIVGTARPDEKAIMTYVSSFYHAFSGAQKAETAANRICKVLAVNQENEQLMEDYEKLASDLLEWIRRTIPWLENRVPENTMHAMQQKLEDFRDYRRLHKPPKVQEKCQLEINFNTLQTKLRLSNRPAFMPSEGRMVSDINNAWGCLEQVEKGYEEWLLNEIRRLERLDHLAEKFRQKASIHEAWTDGKEAMLRQKDYETATLSEIKALLKKHEAFESDLAAHQDRVEQIAAIAQELNELDYYDSPSVNARCQKICDQWDNLGALTQKRREALERTEKLLETIDQLYLEYAKRAAPFNNWMEGAMEDLQDTFIVHTIEEIQGLTTAHEQFKATLPDADKERLAILGIHNEVSKIVQTYHVNMAGTNPYTTITPQEINGKWDHVRQLVPRRDQALTEEHARQQHNERLRKQFGAQANVIGPWIQTKMEEIGRISIEMHGTLEDQLSHLRQYEKSIVNYKPKIDQLEGDHQLIQEALIFDNKHTNYTMEHIRVGWEQLLTTIARTINEVENQILTRDAKGISQEQMNEFRASFNHFDRDHSGTLGPEEFKACLISLGYDIGNDPQGEAEFARIMSIVDPNRLGVVTFQAFIDFMSRETADTDTADQVMASFKILAGDKNYITMDELRRELPPDQAEYCIARMAPYTGPDSVPGALDYMSFSTALYGESDL

SEQ ID NO: 182 - protein, 515 aa, Homo sapiens
MWRLPGLLGRALPRTLGPSLWRVTPKSTSPDGPQTTSSTLLVPVPNLDRSGPHGPGTSGGPRSHGWKDAFQWMSSRVSPNTLWDAISWGTLAVLALQLARQIHFQASLPAGPQRVEHCSWHSPLDRFFSSPLWHPCSSLRQHILPSPDGPAPRHTGLREPRLGQEEASAQPRNFSHNSLRGARPQDPSEEGPGDFGFLHASSSIESEAKPAQPQPTGEKEQDKSKTLSLEEAVTSIQQLFQLSVSIAFNFLGTENMKSGDHTAAFSYFQKAAARGYSKAQYNAGLCHEHGRGTPRDISKAVLYYQLAASQGHSLAQYRYARCLLRDPASSWNPERQRAVSLLKQAADSGLREAQAFLGVLFTKEPYLDEQRAVKYLWLAANNGDSQSRYHLGICYEKGLGVQRNLGEALRCYQQSAALGNEAAQERLRALFSMGAAAPGPSDLTVTGLKSFSSPSLCSLNTLLAGTSRLPHASSTGNLGLLCRSGHLGASLEASSRAIPPHPYPLERSVVRLGFG

SEQ ID NO: 183 - protein, 795 aa, Homo sapiens
MKKLGRIHPNRQVLAFILMVFLSQVRLEPIRYSVLEETESGSFVAHLAKDLGLGIGELASRSARVLSDDDKQRLQLDRQTGDLLLREKLDREELCGPIEPCVLHFQVFLEMPVQFFQGELLIQDINDHSPIFPEREVLLKILENSQPGTLFPLLIAEDLDVGSNGLQKYTISPNSHFHILTRNHSEGKKYPDLVQDKPLDREEQPEFSLTLVALDGGSPPRSGTVMVRILIMDINDNAPEFVHTPYGVQVLENSPLDSPIVRVLARDIDAGNFGSVSYGLFQASDEIKQTFSINEVTGEILLKKKLDFEKIKSYHVEIEATDGGGLSGKGTVVIEVVDVNDNPPELIISSLTSSIPENAPETVVSIFRIRDRDSGENGKMICSIPDNLPFILKPTLKNFYTLVTERPLDRETSAEYNITIAVTDLGTPRLKTQQNITVQVSDVNDNAPAFTQTSYTLFVRENNSPALHIGSVSATDRDSGTNAQVTYSLLPPQDPHLPLASLVSINADNGHLFALRSLDYEALQAFEFRVGASDRGSPALSSEALVRVLVLDTNDNSPFVLYPLQNGSAPCTELVPRAAEPGYLVTKVVAVDGDSGQNAWLSYQLLKATEPGLFGVWAHNGEVRTARLLSERDAAKHRLVVLVKDNGEPPRSATATLHVLLVDGFSQPYLPLPEAAPAQAQADSLTVYLVVALASVSSLFLFSVLLFVAVRLCRRSRAASVGRCSVPEGPFPGHLVDVSGTGTLSQSYQYEVCLTGDSGTGEFKFLKPIFPNLLVQDTGREVKENPKFRNSLVFS

SEQ ID NO: 184 - protein, 798 aa, Homo sapiens
MEAGEGKERVPKQRQVLIFFVLLGIAQASCQPRHYSVAEETESGSFVANLLKDLGLEIGELAVRGARVVSKGKKMHLQFDRQTGDLLLNEKLDREELCGPTEPCVLPFQVLLENPLQFFQAELRIRDVNDHSPVFLDKEILLKIPESITPGTTFLIERAQDLDVGTNSLQNYTISPNFHFHLNLQDSLDGIILPQLVLNRALDREEQPEIRLTLTALDGGSPPRSGTALVRIEVVDINDNVPEFAKLLYEVQIPEDSPVGSQVAIVSARDLDIGTNGEISYAFSQASEDIRKTFRLSAKSGELLLRQKLDFESIQTYTVNIQATDGGGLSGTCVVFVQVMDLNDNPPELTMSTLINQIPENLQDTLIAVFSVSDPDSGDNGRMVCSIQDDLPFFLKPSVENFYTLVISTALDRETRSEYNITITVTDFGTPRLKTEHNITVLVSDVNDNAPAFTQTSYTLFVRENNSPALHIGSVSATDRDSGTNAQVTYSLLPPQDPHLPLASLVSINADNGHLFALQSLDYEALQAFEFRVGAADRGSPALSSEALVRVLVLDANDNSPFVLYPLQNGSAPCTELVPRAAEPGYLVTKVVAVDGDSGQNAWLSYQLLKATEPGLFGVWAHNGEVRTARLLRERDAAKQRLVVLVKDNGEPPRSATATLHVLLVDGFSQPYLLLPEAAPAQAQADLLTVYLVVALASVSSLFLFSVLLFVAVRLCRRSRAASVGRCSVPEGPFPGQMVDVSGTGTLSQSYQYEVCLTGGSGTNEFKFLKPIIPNFVAQGAERVSEANPSFRKSFEFT

SEQ ID NO: 185 - protein, 144 aa, Homo sapiens
MRKIDLCLSSEGSEVILATSSDEKHPPENIIDGNPETFWTTTGMFPQEFIICFHKHVRIERLVIQSYFVQTLKIEKSTSKEPVDFEQWIEKDLVHTEGQLQNEEIVAHDGSATYLRFIIVSAFDHFASVHSVSAEGTVVSNLSS

SEQ ID NO: 186 - protein, 1057 aa, Homo sapiens
MVLAGPLAVSLLLPSLTLLVSHLSSSQDVSSEPSSEQQLCALSKHPTVAFEDLQPWVSNFTYPGARDFSQLALDPSGNQLIVGARNYLFRLSLANVSLLQATEWASSEDTRRSCQSKGKTEEECQNYVRVLIVAGRKVFMCGTNAFSPMCTSRQVGNLSRTIEKINGVARCPYDPRHNSTAVISSQGELYAATVIDFSGRDPAIYRSLGSGPPLRTAQYNSKWLNEPNFVAAYDIGLFAYFFLRENAVEHDCGRTVYSRVARVCKNDVGGRFLLEDTWTTFMKARLNCSRPGEVPFYYNELQSAFHLPEQDLIYGVFTTNVNSIAASAVCAFNLSAISQAFNGPFRYQENPRAAWLPIANPIPNFQCGTLPETGPNENLTERSLQDAQRLFLMSEAVQPVTPEPCVTQDSVRFSHLVVDLVQAKDTLYHVLYIGTESGTILKALSTASRSLHGCYLEELHVLPPGRREPLRSLRILHSARALFVGLRDGVLRVPLERCAAYRSQGACLGARDPYCGWDGKQQRCSTLEDSSNMSLWTQNITACPVRNVTRDGGFGPWSPWQPCEHLDGDNSGSCLCRARSCDSPRPRCGGLDCLGPAIHIANCSRNGAWTPWSSWALCSTSCGIGFQVRQRSCSNPAPRHGGRICVGKSREERFCNENTPCPVPIFWASWGSWSKCSSNCGGGMQSRRRACENGNSCLGCGVEFKTCNPEGCPEVRRNTPWTPWLPVNVTQGGARQEQRFRFTCRAPLADPHGLQFGRRRTETRTCPADGSGSCDTDALVEVLLRSGSTSPHTVSGGWAAWGPWSSCSRDCELGFRVRKRTCTNPEPRNGGLPCVGDAAEYQDCNPQACPGEDICLGLHTEEALCATQACPEGWSPWSEWSKCTDDGAQSRSRHCEELLPGSSACAGNSSQSRPCPYSEIPVILPASSMEEATDCAGFNLIHLVATGISCFLGSGLLTLAVYLSCQHCQRQSQESTLVHPATPNHLHYKGGGTPKNEKYTPMEFKTLNKNNLIPDDRANFYPLQQTNVYTTTYYPSPLNKHSFRPEASPGQRCFPNS

SEQ ID NO: 187 - protein, 2465 aa, Homo sapiens
MNTEELELLSDSKYRNYVAAIDKALKNFEYSSEWADLISALGKLNKVLQNNAKYQVVPKKLTIGKRLAQCLHPALPGGVHRKALETYEIIFKIIGPKRLAKDLFLYSSGLFPLLANAAMSVKPTLLSLYEIYYLPLGKTLKPGLQGLLTGILPGLEEGSEYYERTNMLLEKVAAAVDQSAFYSALWGSLLTSPAVRLPGITYVLAHLNRKLSMEDQLYIIGSDIELMVEAVSTSVQDSSVLVQRSTLDLILFCFPFHMSQATRPDMIRILSAALHVVLRRDMSLNRRLYAWLLGFDNNGAIIGPRSTRHSNPEEHATYYFTTFSKELLVQAMVGILQVNGFGEENTLMQDLKPFRILISLLDKPELGPVILEDVLIEVFRTLYSQCKAELDLQTEPPFSKDHAQLSSKLRENKKTAELIKTANLLFNSFEPYYMWDYVARWFEECCRRTLHVRLQIGPGDSNDSSELQLTNFCLLVDFLLDIVSLPTRSMRVLCQETYIEIQTEHLPQLLLRMISALTSHLQTLHLSELTDSLRLCSKILSKVQPPLLSASTGGVLQFPSGQNNSVKEWEDKKVSSVSHENPTEVFEDGENPPSSRSSESGFTEFIQYQADRTDDIDRELSEGQGAAAIPIGSTSSETETASTVGSEETIIQTPSVVTQGTATRSRKTAQKTAMQCCLEYVQQFLTRLINLYIIQNNSFSQSLATEHQGDLGREQGETSKWDRNSQGDVKEKNISKQKTSKEYLSAFLAACQLFLECSSFPVYIAEGNHTSELRSEKLETDCEHVQPPQWLQTLMNACSQASDFSVQSVAISLVMDLVGLTQSVAMVTGENINSVEPAQPLSPNQGRVAVVIRPPLTQGNLRYIAEKTEFFKHVALTLWDQLGDGTPQHHQKSVELFYQLHNLVPSSSICEDVISQQLTHKDKKIRMEAHAKFAVLWHLTRDLHINKSSSFVRSFDRSLFIMLDSLNSLDGSTSSVGQAWLNQVLQRHDIARVLEPLLLLLLHPKTQRVSVQRVQAERYWNKSPCYPGEESDKHFMQNFACSNVSQVQLITSKGNGEKPLTMDEIENFSLTVNPLSDRLSLLSTSSETIPMVVSDFDLPDQQIEILQSSDSGCSQSSAGDNLSYEVDPETVNAQEDSQMPKESSPDDDVQQVVFDLICKVVSGLEVESASVTSQLEIEAMPPKCSDIDPDEETIKIEDDSIQQSQNALLSNESSQFLSVSAEGGHECVANGISRNSSSPCISGTTHTLHDSSVASIETKSRQRSHSSIQFSFKEKLSEKVSEKETIVKESGKQPGAKPKVKLARKKDDDKKKSSNEKLKQTSVFFSDGLDLENWYSCGEGDISEIESDMGSPGSRKSPNFNIHPLYQHVLLYLQLYDSSRTLYAFSAIKAILKTNPIAFVNAISTTSVNNAYTPQLSLLQNLLARHRISVMGKDFYSHIPVDSNHNFRSSMYIEILISLCLYYMRSHYPTHVKVTAQDLIGNRNMQMMSIEILTLLFTELAKVIESSAKGFPSFISDMLSKCKVQKVILHCLLSSIFSAQKWHSEKMAGKNLVAVEEGFSEDSLINFSEDEFDNGSTLQSQLLKVLQRLIVLEHRVMTIPEENETGFDFVVSDLEHISPHQPMTSLQYLHAQPITCQGMFLCAVIRALHQHCACKMHPQWIGLITSTLPYMGKVLQRVVVSVTLQLCRNLDNLIQQYKYETGLSDSRPLWMASIIPPDMILTLLEGITAIIHYCLLDPTTQYHQLLVSVDQKHLFEARSGILSILHMIMSSVTLLWSILHQADSSEKMTIAASASLTTINLGATKNLRQQILELLGPISMNHGVHFMAAIAFVWNERRQNKTTTRTKVIPAASEEQLLLVELVRSISVMRAETVIQTVKEVLKQPPAIAKDKKHLSLEVCMLQFFYAYIQRIPVPNLVDSWASLLILLKDSIQLSLPAPGQFLILGVLNEFIMKNPSLENKKDQRDLQDVTHKIVDAIGAIAGSSLEQTTWLRRNLEVKPSPKIMVDGTNLESDVEDMLSPAMETANITPSVYSVHALTLLSEVLAHLLDMVFYSDEKERVIPLLVNIMHYVVPYLRNHSAHNAPSYRACVQLLSSLSGYQYTRRAWKKEAFDLFMDPSFFQMDASCVNHWRAIMDNLMTHDKTTFRDLMTRVAVAQSSSLNLFANRDVELEQRAMLLKRLAFAIFSSEIDQYQKYLPDIQERLVESLRLPQVPTLHSQVFLFFRVLLLRMSPQHLTSLWPTMITELVQVFLLMEQELTADEDISRTSGPSVAGLETTYTGGNGFSTSYNSQRWLNLYLSACKFLDLALALPSENLPQFQMYRWAFIPEASDDSGLEVRRQGIHQREFKPYVVRLAKLLRKRAKKNPEEDNSGRTLGWEPGHLLLTICTVRSMEQLLPFFNVLSQVFNSKVTSRCGGHSGSPILYSNAFPNKDMKLENHKPCSSKARQKIEEMVEKDFLEGMIKT

SEQ ID NO: 188 - protein, 727 aa, Homo sapiens
MRPLLLLALLGWLLLAEAKGDAKPEDNLLVLTVATKETEGFRRFKRSAQFFNYKIQALGLGEDWNVEKGTSAGGGQKVRLLKKALEKHADKEDLVILFADSYDVLFASGPRELLKKFRQARSQVVFSAEELIYPDRRLETKYPVVSDGKRFLGSGGFIGYAPNLSKLVAEWEGQDSDSDQLFYTKIFLDPEKREQINITLDHRCRIFQNLDGALDEVVLKFEMGHVRARNLAYDTLPVLIHGNGPTKLQLNYLGNYIPRFWTFETGCTVCDEGLRSLKGIGDEALPTVLVGVFIEQPTPFVSLFFQRLLRLHYPQKHMRLFIHNHEQHHKAQVEEFLAQHGSEYQSVKLVGPEVRMANADARNMGADLCRQDRSCTYYFSVDADVALTEPNSLRLLIQQNKNVIAPLMTRHGRLWSNFWGALSADGYYARSEDYVDIVQGRRVGVWNVPYISNIYLIKGSALRGELQSSDLFHHSKLDPDMAFCANIRQQDVFMFLTNRHTLGHLLSLDSYRTTHLHNDLWEVFSNPEDWKEKYIHQNYTKALAGKLVETPCPDVYWFPIFTEVACDELVEEMEHFGQWSLGNNKDNRIQGGYENVPTIDIHMNQIGFEREWHKFLLEYIAPMTEKLYPGYYTRAQFDLAFVVRYKPDEQPSLMPHHDASTFTINIALNRVGVDYEGGGCRFLRYNCSIRAPRKGWTLMHPGRLTHYHEGLPTTRGTRYIAVSFVDP

SEQ ID NO: 189 - protein, 651 aa, Homo sapiens
MLRLQMTDGHISCTAVEFSYMSKISLNTPPGTKVKLSGIVDIKNGFLLLNDSNTTVLGGEVEHLIEKWELQRSLSKHNRSNIGTEGGPPPFVPFGQKCVSHVQVDSRELDRRKTLQVTMPVKPTNDNDEFEKQRTAAIAEVAKSKETKTFGGGGGGARSNLNMNAAGNRNREVLQKEKSTKSEGKHEGVYRELVDEKALKHITEMGFSKEASRQALMDNGNNLEAALNVLLTSNKQKPVMGPPLRGRGKGRGRIRSEDEEDLGNARPSAPSTLFDFLESKMGTLNVEEPKSQPQQLHQGQYRSSNTEQNGVKDNNHLRHPPRNDTRQPRNEKPPRFQRDSQNSKSVLEGSGLPRNRGSERPSTSSVSEVWAEDRIKCDRPYSRYDRTKDTSYPLGSQHSDGAFKKRDNSMQSRSGKGPSFAEAKENPLPQGSVDYNNQKRGKRESQTSIPDYFYDRKSQTINNEAFSGIKIEKHFNVNTDYQNPVRSNSFIGVPNGEVEMPLKGRRIGPIKPAGPVTAVPCDDKIFYNSGPKRRSGPIKPEKILESSIPMEYAKMWKPGDECFALYWEDNKFYRAEVEALHSSGMTAVVKFIDYGNYEEVLLSNIKPIQTEAWEEEGTYDQTLEFRRGGDGQPRRSTRPTQQFYQPPRARN

SEQ ID NO: 190 - protein, 520 aa, Homo sapiens
MAALKLLSSGLRLCASARGSGATWYKGCVCSFSTSAHRHTKFYTDPVEAVKDIPDGATVLVGGFGLCGIPENLIDALLKTGVKGLTAVSNNAGVDNFGLGLLLRSKQIKRMVSSYVGENAEFERQYLSGELEVELTPQGTLAERIRAGGAGVPAFYTPTGYGTLVQEGGSPIKYNKDGSVAIASKPREVREFNGQHFILEEAITGDFALVKAWKADRAGNVIFRKSARNFNLPMCKAAETTVVEVEEIVDIGAFAPEDIHIPQIYVHRLIKGEKYEKRIERLSIRKEGDGEAKSAKPGDDVRERIIKRAALEFEDGMYANLGIGIPLLASNFISPNITVHLQSENGVLGLGPYPRQHEADADLINAGKETVTILPGASFFSSDESFAMIRGGHVDLTMLGAMQVSKYGDLANWMIPGKMVKGMGGAMDLVSSAKTKVVVTMEHSAKGNAHKIMEKCTLPLTGKQCVNRIITEKAVFDVDKKKGLTLIELWEGLTVDDVQKSTGCDFAVSPKLMPMQQIAN

SEQ ID NO: 191 - protein, 553 aa, Homo sapiens
MAFEDVAVYFSQEEWGLLDTAQRALYRRVMLDNFALVASLGLSTSRPRVVIQLERGEEPWVPSGTDTTLSRTTYRRRNPGSWSLTEDRDVSGEWPRAFPDTPPGMTTSVFPVAGACHSVKSLQRQRGASPSRERKPTGVSVIYWERLLLGSGSGQASVSLRLTSPLRPPEGVRLREKTLTEHALLGRQPRTPERQKPCAQEVPGRTFGSAQDLEAAGGRGHHRMGAVWQEPHRLLGGQEPSTWDELGEALHAGEKSFECRACSKVFVKSSDLLKHLRTHTGERPYECAQCGKAFSQTSHLTQHQRIHSGETPYACPVCGKAFRHSSSLVRHQRIHTAEKSFRCSECGKAFSHGSNLSQHRKIHAGGRPYACAQCGRRFCRNSHLIQHERTHTGEKPFVCALCGAAFSQGSSLFKHQRVHTGEKPFACPQCGRAFSHSSNLTQHQLLHTGERPFRCVDCGKAFAKGAVLLSHRRIHTGEKPFVCTQCGRAFRERPALFHHQRIHTGEKTVRRSRASLHPQARSVAGASSEGAPAKETEPTPASGPAAVSQPAEV

SEQ ID NO: 192 - protein, 594 aa, Homo sapiens
MAAAVLRDSTSVPVTAEAKLMGFTQGCVTFEDVAIYFSQEEWGLLDEAQRLLYRDVMLENFALITALVCWHGMEDEETPEQSVSVEGVPQVRTPEASPSTQKIQSCDMCVPFLTDILHLTDLPGQELYLTGACAVFHQDQKHHSAEKPLESDMDKASFVQCCLFHESGMPFTSSEVGKDFLAPLGILQPQAIANYEKPNKISKCEEAFHVGISHYKWSQCRRESSHKHTFFHPRVCTGKRLYESSKCGKACCCECSLVQLQRVHPGERPYECSECGKSFSQTSHLNDHRRIHTGERPYVCGQCGKSFSQRATLIKHHRVHTGERPYECGECGKSFSQSSNLIEHCRIHTGERPYECDECGKAFGSKSTLVRHQRTHTGEKPYECGECGKLFRQSFSLVVHQRIHTTARPYECGQCGKSFSLKCGLIQHQLIHSGARPFECDECGKSFSQRTTLNKHHKVHTAERPYVCGECGKAFMFKSKLVRHQRTHTGERPFECSECGKFFRQSYTLVEHQKIHTGLRPYDCGQCGKSFIQKSSLIQHQVVHTGERPYECGKCGKSFTQHSGLILHRKSHTVERPRDSSKCGKPYSPRSNIV

SEQ ID NO: 193 - protein, 204 aa, Homo sapiens [sequence omitted]

SEQ ID NO: 194 - protein, 622 aa, Homo sapiens
MATVLSRALKLPGKKSPDLGEYDPLTQADSDESEDDLVLNLQKNGGVKNGKSPLGEAPEPDSDAEVAEAAKPHLSEVTTEGYPSEPLGGLEQKAASSLVSYVRTSVFLLTLGISMILVLLCAFLIPCPPRDLHSTWSRHLGSQGGGDLSPLELADVNGDGLRDVLLSFVMSRNGSAVGVSRPAANLVCLSGMNGSTLWSSLLPEEARDITCLELMPGSLAETICLVTGTHKMLSAFNATSGKAIWTLNPNYLSNGTLAAPVVVLPDLDEDGVRDLVVLAIGELQPDLCFLLVSGRTGNPVGRPVKYNIVGVGNLIGPQVYITTNGAVYILFGFGNIQAVALRDIFVQAQNRDSSPPSLQIEEPEWEKRRSINLSELIDVYSDGVELLQMVKAPDSNCSNLLITTRQSLVLLRGQNLTPYWALRLQGLRSQPTPGYFTDDQTLDFLLQIQDGVGMKKMMVVDGDSGSIVWSYRAPCHMKETPATSAVTSDQKSVFLFWAEGLSAASPNSDIILGTEPPSLHHLYLLHPAFPSILLDLANTTGTVTASEVGINDLWKDAFYVTRTTGPSSEGHPAALVVSKLSLRWALMEGQMAQLQESTPKIGRGELRRFLSRIKFVEAPYEI

SEQ ID NO: 195 - protein, 303 aa, Homo sapiens
MGRPLLLPLLPLLLPPAFLQPSGSTGSGPSYLYGVTQPKHLSASMGGSVEIPFSFYYPWELATAPDVRISWRRGHFHRQSFYSTRPPSIHKDYVNRLFLNWTEGQKSGFLRISNLQKQDQSVYFCRVELDTRSSGRQQWQSIEGTKLSITQAVTTTTQRPSSMTTTWRLSSTTTTTGLRVTQGKRRSDSWHISLETAVGVAVAVTVLGIMILGLICLLRWRRRKGQQRTKATTPAREPFQNTEEPYENIRNEGQNTDPKLNPKDDGIVYASLALSSSTSPRAPPSHRPLKSPQNETLYSVLKA

SEQ ID NO: 196 - protein, 651 aa, Homo sapiens
MAAPLLHTRLPGDAAASSSAVKKLGASRTGISNMRALENDFFNSPPRKTVRFGGTVTEVLLKYKKGETNDFELLKNQLLDPDIKDDQIINWLLEFRSSIMYLTKDFEQLISIILRLPWLNRSQTVVEEYLAFLGNLVSAQTVFLRPCLSMIASHFVPPRVIIKEGDVDVSDSDDEDDNLPANFDTCHRALQIIARYVPSTPWFLMPILVEKFPFVRKSERTLECYVHNLLRISVYFPTLRHEILELIIEKLLKLDVNASRQGIEDAEETATQTCGGTDSTEGLFNMDEDEETEHETKAGPERLDQMVHPVAERLDILMSLVLSYMKDVCYVDGKVDNGKTKDLYRDLINIFDKLLLPTHASCHVQFFMFYLCSFKLGFAEAFLEHLWKKLQDPSNPAIIRQAAGNYIGSFLARAKFIPLITVKSCLDLLVNWLHIYLNNQDSGTKAFCDVALHGPFYSACQAVFYTFVFRHKQLLSGNLKEGLQYLQSLNFERIVMSQLNPLKICLPSVVNFFAAITNKYQLVFCYTIIERNNRQMLPVIRSTAGGDSVQICTNPLDTFFPFDPCVLKRSKKFIDPIYQVWEDMSAEELQEFKKPMKKDIVEDEDDDFLKGEVPQNDTVIGITPSSFDTHFRSPSSSVGSPPVLYMQPSPL

SEQ ID NO: 197 - protein, 927 aa, Homo sapiens
MEMPLPPDDQELRNVIDKLAQFVARNGPEFEKMTMEKQKDNPKFSFLFGGEFYSYYKCKLALEQQQLICKQQTPELEPAATMPPLPQPPLAPAAPIPPAQGAPSMDELIQQSQWNLQQQEQHLLALRQEQVTAAVAHAVEQQMQKLLEETQLDMNEFDNLLQPIIDTCTKDAISAGKNWMFSNAKSPPHCELMAGHLRNRITADGAHFELRLHLIYLINDVLHHWALTRGKSLPHSQRKQARELLAALQKVVVPIYCTSFLAVEEDKQQKIARLLQLWEKNGYFDDSIIQQLQSPALGLGQYQATLINEYSSVVQPVQLAFQQQIQTLKTQHEEFVTSLAQQQQQQQQQQQQLQMPQMEAEVKATPPPPAPPPAPAPAPAIPPTTQPDDSKPPIQMPGSSEYEAPGGVQDPAAAGPRGPGPHDQIPPNKPPWFDQPHPVAPWGQQQPPEQPPYPHHQGGPPHCPPWNNSHEGMWGEQRGDPGWNGQRDAPWNNQPDAAWNSQFEGPWNSQHEQPPWGGGQREPPFRMQRPPHFRGPFPPHQQHPQFNQPPHPHNFNRFPPRFMQDDFPPRHPFERPPYPHRFDYPQGDFPAEMGPPHHHPGHRMPHPGINEHPPWAGPQHPDFGPPPHGFNGQPPHMRRQGPPHINHDDPSLVPNVPYFDLPAGLMAPLVKLEDHEYKPLDPKDIRLPPPMPPSERLLAAVEAFYSPPSHDRPRNSEGWEQNGLYEFFRAKMRARRRKGQEKRNSGPSRSRSRSKSRGRSSSRSNSRSSKSSGSYSRSRSRSCSRSYSRSRSRSRSRSRSSRSRSRSQSRSRSKSYSPGRRRRSRSRSPTPPSSAGLGSNSAPPIPDSRLGEENKGHQMLVKMGWSGSGGLGAKEQGIQDPIKGGDVRDKWDQYKGVGVALDDPYENYRRNKSYSFIARMKARDECK

SEQ ID NO: 198 - protein, 313 aa, Homo sapiens
MPKVKSGAIGRRRGRQEQRRELKSAGGLMFNTGIGQHILKNPLIINSIIDKAALRPTDVVLEVGPGTGNMTVKLLEKAKKVVACELDPRLVAELHKRVQGTPVASKLQVLVGDVLKTDLPFFDTCVANLPYQISSPFVFKLLLHRPFFRCAILMFQREFALRLVAKPGDKLYCRLSINTQLLARVDHLMKVGKNNFRPPPKVESSVVRIEPKNPPPPINFQEWDGLVRITFVRKNKTLSAAFKSSAVQQLLEKNYRIHCSVHNIIIPEDFSIADKIQQILTSTGFSDKRARSMDIDDFIRLLHGFNAEGIHFS

SEQ ID NO: 199 - protein, 630 aa, Homo sapiens
MQGGNSGVRKREEEGDGAGAVAAPPAIDFPAEGPDPEYDESDVPAEIQVLKEPLQQPTFPFAVANQLLLVSLLEHLSHVHEPNPLRSRQVFKLLCQTFIKMGLLSSFTCSDEFSSLRLHHNRAITHLMRSAKERVRQDPCEDISRIQKIRSREVALEAQTSRYLNEFEELAILGKGGYGRVYKVRNKLDGQYYAIKKILIKGATKTVCMKVLREVKVLAGLQHPNIVGYHTAWIEHVHVIQPRADRAAIELPSLEVLSDQEEDREQCGVKNDESSSSSIIFAEPTPEKEKRFGESDTENQNNKSVKYTTNLVIRESGELESTLELQENGLAGLSASSIVEQQLPLRRNSHLEESFTSTEESSEENVNFLGQTEAQYHLMLHIQMQLCELSLWDWIVERNKRGREYVDESACPYVMANVATKIFQELVEGVFYIHNMGIVHRDLKPRNIFLHGPDQQVKIGDFGLACTDILQKNTDWTNRNGKRTPTHTSRVGTCLYASPEQLEGSEYDAKSDMYSLGVVLLELFQPFGTEMERAEVLTGLRTGQLPESLRKRCPVQAKYIQHLTRRNSSQRPSAIQLLQSELFQNSGNVNLTLQMKIIEQEKEIAELKKQLNLLSQDKGVRDDGKDGGVG

SEQ ID NO: 200 - protein, 224 aa, Homo sapiens
MPGRAPLRTVPGALGAWLLGGLWAWTLCGLCSLGAVGAPRPCQAPQQWEGRQVMYQQSSGRNSRALLSYDGLNQRVRVLDERKALIPCKRLFEYILLYKDGVMFQIDQATKQCSKMTLTQPWDPLDIPQNSTFEDQYSIGGPQEQITVQEWSDRKSARSYETWIGIYTVKDCYPVQETFTINYSVILSTRFFDIQLGIKDPSVFTPPSTCQMAQLEKMSEDCSW

SEQ ID NO: 201 - protein, 256 aa, Homo sapiens
MPLHKYPVWLWKRLQLREGICSRLPGHYLRSLEEERTPTPVHYRPHGAKFKINPKNGQRERVEDVPIPIYFPPESQRGLWGGEGWILGQIYANNDKLSKRLKKVWKPQLFEREFYSEILDKKFTVTVTMRTLDLIDEAYGLDFYILKTPKEDLCSKFGMDLKRGMLLRLARQDPQLHPEDPERRAAIYDKYKEFAIPEEEAEWVGLTLEEAIEKQRLLEEKDPVPLFKIYVAELIQQLQQQALSEPAVVQKRASGQ

SEQ ID NO: 202 - protein, 559 aa, Homo sapiens
MADERKDEAKAPHWTSAPLTEASAHSHPPEIKDQGGAGEGLVRSANGFPYREDEEGAFGEHGSQGTYSNTKENGINGELTSADRETAEEVSARIVQVVTAEAVAVLKGEQEKEAQHKDQTAALPLAAEETANLPPSPPPSPASEQTVTVEEAAGGESALAPSVFKQAKDKVSNSTLSKIPALQGSTKSPRYSSACPSTTKRATFSDSLLIQPTSAGSTDRLPYSKSGNKDGVTKSPEKRSSLPRPSSILPPRRGVSGDRDENSFSLNSSISSSARRTTRSEPIRRAGKSGTSTPTTPGSTAITPGTPPSYSSRTPGTPGTPSYPRTPHTPGTPKSAILVPSEKKVAIIRTPPKSPATPKQLRLINQPLPDLKNVKSKIGSTDNIKYQPKGGQVRILNKKIDFSKVQSRCGSKDNIKHSAGGGNVQIVTKKIDLSHVTSKCGSLKNIRHRPGGGRVKIESVKLDFKEKAQAKVGSLDNAHHVPGGGNVKIDSQKLNFREHAKARVDHGAEIITQSPGRSSVASPRRLSNVSSSGSINLLESPQLATLAEDVTAALAKQGL

SEQ ID NO: 203 - protein, 779 aa, Homo sapiens
MASFVTEVLAHSGRLEKEDLGTRISRLTRRVEEIKGEVCNMISKKYSEFLPSMQSAQGLITQVDKLSEDIDLLKSRIESEVRRDLHVSTGEFTDLKQQLERDSVVLSLLKQLQEFSTAIEEYNCALTEKKYVTGAQRLEEAQKCLKLLKSRKCFDLKILKSLSMELTIQKQNILYHLGEEWQKLIVWKFPPSKDTSSLESYLQTELHLYTEQSHKEEKTPMPPISSVLLAFSVLGELHSKLKSFGQMLLKYILRPLASCPSLHAVIESQPNIVIIRFESIMTNLEYPSPSEVFTKIRLVLEVLQKQLLDLPLDTDLENEKTSTVPLAEMLGDMIWEDLSECLIKNCLVYSIPTNSSKLQQYEEIIQSTEEFENALKEMRFLKGDTTDLLKYARNINSHFANKKCQDVIVAARNLMTSEIHNTVKIIPDSKINVPELPTPDEDNKLEVQKVSNTQYHEVMNLEPENTLDQHSFSLPTCRISESVKKLMELAYQTLLEATTSSDQCAVQLFYSVRNIFHLFHDVVPTYHKENLQKLPQLAAIHHNNCMYIAHHLLTLGHQFRLRLAPILCDGTATFVDLVPGFRRLGTECFLAQMRAQKGELLERLSSARNFSNMDDEENYSAASKAVRQVLHQLKRLGIVWQDVLPVNIYCKAMGTLLNTAISEVIGKITALEDISTEDGDRLYSLCKTVMDEGPQVFAPLSEESKNKKYQEEVPVYVPKWMPFKELMMMLQASLQEIGDRWADGKGPLAAAFSSSEVKALIRALFQNTERRAAALAKIK

SEQ ID NO: 204 - protein, 1822 aa, Homo sapiens
MAGPRPSPWARLLLAALISVSLSGTLANRCKKAPVKSCTECVRVDKDCAYCTDEMFRDRRCNTQAELLAAGCQRESIVVMESSFQITEETQIDTTLRRSQMSPQGLRVRLRPGEERHFELEVFEPLESPVDLYILMDFSNSMSDDLDNLKKMGQNLARVLSQLTSDYTIGFGKFVDKVSVPQTDMRPEKLKEPWPNSDPPFSFKNVISLTEDVDEFRNKLQGERISGNLDAPEGGFDAILQTAVCTRDIGWRPDSTHLLVFSTESAFHYEADGANVLAGIMSRNDERCHLDTTGTYTQYRTQDYPSVPTLVRLLAKHNIIPIFAVTNYSYSYYEKLHTYFPVSSLGVLQEDSSNIVELLEEAFNRIRSNLDIRALDSPRGLRTEVTSKMFQKTRTGSFHIRRGEVGIYQVQLRALEHVDGTHVCQLPEDQKGNIHLKPSFSDGLKMDAGIICDVCTCELQKEVRSARCSFNGDFVCGQCVCSEGWSGQTCNCSTGSLSDIQPCLREGEDKPCSGRGECQCGHCVCYGEGRYEGQFCEYDNFQCPRTSGFLCNDRGRCSMGQCVCEPGWTGPSCDCPLSNATCIDSNGGICNGRGHCECGRCHCHQQSLYTDTICEINYSAIHPGLCEDLRSCVQCQAWGTGEKKGRTCEECNFKVKMVDELKRAEEVVVRCSFRDEDDDCTYSYTMEGDGAPGPNSTVLVHKKKDCPPGSFWWLIPLLLLLLPLLALLLLLCWKYCACCKACLALLPCCNRGHMVGFKEDHYMLRENLMASDHLDTPMLRSGNLKGRDVVRWKVTNNMQRPGFATHAASINPTELVPYGLSLRLARLCTENLLKPDTRECAQLRQEVEENLNEVYRQISGVHKLQQTKFRQQPNAGKKQDHTIVDTVLMAPRSAKPALLKLTEKQVEQRAFHDLKVAPGYYTLTADQDARGMVEFQEGVELVDVRVPLFIRPEDDDEKQLLVEAIDVPAGTATLGRRLVNITIIKEQARDVVSFEQPEFSVSRGDQVARIPVIRRVLDGGKSQVSYRTQDGTAQGNRDYIPVEGELLFQPGEAWKELQVKLLELQEVDSLLRGRQVRRFHVQLSNPKFGAHLGQPHSTTIIIRDPDELDRSFTSQMLSSQPPPHGDLGAPQNPNAKAAGSRKIHFNWLPPSGKPMGYRVKYWIQGDSESEAHLLDSKVPSVELTNLYPYCDYEMKVCAYGAQGEGPYSSLVSCRTHQEVPSEPGRLAFNVVSSTVTQLSWAEPAETNGEITAYEVCYGLVNDDNRPIGPMKKVLVDNPKNRMLLIENLRESQPYRYTVKARNGAGWGPEREAIINLATQPKRPMSIPIIPDIPIVDAQSGEDYDSFLMYSDDVLRSPSGSQRPSVSDDTGCGWKFEPLLGEELDLRRVTWRLPPELIPRLSASSGRSSDAEAPHGPPDDGGAGGKGGSLPRSATPGPPGEHLVNGRMDFAFPGSTNSLHRMTTTSAAAYGTHLSPHVPHRVLSTSSTLTRDYNSLTRSEHSHSTTLPRDYSTLTSVSSHDSRLTAGVPDTPTRLVFSALGPTSLRVSWQEPRCERPLQGYSVEYQLLNGGELHRLNIPNPAQTSVVVEDLLPNHSYVFRVRAQSQEGWGREREGVITIESQVHPQSPLCPLPGSAFTLSTPSAPGPLVFTALSPDSLQLSWERPRRPNGDIVGYLVTCEMAQGGGPATAFRVDGDSPESRLTVPGLSENVPYKFKVQARTTEGFGPEREGIITIESQDGGPFPQLGSRAGLFQHPLQSEYSSITTTHTSATEPFLVDGLTLGAQHLEAGGSLTRHVTQEFVSRTLTTSGTLSTHMDQQFFQT

SEQ ID NO: 205 - protein, 674 aa, Homo sapiens
MAPGQAPHQATPWRDAHPFFLLSPVMGLLSRAWSRLRGLGPLEPWLVEAVKGAALVEAGLEGEARTPLAIPHTPWGRRPEEEAEDSGGPGEDRETLGLKTSSSLPEAWGLLDDDDGMYGEREATSVPRGQGSQFADGQRAPLSPSLLIRTLQGSDKNPGEEKAEEEGVAEEEGVNKFSYPPSHRECCPAVEEEDDEEAVKKEAHRTSTSALSPGSKPSTWVSCPGEEENQATEDKRTERSKGARKTSVSPRSSGSDPRSWEYRSGEASEEKEEKAHKETGKGEAAPGPQSSAPAQRPQLKSWWCQPSDEEEGEVKALGAAEKDGEAECPPCIPPPSAFLKAWVYWPGEDTEEEEDEEEDEDSDSGSDEEEGEAEASSSTPATGVFLKSWVYQPGEDTEEEEDEDSDTGSAEDEREAETSASTPPASAFLKAWVYRPGEDTEEEEDEDVDSEDKEDDSEAALGEAESDPHPSHPDQRAHFRGWGYRPGKETEEEEAAEDWGEAEPCPFRVAIYVPGEKPPPPWAPPRLPLRLQRRLKRPETPTHDPDPETPLKARKVRFSEKVTVHFLAVWAGPAQAARQGPWEQLARDRSRFARRITQAQEELSPCLTPAARARAWARLRNPPLAPIPALTQTLPSSSVPSSPVQTTPLSQAVATPSRSSAAAAAALDLSGRRG

SEQ ID NO: 206 - protein, 476 aa, Homo sapiens
MSGPTWLPPKQPEPARAPQGRAIPRGTPGPPPAHGAALQPHPRVNFCPLPSEQCYQAPGGPEDRGPAWVGSHGVLQHTQGLPADRGGLRPGSLDAEIDLLSSTLAELNGGRGHASRRPDRQAYEPPPPPAYRTGSLKPNPASPLPASPYGGPTPASYTTASTPAGPAFPVQVKVAQPVRGCGPPRRGASQASGPLPGPHFPLPGRGEVWGPGYRSQREPGPGAKEEAAGVSGPAGRGRGGEHGPQVPLSQPPEDELDRLTKKLVHDMNHPPSGEYFGQCGGCGEDVVGDGAGVVALDRVFHVGCFVCSTCRAQLRGQHFYAVERRAYCEGCYVATLEKCATCSQPILDRILRAMGKAYHPGCFTCVVCHRGLDGIPFTVDATSQIHCIEDFHRKFAPRCSVCGGAIMPEPGQEETVRIVALDRSFHIGCYKCEECGLLLSSEGECQGCYPLDGHILCKACSAWRIQELSATVTTDC

SEQ ID NO: 207 - protein, 769 aa, Homo sapiens
MRLLRRWAFAALLLSLLPTPGLGTQGPAGALRWGGLPQLGGPGAPEVTEPSRLVRESSGGEVRKQQLDTRVRQEPPGGPPVHLAQVSFVIPAFNSNFTLDLELNHHLLSSQYVERHFSREGTTQHSTGAGDHCYYQGKLRGNPHSFAALSTCQGLHGVFSDGNLTYIVEPQEVAGPWGAPQGPLPHLIYRTPLLPDPLGCREPGCLFAVPAQSAPPNRPRLRRKRQVRRGHPTVHSETKYVELIVINDHQLFEQMRQSVVLTSNFAKSVVNLADVIYKEQLNTRIVLVAMETWADGDKIQVQDDLLETLARLMVYRREGLPEPSDATHLFSGRTFQSTSSGAAYVGGICSLSHGGGVNEYGNMGAMAVTLAQTLGQNLGMMWNKHRSSAGDCKCPDIWLGCIMEDTGFYLPRKFSRCSIDEYNQFLQEGGGSCLFNKPLKLLDPPECGNGFVEAGEECDCGSVQECSRAGGNCCKKCTLTHDAMCSDGLCCRRCKYEPRGVSCREAVNECDIAETCTGDSSQCPPNLHKLDGYYCDHEQGRCYGGRCKTRDRQCQVLWGHAAADRFCYEKLNVEGTERGSCGRKGSGWVQCSKQDVLCGFLLCVNISGAPRLGDLVGDISSVTFYHQGKELDCRGGHVQLADGSDLSYVEDGTACGPNMLCLDHRCLPASAFNFSTCPGSGERRICSHHGVCSNEGKCICQPDWTGKDCSIHNPLPTSPPTGETERYKGPSGTNIIIGSIAGAVLVAAIVLGGTGWGFKNIRRGRSGGA

SEQ ID NO: 208 - protein, 410 aa, Homo sapiens
MVCFRLFPVPGSGLVLVCLVLGAVRSYALELNLTDSENATCLYAKWQMNFTVRYETTNKTYKTVTISDHGTVTYNGSICGDDQNGPKIAVQFGPGFSWIANFTKAASTYSIDSVSFSYNTGDNTTFPDAEDKGILTVDELLAIRIPLNDLFRCNSLSTLEKNDVVQHYWDVLVQAFVQNGTVSTNEFLCDKDKTSTVAPTIHTTVPSPTTTPTPKEKPEAGTYSVNNGNDTCLLATMGLQLNITQDKVASVININPNTTHSTGSCRSHTALLRLNSSTIKYLDFVFAVKNENRFYLKEVNISMYLVNGSVFSIANNNLSYWDAPLGSSYMCNKEQTVSVSGAFQINTFDLRVQPFNVTQGKYSTAQDCSADDDNFLVPIAVGAALAGVLILVLLAYFIGLKHHHAGYEQF

SEQ ID NO: 209 - protein, 493 aa, Homo sapiens [sequence omitted]

SEQ ID NO: 210 - protein, 175 aa, Homo sapiens
MQRRLVQQWSVAVFLLSYAVPSCGRSVEGLSRRLKRAVSEHQLLHDKGKSIQDLRRRFFLHHLIAEIHTAEIRATSEVSPNSKPSPNTKNHPVRFGSDDEGRYLTQETNKVETYKEQPLKTPGKKKKGKPGKRKEQEKKKRRTRSAWLDSGVTGSGLEGDHLSDTSTTSLELDSR

SEQ ID NO: 211 - protein, 133 aa, Homo sapiens
MLSPEAERVLRYLVEVEELAEEVLADKRQIVDLDTKRNQNREGLRALQKDLSLSEDVMVCFGNMFIKMPHPETKEMIEKDQDHLDKEIEKLRKQLKVKVNRLFEAQGKPELKGFNLNPLNQDELKALKVILKG

SEQ ID NO: 212 - protein, 1090 aa, Homo sapiens
MMPMILTVFLSNNEQILTEVPITPETTCRDVVEFCKEPGEGSCHLAEVWRGNERPIPFDHMMYEHLQKWGPRREEVKFFLRHEDSPTENSEQGGRQTQEQRTQRNVINVPGEKRTENGVGNPRVELTLSELQDMAARQQQQIENQQQMLVAKEQRLHFLKQQERRQQQSISENEKLQKLKERVEAQENKLKKIRAMRGQVDYSKIMNGNLSAEIERFSAMFQEKKQEVQTAILRVDQLSQQLEDLKKGKLNGFQSYNGKLTGPAAVELKRLYQELQIRNQLNQEQNSKLQQQKELLNKRNMEVAMMDKRISELRERLYGKKIQLNRVNGTSSPQSPLSTSGRVAAVGPYIQVPSAGSFPVLGDPIKPQSLSIASNAAHGRSKSANDGNWPTLKQNSSSSVKPVQVAGADWKDPSVEGSVKQGTVSSQPVPFSALGPTEKPGIEIGKVPPPIPGVGKQLPPSYGTYPSPTPLGPGSTSSLERRKEGSLPRPSAGLPSRQRPTLLPATGSTPQPGSSQQIQQRISVPPSPTYPPAGPPAFPAGDSKPELPLTVAIRPFLADKGSRPQSPRKGPQTVNSSSIYSMYLQQATPPKNYQPAAHSALNKSVKAVYGKPVLPSGSTSPSPLPFLHGSLSTGTPQPQPPSESTEKEPEQDGPAAPADGSTVESLPRPLSPTKLTPIVHSPLRYQSDADLEALRRKLANAPRPLKKRSSITEPEGPGGPNIQKLLYQRFNTLAGGMEGTPFYQPSPSQDFMGTLADVDNGNTNANGNLEELPPAQPTAPLPAEPAPSSDANDNELPSPEPEELICPQTTHQTAEPAEDNNNNVATVPTTEQIPSPVAEAPSPGEEQVPPAPLPPASHPPATSTNKRTNLKKPNSERTGHGLRVRFNPLALLLDASLEGEFDLVQRIIYEVEDPSKPNDEGITPLHNAVCAGHHHIVKFLLDFGVNVNAADSDGWTPLHCAASCNSVHLCKQLVESGAAIFASTISDIETAADKCEEMEEGYIQCSQFLYGVQEKLGVMNKGVAYALWDYEAQNSDELSFHEGDALTILRRKDESETEWWWARLGDREGYVPKNLLGLYPRIKPRQRTLA

SEQ ID NO: 213 - protein, 288 aa, Homo sapiens [sequence omitted]

SEQ ID NO: 214 - protein, 851 aa, Homo sapiens
MSSKQEIMSDQRFRRVAKDPRFWEMPEKDRKVKIDKRFRAMFHDKKFKLNYAVDKRGRPISHSTTEDLKRFYDLSDSDSNLSGEDSKALSQKKIKKKKTQTKKEIDSKNLVEKKKETKKANHKGSENKTDLDNSIGIKKMKTSCKFKIDSNISPKKDSKEFTQKNKKEKKNIVQHTTDSSLEEKQRTLDSGTSEIVKSPRIECSKTRREMQSVVQLIMTRDSDGYENSTDGEMCDKDALEEDSESVSEIGSDEESENEITSVGRASGDDDGSEDDEEEDEDEEEDEDEDSEDDDKSDSGPDLARGKGNIETSSEDEDDTADLFPEESGFEHAWRELDKDAPRADEITRRLAVCNMDWDRLKAKDLLALFNSFKPKGGVIFSVKIYPSEFGKERMKEEQVQGPVELLSIPEDAPEKDWTSREKLRDYQFKRLKYYYAVVDCDSPETASKIYEDCDGLEFESSCSFIDLRFIPDDITFDDEPKDVASEVNLTAYKPKYFTSAAMGTSTVEITWDETDHERITMLNRKFKKEELLDMDFQAYLASSSEDEEEIEEELQGDDGVNVEEDGKTKKSQKDDEEQIAKYRQLLQVIQEKEKKGKENDMEMEIKWVPGLKESAEEMVKNKLEGKDKLTPWEQFLEKKKEKKRLKRKQKALAEEASEEELPSDVDLNDPYFAEEVKQIGINKKSVKSAKDGTSPEEEIEIERQKAEMALLMMDEDEDSKKHFNYNKIVEHQNLSKKKKKQLMKKKELIEDDFEVNVNDARFQAMYTSHLFNLDPSDPNFKKTKAMEKILEEKARQRERKEQELTQAIKKKESEIEKESQRKSIDPALSMLIKSIKTKTEQFQARKKQKVK

SEQ ID NO: 215 - protein, 584 aa, Homo sapiens
MAGRRLNLRWALSVLCVLLMAETVSGTRGSSTGAHISPQFPASGVNQTPVVDCRKVCGLNVSDRCDFIRTNPDCHSDGGYLDYLEGIFCHFPPSLLPLAVTLYVSWLLYLFLILGVTAAKFFCPNLSAISTTLKLSHNVAGVTFLAFGNGAPDIFSALVAFSDPHTAGLALGALFGAGVLVTTVVAGGITILHPFMAASRPFFRDIVFYMVAVFLTFLMLFRGRVTLAWALGYLGLYVFYVVTVILCTWIYQRQRRGSLFCPMPVTPEILSDSEEDRVSSNTNSYDYGDEYRPLFFYQETTAQILVRALNPLDYMKWRRKSAYWKALKVFKLPVEFLLLLTVPVVDPDKDDQNWKRPLNCLHLVISPLVVVLTLQSGTYGVYEIGGLVPVWVVVVIAGTALASVTFFATSDSQPPRLHWLFAFLGFLTSALWINAAATEVVNILRSLGVVFRLSNTVLGLTLLAWGNSIGDAFSDFTLARQGYPRMAFSACFGGIIFNILVGVGLGCLLQISRSHTEVKLEPDGLLVWVLAGALGLSLVFSLVSVPLQCFQLSRVYGFCLLLFYLNFLVVALLTEFGVIHLKSM

SEQ ID NO: 216 - protein, 120 aa, Homo sapiens
MMPSRTNLATGIPSSKVKYSRLSSTDDGYIDLQFKKTPPKIPYKAIALATVLFLIGAFLIIIGSLLLSGYISKGGADRAVPVLIIGILVFLPGFYHLRIAYYASKGYRGYSYDDIPDFDD

SEQ ID NO: 217 - protein, 497 aa, Homo sapiens
MEGSGEQPGPQPQHPGDHRIRDGDFVVLKREDVFKAVQVQRRKKVTFEKQWFYLDNVIGHSYGTAFEVTSGGSLQPKKKREEPTAETKEAGTDNRNIVDDGKSQKLTQDDIKALKDKGIKGEEIVQQLIENSTTFRDKTEFAQDKYIKKKKKKYEAIITVVKPSTRILSIMYYAREPGKINHMRYDTLAQMLTLGNIRAGNKMIVMETCAGLVLGAMMERMGGFGSIIQLYPGGGPVRAATACFGFPKSFLSGLYEFPLNKVDSLLHGTFSAKMLSSEPKDSALVEESNGTLEEKQASEQENEDSMAEAPESNHPEDQETMETISQDPEHKGPKERGSKKDYIQEKQRRQEEQRKRHLEAAALLSERNADGLIVASRFHPTPLLLSLLDFVAPSRPFVVYCQYKEPLLECYTKLRERGGVINLRLSETWLRNYQVLPDRSHPKLLMSGGGGYLLSGFTVAMDNLKADTSLKSNASTLESHETEEPAAKKRKCPESDS

SEQ ID NO: 218 - protein, 480 aa, Homo sapiens
MAASVVCRAATAGAQVLLRARRSPALLRTPALRSTATFAQALQFVPETQVSLLDNGLRVASEQSSQPTCTVGVWIDVGSRFETEKNNGAGYFLEHLAFKGTKNRPGSALEKEVESMGAHLNAYSTREHTAYYIKALSKDLPKAVELLGDIVQNCSLEDSQIEKERDVILREMQENDASMRDVVFNYLHATAFQGTPLAQAVEGPSENVRKLSRADLTEYLSTHYKAPRMVLAAAGGVEHQQLLDLAQKHLGGIPWTYAEDAVPTLTPCRFTGSEIRHRDDALPFAHVAIAVEGPGWASPDNVALQVANAIIGHYDCTYGGGVHLSSPLASGAVANKLCQSFQTFSICYAETGLLGAHFVCDRMKIDDMMFVLQGQWMRLCTSATESEVARGKNILRNALVSHLDGTTPVCEDIGRSLLTYGRRIPLAEWESRIAEVDASVVREICSKYIYDQCPAVAGYGPIEQLPDYNRIRSGMFWLRF

SEQ ID NO: 219 - protein, 525 aa, Homo sapiens
MWEAQFLGLLFLQPLWVAPVKPLQPGAEVPVVWAQEGAPAQLPCSPTIPLQDLSLLRRAGVTWQHQPDSGPPAAAPGHPLAPGPHPAAPSSWGPRPRRYTVLSVGPGGLRSGRLPLQPRVQLDERGRQRGDFSLWLRPARRADAGEYRAAVHLRDRALSCRLRLRLGQASMTASPPGSLRASDWVILNCSFSRPDRPASVHWFRNRGQGRVPVRESPHHHLAESFLFLPQVSPMDSGPWGCILTYRDGFNVSIMYNLTVLGLEPPTPLTVYAGAGSRVGLPCRLPAGVGTRSFLTAKWTPPGGGPDLLVTGDNGDFTLRLEDVSQAQAGTYTCHIHLQEQQLNATVTLAIITVTPKSFGSPGSLGKLLCEVTPVSGQERFVWSSLDTPSQRSFSGPWLEAQEAQLLSQPWQCQLYQGERLLGAAVYFTELSSPGAQRSGRAPGALPAGHLLLFLILGVLSLLLLVTGAFGFHLWRRQWRPRRFSALEQGIHPPQAQSKIEELEQEPEPEPEPEPEPEPEPEPEQL

SEQ ID NO: 220 - protein, 248 aa, Homo sapiens
MFRFMRDVEPEDPMFLMDPFAIHRQHMSRMLSGGFGYSPFLSITDGNMPGTRPASRRMQQAGAVSPFGMLGMSGGFMDMFGMMNDMIGNMEHMTAGGNCQTFSSSTVISYSNTGDGAPKVYQETSEMRSAPGGIRETRRTVRDSDSGLEQMSIGHHIRDRAHILQRSRNHRTGDQEERQDYINLDESEAAAFDDEWRRETSRFRQQRPLEFRRLESSGAGGRRAEGPPRLAIQGPEDSPSRQSRRYDW

SEQ ID NO: 221 - protein, 234 aa, Homo sapiens
MSETSFNLISEKCDILSILRDHPENRIYRRKIEELSKRFTAIRKTKGDGNCFYRALGYSYLESLLGKSREIFKFKERVLQTPNDLLAAGFEEHKFRNFFNAFYSVVELVEKDGSVSSLLKVFNDQSASDHIVQFLRLLTSAFIRNRADFFRHFIDEEMDIKDFCTHEVEPMATECDHIQITALSQALSIALQVEYVDEMDTALNHHVFPEAATPSVYLLYKTSHYNILYAADKH

SEQ ID NO: 222 - protein, 338 aa, Homo sapiens
MEYFMVPTQKVPSLQHFRKTEKEVIGGLCSLANIPLTPETQRDQERRIRREIANSNERRRMQSINAGFQSLKTLIPHTDGEKLSKAAILQQTAEYIFSLEQEKTRLLQQNTQLKRFIQELSGSSPKRRRAEDKDEGIGSPDIWEDEKAEDLRREMIELRQQLDKERSVRMMLEEQVRSLEAHMYPEKLKVIAQQVQLQQQQEQVRLLHQEKLEREQQQLRTQLLPPPAPTHHPTVIVPAPPPPPSHHINVVTMGPSSVINSVSTSRQNLDTIVQAIQHIEGTQEKQELEEEQRRAVIVKPVRSCPEAPTSDTASDSEASDSDAMDQSREEPSGDGELP

SEQ ID NO: 223 - protein, 485 aa, Homo sapiens
MALPPFFGQGRPGPPPPQPPPPAPFGCPPPPLPSPAFPPPLPQRPGPFPGASAPFLQPPLALQPRASAEASRGGGGAGAFYPVPPPPLPPPPPQCRPFPGTDAGERPRPPPPGPGPPWSPRWPEAPPPPADVLGDAALQRLRDRQWLEAVFGTPRRAGCPVPQRTHAGPSLGEVRARLLRALRLVRRLRGLSQALREAEADGAAWVLLYSQTAPLRAELAERLQPLTQAAYVGEARRRLERVRRRRLRLRERAREREAEREAEAARAVEREQEIDRWRVKCVQEVEEKKREQELKAAADGVLSEVRKKQADTKRMVDILRALEKLRKLRKEAAARKGVCPPASADETFTHHLQRLRKLIKKRSELYEAEERALRVMLEGEQEEERKRELEKKQRKEKEKILLQKREIESKLFGDPDEFPLAHLLEPFRQYYLQAEHSLPALIQIRHDWDQYLVPSDHPKGNFVPQGWVLPPLPSNDIWATAVKLH

SEQ ID NO: 224 - protein, 308 aa, Homo sapiens
MGEIKVSPDYNWFRGTVPLKKIIVDDDDSKIWSLYDAGPRSIRCPLIFLPPVSGTADVFFRQILALTGWGYRVIALQYPVYWDHLEFCDGFRKLLDHLQLDKVHLFGASLGGFLAQKFAEYTHKSPRVHSLILCNSFSDTSIFNQTWTANSFWLMPAFMLKKIVLGNFSSGPVDPMMADAIDFMVDRLESLGQSELASRLTLNCQNSYVEPHKIRDIPVTIMDVFDQSALSTEAKEEMYKLYPNARRAHLKTGGNFPYLCRSAEVNLYVQIHLLQFHGTKYAAIDPSMVSAEELEVQKGSLGISQEEQ

SEQ ID NO: 225 - protein, 955 aa, Homo sapiens
MPSLPAPPAPLLLLGLLLLGSRPARGAGPEPPVLPIRSEKEPLPVRGAAGCTFGGKVYALDETWHPDLGEPFGVMRCVLCACEAPQWGRRTRGPGRVSCKNIKPECPTPACGQPRQLPGHCCQTCPQERSSSERQPSGLSFEYPRDPEHRSYSDRGEPGAEERARGDGHTDFVALLTGPRSQAVARARVSLLRSSLRFSISYRRLDRPTRIRFSDSNGSVLFEHPAAPTQDGLVCGVWRAVPRLSLRLLRAEQLHVALVTLTHPSGEVWGPLIRHRALAAETFSAILTLEGPPQQGVGGITLLTLSDTEDSLHFLLLFRGLLEPRSGGLTQVPLRLQILHQGQLLRELQANVSAQEPGFAEVLPNLTVQEMDWLVLGELQMALEWAGRPGLRISGHIAARKSCDVLQSVLCGADALIPVQTGAAGSASLTLLGNGSLIYQVQVVGTSSEVVAMTLETKPQRRDQRTVLCHMAGLQPGGHTAVGICPGLGARGAHMLLQNELFLNVGTKDFPDGELRGHVAALPYCGHSARHDTLPVPLAGALVLPPVKSQAAGHAWLSLDTHCHLHYEVLLAGLGGSEQGTVTAHLLGPPGTPGPRRLLKGFYGSEAQGVVKDLEPELLRHLAKGMASLMITTKGSPRGELRGQVHIANQCEVGGLRLEAAGAEGVRALGAPDTASAAPPVVPGLPALAPAKPGGPGRPRDPNTCFFEGQQRPHGARWAPNYDPLCSLCTCQRRTVICDPVVCPPPSCPHPVQAPDQCCPVCPEKQDVRDLPGLPRSRDPGEGCYFDGDRSWRAAGTRWHPVVPPFGLIKCAVCTCKGGTGEVHCEKVQCPRLACAQPVRVNPTDCCKQCPVGSGAHPQLGDPMQADGPRGCRFAGQWFPESQSWHPSVPPFGEMSCITCRCGAGVPHCERDDCSLPLSCGSGKESRCCSRCTAHRRPAPETRTDPELEKEAEGS

SEQ ID NO: 226 - protein, 305 aa, Homo sapiens
MAAGLARLLLLLGLSAGGPAPAGAAKMKVVEEPNAFGVNNPFLPQASRLQAKRDPSPVSGPVHLFRLSGKCFSLVESTYKYEFCPFHNVTQHEQTFRWNAYSGILGIWHEWEIANNTFTGMWMRDGDACRSRSRQSKVELACGKSNRLAHVSEPSTCVYALTFETPLVCHPHALLVYPTLPEALQRQWDQVEQDLADELITPQGHEKLLRTLFEDAGYLKTPEENEPTQLEGGPDSLGFETLENCRKAHKELSKEIKRLKGLLTQHGIPYTRPTETSNLEHLGHETPRAKSPEQLRGDPGLRGSL

SEQ ID NO: 227 - protein, 1498 aa, Homo sapiens
MDGASAEQDGLQEDRSHSGPSSLPEAPLKPPGPLVPPDQQDKVQCAEVNRASTEGESPDGPGQGGLCQNGPTPPFPDPPSSLDPTTSPVGPDASPGVAGFHDNLRKSQGTSAEGSVRKEALQSLRLSLPMQETQLCSTDSPLPLEKEEQVRLQARKWLEEQLKQYRVKRQQERSSQPATKTRLFSTLDPELMLNPENLPRASTLAMTKEYSFLRTSVPRGPKVGSLGLPAHPREKKTSKSSKIRSLADYRTEDSNAGNSGGNVPAPDSTKGSLKQNRSSAASVVSEISLSPDTDDRLENTSLAGDSVSEVDGNDSDSSSYSSASTRGTYGILSKTVGTQDTPYMVNGQEIPADTLGQFPSIKDVLQAAAAEHQDQGQEVNGEVRSRRDSICSSVSLESSAAETQEEMLQVLKEKMRLEGQLEALSLEASQALKEKAELQAQLAALSTKLQAQVECSHSSQQRQDSLSSEVDTLKQSCWDLERAMTDLQNMLEAKNASLASSNNDLQVAEEQYQRLMAKVEDMQRSMLSKDNTVHDLRQQMTALQSQLQQVQLERTTLTSKLKASQAEISSLQSVRQWYQQQLALAQEARVRLQGEMAHIQVGQMTQAGLLEHLKLENVSLSQQLTETQHRSMKEKGRIAAQLQGIEADMLDQEAAFMQIQEAKTMVEEDLQRRLEEFEGERERLQRMADSAASLEQQLEQVKLTLLQRDQQLEALQQEHLDLMKQLTLTQEALQSREQSLDALQTHYDELQARLGELQGEAASREDTICLLQNEKIILEAALQAAKSGKEELDRGARRLEEGTEETSETLEKLREELAIKSGQVEHLQQETAALKKQMQKIKEQFLQQKVMVEAYRRDATSKDQLISELKATRKRLDSELKELRQELMQVHGEKRTAEAELSRLHREVAQVRQHMADLEGHLQSAQKERDEMETHLQSLQFDKEQMVAVTEANEALKKQIEELQQEARKAITEQKQKMRRLGSDLTSAQKEMKTKHKAYENAVGILSRRLQEALAAKEAADAELGQLRAQGGSSDSSLALHERIQALEAELQAVSHSKTLLEKELQEVIALTSQELEESREKVLELEDELQESRGFRKKIKRLEESNKKLALELEHEKGKLTGLGQSNAALREHNSILETALAKREADLVQLNLQVQAVLQRKEEEDRQMKHLVQALQASLEKEKEKVNSLKEQVAAAKVEAGHNRRHFKAASLELSEVKKELQAKEHLVQKLQAEADDLQIREGKHSQEIAQFQAELAEARAQLQLLQKQLDEQLSKQPVGNQEMENLKWEVDQKEREIQSLKQQLDLTEQQGRKELEGLQQLLQNVKSELEMAQEDLSMTQKDKFMLQAKVSELKNNMKTLLQQNQQLKLDLRRGAAKTRKEPKGEASSSNPATPIKIPDCPVPASLLEELLRPPPAVSKEPLKNLNSCLQQLKQEMDSLQRQMEEHALTVHESLSSWTPLEPATASPVPPGGHAGPRGDPQRHSQSRASKEGPGE

SEQ ID NO: 228 - protein, 346 aa, Homo sapiens
MARPGQRWLGKWLVAMVVWALCRLATPLAKNLEPVSWSSLNPKFLSGKGLVIYPKIGDKLDIICPRAEAGRPYEYYKLYLVRPEQAAACSTVLDPNVLVTCNRPEQEIRFTIKFQEFSPNYMGLEFKKHHDYYITSTSNGSLEGLENREGGVCRTRTMKIIMKVGQDPNAVTPEQLTTSRPSKEADNTVKMATQAPGSRGSLGDSDGKHETVNQEEKSGPGASGGSSGDPDGFFNSKVALFAAVGAGCVIFLLIIIFLTVLLLKLRKRHRKHTQQRAAALSLSTLASPKGGSGTAGTEPSDIIIPLRTTENNYCPHYEKVSGDYGHPVYIVQEMPPQSPANIYYKV

SEQ ID NO: 229 - protein, 1203 aa, Homo sapiens
MAACGRVRRMFRLSAALHLLLLFAAGAEKLPGQGVHSQGQGPGANFVSFVGQAGGGGPAGQQLPQLPQSSQLQQQQQQQQQQQQPQPPQPPFPAGGPPARRGGAGAGGGWKLAEEESCREDVTRVCPKHTWSNNLAVLECLQDVREPENEISSDCNHLLWNYKLNLTTDPKFESVAREVCKSTITEIKECADEPVGKGYMVSCLVDHRGNITEYQCHQYITKMTAIIFSDYRLICGFMDDCKNDINILKCGSIRLGEKDAHSQGEVVSCLEKGLVKEAEEREPKIQVSELCKKAILRVAELSSDDFHLDRHLYFACRDDRERFCENTQAGEGRVYKCLFNHKFEESMSEKCREALTTRQKLIAQDYKVSYSLAKSCKSDLKKYRCNVENLPRSREARLSYLLMCLESAVHRGRQVSSECQGEMLDYRRMLMEDFSLSPEIILSCRGEIEHHCSGLHRKGRTLHCLMKVVRGEKGNLGMNCQQALQTLIQETDPGADYRIDRALNEACESVIQTACKHIRSGDPMILSCLMEHLYTEKMVEDCEHRLLELQYFISRDWKLDPVLYRKCQGDASRLCHTHGWNETSEFMPQGAVFSCLYRHAYRTEEQGRRLSRECRAEVQRILHQRAMDVKLDPALQDKCLIDLGKWCSEKTETGQELECLQDHLDDLVVECRDIVGNLTELESEDIQIEALLMRACEPIIQNFCHDVADNQIDSGDLMECLIQNKHQKDMNEKCAIGVTHFQLVQMKDFRFSYKFKMACKEDVLKLCPNIKKKVDVVICLSTTVRNDTLQEAKEHRVSLKCRRQLRVEELEMTEDIRLEPDLYEACKSDIKNFCSAVQYGNAQIIECLKENKKQLSTRCHQKVFKLQETEMMDPELDYTLMRVCKQMIKRFCPEADSKTMLQCLKQNKNSELMDPKCKQMITKRQITQNTDYRLNPMLRKACKADIPKFCHGILTKAKDDSELEGQVISCLKLRYADQRLSSDCEDQIRIIIQESALDYRLDPQLQLHCSDEISSLCAEEAAAQEQTGQVEECLKVNLLKIKTELCKKEVLNMLKESKADIFVDPVLHTACALDIKHHCAAITPGRGRQMSCLMEALEDKRVRLQPECKKRLNDRIEMWSYAAKVAPADGFSDLAMQVMTSPSKNYILSVISGSICILFLIGLMCGRITKRVTRELKDRLQYRSETMAYKGLVWSQDVTGSPA

SEQ ID NO: 230 - protein, 618 aa, Homo sapiens
MVSPRMSGLLSQTVILALIFLPQTRPAGVFELQIHSFGPGPGPGAPRSPCSARLPCRLFFRVCLKPGLSEEAAESPCALGAALSARGPVYTEQPGAPAPDLPLPDGLLQVPFRDAWPGTFSFIIETWREELGDQIGGPAWSLLARVAGRRRLAAGGPWARDIQRAGAWELRFSYRARCEPPAVGTACTRLCRPRSAPSRCGPGLRPCAPLEDECEAPLVCRAGCSPEHGFCEQPGECRCLEGWTGPLCTVPVSTSSCLSPRGPSSATTGCLVPGPGPCDGNPCANGGSCSETPRSFECTCPRGFYGLRCEVSGVTCADGPCFNGGLCVGGADPDSAYICHCPPGFQGSNCEKRVDRCSLQPCRNGGLCLDLGHALRCRCRAGFAGPRCEHDLDDCAGRACANGGTCVEGGGAHRCSCALGFGGRDCRERADPCAARPCAHGGRCYAHFSGLVCACAPGYMGARCEFPVHPDGASALPAAPPGLRPGDPQRYLLPPALGLLVAAGVAGAALLLVHVRRRGHSQDAGSRLLAGTPEPSVHALPDALNNLRTQEGSGDGPSSSVDWNRPEDVDPQGIYVISAPSIYAREVATPLFPPLHTGRAGQRQHLLFPYPSSILSVK

SEQ ID NO: 231 - protein, 206 aa, Homo sapiens
MAPSHLSVREMREDEKPLVLEMLKAGVKDTENRVALHALTRPPALLLLAAASSGLRFVLASFALALLLPVFLAVAAVKLGLRARWGSLPPPGGLGGPWVAVRGSGDVCGVLALAPGTNAGDGARVTRLSVSRWHRRRGVGRRLLAFAEARARAWAGGMGEPRARLVVPVAVAAWGVGGMLEGCGYQAEGGWGCLGYTLVREFSKDL

SEQ ID NO: 232 - protein, 1098 aa, Homo sapiens
MTLQELVHKAASCYMDRVAVCFDECNNQLPVYYTYKTVVNAASELSNFLLLHCDFQGIREIGLYCQPGIDLPSWILGILQVPAAYVPIEPDSPPSLSTHFMKKCNLKYILVEKKQINKFKSFHETLLNYDTFTVEHNDLVLFRLHWKNTEVNLMLNDGKEKYEKEKIKSISSEHVNEEKAEEHMDLRLKHCLAYVLHTSGTTGIPKIVRVPHKCIVPNIQHFRVLFDITQEDVLFLASPLTFDPSVVEIFLALSSGASLLIVPTSVKLLPSKLASVLFSHHRVTVLQATPTLLRRFGSQLIKSTVLSATTSLRVLALGGEAFPSLTVLRSWRGEGNKTQIFNVYGITEVSSWATIYRIPEKTLNSTLKCELPVQLGFPLLGTVVEVRDTNGFTIQEGSGQVFLGGRNRVCFLDDEVTVPLGTMRATGDFVTVKDGEIFFLGRKDSQIKRHGKRLNIELVQQVAEELQQVESCAVTWYNQEKLILFMVSKDASVKEYIFKELQKYLPSHAVPDELVLIDSLPFTSHGKIDVSELNKIYLNYINLKSENKLSGKEDLWEKLQYLWKSTLNLPEDLLRVPDESLFLNSGGDSLKSIRLLSEIEKLVGTSVPGLLEIILSSSILEIYNHILQTVVPDEDVTFRKSCATKRKLSDINQEEASGTSLHQKAIMTFTCHNEINAFVVLSRGSQILSLNSTRFLTKLGHCSSACPSDSVSQTNIQNLKGLNSPVLIGKSKDPSCVAKVSEEGKPAIGTQKMELHVRWRSDTGKCVDASPLVVIPTFDKSSTTVYIGSHSHRMKAVDFYSGKVKWEQILGDRIESSACVSKCGNFIVVGCYNGLVYVLKSNSGEKYWMFTTEDAVKSSATMDPTTGLIYIGSHDQHAYALDIYRKKCVWKSKCGGTVFSSPCLNLIPHHLYFATLGGLLLAVNPATGNVIWKHSCGKPLFSSPQCCSQYICIGCVDGNLLCFTHFGEQVWQFSTSGPIFSSPCTSPSEQKIFFGSHDCFIYCCNMKGHLQWKFETTSRVYATPFAFHNYNGSNEMLLAAASTDGKVWILESQSGQLQSVYELPGEVFSSPVVLESMLIIGCRDNYVYCLDLLGGNQK

SEQ ID NO: 233 - protein, 1761 aa, Homo sapiens
MQFQLTLFLHLGWLSYSKAQDDCNRGACHPTTGDLLVGRNTQLMASSTCGLSRAQKYCILSYLEGEQKCFICDSRFPYDPYDQPNSHTIENVIVSFEPDREKKWWQSENGLDHVSIRLDLEALFRFSHLILTFKTFRPAAMLVERSTDYGHNWKVFKYFAKDCATSFPNITSGQAQGVGDIVCDSKYSDIEPSTGGEVVLKVLDPSFEIENPYSPYIQDLVTLTNLRINFTKLHTLGDALLGRRQNDSLDKYYYALYEMIVRGSCFCNGHASECRPMQKMRGDVFSPPGMVHGQCVCQHNTDGPNCERCKDFFQDAPWRPAADLQDNACRSCSCNSHSSRCHFDMTTYLASGGLSGGVCEDCQHNTEGQHCDRCRPLFYRDPLKTISDPYACIPCECDPDGTISGGICVSHSDPALGSVAGQCLCKENVEGAKCDQCKPNHYGLSATDPLGCQPCDCNPLGSLPFLTCDVDTGQCLCLSYVTGAHCEECTVGYWGLGNHLHGCSPCDCDIGGAYSNVCSPKNGQCECRPHVTGRSCSEPAPGYFFAPLNFYLYEAEEATTLQGLAPLGSETFGQSPAVHVVLGEPVPGNPVTWTGPGFARVLPGAGLRFAVNNIPFPVDFTIAIHYETQSAADWTVQIVVNPPGGSEHCIPKTLQSKPQSFALPAATRIMLLPTPICLEPDVQYSIDVYFSQPLQGESHAHSHVLVDSLGLIPQINSLENFCSKQDLDEYQLHNCVEIASAMGPQVLPGACERLIISMSAKLHDGAVACKCHPQGSVGSSCSRLGGQCQCKPLVVGRCCDRCSTGSYDLGHHGCHPCHCHPQGSKDTVCDQVTGQCPCHGEVSGRRCDRCLAGYFGFPSCHPCPCNRFAELCDPETGSCFNCGGFTTGRNCERCIDGYYGNPSSGQPCRPCLCPDDPSSNQYFAHSCYQNLWSSDVICNCLQGYTGTQCGECSTGFYGNPRISGAPCQPCACNNNIDVTDPESCSRVTGECLRCLHNTQGANCQLCKPGHYGSALNQTCRRCSCHASGVSPMECPPGGGACLCDPVTGACPCLPNVTGLACDRCADGYWNLVPGRGCQSCDCDPRTSQSSHCDQLTGQCPCKLGYGGKRCSECQENYYGDPPGRCIPCDCNRAGTQKPICDPDTGMCRCREGVSGQRCDRCARGHSQEFPTCLQCHLCFDQWDHTISSLSKAVQGLMRLAANMEDKRETLPVCEADFKDLRGNVSEIERILKHPVFPSGKFLKVKDYHDSVRRQIMQLNEQLKAVYEFQDLKDTIERAKNEADLLLEDLQEEIDLQSSVLNASIADSSENIKKYYHISSSAEKKINETSSTINTSANTRNDLLTILDTLTSKGNLSLERLKQIKIPDIQILNEKVCGDPGNVPCVPLPCGGALCTGRKGHRKCRGPGCHGSLTLSTNALQKAQEAKSIIRNLDKQVRGLKNQIESISEQAEVSKNNALQLREKLGNIRNQSDSEEENINLFIKKVKNFLLEENVPPEDIEKVANGVLDIHLPIPSQNLTDELVKIQKHMQLCEDYRTDENRLNEEADGAQKLLVKAKAAEKAANILLNLDKTLNQLQQAQITQGRANSTITQLTANITKIKKNVLQAENQTREMKSELELAKQRSGLEDGLSLLQTKLQRHQDHAVNAKVQAESAQHQAGSLEKEFVELKKQYAILQRKTSTTGLTKETLGKVKQLKDAAEKLAGDTEAKIRRITDLERKIQDLNLSRQAKADQLRILEDQVVAIKNEIVEQEKKYARCYS

SEQ ID NO: 234 - protein, 509 aa, Homo sapiens
MQSWSRVYCSLAKRGHFNRISHGLQGLSAVPLRTYADQPIDADVTVIGSGPGGYVAAIKAAQLGFKTVCIEKNETLGGTCLNVGCIPSKALLNNSHYYHMAHGKDFASRGIEMSEVRLNLDKMMEQKSTAVKALTGGIAHLFKQNKVVHVNGYGKITGKNQVTATKADGGTQVIDTKNILIATGSEVTPFPGITIDEDTIVSSTGALSLKKVPEKMVVIGAGVIGVELGSVWQRLGADVTAVEFLGHVGGVGIDMEISKNFQRILQKQGFKFKLNTKVTGATKKSDGKIDVSIEAASGGKAEVITCDVLLVCIGRRPFTKNLGLEELGIELDPRGRIPVNTRFQTKIPNIYAIGDVVAGPMLAHKAEDEGIICVEGMAGGAVHIDYNCVPSVIYTHPEVAWVGKSEEQLKEEGIEYKVGKFPFAANSRAKTNADTDGMVKILGQKSTDRVLGAHILGPGAGEMVNEAALALEYGASCEDIARVCHAHPTLSEAFREANLAASFGKSINF

SEQ ID NO: 235 - protein, 183 aa, Homo sapiens
MENGAVYSPTTEEDPGPARGPRSGLAAYFFMGRLPLLRRVLKGLQLLLSLLAFICEEVVSQCTLCGGLYFFEFVSCSAFLLSLLILIVYCTPFYERVDTTKVKSSDFYITLGTGCVFLLASIIFVSTHDRTSAEIAAIVFGFIASFMFLLDFITMLYEKRQESQLRKPENTTRAEALTEPLNA

SEQ ID NO: 236 - protein, 345 aa, Homo sapiens
MISPVLILFSSFLCHVAIAGRTCPKPDDLPFSTVVPLKTFYEPGEEITYSCKPGYVSRGGMRKFICPLTGLWPINTLKCTPRVCPFAGILENGAVRYTTFEYPNTISFSCNTGFYLNGADSAKCTEEGKWSPELPVCAPIICPPPSIPTFATLRVYKPSAGNNSLYRDTAVFECLPQHAMFGNDTITCTTHGNWTKLPECREVKCPFPSRPDNGFVNYPAKPTLYYKDKATFGCHDGYSLDGPEEIECTKLGNWSAMPSCKASCKVPVKKATVVYQGERVKIQEKFKNGMLHGDKVSFFCKNKEKKCSYTEDAQCIDGTIEVPKCFKEHSSLAFWKTDASDVKPC

SEQ ID NO: 237 - protein, 227 aa, Homo sapiens
MADLLGSILSSMEKPPSLGDQETRRKAREQAARLKKLQEQEKQQKVEFRKRMEKEVSDFIQDSGQIKKKFQPMNKIERSILHDVVEVAGLTSFSFGEDDDCRYVMIFKKEFAPSDEELDSYRRGEEWDPQKAEEKRKLKELAQRQEEEAAQQGPVVVSPASDYKDKYSHLIGKGAAKDAAHMLQANKTYGCVPVANKRDTRSIEEAMNEIRAKKRLRQSGEELPPTS

SEQ ID NO: 238 - protein, 257 aa, Homo sapiens
MASKIGSRRWMLQLIMQLGSVLLTRCPFWGCFSQLMLYAERAEARRKPDIPVPYLYFDMGAAVLCASFMSFGVKRRWFALGAALQLAISTYAAYIGGYVHYGDWLKVRMYSRTVAIIGGFLVLASGAGELYRRKPRSRSLQSTGQVFLGIYLICVAYSLQHSKEDRLAYLNHLPGGELMIQLFFVLYGILALAFLSGYYVTLAAQILAVLLPPVMLLIDGNVAYWHNTRRVEFWNQMKLLGESVGIFGTAVILATDG

SEQ ID NO: 239 - protein, 950 aa, Homo sapiens
MTWRMGPRFTMLLAMWLVCGSEPHPHATIRGSHGGRKVPLVSPDSSRPARFLRHTGRSRGIERSTLEEPNLQPLQRRRSVPVLRLARPTEPPARSDINGAAVRPEQRPAARGSPREMIRDEGSSARSRMLRFPSGSSSPNILASFAGKNRVWVISAPHASEGYYRLMMSLLKDDVYCELAERHIQQIVLFHQAGEEGGKVRRITSEGQILEQPLDPSLIPKLMSFLKLEKGKFGMVLLKKTLQVEERYPYPVRLEAMYEVIDQGPIRRIEKIRQKGFVQKCKASGVEGQVVAEGNDGGGGAGRPSLGSEKKKEDPRRAQVPPTRESRVKVLRKLAATAPALPQPPSTPRATTLPPAPATTVTRSTSRAVTVAARPMTTTAFPTTQRPWTPSPSHRPPTTTEVITARRPSVSENLYPPSRKDQHRERPQTTRRPSKATSLESFTNAPPTTISEPSTRAAGPGRFRDNRMDRREHGHRDPNVVPGPPKPAKEKPPKKKAQDKILSNEYEEKYDLSRPTASQLEDELQVGNVPLKKAKESKKHEKLEKPEKEKKKKMKNENADKLLKSEKQMKKSEKKSKQEKEKSKKKKGGKTEQDGYQKPTNKHFTQSPKKSVADLLGSFEGKRRLLLITAPKAENNMYVQQRDEYLESFCKMATRKISVITIFGPVNNSTMKIDHFQLDNEKPMRVVDDEDLVDQRLISELRKEYGMTYNDFFMVLTDVDLRVKQYYEVPITMKSVFDLIDTFQSRIKDMEKQKKEGIVCKEDKKQSLENFLSRFRWRRRLLVISAPNDEDWAYSQQLSALSGQACNFGLRHITILKLLGVGEEVGGVLELFPINGSSVVEREDVPAHLVKDIRNYFQVSPEYFSMLLVGKDGNVKSWYPSPMWSMVIVYDLIDSMQLRRQEMAIQQSLGMRCPEDEYAGYGYHSYHQGYQDGYQDDYRHHESYHHGYPY

SEQ ID NO: 240 - protein, 249 aa, Homo sapiens
MAMLRVQPEAQAKVDVFREDLCTKTENLLGSYFPKKISELDAFLKEPALNEANLSNLKAPLDIPVPDPVKEKEKEERKKQQEKEDKDEKKKGEDEDKGPPCGPVNCNEKIVVLLQRLKPEIKDVIEQLNLVTTWLQLQIPRIEDGNNFGVAVQEKVFELMTSLHTKLEGFHTQISKYFSERGDAVTKAAKQPHVGDYRQLVHELDEAEYRDIRLMVMEIRNAYAVLYDIILKNFEKLKKPRGETKGMIY

SEQ ID NO: 241 - protein, 363 aa, Homo sapiens
MASGDFCSPGEGMEILQQVCSKQLPPCNLSKEDLLQNPYFSKLLLNLSQHVDESGLSLTLAKEQAQAWKEVRLHKTTWLRSEILHRVIQELLVDYYVKIQDTNVTSEDKKFHETLEQRLLVTELMRLLGPSQEREIPPLLGLEKADLLELMPLSEDFVWMRARLQQEVEEQLKKKCFTLLCYYDPNSDADSETVKAAKVWKLAEVLVGEQQQCQDAKSQQKEQMLLLEKKSAAYSQVLLRCLTLLQRLLQEHRLKTQSELDRINAQYLEVKCGAMILKLRMEELKILSDTYTVEKVEVHRLIRDRLEGAIHLQEQDMENSRQVLNSYEVLGEEFDRLVKEYTVLKQATENKRWALQEFSKVYR

SEQ ID NO: 242 - protein, 335 aa, Homo sapiens
MPAVLGFEGSANKIGVGVVRDGKVLANPRRTYVTPPGTGFLPGDTARHHRAVILDLLQEALTESGLTSQDIDCIAYTKGPGMGAPLVSVAVVARTVAQLWNKPLVGVNHCIGHIEMGRLITGATSPTVLYVSGGNTQVIAYSEHRYRIFGETIDIAVGNCLDRFARVLKISNDPSPGYNIEQMAKRGKKLVELPYTVKGMDVSFSGILSFIEDVAHRMLATGECTPEDLCFSLQETVFAMLVEITERAMAHCGSQEALIVGGVGCNVRLQEMMATMCQERGARLFATDERFCIDNGAMIAQAGWEMFRAGHRTPLSDSGVTQRYRTDEVEVTWRD

SEQ ID NO: 243 - protein, 199 aa, Homo sapiens
MPEAPPLLLAAVLLGLVLLVVLLLLLRHWGWGLCLIGWNEFILQPIHNLLMGDTKEQRILNHVLQHAEPGNAQSVLEAIDTYCEQKEWAMNVGDKKGKIVDAVIQEHQPSVLLELGAYCGYSAVRMARLLSPGARLITIEINPDCAAITQRMVDFAGVKDKVCRDGLLSVRTWALTGAVPGHPCGWSVPGHHPPAEEEV

SEQ ID NO: 244 - protein, 546 aa, Homo sapiens [sequence omitted]

SEQ ID NO: 245 - protein, 191 aa, Homo sapiens
MGKKTKRTADSSSSEDEEEYVVEKVLDRRVVKGQVEYLLKWKGFSEEHNTWEPEKNLDCPELISEFMKKYKKMKEGENNKPREKSESNKRKSNFSNSADDIKSKKKREQSNDIARGFERGLEPEKIIGATDSCGDLMFLMKWKDTDEADLVLAKEANVKCPQIVIAFYEERLTWHAYPEDAENKEKETAKS

SEQ ID NO: 246 - protein, 609 aa, Homo sapiens
MEGKPMRRCTNIRPGETGMDVTSRCTLGDPNKLPEGVPQPARMPYISDKHPRQTLEVINLLRKHRELCDVVLVVGAKKIYAHRVILSACSPYFRAMFTGELAESRQTEVVIRDIDERAMELLIDFAYTSQITVEEGNVQTLLPAACLLQLAEIQEACCEFLKRQLDPSNCLGIRAFADTHSCRELLRIADKFTQHNFQEVMESEEFMLLPANQLIDIISSDELNVRSEEQVFNAVMAWVKYSIQERRPQLPQVLQHVRLPLLSPKFLVGTVGSDPLIKSDEECRDLVDEAKNYLLLPQERPLMQGPRTRPRKPIRCGEVLFAVGGWCSGDAISSVERYDPQTNEWRMVASMSKRRCGVGVSVLDDLLYAVGGHDGSSYLNSVERYDPKTNQWSSDVAPTSTCRTSVGVAVLGGFLYAVGGQDGVSCLNIVERYDPKENKWTRVASMSTRRLGVAVAVLGGFLYAVGGSDGTSPLNTVERYNPQENRWHTIAPMGTRRKHLGCAVYQDMIYAVGGRDDTTELSSAERYNPRTNQWSPVVAMTSRRSGVGLAVVNGQLMAVGGFDGTTYLKTIEVFDPDANTWRLYGGMNYRRLGGGVGVIKMTHCESHIW

SEQ ID NO: 247 - protein, 369 aa, Homo sapiens
MEGSLEREAPAGALAAVLKHSSTLPPESTQVRGYDFNRGVNYRALLEAFGTTGFQATNFGRAVQQVNAMIEKKLEPLSQDEDQHADLTQSRRPLTSCTIFLGYTSNLISSGIRETIRYLVQHNMVDVLVTTAGGVEEDLIKCLAPTYLGEFSLRGKELRENGINRIGNLLVPNENYCKFEDWLMPILDQMVMEQNTEGVKWTPSKMIARLGKEINNPESVYYWAQKNHIPVFSPALTDGSLGDMIFFHSYKNPGLVLDIVEDLRLINTQAIFAKCTGMIILGGGVVKHHIANANLMRNGADYAVYINTAQEFDGSDSGARPDEAVSWGKIRVDAQPVKVYADASLVFPLLVAETFAQKMDAFMHEKNED

SEQ ID NO: 248 - protein, 504 aa, Homo sapiens
MAAQALALLREVARLEAPLEELRALHSVLQAVPLNELRQQAAELRLGPLFSLLNENHREKTTLCVSILERLLQAMEPVHVARNLRVDLQRGLIHPDDSVKILTLSQIGRIVENSDAVTEILNNAELLKQIVYCIGGENLSVAKAAIKSLSRISLTQAGLEALFESNLLDDLKSVMKTNDIVRYRVYELIIEISSVSPESLNYCTTSGLVTQLLRELTGEDVLVRATCIEMVTSLAYTHHGRQYLAQEGVIDQISNIIVGADSDPFSSFYLPGFVKFFGNLAVMDSPQQICERYPIFVEKVFEMIESQDPTMIGVAVDTVGILGSNVEGKQVLQKTGTRFERLLMRIGHQSKNAPVELKIRCLDAISSLLYLPPEQQTDDLLRMTESWFSSLSRDPLELFRGISSQPFPELHCAALKVFTAIANQPWAQKLMFNSPGFVEYVVDRSVEHDKASKDAKYELVKALANSKTIAEIFGNPNYLRLRTYLSEGPYYVKPVSTTAVEGAE

SEQ ID NO: 249 - protein, 359 aa, Homo sapiens
MPLELELCPGRWVGGQHPCFIIAEIGQNHQGDLDVAKRMIRMAKECGADCAKFQKSELEFKFNRKALERPYTSKHSWGKTYGEHKRHLEFSHDQYRELQRYAEEVGIFFTASGMDEMAVEFLHELNVPFFKVGSGDTNNFPYLEKTAKKGRPMVISSGMQSMDTMKQVYQIVKPLNPNFCFLQCTSAYPLQPEDVNLRVISEYQKLFPDIPIGYSGHETGIAISVAAVALGAKVLERHITLDKTWKGSDHSASLEPGELAELVRSVRLVERALGSPTKQLLPCEMACNEKLGKSVVAKVKIPEGTILTMDMLTVKVGEPKGYPPEDIFNLVGKKVLVTVEEDDTIMEELVDNHGKKIKS

SEQ ID NO: 250 - protein, 843 aa, Homo sapiens
MWGRLWPLLLSILTATAVPGPSLRRPSRELDATPRMTIPYEELSGTRHFKGQAQNYSTLLLEEASARLLVGARGALFSLSANDIGDGAHKEIHWEASPEMQSKCHQKGKNNQTECFNHVRFLQRLNSTHLYACGTHAFQPLCAAIDAEAFTLPTSFEEGKEKCPYDPARGFTGLIIDGGLYTATRYEFRSIPDIRRSRHPHSLRTEETPMHWLNDAEFVFSVLVRESKASAVGDDDKVYYFFTERATEEGSGSFTQSRSSHRVARVARVCKGDLGGKKILQKKWTSFLKARLICHIPLYETLRGVCSLDAETSSRTHFYAAFTLSTQWKTLEASAICRYDLAEIQAVFAGPYMEYQDGSRRWGRYEGGVPEPRPGSCITDSLRSQGYNSSQDLPSLVLDFVKLHPLMARPVVPTRGRPLLLKRNIRYTHLTGTPVTTPAGPTYDLLFLGTADGWIHKAVVLGSGMHIIEETQVFRESQSVENLVISLLQHSLYVGAPSGVIQLPLSSCSRYRSCYDCILARDPYCGWDPGTHACAAATTIANRSQGSRTALIQDIERGNRGCESSRDTGPPPPLKTRSVLRGDDVLLPCDQPSNLARALWLLNGSMGLSDGQGGYRVGVDGLLVTDAQPEHSGNYGCYAEENGLRTLLASYSLTVRPATPAPAPKAPATPGAQLAPDVRLLYVLAIAALGGLCLILASSLLYVACLREGRRGRRRKYSLGRASRAGGSAVQLQTVSGQCPGEEDEGDDEGAGGLEGSCLQIIPGEGAPAPPPPPPPPPPAELTNGLVALPSRLRRMNGNSYVLLRQSNNGVPAGPCSFAEELSRILEKRKHTQLVEQLDESSV

SEQ ID NO: 251 - protein, 242 aa, Homo sapiens
MLLLAPQMLSLLLLALPVLASPAYVAPAPGQALQQTGIVGGQEAPRSKWPWQVSLRVRGPYWMHFCGGSLIHPQWVLTAAHCVEPDIKDLAALRVQLREQHLYYQDQLLPVSRIIVHPQFYIIQTGADIALLELEEPVNISSHIHTVTLPPASETFPPGMPCWVTGWGDVDNNVHLPPPYPLKEVEVPVVENHLCNAEYHTGLHTGHSFQIVRDDMLCAGSENHDSCQGDSGGPLVCKVNGT

SEQ ID NO: 252 - protein, 99 aa, Homo sapiens
MDLIGFGYAALVTFGSIFGYKRRGGVPSLIAGLFVGCLAGYGAYRVSNDKRDVKVSLFTAFFLATIMGVRFKRSKKIMPAGLVAGLSLMMILRLVLLLL

SEQ ID NO: 253 - protein, 1126 aa, Homo sapiens
MEPNDSTSTAVEEPDSLEVLVKTLDSQTRTFIVGAQMNVKEFKEHIAASVSIPSEKQRLIYQGRVLQDDKKLQEYNVGGKVIHLVERAPPQTHLPSGASSGTGSASATHGGGSPPGTRGPGASVHDRNANSYVMVGTFNLPSDGSAVDVHINMEQAPIQSEPRVRLVMAQHMIRDIQTLLSRMECRGGPQPQHSQPPPQPPAVTPEPVALSSQTSEPVESEAPPREPMEAEEVEERAPAQNPELTPGPAPAGPTPAPETNAPNHPSPAEYVEVLQELQRLESRLQPFLQRYYEVLGAAATTDYNNNHEGREEDQRLINLVGESLRLLGNTFVALSDLRCNLACTPPRHLHVVRPMSHYTTPMVLQQAAIPIQINVGTTVTMTGNGTRPPPTPNAEAPPPGPGQASSVAPSSTNVESSAEGAPPPGPAPPPATSHPRVIRISHQSVEPVVMMHMNIQDSGTQPGGVPSAPTGPLGPPGHGQTLGQQVPGFPTAPTRVVIARPTPPQARPSHPGGPPVSGTLQGAGLGTNASLAQMVSGLVGQLLMQPVLVAQGTPGMAPPPAPATASASAGTTNTATTAGPAPGGPAQPPPTPQPSMADLQFSQLLGNLLGPAGPGAGGSGVASPTITVAMPGVPAFLQGMTDFLQATQTAPPPPPPPPPPPPAPEQQTMPPPGSPSGGAGSPGGLGLESLSPEFFTSVVQGVLSSLLGSLGARAGSSESIAAFIQRLSGSSNIFEPGADGALGFFGALLSLLCQNFSMVDVVMLLHGHFQPLQRLQPQLRSFFHQHYLGGQEPTPSNIRMATHTLITGLEEYVRESFSLVQVQPGVDIIRTNLEFLQEQFNSIAAHVLHCTDSGFGARLLELCNQGLFECLALNLHCLGGQQMELAAVINGRIRRMSRGVNPSLVSWLTTMMGLRLQVVLEHMPVGPDAILRYVRRVGDPPQPLPEEPMEVQGAERASPEPQRENASPAPGTTAEEAMSRGPPPAPEGGSRDEQDGASAETEPWAAAVPPEWVPIIQQDIQSQRKVKPQPPLSDAYLSGMPAKRRKTMQGEGPQLLLSEAVSRAAKAAGARPLTSPESLSRDLEAPEVQESYRQQLRSDIQKRLQEDPNYSPQRFPNAQRAFADDP

SEQ ID NO: 254 - protein, 751 aa, Homo sapiens
MEDLSSPDSTLLQGGHNLLSSASFQEAVTFKDVIVDFTQEEWKQLDPGQRDLFRDVTLENYTHLVSIGLQVSKPDVISQLEQGTEPWIMEPSIPVGTCADWETRLENSVSAPEPDISEEELSPEVIVEKHKRDDSWSSNLLESWEYEGSLERQQANQQTLPKEIKVTEKTIPSWEKGPVNNEFGKSVNVSSNLVTQEPSPEETSTKRSIKQNSNPVKKEKSCKCNECGKAFSYCSALIRHQRTHTGEKPYKCNECEKAFSRSENLINHQRIHTGDKPYKCDQCGKGFIEGPSLTQHQRIHTGEKPYKCDECGKAFSQRTHLVQHQRIHTGEKPYTCNECGKAFSQRGHFMEHQKIHTGEKPFKCDECDKTFTRSTHLTQHQKIHTGEKTYKCNECGKAFNGPSTFIRHHMIHTGEKPYECNECGKAFSQHSNLTQHQKTHTGEKPYDCAECGKSFSYWSSLAQHLKIHTGEKPYKCNECGKAFSYCSSLTQHRRIHTREKPFECSECGKAFSYLSNLNQHQKTHTQEKAYECKECGKAFIRSSSLAKHERIHTGEKPYQCHECGKTFSYGSSLIQHRKIHTGERPYKCNECGRAFNQNIHLTQHKRIHTGAKPYECAECGKAFRHCSSLAQHQKTHTEEKPYQCNKCEKTFSQSSHLTQHQRIHTGEKPYKCNECDKAFSRSTHLTEHQNTHTGEKPYNCNECRKTFSQSTYLIQHQRIHSGEKPFGCNDCGKSFRYRSALNKHQRLHPGI

SEQ ID NO: 255 - protein, 1134 aa, Homo sapiens
MPVFHTRTIESILEPVAQQISHLVIMHEEGEVDGKAIPDLTAPVAAVQAAVSNLVRVGKETVQTTEDQILKRDMPPAFIKVENACTKLVQAAQMLQSDPYSVPARDYLIDGSRGILSGTSDLLLTFDEAEVRKIIRVCKGILEYLTVAEVVETMEDLVTYTKNLGPGMTKMAKMIDERQQELTHQEHRVMLVNSMNTVKELLPVLISAMKIFVTTKNSKNQGIEEALKNRNFTVEKMSAEINEIIRVLQLTSWDEDAWASKDTEAMKRALASIDSKLNQAKGWLRDPSASPGDAGEQAIRQILDEAGKVGELCAGKERREILGTCKMLGQMTDQVADLRARGQGSSPVAMQKAQQVSQGLDVLTAKVENAARKLEAMTNSKQSIAKKIDAAQNWLADPNGGPEGEEQIRGALAEARKIAELCDDPKERDDILRSLGEISALTSKLADLRRQGKGDSPEARALAKQVATALQNLQTKTNRAVANSRPAKAAVHLEGKIEQAQRWIDNPTVDDRGVGQAAIRGLVAEGHRLANVMMGPYRQDLLAKCDRVDQLTAQLADLAARGEGESPQARALASQLQDSLKDLKARMQEAMTQEVSDVFSDTTTPIKLLAVAATAPPDAPNREEVFDERAANFENHSGKLGATAEKAAAVGTANKSTVEGIQASVKTARELTPQVVSAARILLRNPGNQAAYEHFETMKNQWIDNVEKMTGLVDEAIDTKSLLDASEEAIKKDLDKCKVAMANIQPQMLVAGATSIARRANRILLVAKREVENSEDPKFREAVKAASDELSKTISPMVMDAKAVAGNISDPGLQKSFLDSGYRILGAVAKVREAFQPQEPDFPPPPPDLEQLRLTDELAPPKPPLPEGEVPPPRPPPPEEKDEEFPEQKAGEVINQPMMMAARQLHDEARKWSSKPGIPAAEVGIGVVAEADAADAAGFPVPPDMEDDYEPELLLMPSNQPVNQPILAAAQSLHREATKWSSKGNDIIAAAKRMALLMAEMSRLVRGGSGTKRALIQCAKDIAKASDEVTRLAKEVAKQCTDKRIRTNLLQVCERIPTISTQLKILSTVKATMLGRTNISDEESEQATEMLVHNAQNLMQSVKETVREAEAASIKIRTDAGFTLRWVRKTPWYQ

SEQ ID NO: 256 - protein, 747 aa, Homo sapiens
MADEAALALQPGGSPSAAGADREAASSPAGEPLRKRPRRDGPGLERSPGEPGGAAPEREVPAAARGCPGAAAAALWREAEAEAAAAGGEQEAQATAAAGEGDNGPGLQGPSREPPLADNLYDEDDDDEGEEEEEAAAAAIGYRDNLLFGDEIITNGFHSCESDEEDRASHASSSDWTPRPRIGPYTFVQQHLMIGTDPRTILKDLLPETIPPPELDDMTLWQIVINILSEPPKRKKRKDINTIEDAVKLLQECKKIIVLTGAGVSVSCGIPDFRSRDGIYARLAVDFPDLPDPQAMFDIEYFRKDPRPFFKFAKEIYPGQFQPSLCHKFIALSDKEGKLLRNYTQNIDTLEQVAGIQRIIQCHGSFATASCLICKYKVDCEAVRGDIFNQVVPRCPRCPADEPLAIMKPEIVFFGENLPEQFHRAMKYDKDEVDLLIVIGSSLKVRPVALIPSSIPHEVPQILINREPLPHLHFDVELLGDCDVIINELCHRLGGEYAKLCCNPVKLSEITEKPPRTQKELAYLSELPPTPLHVSEDSSSPERTSPPDSSVIVTLLDQAAKSNDDLDVSESKGCMEEKPQEVQTSRNVESIAEQMENPDLKNVGSSTGEKNERTSVAGTVRKCWPNRVAKEQISRRLDGNQYLFLPPNRYIFHGAEVYSDSEDDVLSSSSCGSNSDSGTCQSPSLEEPMEDESEIEEFYNGLEDEPDVPERAGGAGFGTDGDDQEAINEAISVKQEVTDMNYPSNKS

SEQ ID NO: 257 - protein, 851 aa, Homo sapiens
MTSHYVIAIFALMSSCLATAGPEPGALCELSPVSASHPVQALMESFTVLSGCASRGTTGLPQEVHVLNLRTAGQGPGQLQREVTLHLNPISSVHIHHKSVVFLLNSPHPLVWHLKTERLATGVSRLFLVSEGSVVQFSSANFSLTAETEERNFPHGNEHLLNWARKEYGAVTSFTELKIARNIYIKVGEDQVFPPKCNIGKNFLSLNYLAEYLQPKAAEGCVMSSQPQNEEVHIIELITPNSNPYSAFQVDITIDIRPSQEDLEVVKNLILILKCKKSVNWVIKSFDVKGSLKIIAPNSIGFGKESERSMTMTKSIRDDIPSTQGNLVKWALDNGYSPITSYTMAPVANRFHLRLENNAEEMGDEEVHTIPPELRILLDPGALPALQNPPIRGGEGQNGGLPFPFPDISRRVWNEEGEDGLPRPKDPVIPSIQLFPGLREPEEVQGSVDIALSVKCDNEKMIVAVEKDSFQASGYSGMDVTLLDPTCKAKMNGTHFVLESPLNGCGTRPRWSALDGVVYYNSIVIQVPALGDSSGWPDGYEDLESGDNGFPGDMDEGDASLFTRPEIVVFNCSLQQVRNPSSFQEQPHGNITFNMELYNTDLFLVPSQGVFSVPENGHVYVEVSVTKAEQELGFAIQTCFISPYSNPDRMSHYTIIENICPKDESVKFYSPKRVHFPIPQADMDKKRFSFVFKPVFNTSLLFLQCELTLCTKMEKHPQKLPKCVPPDEACTSLDASIIWAMMQNKKTFTKPLAVIHHEAESKEKGPSMKEPNPISPPIFHGLDTLTVMGIAFAAFVIGALLTGALWYIYSHTGETAGRQQVPTSPPASENSSAAHSIGSTQSTPCSSSSTA

SEQ ID NO: 258 - protein, 227 aa, Homo sapiens
MMAAGAALALALWLLMPPVEVGGAGPPPIQDGEFTFLLPAGRKQCFYQSAPANASLETEYQVIGGAGLDVDFTLESPQGVLLVSESRKADGVHTVEPTEAGDYKLCFDNSFSTISEKLVFFELIFDSLQDDEEVEGWAEAVEPEEMLDVKMEDIKESIETMRTRLERSIQMLTLLRAFEARDRNLQEGNLERVNFWSAVNVAVLLLVAVLQVCTLKRFFQDKRPVPT

SEQ ID NO: 259 - protein, 350 aa, Homo sapiens
MFIKGRAPRAPPRERRRATRGGLRQVVAPPRALGSTSRPHFRRASVCRRRCRKSGGLLAASRKMAAAAVNGAAGFSSSGPAATSGAVLQAATGMYEQLKGEWNRKSPNLSKCGEELGRLKLVLLELNFLPTTGTKLTKQQLILARDILEIGAQWSILRKDIPSFERYMAQLKCYYFDYKEQLPESAYMHQLLGLNLLFLLSQNRVAEFHTELERLPAKDIQTNVYIKHPVSLEQYLMEGSYNKVFLAKGNIPAESYTFFIDILLDTIRDEIAGCIEKAYEKILFTEATRILFFNTPKKMTDYAKKRGWVLGPNNYYSFASQQQKPEDTTIPSTELAKQVIEYARQLEMIV

SEQ ID NO: 260 - protein, 217 aa, Homo sapiens
MAGRTVRAETRSRAKDDIKKVMATIEKVRRWEKRWVTVGDTSLRIFKWVPVVDPQEEERRRAGGGAERSRGRERRGRGASPRGGGPLILLDLNDENSNQSFHSEGSLQKGTEPSPGGTPQPSRPVSPAGPPEGVPEEAQPPRLGQERDPGGITAGSTDEPPMLTKEEPVPELLEAEAPEAYPVFEPVPPVPEAAQGDTEDSEGAPPLKRICPNAPDP

SEQ ID NO: 261 - protein, 213 aa, Homo sapiens
MAPAQRPLLPLLLLLLPLPPPPFARAEDAARANSDRYAVYWNRSNPRFHAGAGDDGGGYTVEVSINDYLDIYCPHYGAPLPPAERMEHYVLYMVNGEGHASCDHRQRGFKRWECNRPAAPGGPLKFSEKFQLFTPFSLGFEFRPGHEYYYISATPPNAVDRPCLRLKVYVRPTNETLYEAPEPIFTSNNSCSSPGGCRLFLSTIPVLWTLLGS

SEQ ID NO: 262 - protein, 168 aa, Homo sapiens
MLPAALLRRPGLGRLVRHARAYAEAAAAPAAASGPNQMSFTFASPTQVFFNGANVRQVDVPTLTGAFGILAAHVPTLQVLRPGLVVVHAEDGTTSKYFVSSGSIAVNADSSVQLLAEEAVTLDMLDLGAAKANLEKAQAELVGTADEATRAEIQIRIEANEALVKALE

SEQ ID NO: 263 - protein, 192 aa, Homo sapiens
MGTWILFACLVGAAFAMPLPPHPGHPGYINFSYEVLTPLKWYQSMIRPPYSSYGYEPMGGWLHHQIIPVVSQQHPLTHTLQSHHHIPVVPAQQPRVRQQALMPVPGQQSMTPTQHHQPNLPLPAQQPFQPQPVQPQPHQPMQPQPPVQPMQPLLPQPPLPPMFPLRPLPPILPDLHLEAWPATDKTKQEEVD

SEQ ID NO: 264 - protein, 170 aa, Homo sapiens
MRRRLWLGLAWLLLARAPDAAGTPSASRGPRSYPHLEGDVRWRRLFSSTHFFLRVDPGGRVQGTRWRHGQDSILEIRSVHVGVVVIKAVSSGFYVAMNRRGRLYGSRLYTVDCRFRERIEENGHNTYASQRWRRRGQPMFLALDRRGGPRPGGRTRRYHLSAHFLPVLVS

SEQ ID NO: 265 - protein, 605 aa, Homo sapiens
MALRKGGLALALLLLSWVALGPRSLEGADPGTPGEAEGPACPAACVCSYDDDADELSVFCSSRNLTRLPDGVPGGTQALWLDGNNLSSVPPAAFQNLSSLGFLNLQGGQLGSLEPQALLGLENLCHLHLERNQLRSLALGTFAHTPALASLGLSNNRLSRLEDGLFEGLGSLWDLNLGWNSLAVLPDAAFRGLGSLRELVLAGNRLAYLQPALFSGLAELRELDLSRNALRAIKANVFVQLPRLQKLYLDRNLIAAVAPGAFLGLKALRWLDLSHNRVAGLLEDTFPGLLGLRVLRLSHNAIASLRPRTFKDLHFLEELQLGHNRIRQLAERSFEGLGQLEVLTLDHNQLQEVKAGAFLGLTNVAVMNLSGNCLRNLPEQVFRGLGKLHSLHLEGSCLGRIRPHTFTGLSGLRRLFLKDNGLVGIEEQSLWGLAELLELDLTSNQLTHLPHRLFQGLGKLEYLLLSRNRLAELPADALGPLQRAFWLDVSHNRLEALPNSLLAPLGRLRYLSLRNNSLRTFTPQPPGLERLWLEGNPWDCGCPLKALRDFALQNPSAVPRFVQAICEGDDCQPPAYTYNNITCASPPEVVGLDLRDLSEAHFAPC

SEQ ID NO: 266 - protein, 246 aa, Homo sapiens
MTTGDCCHLPGSLCDCSGSPAFSKVVEATGLGPPQYVAQVTSRDGRLLSTVIRALDTPSDGPFCRICHEGANGECLLSPCGCTGTLGAVHKSCLEKWLSSSNTSYCELCHTEFAVEKRPRPLTEWLKDPGPRTEKRTLCCDMVCFLFITPLAAISGWLCLRGAQDHLRLHSQLEAVGLIALTIALFTIYVLWTLVSFRYHCQLYSEWRKTNQKVRLKIREADSPEGPQHSPLAAGLLKKVAEETPV

SEQ ID NO: 267 - protein, 137 aa, Homo sapiens
MGAHLVRRYLGDASVEPDPLQMPTFPPDYGFPERKEREMVATQQEMMDAQLRLQLRDYCAHHLIRLLKCKRDSFPNFLACKQERHDWDYCEHRDYVMRMKEFERERRLLQRKKRREKKAAELAKGQGPGEVDPKVAL

SEQ ID NO: 268 - protein, 308 aa, Homo sapiens [sequence omitted]

SEQ ID NO: 269 - protein, 95 aa, Homo sapiens
MEGGFGSDFGGSGSGKLDPGLIMEQVKVQIAVANAQELLQRMTDKCFRKCIGKPGGSLDNSEQKCIAMCMDRYMDAWNTVSRAYNSRLQRERANM

SEQ ID NO: 270 - protein, 236 aa, Homo sapiens
MARPLVPSSQKALLLELKGLQEEPVEGFRVTLVDEGDLYNWEVAIFGPPNTYYEGGYFKARLKFPIDYPYSPPAFRFLTKMWHPNIYETGDVCISILHPPVDDPQSGELPSERWNPTQNVRTILLSVISLLNEPNTFSPANVDASVMYRKWKESKGKDREYTDIIRKQVLGTKVDAERDGVKVPTTLAEYCVKTKAPAPDEGSDLFYDDYYEDGEVEEEADSCFGDDEDDSGTEES

SEQ ID NO: 271 - protein, 160 aa, Homo sapiens
MTLEELVACDNAAQKMQTVTAAVEELLVAAQRQDRLTVGVYESAKLMNVDPDSVVLCLLAIDEEEEDDIALQIHFTLIQSFCCDNDINIVRVSGMQRLAQLLGEPAETQGTTEARDLHCLLVTNPHTDAWKSHGLVEVASYCEESRGNNQWVPYISLQER

SEQ ID NO: 272 - protein, 382 aa, Homo sapiens
MDFGLALLLAGLLGLLLGQSLQVKPLQVEPPEPVVAVALGASRQLTCRLACADRGASVQWRGLDTSLGAVQSDTGRSVLTVRNASLSAAGTRVCVGSCGGRTFQHTVQLLVYAFPDQLTVSPAALVPGDPEVACTAHKVTPVDPNALSFSLLVGGQELEGAQALGPEVQEEEEEPQGDEDVLFRVTERWRLPPLGTPVPPALYCQATMRLPGLELSHRQAIPVLHSPTSPEPPDTTSPESPDTTSPESPDTTSQEPPDTTSPEPPDKTSPEPAPQQGSTHTPRSPGSTRTRRPEISQAGPTQGEVIPTGSSKPAGDQLPAALWTSSAVLGLLLLALPTYHLWKRCRHLAEDDTHPPASLRLLPQVSAWAGLRGTGQVGISPS

SEQ ID NO: 273 - protein, 499 aa, Homo sapiens
MKHSLNALLIFLIITSAWGGSKGPLDQLEKGGETAQSADPQWEQLNNKNLSMPLLPADFHKENTVTNDWIPEGEEDDDYLDLEKIFSEDDDYIDIVDSLSVSPTDSDVSAGNILQLFHGKSRIQRLNILNAKFAFNLYRVLKDQVNTFDNIFIAPVGISTAMGMISLGLKGETHEQVHSILHFKDFVNASSKYEITTIHNLFRKLTHRLFRRNFGYTLRSVNDLYIQKQFPILLDFKTKVREYYFAEAQIADFSDPAFISKTNNHIMKLTKGLIKDALENIDPATQMMILNCIYFKGSWVNKFPVEMTHNHNFRLNEREVVKVSMMQTKGNFLAANDQELDCDILQLEYVGGISMLIVVPHKMSGMKTLEAQLTPRVVERWQKSMTNRTREVLLPKFKLEKNYNLVESLKLMGIRMLFDKNGNMAGISDQRIAIDLFKHQGTITVNEEGTQATTVTTVGFMPLSTQVRFTVDRPFLFLIYEHRTSCLLFMGRVANPSRS

SEQ ID NO: 274 - protein, 258 aa, Homo sapiens
MSAYPKSYNPFDDDGEDEGARPAPWRDARDLPDGPDAPADRQQYLRQEVLRRAEATAASTSRSLALMYESEKVGVASSEELARQRGVLERTEKMVDKMDQDLKISQKHINSIKSVFGGLVNYFKSKPVETPPEQNGTLTSQPNNRLKEAISTSKEQEAKYQASHPNLRKLDDTDPVPRGAGSAMSTDAYPKNPHLRAYHQKIDSNLDELSMGLGRLKDIALGMQTEIEEQDDILDRLTTKVDKLDVNIKSTERKVRQL

SEQ ID NO: 275 - protein, 488 aa, Homo sapiens
MAPAAWLRSAAARALLPPMLLLLLQPPPLLARALPPDAHHLHAERRGPQPWHAALPSSPAPAPATQEAPRPASSLRPPRCGVPDPSDGLSARNRQKRFVLSGGRWEKTDLTYRILRFPWQLVQEQVRQTMAEALKVWSDVTPLTFTEVHEGRADIMIDFARYWHGDDLPFDGPGGILAHAFFPKTHREGDVHFDYDETWTIGDDQGTDLLQVAAHEFGHVLGLQHTTAAKALMSAFYTFRYPLSLSPDDCRGVQHLYGQPWPTVTSRTPALGPQAGIDTNEIAPLEPDAPPDACEASFDAVSTIRGELFFFKAGFVWRLRGGQLQPGYPALASRHWQGLPSPVDAAFEDAQGHIWFFQGAQYWVYDGEKPVLGPAPLTELGLVRFPVHAALVWGPEKNKIYFFRGRDYWRFHPSTRRVDSPVPRRATDWRGVPSEIDAAFQDADGYAYFLRGRLYWKFDPVKVKALEGFPRLVGPDFFGCAEPANTFL

SEQ ID NO: 276 - protein, 115 aa, Homo sapiens
MPMFIVNTNVPRASVPDGFLSELTQQLAQATGKPPQYIAVHVVPDQLMAFGGSSEPCALCSLHSIGKIGGAQNRSYSKLLCGLLAERLRISPDRVYINYYDMNAANVGWNNSTFA

SEQ ID NO: 277 - protein, 134 aa, Homo sapiens
MPFLELDTNLPANRVPAGLEKRLCAAAASILGKPADRVNVTVRPGLAMALSGSTEPCAQLSISSIGVVGTAEDNRSHSAHFFEFLTKELALGQDRFPTVLSTSPAAHGGPRCPGEIIEGKKSCLNEEALFIYFI

SEQ ID NO: 278 - protein, 118 aa, Homo sapiens
MPFLELDTNLPANRVPAGLEKRLCAAAASILGKPADRVNVTVRPGLAMALSGSTEPCAQLSISSIGVVGTAEDNRSHSAHFFEFLTKELALGQDRILIRFFPLESWQIGKIGTVMTFL

SEQ ID NO: 279 - protein, 252 aa, Homo sapiens
MGVLLTQRTLLSLVLALLFPSMASMAAIGSCSKEYRVLLGQLQKQTDLMQDTSRLLDPYIRIQGLDVPKLREHCRERPGAFPSEETLRGLGRRGFLQTLNATLGCVLHRLADLEQRLPKAQDLERSGLNIEDLEKLQMARPNILGLRNNIYCMAQLLDNSDTAEPTKAGRGASQPPTPTPASDAFQRKLEGCRFLHGYHRFMHSVGRVFSKWGESPNRSRRHSPHQALRKGVRRTRPSRKGKRLMTRGQLPR

SEQ ID NO: 280 - protein, 508 aa, Homo sapiens
MAKSNGENGPRAPAAGESLSGTRESLAQGPDAATTDELSSLGSDSEANGFAERRIDKFGFIVGSQGAEGALEEVPLEVLRQRESKWLDMLNNWDKWMAKKHKKIRLRCQKGIPPSLRGRAWQYLSGGKVKLQQNPGKFDELDMSPGDPKWLDVIERDLHRQFPFHEMFVSRGGHGQQDLFRVLKAYTLYRPEEGYCQAQAPIAAVLLMHMPAEQAFWCLVQICEKYLPGYYSEKLEAIQLDGEILFSLLQKVSPVAHKHLSRQKIDPLLYMTEWFMCAFSRTLPWSSVLRVWDMFFCEGVKIIFRVGLVLLKHALGSPEKVKACQGQYETIERLRSLSPKIMQEAFLVQEVVELPVTERQIEREHLIQLRRWQETRGELQCRSPPRLHGAKAILDAEPGPRPALQPSPSIRLPLDAPLPGSKAKPKPPKQAQKEQRKQMKGRGQLEKPPAPNQAMVVAAAGDACPPQHVPPKDSAPKDSAPQDLAPQVSAHHRSQESLTSQESEDTYL

SEQ ID NO: 281 - protein, 793 aa, Homo sapiens
MPAGPVQAVPPPPPVPTEPKQPTEEEASSKEDSAPSKPVVGIIYPPPEVRNIVDKTASFVARNGPEFEARIRQNEINNPKFNFLNPNDPYHAYYRHKVSEFKEGKAQEPSAAIPKVMQQQQQTTQQQLPQKVQAQVIQETIVPKEPPPEFEFIADPPSISAFDLDVVKLTAQFVARNGRQFLTQLMQKEQRNYQFDFLRPQHSLFNYFTKLVEQYTKILIPPKGLFSKLKKEAENPREVLDQVCYRVEWAKFQERERKKEEEEKEKERVAYAQIDWHDFVVVETVDFQPNEQGNFPPPTTPEELGARILIQERYEKFGESEEVEMEVESDEEDDKQEKAEEPPSQLDQDTQVQDMDEGSDDEEEGQKVPPPPETPMPPPLPPTPDQVIVRKDYDPKASKPLPPAPAPDEYLVSPITGEKIPASKMQEHMRIGLLDPRWLEQRDRSIREKQSDDEVYAPGLDIESSLKQLAERRTDIFGVEETAIGKKIGEEEIQKPEEKVTWDGHSGSMARTQQAAQANITLQEQIEAIHKAKGLVPEDDTKEKIGPSKPNEIPQQPPPPSSATNIPSSAPPITSVPRPPTMPPPVRTTVVSAVPVMPRPPMASVVRLPPGSVIAPMPPIIHAPRINVVPMPPSAPPIMAPRPPPMIVPTAFVPAPPVAPVPAPAPMPPVHPPPPMEDEPTSKKLKTEDSLMPEEEFLRRNKGPVSIKVQVPNMQDKTEWKLNGQVLVFTLPLTDQVSVIKVKIHEATGMPAGKQKLQYEGIFIKDSNSLAYYNMANGAVIHLALKERGGRKK

SEQ ID NO: 282 - protein, 372 aa, Homo sapiens
MSKAFGLLRQICQSILAESSQSPADLEEKKEEDSNMKREQPRERPRAWDYPHGLVGLHNIGQTCCLNSLIQVFVMNVDFTRILKRITVPRGADEQRRSVPFQMLLLLEKMQDSRQKAVRPLELAYCLQKCNVPLFVQHDAAQLYLKLWNLIKDQITDVHLVERLQALYTIRVKDSLICVDCAMESSRNSSMLTLPLSLFDVDSKPLKTLEDALHCFFQPRELSSKSKCFCENCGKKTRGKQVLKLTHLPQTLTIHLMRFSIRNSQTRKICHSLYFPQSLDFSQILPMKRESCDAEEQSGGQYELFAVIAHVGMADSGHYCVYIRNAVDGKWFCFNDSNICLVSWEDIQCTYGNPNYHWQETAYLLVYMKMEC

SEQ ID NO: 283 - protein, 126 aa, Homo sapiens
MSIGVPIKVLHEAEGHIVTCETNTGEVYRGKLIEAEDNMNCQMSNITVTYRDGRVAQLEQVYIRGSKIRFLILPDMLKNAPMLKSMKNKNQGSGAGRGKAAILKAQVAARGRGRGMGRGNIFQKRR

SEQ ID NO: 284 - protein, 360 aa, Homo sapiens [sequence omitted]

SEQ ID NO: 285 - protein, 427 aa, Homo sapiens
MRHLGAFLFLLGVLGALTEMCEIPEMDSHLVEKLGQHLLPWMDRLSLEHLNPSIYVGLRLSSLQAGTKEDLYLHSLKLGYQQCLLGSAFSEDDGDCQGKPSMGQLALYLLALRANCEFVRGHKGDRLVSQLKWFLEDEKRAIGHDHKGHPHTSYYQYGLGILALCLHQKRVHDSVVDKLLYAVEPFHQGHHSVDTAAMAGLAFTCLKRSNFNPGRRQRITMAIRTVREEILKAQTPEGHFGNVYSTPLALQFLMTSPMRGAELGTACLKARVALLASLQDGAFQNALMISQLLPVLNHKTYIDLIFPDCLAPRVMLEPAAETIPQTQEIISVTLQVLSLLPPYRQSISVLAGSTVEDVLKKAHELGGFTYETQASLSGPYLTSVMGKAAGEREFWQLLRDPNTPLLQGIADYRPKDGETIELRLVSW

SEQ ID NO: 286 - protein, 970 aa, Homo sapiens
MLCFLDDGAGMDPSDAASVIQFGKSAKRTPESTQIGQYGNGLKSGSMRIGKDFILFTKKEDTMTCLFLSRTFHEEEGIDEVIVPLPTWNARTREPVTDNVEKFAIETELIYKYSPFRTEEEVMTQFMKIPGDSGTLVIIFNLKLMDNGEPELDIISNPRDIQMAETSPEGTKPERRSFRAYAAVLYIDPRMRIFIHGHKVQTKRLSCCLYKPRMYKYTSSRFKTRAEQEVKKAEHVARIAEEKAREAESKARTLEVRLGGDLTRDSRVMLRQVQNRAITLRREADVKKRIKEAKQRALKEPKELNFVFGVNIEHRDLDGMFIYNCSRLIKMYEKVGPQLEGGMACGGVVGVVDVPYLVLEPTHNKQDFADAKEYRHLLRAMGEHLAQYWKDIAIAQRGIIKFWDEFGYLSANWNQPPSSELRYKRRRAMEIPTTIQCDLCLKWRTLPFQLSSVEKDYPDTWVCSMNPDPEQDRCEASEQKQKVPLGTFRKDMKTQEEKQKQLTEKIRQQQEKLEALQKTTPIRSQADLKKLPLEVTTRPSTEEPVRRPQRPRSPPLPAVIRNAPSRPPSLPTPRPASQPRKAPVISSTPKLPALAAREEASTSRLLQPPEAPRKPANTLVKTASRPAPLVQQLSPSLLPNSKSPREVPSPKVIKTPVVKKTESPIKLSPATPSRKRSVAVSDEEEVEEEAERRKERCKRGRFVVKEEKKDSNELSDSAGEEDSADLKRAQKDKGLHVEVRVNREWYTGRVTAVEVGKHVVRWKVKFDYVPTDTTPRDRWVEKGSEDVRLMKPPSPEHQSLDTQQEGGEEEVGPVAQQAIAVAEPSTSECLRIEPDTTALSTNHETIDLLVQILRNCLRYFLPPSFPISKKQLSAMNSDELISFPLKEYFKQYEVGLQNLCNSYQSRADSRAKASEESLRTSERKLRETEEKLQKLRTNIVALLQKVQEDIDINTDDELDAYIEDLITKGD

SEQ ID NO: 287 - protein, 311 aa, Homo sapiens
MPAPRAPRALAAAAPASGKAKLTHPGKAILAGGLAGGIEICITFPTEYVKTQLQLDERSHPPRYRGIGDCVRQTVRSHGVLGLYRGLSSLLYGSIPKAAVRFGMFEFLSNHMRDAQGRLDSTRGLLCGLGAGVAEAVVVVCPMETIKVKFIHDQTSPNPKYRGFFHGVREIVREQGLKGTYQGLTATVLKQGSNQAIRFFVMTSLRNWYRGDNPNKPMNPLITGVFGAIAGAASVFGNTPLDVIKTRMQGLEAHKYRNTWDCGLQILKKEGLKAFYKGTVPRLGRVCLDVAIVFVIYDEVVKLLNKVWKTD

SEQ ID NO: 288 - protein, 509 aa, Homo sapiens
MGVQAGLFGMLGFLGVALGGSPALRWYRTSCHLTKAVPGNPLGYLSFLAKDAQGLALIHARWDAHRRLQSCSWEDEPELTAAYGALCAHETAWGSFIHTPGPELQRALATLQSQWEACRALEESPAGARKKRAAGQSGVPGGGHQREKRGWTMPGTLWCGVGDSAGNSSELGVFQGPDLCCREHDRCPQNISPLQYNYGIRNYRFHTISHCDCDTRFQQCLQNQHDSISDIVGVAFFNVLEIPCFVLEEQEACVAWYWWGGCRMYGTVPLARLQPRTFYNASWSSRATSPTPSSRSPAPPKPRQKQHLRKGPPHQKGSKRPSKANTTALQDPMVSPRLDVAPTGLQGPQGGLKPQGARWVCRSFRRHLDQCEHQIGPREIEFQLLNSAQEPLFHCNCTRRLARFLRLHSPPEVTNMLWELLGTTCFKLAPPLDCVEGKNCSRDPRAIRVSARHLRRLQQRRHQLQDKGTDERQPWPSEPLRGPMSFYNQCLQLTQAARRPDRQQKSWSQ

SEQ ID NO: 289 - protein, 296 aa, Homo sapiens
MARCERLRGAALRDVLGRAQGVLFDCDGVLWNGERAVPGAPELLERLARAGKAALFVSNNSRRARPELALRFARLGFGGLRAEQLFSSALCAARLLRQRLPGPPDAPGAVFVLGGEGLRAELRAAGLRLAGDPSAGDGAAPRVRAVLVGYDEHFSFAKLREACAHLRDPECLLVATDRDPWHPLSDGSRTPGTGSLAAAVETASGRQALVVGKPSPYMFECITENFSIDPARTLMVGDRLETDILFGHRCGMTTVLTLTGVSRLEEAQAYLAAGQHDLVPHYYVESIADLTEGLED

SEQ ID NO: 290 - protein, 135 aa, Homo sapiens
MACGLVASNLNLKPGECLRVRGEVAPDAKSFVLNLGKDSNNLCLHFNPRFNAHGDANTIVCNSKDGGAWGTEQREAVFPFQPGSVAEVCITFDQANLTVKLPDGYEFKFPNRLNLEAINYMAADGDFKIKCVAFD

SEQ ID NO: 291 - protein, 263 aa, Homo sapiens
MLLAWVQAFLVSNMLLAEAYGSGGCFWDNGHLYREDQTSPAPGLRCLNWLDAQSGLASAPVSGAGNHSYCRNPDEDPRGPWCYVSGEAGVPEKRPCEDLRCPETTSQALPAFTTEIQEASEGPGADEVQVFAPANALPARSEAAAVQPVIGISQRVRMNSKEKKDLGTLGYVLGITMMVIIIAIGAGIILGYSYKRGKDLKEQHDQKVCEREMQRITLPLSAFTNPTCEIVDEKTVVVHTSQTPVDPQEGTTPLMGQAGTPGA

SEQ ID NO: 292 - protein, 339 aa, Homo sapiens
MAAAAAAALESWQAAAPRKRRSAARRPRRREAAPRGREAAPRGREAAPRGPEAEFESDSGVVLRRIWEAEKDLFISDFWSSALETINRCLTKHLEQLKAPVGTLSDIFGNLHLDSLPEESDVATDSIPREILVTGTCHLKCVCYGIGNFATCIVARNQLTFLLLLLEKCQIPRSHCWVYDPLFSQLEIEVLNTLGVTVLSENEEGKRSIRGEPTIFYMLHCGTALYNNLLWSNWSVDALSKMVIIGNSFKGLEERLLARILQKNYPYIAKILKGLEELEFPQTSQYMDIFNDTSVHWFPVQKLEQLSIDIWEFREEPDYQDCEDLEIIRNKREDPSATD

SEQ ID NO: 293 - protein, 537 aa, Homo sapiens
MERVNDASCGPSGCYTYQVSRHSTEMLHNLNQQRKNGGRFCDVLLRVGDESFPAHRAVLAACSEYFESVFSAQLGDGGAADGGPADVGGATAAPGGGAGGSRELEMHTISSKVFGDILDFAYTSRIVVRLESFPELMTAAKFLLMRSVIEICQEVIKQSNVQILVPPARADIMLFRPPGTSDLGFPLDMTNGAALAANSNGIAGSMQPEEEAARAAGAAIAGQASLPVLPGVDRLPMVAGPLSPQLLTSPFPSVASSAPPLTGKRGRGRPRKANLLDSMFGSPGGLREAGILPCGLCGKVFTDANRLRQHEAQHGVTSLQLGYIDLPPPRLGENGLPISEDPDGPRKRSRTRKQVACEICGKIFRDVYHLNRHKLSHSGEKPYSCPVCGLRFKRKDRMSYHVRSHDGSVGKPYICQSCGKGFSRPDHLNGHIKQVHTSERPHKCQVWVGSSSGLPPLEPLPSDLPSWDFAQPALWRSSHSVPDTAFSLSLKKSFPALENLGPAHSSNTLFCPAPPGYLRQGWTTPEGSRAFTQWPVG

SEQ ID NO: 294 - protein, 300 aa, Homo sapiens
MAAAAGDADDEPRSGHSSSEGECAVAPEPLTDAEGLFSFADFGSALGGGGAGLSGRASGGAQSPLRYLHVLWQQDAEPRDELRCKIPAGRLRRAARPHRRLGPTGKEVHALKRLRDSANANDVETVQQLLEDGADPCAADDKGRTALHFASCNGNDQIVQLLLDHGADPNQRDGLGNTPLHLAACTNHVPVITTLLRGGARVDALDRAGRTPLHLAKSKLNILQEGHAQCLEAVRLEVKQIIHMLREYLERLGQHEQRERLDDLCTRLQMTSTKEQVDEVTDLLASFTSLSLQMQSMEKR

SEQ ID NO: 295 - protein, 128 aa, Homo sapiens
MTEADVNPKAYPLADAHLTKKLLDLVQQSCNYKQLRKGANEATKTLNRGISEFIVMAADAEPLEIILHLPLLCEDKNVPYVFVRSKQALGRACGVSRPVIACSVTIKEGSQLKQQIQSIQQSIERLLV

SEQ ID NO: 296 - protein, 863 aa, Homo sapiens
MAGPRGALLAWCRRQCEGYRGVEIRDLSSSFRDGLAFCAILHRHRPDLLDFDSLSKDNVFENNRLAFEVAEKELGIPALLDPNDMVSMSVPDCLSIMTYVSQYYNHFCSPGQAGVSPPRKGLAPCSPPSVAPTPVEPEDVAQGEELSSGSLSEQGTGQTPSSTCAACQQHVHLVQRYLADGRLYHRHCFRCRRCSSTLLPGAYENGPEEGTFVCAEHCARLGPGTRSGTRPGPFSQPKQQHQQQLAEDAKDVPGGGPSSSAPAGAEADGPKASPEARPQIPTKPRVPGKLQELASPPAGRPTPAPRKASESTTPAPPTPRPRSSLQQENLVEQAGSSSLVNGRLHELPVPKPRGTPKPSEGTPAPRKDPPWITLVQAEPKKKPAPLPPSSSPGPPSQDSRQVENGGTEEVAQPSPTASLESKPYNPFEEEEEDKEEEAPAAPSLATSPALGHPESTPKSLHPWYGITPTSSPKTKKRPAPRAPSASPLALHASRLSHSEPPSATPSPALSVESLSSESASQTAGAELLEPPAVPKSSSEPAVHAPGTPGNPVSLSTNSSLASSGELVEPRVEQMPQASPGLAPRTRGSSGPQPAKPCSGATPTPLLLVGDRSPVPSPGSSSPQLQVKSSCKENPFNRKPSPAASPATKKATKGSKPVRPPAPGHGFPLIKRKVQADQYIPEEDIHGEMDTIERRLDALEHRGVLLEEKLRGGLNEGREDDMLVDWFKLIHEKHLLVRRESELIYVFKQQNLEQRQADVEYELRCLLNKPEKDWTEEDRAREKVLMQELVTLIEQRNAIINCLDEDRQREEEEDKMLEAMIKKKEFQREAEPEGKKKGKFKTMKMLKLLGNKRDAKSKSPRDKS

SEQ ID NO: 297 - protein, 214 aa, Homo sapiens
MNVFRILGDLSHLLAMILLLGKIWRSKCCKGISGKSQILFALVFTTRYLDLFTNFISIYNTVMKVVFLLCAYVTVYMIYGKFRKTFDSENDTFRLEFLLVPVIGLSFLENYSFTLLEILWTFSIYLESVAILPQLFMISKTGEAETITTHYLFFLGLYRALYLANWIRRYQTENFYDQIAVVSGVVQTIFYCDFFYLYVTKVLKGKKLSLPMPI

SEQ ID NO: 298 - protein, 126 aa, Homo sapiens
MPFFGNTFSPKKTPPRKSASLSNLHSLDRSTREVELGLEYGSPTMNLAGQSLKFENGQWIAETGVSGGVDRREVQRLRRRNQQLEEENNLLRLKVDILLDMLSESTAESHLMEKELDELRISRKRK

SEQ ID NO: 299 - protein, 142 aa, Homo sapiens
MAAAVAAAGAGEPQSPDELLPKGDAEKPEEELEEDDDEELDETLSERLWGLTEMFPERVRSAAGATFDLSLFVAQKMYRFSRAALWIGTTSFMILVLPVVFETEKLQMEQQQQLQQRQILLGPNTGLSGGMPGALPSLPGKI

SEQ ID NO: 300 - protein, 261 aa, Homo sapiens
MVVVAAAPNPADGTPKVLLLSGQPASAAGAPAGQALPLMVPAQRGASPEAASGGLPQARKRQRLTHLSPEEKALRRKLKNRVAAQTARDRKKARMSELEQQVVDLEEENQKLLLENQLLREKTHGLVVENQELRQRLGMDALVAEEEAEAKGNEVRPVAGSAESAALRLRAPLQQVQAQLSPLQNISPWILAVLTLQIQSLISCWAFWTTWTQSCSSNALPQSLPAWRSSQRSTQKDPVPYQPPFLCQWGRHQPSWKPLMN

SEQ ID NO: 301 - protein, 505 aa, Homo sapiens
MSRSYNDELQFLEKINKNCWRIKKGFVPNMQVEGVFYVNDALEKLMFEELRNACRGGGVGGFLPAMKQIGNVAALPGIVHRSIGLPDVHSGYGFAIGNMAAFDMNDPEAVVSPGGVGFDINCGVRLLRTNLDESDVQPVKEQLAQAMFDHIPVGVGSKGVIPMNAKDLEEALEMGVDWSLREGYAWAEDKEHCEEYGRMLQADPNKVSARAKKRGLPQLGTLGAGNHYAEIQVVDEIFNEYAAKKMGIDHKGQVCVMIHSGSRGLGHQVATDALVAMEKAMKRDKIIVNDRQLACARIASPEGQDYLKGMAAAGNYAWVNRSSMTFLTRQAFAKVFNTTPDDLDLHVIYDVSHNIAKVEQHVVDGKERTLLVHRKGSTRAFPPHHPLIAVDYQLTGQPVLIGGTMGTCSYVLTGTEQGMTETFGTTCHGAGRALSRAKSRRNLDFQDVLDKLADMGIAIRVASPKLVMEEAPESYKNVTDVVNTCHDAGISKKAIKLRPIAVIKG

SEQ ID NO: 302 - protein, 202 aa, Homo sapiens
MSCVPWKGDKAKSESLELPQAAPPQIYHEKQRRELCALHALNNVFQDSNAFTRDTLQEIFQRLSPNTMVTPHKKSMLGNGNYDVNVIMAALQTKGYEAVWWDKRRDVGVIALTNVMGFIMNLPSSLCWGPLKLPLKRQHWICVREVGGAYYNLDSKLKMPEWIGGESELRKFLKHHLRGKNCELLLVVPEEVEAHQSWRTDV

SEQ ID NO: 303 - protein, 669 aa, Homo sapiens
MATERSRSAMDSPVPASMFAPEPSSPGAARAAAAAARLHGGFDSDCSEDGEALNGEPELDLTSKLVLVSPTSEQYDSLLRQMWERMDEGCGETIYVIGQGSDGTEYGLSEADMEASYATVKSMAEQIEADVILLRERQEAGGRVRDYLVRKRVGDNDFLEVRVAVVGNVDAGKSTLLGVLTHGELDNGRGFARQKLFRHKHEIESGRTSSVGNDILGFDSEGNVVNKPDSHGGSLEWTKICEKSTKVITFIDLAGHEKYLKTTVFGMTGHLPDFCMLMVGSNAGIVGMTKEHLGLALALNVPVFVVVTKIDMCPANILQETLKLLQRLLKSPGCRKIPVLVQSKDDVIVTASNFSSERMCPIFQISNVTGENLDLLKMFLNLLSPRTSYREEEPAEFQIDDTYSVPGVGTVVSGTTLRGLIKLNDTLLLGPDPLGNFLSIAVKSIHRKRMPVKEVRGGQTASFALKKIKRSSIRKGMVMVSPRLNPQASWEFEAEILVLHHPTTISPRYQAMVHCGSIRQTATILSMDKDCLRTGDKATVHFRFIKTPEYLHIDQRLVFREGRTKAVGTITKLLQTTNNSPMNSKPQQIKMQSTKKGPLTKRDEGGPSGGPAVGAPPPGDEASSVGAGQPAASSNLQPQPKPSSGGRRRGGQRHKVKSQGACVTPASGC

SEQ ID NO: 304 - protein, 394 aa, Homo sapiens
MELSAVGERVFAAESIIKRRIRKGRIEYLVKWKGWAIKYSTWEPEENILDSRLIAAFEQKERERELYGPKKRGPKPKTFLLKPSASASSPKLHSSAAVHRLKKDIRRCHRMSRRPLPRPDPQGGSPGLRPPISPFSETVRIINRKVKPREPKRNRIILNLKVIDKGAGGGGAGQGAGALARPKVPSRNRVIGKSKKFSESVLRTQIRHMKFGAFALYKPPPAPLVAPSPGKAEASAPGPGLLLAAPAAPYDARSSGSSGCPSPTPQSSDPDDTPPKLLPETVSPSAPSWREPEVLDLSLPPESAATSKRAPPEVTAAAGPAPPTAPEPAGASSEPEAGDWRPEMSPCSNVVVTDVTSNLLTVTIKEFCNPEDFEKVAAGVAGAAGGGGSIGASK

SEQ ID NO: 305 - protein, 386 aa, Homo sapiens
MHARGPHGQLSPALPLASSVLMLLMSTLWLVGAGPGLVLAPELLLDPWQVHRLLTHALGHTALPGLLLSLLLLPTVGWQQECHLGTLRFLHASALLALASGLLAVLLAGLGLSSAAGSCGYMPVHLAMLAGEGHRPRRPRGALPPWLSPWLLLALTPLLSSEPPFLQLLCGLLAGLAYAAGAFRWLEPSERRLQVLQEGVLCRTLAGCWPLRLLATPGSLAELPVTHPAGVRPPIPGPPYVASPDLWSHWEDSALPPPSLRPVQPTWEGSSEAGLDWAGASFSPGTPMWAALDEQMLQEGIQASLLDGPAQEPQSAPWLSKSSVSSLRLQQLERMGFPTEQAVVALAATGRVEGAVSLLVGGQVGTETLVTHGKGGPAHSEGPGPP

SEQ ID NO: 306 - protein, 601 aa, Homo sapiens
MAYDDSVKKEDCFDGDHTFEDIGLAAGRSQREKKRSYKDFLREEEEIAAQVRNSSKKKLKDSELYFLGTDTHKKKRKHSSDDYYYGDISSLESSQKKKKKSSPQSTDTAMDLLKAITSPLAAGSKPSKKTGEKSSGSSSHSESKKEHHRKKVSGSSGELPLEDGGSHKSKKMKPLYVNTETLTLREPDGLKMKLILSPKEKGSSSVDEESFQYPSQQATVKKSSKKSARDEQGALLLGHELQSFLKTARKKHKSSSDAHSSPGPEGCGSDASQFAESHSANLDLSGLEPILVESDSSSGGELEAGELVIDDSYREIKKKKKSKKSKKKKDKEKHKEKRHSKSKRSLGLSAVPVGEVTVTSGPPPSIPYAGAAAPPLPLPGLHTDGHSEKKKKKEEKDKERERGEKPKKKNMSAYQVFCKEYRVTIVADHPGIDFGELSKKLAEVWKQLPEKDKLIWKQKAQYLQHKQNKAEATTVKRKASSSEGSMKVKASSVGVLSPQKKSPPTTMLLPASPAKAPETEPIDVAAHLQLLGESLSLIGHRLQETEGMVAVSGSLSVLLDSIICALGPLACLTTQLPELNGCPKQVLSNTLDNIAYIMPGL

SEQ ID NO: 307 - protein, 288 aa, Homo sapiens
MERPQPDSMPQDLSEALKEATKEVHTQAENAEFMRNFQKGQVTRDGFKLVMASLYHIYVALEEEIERNKESPVFAPVYFPEELHRKAALEQDLAFWYGPRWQEVIPYTPAMQRYVKRLHEVGRTEPELLVAHAYTRYLGDLSGGQVLKKIAQKALDLPSSGEGLAFFTFPNIASATKFKQLYRSRMNSLEMTPAVRQRVIEEAKTAFLLNIQLFEELQELLTHDTKDQSPSRAPGLRQRASNKVQDSAPVETPRGKPPLNTRSQAPLLRWVLTLSFLVATVAVGLYAM

SEQ ID NO: 308 - protein, 284 aa, Homo sapiens
MAPRLCSISVTARRLLGGPGPRAGDVASAAAARFYSKDNEGSWFRSLFVHKVDPRKDAHSTLLSKKETSNLYKIQFHNVKPEYLDAYNSLTEAVLPKLHLDEDYPCSLVGNWNTWYGEQDQAVHLWRFSGGYPALMDCMNKLKNNKEYLEFRRERSQMLLSRRNQLLLEFSFWNEPQPRMGPNIYELRTYKLKPGTMIEWGNNWARAIKYRQENQEAVGGFFSQIGELYVVHHLWAYKDLQSREETRNAAWRKRGWDENVYYTVPLVRHMESRIMIPLKISPLQ

SEQ ID NO: 309 - protein, 509 aa, Homo sapiens
MSMGAPRSLLLALAAGLAVARPPNIVLIFADDLGYGDLGCYGHPSSTTPNLDQLAAGGLRFTDFYVPVSLCTPSRAALLTGRLPVRMGMYPGVLVPSSRGGLPLEEVTVAEVLAARGYLTGMAGKWHLGVGPEGAFLPPHQGFHRFLGIPYSHDQGPCQNLTCFPPATPCDGGCDQGLVPIPLLANLSVEAQPPWLPGLEARYMAFAHDLMADAQRQDRPFFLYYASHHTHYPQFSGQSFAERSGRGPFGDSLMELDAAVGTLMTAIGDLGLLEETLVIFTADNGPETMRMSRGGCSGLLRCGKGTTYEGGVREPALAFWPGHIAPGVTHELASSLDLLPTLAALAGAPLPNVTLDGFDLSPLLLGTGKSPRQSLFFYPSYPDEVRGVFAVRTGKYKAHFFTQGSAHSDTTADPACHASSSLTAHEPPLLYDLSKDPGENYNLLGGVAGATPEVLQALKQLQLLKAQLDAAVTFGPSQVARGEDPALQICCHPGCTPRPACCHCPDPHA

SEQ ID NO: 310 - protein, 644 aa, Homo sapiens
MEAERGPERRPAERSSPGQTPEEGAQALAEFAALHGPALRASGVPERYWGRLLHKLEHEVFDAGEVFGIMQVEEVEEEEDEAAREVRKQQPNPGNELCYKVIVTRESGLQAAHPNSIFLIDHAWTCRVEHARQQLQQVPGLLHRMANLMGIEFHGELPSTEAVALVLEEMWKFNQTYQLAHGTAEEKMPVWYIMDEFGSRIQHADVPSFATAPFFYMPQQVAYTLLWPLRDLDTGEEVTRDFAYGETDPLIRKCMLLPWAPTDMLDLSSCTPEPPAEHYQAILEENKEKLPLDINPVVHPHGHIFKVYTDVQQVASSLTHPRFTLTQSEADADILFNFSHFKDYRKLSQERPGVLLNQFPCENLLTVKDCLASIARRAGGPEGPPWLPRTFNLRTELPQFVSYFQQRERWGEDNHWICKPWNLARSLDTHVTKSLHSIIRHRESTPKVVSKYIESPVLFLREDVGKVKFDIRYIVLLRSVRPLRLFVYDVFWLRFSNRAFALNDLDDYEKHFTVMNYDPDVVLKQVHCEEFIPEFEKQYPEFPWTDVQAEIFRAFTELFQVACAKPPPLGLCDYPSSRAMYAVDLMLKWDNGPDGRRVMQPQILEVNFNPDCERACRYHPTFFNDVFSTLFLDQPGGCHVTCLV

SEQ ID NO: 311 - protein, 251 aa, Homo sapiens
MELSAIGEQVFAVESIRKKRVRKGKVEYLVKWKGWPPKYSTWEPEEHILDPRLVMAYEEKEERDRASGYRKRGPKPKRLLLQRLYSMDLRSSHKAKGKEKLCFSLTCPLGSGSPEGVVKAGAPELVDKGPLVPTLPFPLRKPRKAHKYLRLSRKKFPPRGPNLESHSHRRELFLQEPPAPDVLQAAGEWEPAAQPPEEEADADLAEGPPPWTPALPSSEVTVTDITANSITVTFREAQAAEGFFRDRSGKF

SEQ ID NO: 312 - protein, 421 aa, Homo sapiens
MVEMLPTAILLVLAVSVVAKDNATCDGPCGLRFRQNPQGGVRIVGGKAAQHGAWPWMVSLQIFTYNSHRYHTCGGSLLNSRWVLTAAHCFVGKNNVHDWRLVFGAKEITYGNNKPVKAPLQERYVEKIIIHEKYNSATEGNDIALVEITPPISCGRFIGPGCLPHFKAGLPRGSQSCWVAGWGYIEEKAPRPSSILMEARVDLIDLDLCNSTQWYNGRVQPTNVCAGYPVGKIDTCQGDSGGPLMCKDSKESAYVVVGITSWGVGCARAKRPGIYTATWPYLNWIASKIGSNALRMIQSATPPPPTTRPPPIRPPFSHPISAHLPWYFQPPPRPLPPRPPAAQPRPPPSPPPPPPPPASPLPPPPPPPPPTPSSTTKLPQGLSFAKRLQQLIEVLKGKTYSDGKNHYDMETTELPELTSTS

SEQ ID NO: 313 - protein, 504 aa, Homo sapiens
MAAQRRSLLQSEQQPSWTDDLPLCHLSGVGSASNRSYSADGKGTESHPPEDSWLKFRSENNCFLYGVFNGYDGNRVTNFVAQRLSAELLLGQLNAEHAEADVRRVLLQAFDVVERSFLESIDDALAEKASLQSQLPEGVPQHQLPPQYQKILERLKTLEREISGGAMAVVAVLLNNKLYVANVGTNRALLCKSTVDGLQVTQLNVDHTTENEDELFRLSQLGLDAGKIKQVGIICGQESTRRIGDYKVKYGYTDIDLLSAAKSKPIIAEPEIHGAQPLDGVTGFLVLMSEGLYKALEAAHGPGQANQEIAAMIDTEFAKQTSLDAVAQAVVDRVKRIHSDTFASGGERARFCPRHEDMTLLVRNFGYPLGEMSQPTPSPAPAAGGRVYPVSVPYSSAQSTSKTSVTLSLVMPSQGQMVNGAHSASTLDEATPTLTNQSPTLTLQSTNTHTQSSSSSSDGGLFRSRPAHSLPPGEDGRVEPYVDFAEFYRLWSVDHGEQSVVTAP

SEQ ID NO: 314 - protein, 1960 aa, Homo sapiens
MAQQAADKYLYVDKNFINNPLAQADWAAKKLVWVPSDKSGFEPASLKEEVGEEAIVELVENGKKVKVNKDDIQKMNPPKFSKVEDMAELTCLNEASVLHNLKERYYSGLIYTYSGLFCVVINPYKNLPIYSEEIVEMYKGKKRHEMPPHIYAITDTAYRSMMQDREDQSILCTGESGAGKTENTKKVIQYLAYVASSHKSKKDQGELERQLLQANPILEAFGNAKTVKNDNSSRFGKFIRINFDVNGYIVGANIETYLLEKSRAIRQAKEERTFHIFYYLLSGAGEHLKTDLLLEPYNKYRFLSNGHVTIPGQQDKDMFQETMEAMRIMGIPEEEQMGLLRVISGVLQLGNIVFKKERNTDQASMPDNTAAQKVSHLLGINVTDFTRGILTPRIKVGRDYVQKAQTKEQADFAIEALAKATYERMFRWLVLRINKALDKTKRQGASFIGILDIAGFEIFDLNSFEQLCINYTNEKLQQLFNHTMFILEQEEYQREGIEWNFIDFGLDLQPCIDLIEKPAGPPGILALLDEECWFPKATDKSFVEKVMQEQGTHPKFQKPKQLKDKADFCIIHYAGKVDYKADEWLMKNMDPLNDNIATLLHQSSDKFVSELWKDVDRIIGLDQVAGMSETALPGAFKTRKGMFRTVGQLYKEQLAKLMATLRNTNPNFVRCIIPNHEKKAGKLDPHLVLDQLRCNGVLEGIRICRQGFPNRVVFQEFRQRYEILTPNSIPKGFMDGKQACVLMIKALELDSNLYRIGQSKVFFRAGVLAHLEEERDLKITDVIIGFQACCRGYLARKAFAKRQQQLTAMKVLQRNCAAYLKLRNWQWWRLFTKVKPLLQVSRQEEEMMAKEEELVKVREKQLAAENRLTEMETLQSQLMAEKLQLQEQLQAETELCAEAEELRARLTAKKQELEEICHDLEARVEEEEERCQHLQAEKKKMQQNIQELEEQLEEEESARQKLQLEKVTTEAKLKKLEEEQIILEDQNCKLAKEKKLLEDRIAEFTTNLTEEEEKSKSLAKLKNKHEAMITDLEERLRREEKQRQELEKTRRKLEGDSTDLSDQIAELQAQIAELKMQLAKKEEELQAALARVEEEAAQKNMALKKIRELESQISELQEDLESERASRNKAEKQKRDLGEELEALKTELEDTLDSTAAQQELRSKREQEVNILKKTLEEEAKTHEAQIQEMRQKHSQAVEELAEQLEQTKRVKANLEKAKQTLENERGELANEVKVLLQGKGDSEHKRKKVEAQLQELQVKFNEGERVRTELADKVTKLQVELDNVTGLLSQSDSKSSKLTKDFSALESQLQDTQELLQEENRQKLSLSTKLKQVEDEKNSFREQLEEEEEAKHNLEKQIATLHAQVADMKKKMEDSVGCLETAEEVKRKLQKDLEGLSQRHEEKVAAYDKLEKTKTRLQQELDDLLVDLDHQRQSACNLEKKQKKFDQLLAEEKTISAKYAEERDRAEAEAREKETKALSLARALEEAMEQKAELERLNKQFRTEMEDLMSSKDDVGKSVHELEKSKRALEQQVEEMKTQLEELEDELQATEDAKLRLEVNLQAMKAQFERDLQGRDEQSEEKKKQLVRQVREMEAELEDERKQRSMAVAARKKLEMDLKDLEAHIDSANKNRDEAIKQLRKLQAQMKDCMRELDDTRASREEILAQAKENEKKLKSMEAEMIQLQEELAAAERAKRQAQQERDELADEIANSSGKGALALEEKRRLEARIAQLEEELEEEQGNTELINDRLKKANLQIDQINTDLNLERSHAQKNENARQQLERQNKELKVKLQEMEGTVKSKYKASITALEAKIAQLEEQLDNETKERQAACKQVRRTEKKLKDVLLQVDDERRNAEQYKDQADKASTRLKQLKRQLEEAEEEAQRANASRRKLQRELEDATETADAMNREVSSLKNKLRRGDLPFVVPRRMARKGAGDGSDEEVDGKADGAEAKPAE

SEQ ID NO: 315 - protein, 166 aa, Homo sapiens
MAQRLLLRRFLASVISRKPSQGQWPPLTSRALQTPQCSPGGLTVTPNPARTIYTTRISLTTFNIQDGPDFQDRVVNSETPVVVDFHAQWCGPCKILGPRLEKMVAKQHGKVVMAKVDIDDHTDLAIEYEVSAVPTVLAMKNGDVVDKFVGIKDEDQLEAFLKKLIG

SEQ ID NO: 316 - protein, 684 aa, Homo sapiens
MGLSAAAPLWGPPGLLLAIALHPALSVPPRRDYCVLGAGPAGLQMAYFLQRAGRDYAVFERAPRPGSFFTRYPRHRKLISINKRYTGKANAEFNLRHDWNSLLSHDPRLLFRHYSRAYFPDARDMVRYLGDFADTLGLRVQYNTTIAHVTLDKDRQAWNGHYFILTDQKGQVHQCSVLFVATGLSVPNQVDFPGSEYAEGYESVSVDPEDFVGQNVLILGRGNSAFETAENILGVTNFIHMLSRSRVRLSWATHYVGDLRAINNGLLDTYQLKSLDGLLESDLTDLAILKDSKGKFHVTPKFFLEEANTNQSADSITLPQDDNDNFAMRVPYDRVIRCLGWNFDFSIFNKSLRLNSGNAFGKKYPLIRASYESKGSRGLFILGTASHSVDYRKSAGGFIHGFRYTVRAVHRLLEHRHHSVTWPATELPITQLTSSIVRRVNEASGLYQMFGVLADVILLKENSTAFEYLEEFPIQMLAQLETLTGRKAKHGLFVINMEYGRNFSGPDKDVFFDDRSVGHTEDAWQSNFLHPVIYYYRYLPTEQEVRFRPAHWPLPRPTAIHHIVEDFLTDWTAPIGHILPLRRFLENCLDTDLRSFYAESCFLFALTRQKLPPFCQQGYLRMQGLVSTESLWQHRVESRLLRDYAPTGRRLEDSSQQLGDQEPLGSPLAPGPLAQSVDSNKEEL

SEQ ID NO: 317 - protein, 548 aa, Homo sapiens
MAKFMTPVIQDNPSGWGPCAVPEQFRDMPYQPFSKGDRLGKVADWTGATYQDKRYTNKYSSQFGGGSQYAYFHEEDESSFQLVDTARTQKTAYQRNRMRFAQRNLRRDKDRRNMLQFNLQILPKSAKQKERERIRLQKKFQKQFGVRQKWDQKSQKPRDSSVEVRSDWEVKEEMDFPQLMKMRYLEVSEPQDIECCGALEYYDKAFDRITTRSEKPLRSIKRIFHTVTTTDDPVIRKLAKTQGNVFATDAILATLMSCTRSVYSWDIVVQRVGSKLFFDKRDNSDFDLLTVSETANEPPQDEGNSFNSPRNLAMEATYINHNFSQQCLRMGKERYNFPNPNPFVEDDMDKNEIASVAYRYRRWKLGDDIDLIVRCEHDGVMTGANGEVSFINIKTLNEWDSRHCNGVDWRQKLDSQRGAVIATELKNNSYKLARWTCCALLAGSEYLKLGYVSRYHVKDSSRHVILGTQQFKPNEFASQINLSVENAWGILRCVIDICMKLEEGKYLILKDPNKQVIRVYSLPDGTFSSDEDEEEEEEEEEEEEEEET

SEQ ID NO: 318 - protein, 287 aa, Homo sapiens
MPPLWALLALGCLRFGSAVNLQPQLASVTFATNNPTLTTVALEKPLCMFDSKEALTGTHEVYLYVLVDSAISRNASVQDSTNTPLGSTFLQTEGGRTGPYKAVAFDLIPCSDLPSLDAIGDVSKASQILNAYLVRVGANGTCLWDPNFQGLCNAPLSAATEYRFKYVLVNMSTGLVEDQTLWSDPIRTNQLTPYSTIDTWPGRRSGGMIVITSILGSLPFFLLVGFAGAIALSLVDMGSSDGETTHDSQITQEAVPKSLGASESSYTSVNRGPPLDRAEVYSSKLQD

SEQ ID NO: 319 - protein, 551 aa, Homo sapiens
MAAPALSWRLPLLILLLPLATSWASAAVNGTSQFTCFYNSRANISCVWSQDGALQDTSCQVHAWPDRRRWNQTCELLPVSQASWACNLILGAPDSQKLTTVDIVTLRVLCREGVRWRVMAIQDFKPFENLRLMAPISLQVVHVETHRCNISWEISQASHYFERHLEFEARTLSPGHTWEEAPLLTLKQKQEWICLETLTPDTQYEFQVRVKPLQGEFTTWSPWSQPLAFRTKPAALGKDTIPWLGHLLVGLSGAFGFIILVYLLINCRNTGPWLKKVLKCNTPDPSKFFSQLSSEHGGDVQKWLSSPFPSSSFSPGGLAPEISPLEVLERDKVTQLLLQQDKVPEPASLSSNHSLTSCFTNQGYFFFHLPDALEIEACQVYFTYDPYSEEDPDEGVAGAPTGSSPQPLQPLSGEDDAYCTFPSRDDLLLFSPSLLGGPSPPSTAPGGSGAGEERMPPSLQERVPRDWDPQPLGPPTPGVPDLVDFQPPPELVLREAGEEVPDAGPREGVSFPWSRPPGQGEFRALNARLPLNTDAYLSLQELQGQDPTHLV

SEQ ID NO: 320 - protein, 108 aa, Homo sapiens [sequence omitted]

SEQ ID NO: 321 - protein, 705 aa, Homo sapiens
MEKPRSIEETPSSEPMEEEEDDDLELFGGYDSFRSYNSSVGSESSSYLEESSEAENEDREAGELPTSPLHLLSPGTPRSLDGSGSEPAVCEMCGIVGTREAFFSKTKRFCSVSCSRSYSSNSKKASILARLQGKPPTKKAKVLHKAAWSAKIGAFLHSQGTGQLADGTPTGQDALVLGFDWGKFLKDHSYKAAPVSCFKHVPLYDQWEDVMKGMKVEVLNSDAVLPSRVYWIASVIQTAGYRVLLRYEGFENDASHDFWCNLGTVDVHPIGWCAINSKILVPPRTIHAKFTDWKGYLMKRLVGSRTLPVDFHIKMVESMKYPFRQGMRLEVVDKSQVSRTRMAVVDTVIGGRLRLLYEDGDSDDDFWCHMWSPLIHPVGWSRRVGHGIKMSERRSDMAHHPTFRKIYCDAVPYLFKKVRAVYTEGGWFEEGMKLEAIDPLNLGNICVATVCKVLLDGYLMICVDGGPSTDGLDWFCYHASSHAIFPATFCQKNDIELTPPKGYEAQTFNWENYLEKTKSKAAPSRLFNMDCPNHGFKVGMKLEAVDLMEPRLICVATVKRVVHRLLSIHFDGWDSEYDQWVDCESPDIYPVGWCELTGYQLQPPVAAEPATPLKAKEATKKKKKQFGKKRKRIPPTKTRPLRQGSKKPLLEDDPQGARKISSEPVPGEIIAVRVKEEHLDVASPDKASSPELPVSVENIKQETDD

SEQ ID NO: 322 - protein, 762 aa, Homo sapiens
MEGPRSSTHVPLVLPLLVLLLLAPARQAAAQRCPQACICDNSRRHVACRYQNLTEVPDAIPELTQRLDLQGNLLKVIPAAAFQGVPHLTHLDLRHCEVELVAEGAFRGLGRLLLLNLASNHLRELPQEALDGLGSLRRLELEGNALEELRPGTFGALGALATLNLAHNALVYLPAMAFQGLLRVRWLRLSHNALSVLAPEALAGLPALRRLSLHHNELQALPGPVLSQARGLARLELGHNPLTYAGEEDGLALPGLRELLLDGGALQALGPRAFAHCPRLHTLDLRGNQLDTLPPLQGPGQLRRLRLQGNPLWCGCQARPLLEWLARARVRSDGACQGPRRLRGEALDALRPWDLRCPGDAAQEEEELEERAVAGPRAPPRGPPRGPGEERAVAPCPRACVCVPESRHSSCEGCGLQAVPRGFPSDTQLLDLRRNHFPSVPRAAFPGLGHLVSLHLQHCGIAELEAGALAGLGRLIYLYLSDNQLAGLSAAALEGAPRLGYLYLERNRFLQVPGAALRALPSLFSLHLQDNAVDRLAPGDLGRTRALRWVYLSGNRITEVSLGALGPARELEKLHLDRNQLREVPTGALEGLPALLELQLSGNPLRALRDGAFQPVGRSLQHLFLNSSGLEQICPGAFSGLGPGLQSLHLQKNQLRALPALPSLSQLELIDLSSNPFHCDCQLLPLHRWLTGLNLRVGATCATPPNARGQRVKAAAAVFEDCPGWAARKAKRTPASRPSARRTPIKGRQCGADKVGKEKGRL

SEQ ID NO: 323 - protein, 110 aa, Homo sapiens
MAKHHPDLIFCRKQAGVAIGRLCEKCDGKCVICDSYVRPCTLVRICDECNYGSYQGRCVICGGPGVSDAYYCKECTIQEKDRDGCPKIVNLGSSKTDLFYERKKYGFKKR

SEQ ID NO: 324 - protein, 780 aa, Homo sapiens
MAPYSLLVTRLQKALGVRQYHVASVLCQRAKVAMSHFEPNEYIHYDLLEKNINIVRKRLNRPLTLSEKIVYGHLDDPASQEIERGKSYLRLRPDRVAMQDATAQMAMLQFISSGLSKVAVPSTIHCDHLIEAQVGGEKDLRRAKDINQEVYNFLATAGAKYGVGFWKPGSGIIHQIILENYAYPGVLLIGTDSHTPNGGGLGGICIGVGGADAVDVMAGIPWELKCPKVIGVKLTGSLSGWSSPKDVILKVAGILTVKGGTGAIVEYHGPGVDSISCTGMATICNMGAEIGATTSVFPYNHRMKKYLSKTGREDIANLADEFKDHLVPDPGCHYDQLIEINLSELKPHINGPFTPDLAHPVAEVGKVAEKEGWPLDIRVGLIGSCTNSSYEDMGRSAAVAKQALAHGLKCKSQFTITPGSEQIRATIERDGYAQILRDLGGIVLANACGPCIGQWDRKDIKKGEKNTIVTSYNRNFTGRNDANPETHAFVTSPEIVTALAIAGTLKFNPETDYLTGTDGKKFRLEAPDADELPKGEFDPGQDTYQHPPKDSSGQHVDVSPTSQRLQLLEPFDKWDGKDLEDLQILIKVKGKCTTDHISAAGPWLKFRGHLDNISNNLLIGAINIENGKANSVRNAVTQEFGPVPDTARYYKKHGIRWVVIGDENYGEGSSREHAALEPRHLGGRAIITKSFARIHETNLKKQGLLPLTFADPADYNKIHPVDKLTIQGLKDFTPGKPLKCIIKHPNGTQETILLNHTFNETQIEWFRAGSALNRMKELQQ

SEQ ID NO: 325 - protein, 262 aa, Homo sapiens
MAVTAQAARRKERVLCLFDVDGTLTPARQKIDPEVAAFLQKLRSRVQIGVVGGSDYCKIAEQLGDGDEVIEKFDYVFAENGTVQYKHGRLLSKQTIQNHLGEELLQDLINFCLSYMALLRLPKKRGTFIEFRNGMLNISPIGRSCTLEERIEFSELDKKEKIREKFVEALKTEFAGKGLRFSRGGMISFDVFPEGWDKRYCLDSLDQDSFDTIHFFGNETSPGGNDFEIFADPRTVGHSVVSPQDTVQRCREIFFPETAHEA

SEQ ID NO: 326 - protein, 537 aa, Homo sapiens
MGATGAAEPLQSVLWVKQQRCAVSLEPARALLRWWRSPGPGAGAPGADACSVPVSEIIAVEETDVHGKHQGSGKWQKMEKPYAFTVHCVKRARRHRWKWAQVTFWCPEEQLCHLWLQTLREMLEKLTSRPKHLLVFINPFGGKGQGKRIYERKVAPLFTLASITTDIIVTEHANQAKETLYEINIDKYDGIVCVGGDGMFSEVLHGLIGRTQRSAGVDQNHPRAVLVPSSLRIGIIPAGSTDCVCYSTVGTSDAETSALHIVVGDSLAMDVSSVHHNSTLLRYSVSLLGYGFYGDIIKDSEKKRWLGLARYDFSGLKTFLSHHCYEGTVSFLPAQHTVGSPRDRKPCRAGCFVCRQSKQQLEEEQKKALYGLEAAEDVEEWQVVCGKFLAINATNMSCACRRSPRGLSPAAHLGDGSSDLILIRKCSRFNFLRFLIRHTNQQDQFDFTFVEVYRVKKFQFTSKHMEDEDSDLKEGGKKRFGHICSSHPSCCCTVSNSSWNCDGEVLHSPAIEVRVHCQLVRLFARGIEENPKPDSHS

SEQ ID NO: 327 - protein, 1058 aa, Homo sapiens
MRRKGRCHRGSAARHPSSPCSVKHSPTRETLTYAQAQRMVEIEIEGRLHRISIFDPLEIILEDDLTAQEMSECNSNKENSERPPVCLRTKRHKNNRVKKKNEALPSAHGTPASASALPEPKVRIVEYSPPSAPRRPPVYYKFIEKSAEELDNEVEYDMDEEDYAWLEIVNEKRKGDCVPAVSQSMFEFLMDRFEKESHCENQKQGEQQSLIDEDAVCCICMDGECQNSNVILFCDMCNLAVHQECYGVPYIPEGQWLCRHCLQSRARPADCVLCPNKGGAFKKTDDDRWGHVVCALWIPEVGFANTVFIEPIDGVRNIPPARWKLTCYLCKQKGVGACIQCHKANCYTAFHVTCAQKAGLYMKMEPVKELTGGGTTFSVRKTAYCDVHTPPGCTRRPLNIYGDVEMKNGVCRKESSVKTVRSTSKVRKKAKKAKKALAEPCAVLPTVCAPYIPPQRLNRIANQVAIQRKKQFVERAHSYWLLKRLSRNGAPLLRRLQSSLQSQRSSQQRENDEEMKAAKEKLKYWQRLRHDLERARLLIELLRKREKLKREQVKVEQVAMELRLTPLTVLLRSVLDQLQDKDPARIFAQPVSLKEVPDYLDHIKHPMDFATMRKRLEAQGYKNLHEFEEDFDLIIDNCMKYNARDTVFYRAAVRLRDQGGVVLRQARREVDSIGLEEASGMHLPERPAAAPRRPFSWEDVDRLLDPANRAHLGLEEQLRELLDMLDLTCAMKSSGSRSKRAKLLKKEIALLRNKLSQQHSQPLPTGPGLEGFEEDGAALGPEAGEEVLPRLETLLQPRKRSRSTCGDSEVEEESPGKRLDAGLTNGFGGARSEQEPGGGLGRKATPRRRCASESSISSSNSPLCDSSFNAPKCGRGKPALVRRHTLEDRSELISCIENGNYAKAARIAAEVGQSSMWISTDAAASVLEPLKVVWAKCSGYPSYPALIIDPKMPRVPGHHNGVTIPAPPLDVLKIGEHMQTKSDEKLFLVLFFDNKRSWQWLPKSKMVPLGIDETIDKLKMMEGRNSSIRKAVRIAFDRAMNHLSRVHGEPTSDLSDID

SEQ ID NO: 328 - protein, 1171 aa, Homo sapiens
MENNLKTCPKEDGDFVSDKIKFKIEEEDDDGIPPDSLERMDFKSEQEDMKQTDSGGERAGLGGTGCSCKPPGKYLSAESEDDYGALFSQYSSTLYDVAMEAVTQSLLSSRNMSSRKKSPAWKHFFISPRDSTKAICMYCVKEFSRGKNEKDLSTSCLMRHVRRAHPTVLIQENGSVSAVSSFPSPSLLLPPQPADAGDLSTILSPIKLVQKVASKIPSPDRITEESVSVVSSEEISSDMSVSEKCGREEALVGSSPHLPALHYDEPAENLAEKSLPLPKSTSGSRRRSAVWKHFYLSPLDNSKAVCIHCMNEFSRGKNGKDLGTSCLIRHMWRAHRAIVLQENGGTGIPPLYSTPPTLLPSLLPPEGELSSVSSSPVKPVRESPSASSSPDRLTEDLQSHLNPGDGLMEDVAAFSSSDDIGEASASSPEKQQADGLSPRLFESGAIFQQNKKVMKRLKSEVWHHFSLAPMDSLKAECRYCGCAISRGKKGDVGTSCLMRHLYRRHPEVVGSQKGFLGASLANSPYATLASAESSSSKLTDLPTVVTKNNQVMFPVNSKKTSKLWNHFSICSADSTKVVCLHCGRTISRGKKPTNLGTSCLLRHLQRFHSNVLKTEVSETARPSSPDTRVPRGTELSGASSFDDTNEKFYDSHPVAKKITSLIAEMIALDLQPYSFVDNVGFNRLLEYLKPQYSLPAPSYFSRTAIPGMYDNVKQIIMSHLKEAESGVIHFTSGIWMSNQTREYLTLTAHWVSFESPARPRCDDHHCSALLDVSQVDCDYSGNSIQKQLECWWEAWVTSTGLQVGITVTDNASIGKTLNEGEHSSVQCFSHTVNLIVSEAIKSQRMVQNLLSLARKICERVHRSPKAKEKLAELQREYALPQHHLIQDVPSKWSTSFHMLERLIEQKRAINEMSVECNFRELISCDQWEVMQSVCRALKPFEAASREMSTQMSTLSQVIPMVHILNRKVEMLFEETMGIDTMLRSLKEAMVSRLSATLHDPRYVFATLLDPRYKASLFTEEEAEQYKQDLIRELELMNSTSEDVAASHRCDAGSPSKDSAAEENLWSLVAKVKKKDPREKLPEAMVLAYLEEEVLEHSCDPLTYWNLKKASWPGLSALAVRFLGCPPSIVPSEKLFNTPTENGSLGQSRLMMEHFEKLIFLKVNLPLIYFQY

SEQ ID NO: 329 - protein, 518 aa, Homo sapiens
MSCVKLWPSGAPAPLVSIEELENQELVGKGGFGTVFRAQHRKWGYDVAVKIVNSKAISREVKAMASLDNEFVLRLEGVIEKVNWDQDPKPALVTKFMENGSLSGLLQSQCPRPWPLLCRLLKEVVLGMFYLHDQNPVLLHRDLKPSNVLLDPELHVKLADFGLSTFQGGSQSGTGSGEPGGTLGYLAPELFVNVNRKASTASDVYSFGILMWAVLAGREVELPTEPSLVYEAVCNRQNRPSLAELPQAGPETPGLEGLKELMQLCWSSEPKDRPSFQECLPKTDEVFQMVENNMNAAVSTVKDFLSQLRSSNRRFSIPESGQGGTEMDGFRRTIENQHSRNDVMVSEWLNKLNLEEPPSSVPKKCPSLTKRSRAQEEQVPQAWTAGTSSDSMAQPPQTPETSTFRNQMPSPTSTGTPSPGPRGNQGAERQGMNWSCRTPEPNPVTGRPLVNIYNCSGVQVGDNNYLTMQQTTALPTWGLAPSGKGRGLQHPPPVGSQEGPKDPEAWSRPQGWYNHSGK

SEQ ID NO: 330 - protein, 745 aa, Homo sapiens
MPFPVTTQGSQQTQPPQKHYGITSPISLAAPKETDCVLTQKLIETLKPFGVFEEEEELQRRILILGKLNNLVKEWIREISESKNLPQSVIENVGGKIFTFGSYRLGVHTKGADIDALCVAPRHVDRSDFFTSFYDKLKLQEEVKDLRAVEEAFVPVIKLCFDGIEIDILFARLALQTIPEDLDLRDDSLLKNLDIRCIRSLNGCRVTDEILHLVPNIDNFRLTLRAIKLWAKRHNIYSNILGFLGGVSWAMLVARTCQLYPNAIASTLVHKFFLVFSKWEWPNPVLLKQPEECNLNLPVWDPRVNPSDRYHLMPIITPAYPQQNSTYNVSVSTRMVMVEEFKQGLAITDEILLSKAEWSKLFEAPNFFQKYKHYIVLLASAPTEKQRLEWVGLVESKIRILVGSLEKNEFITLAHVNPQSFPAPKENPDKEEFRTMWVIGLVFKKTENSENLSVDLTYDIQSFTDTVYRQAINSKMFEVDMKIAAMHVKRKQLHQLLPNHVLQKKKKHSTEGVKLTALNDSSLDLSMDSDNSMSVPSPTSATKTSPLNSSGSSQGRNSPAPAVTAASVTNIQATEVSVPQVNSSESSGGTSSESIPQTATQPAISPPPKPTVSRVVSSTRLVNPPPRSSGNAATSGNAATKIPTPIVGVKRTSSPHKEESPKKTKTEEDETSEDANCLALSGHDKTEAKEQLDTETSTTQSETIQTAASLLASQKTSSTDLSDIPALPANPIPVIKNSIKLRLNR

SEQ ID NO: 331 - protein, 732 aa, Homo sapiens
MPEETQTQDQPMEEEEVETFAFQAEIAQLMSLIINTFYSNKEIFLRELISNSSDALDKIRYESLTDPSKLDSGKELHINLIPNKQDRTLTIVDTGIGMTKADLINNLGTIAKSGTKAFMEALQAGADISMIGQFGVGFYSAYLVAEKVTVITKHNDDEQYAWESSAGGSFTVRTDTGEPMGRGTKVILHLKEDQTEYLEERRIKEIVKKHSQFIGYPITLFVEKERDKEVSDDEAEEKEDKEEEKEKEEKESEDKPEIEDVGSDEEEEKKDGDKKKKKKIKEKYIDQEELNKTKPIWTRNPDDITNEEYGEFYKSLTNDWEDHLAVKHFSVEGQLEFRALLFVPRRAPFDLFENRKKKNNIKLYVRRVFIMDNCEELIPEYLNFIRGVVDSEDLPLNISREMLQQSKILKVIRKNLVKKCLELFTELAEDKENYKKFYEQFSKNIKLGIHEDSQNRKKLSELLRYYTSASGDEMVSLKDYCTRMKENQKHIYYITGETKDQVANSAFVERLRKHGLEVIYMIEPIDEYCVQQLKEFEGKTLVSVTKEGLELPEDEEEKKKQEEKKTKFENLCKIMKDILEKKVEKVVVSNRLVTSPCCIVTSTYGWTANMERIMKAQALRDNSTMGYMAAKKHLEINPDHSIIETLRQKAEADKNDKSVKDLVILLYETALLSSGFSLEDPQTHANRIYRMIKLGLGIDEDDPTADDTSAAVTEEMPPLEGDDDTSRMEEVD

SEQ ID NO: 332 - protein, 1375 aa, Homo sapiens
MEGDRVAGRPVLSSLPVLLLLPLLMLRAAALHPDELFPHGESWGDQLLQEGDDESSAVVKLANPLHFYEARFSNLYVGTNGIISTQDFPRETQYVDYDFPTDFPAIAPFLADIDTSHGRGRVLYREDTSPAVLGLAARYVRAGFPRSARFTPTHAFLATWEQVGAYEEVKRGALPSGELNTFQAVLASDGSDSYALFLYPANGLQFLGTRPKESYNVQLQLPARVGFCRGEADDLKSEGPYFSLTSTEQSVKNLYQLSNLGIPGVWAFHIGSTSPLDNVRPAAVGDLSAAHSSVPLGRSFSHATALESDYNEDNLDYYDVNEEEAEYLPGEPEEALNGHSSIDVSFQSKVDTKPLEESSTLDPHTKEGTSLGEVGGPDLKGQVEPWDERETRSPAPPEVDRDSLAPSWETPPPYPENGSIQPYPDGGPVPSEMDVPPAHPEEEIVLRSYPASGHTTPLSRGTYEVGLEDNIGSNTEVFTYNAANKETCEHNHRQCSRHAFCTDYATGFCCHCQSKFYGNGKHCLPEGAPHRVNGKVSGHLHVGHTPVHFTDVDLHAYIVGNDGRAYTAISHIPQPAAQALLPLTPIGGLFGWLFALEKPGSENGFSLAGAAFTHDMEVTFYPGEETVRITQTAEGLDPENYLSIKTNIQGQVPYVSANFTAHISPYKELYHYSDSTVTSTSSRDYSLTFGAINQTWSYRIHQNITYQVCRHAPRHPSFPTTQQLNVDRVFALYNDEERVLRFAVTNQIGPVKEDSDPTPGNPCYDGSHMCDTTARCHPGTGVDYTCECASGYQGDGRNCVDENECATGFHRCGPNSVCINLPGSYRCECRSGYEFADDRHTCILITPPANPCEDGSHTCAPAGQARCVHHGGSTFSCACLPGYAGDGHQCTDVDECSENRCHPAATCYNTPGSFSCRCQPGYYGDGFQCIPDSTSSLTPCEQQQRHAQAQYAYPGARFHIPQCDEQGNFLPLQCHGSTGFCWCVDPDGHEVPGTQTPPGSTPPHCGPSPEPTQRPPTICERWRENLLEHYGGTPRDDQYVPQCDDLGHFIPLQCHGKSDFCWCVDKDGREVQGTRSQPGTTPACIPTVAPPMVRPTPRPDVTPPSVGTFLLYTQGQQIGYLPLNGTRLQKDAAKTLLSLHGSIIVGIDYDCRERMVYWTDVAGRTISRAGLELGAEPETIVNSGLISPEGLAIDHIRRTMYWTDSVLDKIESALLDGSERKVLFYTDLVNPRAIAVDPIRGNLYWTDWNREAPKIETSSLDGENRRILINTDIGLPNGLTFDPFSKLLCWADAGTKKLECTLPDGTGRRVIQNNLKYPFSIVSYADHFYHTDWRRDGVVSVNKHSGQFTDEYLPEQRSHLYGITAVYPYCPTGRK

SEQ ID NO: 333 - protein, 713 aa, Homo sapiens
MSTRTPLPTVNERDTENHTSHGDGRQEVTSRTSRSGARCRNSIASCADEQPHIGNYRLLKTIGKGNFAKVKLARHILTGREVAIKIIDKTQLNPTSLQKLFREVRIMKILNHPNIVKLFEVIETEKTLYLIMEYASGGEVFDYLVAHGRMKEKEARSKFRQIVSAVQYCHQKRIVHRDLKAENLLLDADMNIKIADFGFSNEFTVGGKLDTFCGSPPYAAPELFQGKKYDGPEVDVWSLGVILYTLVSGSLPFDGQNLKELRERVLRGKYRIPFYMSTDCENLLKRFLVLNPIKRGTLEQIMKDRWINAGHEEDELKPFVEPELDISDQKRIDIMVGMGYSQEEIQESLSKMKYDEITATYLLLGRKSSEVRPSSDLNNSTGQSPHHKVQRSVSSSQKQRRYSDHAGPAIPSVVAYPKRSQTSTADSDLKEDGISSRKSSGSAVGGKGIAPASPMLGNASNPNKADIPERKKSSTVPSSNTASGGMTRRNTYVCSERTTADRHSVIQNGKENSTIPDQRTPVASTHSISSAATPDRIRFPRGTASRSTFHGQPRERRTATYNGPPASPSLSHEATPLSQTRSRGSTNLFSKLTSKLTRSRNVSAEQKDENKEAKPRSLRFTWSMKTTSSMDPGDMMREIRKVLDANNCDYEQRERFLLFCVHGDGHAENLVQWEMEVCKLPRLSLNGVRFKRISGTSIAFKNIASKIANELKL

SEQ ID NO: 334 - protein, 368 aa, Homo sapiens
MGTPPGLQTDCEALLSRFQETDSVRFEDFTELWRNMKFGTIFCGRMRNLEKNMFTKEALALAWRYFLPPYTFQIRVGALYLLYGLYNTQLCQPKQKIRVALKDWDEVLKFQQDLVNAQHFDAAYIFRKLRLDRAFHFTAMPKLLSYRMKKKIHRAEVTEEFKDPSDRVMKLITSDVLEEMLNVHDHYQNMKHVISVDKSKPDKALSLIKDDFFDNIKNIVLEHQQWHKDRKNPSLKSKTNDGEEKMEGNSQETERCERAESLAKIKSKAFSVVIQASKSRRHRQVKLDSSDSDSASGQGQVKATRKKEKKERLKPAGRKMSLRNKGNVQNIHKEDKPLSLSMPVITEEEENESLSGTEFTASKKRRKH

SEQ ID NO: 335 - protein, 1047 aa, Homo sapiens
MAVTLDKDAYYRRVKRLYSNWRKGEDEYANVDAIVVSVGVDEEIVYAKSTALQTWLFGYELTDTIMVFCDDKIIFMASKKKVEFLKQIANTKGNENANGAPAITLLIREKNESNKSSFDKMIEAIKESKNGKKIGVFSKDKFPGEFMKSWNDCLNKEGFDKIDISAVVAYTIAVKEDGELNLMKKAASITSEVFNKFFKERVMEIVDADEKVRHSKLAESVEKAIEEKKYLAGADPSTVEMCYPPIIQSGGNYNLKFSVVSDKNHMHFGAITCAMGIRFKSYCSNLVRTLMVDPSQEVQENYNFLLQLQEELLKELRHGVKICDVYNAVMDVVKKQKPELLNKITKNLGFGMGIEFREGSLVINSKNQYKLKKGMVFSINLGFSDLTNKEGKKPEEKTYALFIGDTVLVDEDGPATVLTSVKKKVKNVGIFLKNEDEEEEEEEKDEAEDLLGRGSRAALLTERTRNEMTAEEKRRAHQKELAAQLNEEAKRRLTEQKGEQQIQKARKSNVSYKNPSLMPKEPHIREMKIYIDKKYETVIMPVFGIATPFHIATIKNISMSVEGDYTYLRINFYCPGSALGRNEGNIFPNPEATFVKEITYRASNIKAPGEQTVPALNLQNAFRIIKEVQKRYKTREAEEKEKEGIVKQDSLVINLNRSNPKLKDLYIRPNIAQKRMQGSLEAHVNGFRFTSVRGDKVDILYNNIKHALFQPCDGEMIIVLHFHLKNAIMFGKKRHTDVQFYTEVGEITTDLGKHQHMHDRDDLYAEQMEREMRHKLKTAFKNFIEKVEALTKEELEFEVPFRDLGFNGAPYRSTCLLQPTSSALVNATEWPPFVVTLDEVELIHFERVQFHLKNFDMVIVYKDYSKKVTMINAIPVASLDPIKEWLNSCDLKYTEGVQSLNWTKIMKTIVDDPEGFFEQGGWSFLEPEGEGSDAEEGDSESEIEDETFNPSEDDYEEEEEDSDEDYSSEAEESDYSKESLGSEEESGKDWDELEEEARKADRESRYEEEEEQSRSMSRKRKASVHSSGRGSNRGSRHSSAPPKKKRK

SEQ ID NO: 336 - protein, 224 aa, Homo sapiens
MAAAVPQRAWTVEQLRSEQLPKKDIIKFLQEHGSDSFLAEHKLLGNIKNVAKTANKDHLVTAYNHLFETKRFKGTESISKVSEQVKNVKLNEDKPKETKSEETLDEGPPKYTKSVLKKGDKTNFPKKGDVVHCWYTGTLQDGTVFDTNIQTSAKKKKNAKPLSFKVGVGKVIRGWDEALLTMSKGEKARLEIEPEWAYGKKGQPDAKIPPNAKLTFEVELVDID

SEQ ID NO: 337 - protein, 255 aa, Homo sapiens
MQPLLLLLAFLLPTGAEAGEIIGGRESRPHSRPYMAYLQIQSPAGQSRCGGFLVREDFVLTAAHCWGSNINVTLGAHNIQRRENTQQHITARRAIRHPQYNQRTIQNDIMLLQLSRRVRRNRNVNPVALPRAQEGLRPGTLCTVAGWGRVSMRRGTDTLREVQLRVQRDRQCLRIFGSYDPRRQICVGDRRERKAAFKGDSGGPLLCNNVAHGIVSYGKSSGVPPEVFTRVSSFLPWIRTTMRSFKLLDQMETPL

SEQ ID NO: 338 - protein, 246 aa, Homo sapiens
MQPFLLLLAFLLTPGAGTEEIIGGHEAKPHSRPYMAFVQFLQEKSRKRCGGILVRKDFVLTAAHCQGSSINVTLGAHNIKEQERTQQFIPVKRPIPHPAYNPKNFSNDIMLLQLERKAKWTTAVRPLRLPSSKAQVKPGQLCSVAGWGYVSMSTLATTLQEVLLTVQKDCQCERLFHGNYSRATEICVGDPKKTQTGFKGDSGGPLVCKDVAQGILSYGNKKGTPPGVYIKVSHFLPWIKRTMKRL

SEQ ID NO: 339 - protein, 247 aa, Homo sapiens
MQPILLLLAFLLLPRADAGEIIGGHEAKPHSRPYMAYLMIWDQKSLKRCGGFLIRDDFVLTAAHCWGSSINVTLGAHNIKEQEPTQQFIPVKRPIPHPAYNPKNFSNDIMLLQLERKAKRTRAVQPLRLPSNKAQVKPGQTCSVAGWGQTAPLGKHSHTLQEVKMTVQEDRKCESDLRHYYDSTIELCVGDPEIKKTSFKGDSGGPLVCNKVAQGIVSYGRNNGMPPRACTKVSSFVHWIKKTMKRY

SEQ ID NO: 340 - protein, 576 aa, Homo sapiens
MRGPNSGTEKGRLVIPEKQGFDFLCMPVFHPRFKREFIQEPAKNRPGPQTRSDLLLSGRAFLLPLNQEDNTNLARVLTNHIHTGHHSSMFWMRVPLVAPEDLRDDIIENAPTTHTEEYSGEEKTWMWWHNFRTLCDYSKRIAVALEIGADLPSNHVIDRWLGEPIKAAILPTSIFLTNKKGFPVLSKMHQRLIFRLLKLEVQFIITGTNHHSEKEFCSYLQYLEYLSQNRPPPNAYELFAKGYEDYLQSPLQPLMDNLESQTYEVFEKDPIKYSQYQQAIYKCLLDRVPEEEKDTNVQVLMVLGAGRGPLVNASLRAAKQADRRIKLYAVEKNPNAVVTLENWQFEEWGSQVTVVSSDMREWVAPEKADIIVSELLGSFADNELSPECLDGAQHFLKDDGVSIPGEYTSFLAPISSSKLYNEVRACREKDRDPEAQFEMPYVVRLHNFHQLSAPQPCFTFSHPNRDPMIDNNRYCTLEFPVEVNTVLHGFAGYFETVLYQDITLSIRPETHSPGMFSWFPILFPIKQPITVREGQTICVRFWRCSNSKKVWYEWAVTAPVCSAIHNPTGRSYTIGL

SEQ ID NO: 341 - protein, 615 aa, Homo sapiens
MSAAWIPALGLGVCLLLLPGPAGSEGAGEWGSWGASRRSQGLSTSGYKRDSDPAPWASALPPEEEGAKVEPPRGAPALTPAADLLLLTCFSHAPIAITCFTRGLDIRKEKADVLCPGGCPLEEFSVYGNIVYASVSSICGAAVHRGVISNSGGPVRVYSLPGRENYSSVDANGIQSQMLSRWSASFTVTKGKSSTQEATGQAVSTAHPPTGKRLKKTPEKKTGNKDCKADIAFLIDGSFNIGQRRFNLQKNFVGKVALMLGIGTEGPHVGLVQASEHPKIEFYLKNFTSAKDVLFAIKEVGFRGGNSNTGKALKHTAQKFFTVDAGVRKGIPKVVVVFIDGWPSDDIEEAGIVAREFGVNVFIVSVAKPIPEELGMVQDVTFVDKAVCRNNGFFSYHMPNWFGTTKYVKPLVQKLCTHEQMMCSKTCYNSVNIAFLIDGSSSVGDSNFRLMLEFVSNIAKTFEISDIGAKIAAVQFTYDQRTEFSFTDYSTKENVLAVIRNIRYMSGGTATGDAISFTVRNVFGPIRESPNKNFLVIVTDGQSYDDVQGPAAAAHDAGITIFSVGVAWAPLDDLKDMASKPKESHAFFTREFTGLEPIVSDVIRGICRDFLESQQ

SEQ ID NO: 342 - protein, 159 aa, Homo sapiens
MIKFFLMVNKQGQTRLSKYYEHVDINKRTLLETEVIKSCLSRSNEQCSFIEYKDFKLIYRQYAALFIVVGVNDTENEMAIYEFIHNFVEVLDEYFSRVSELDVSFFNTVFHSTWQMHSGPYQEPIDELPKICSALEPQQTCFSPDSSSFKGAASTTPIY

SEQ ID NO: 343 - protein, 1332 aa, Homo sapiens [sequence omitted]

SEQ ID NO: 344 - protein, 847 aa, Homo sapiens
MAKPLTDQEKRRQISIRGIVGVENVAELKKSFNRHLHFTLVKDRNVATTRDYYFALAHTVRDHLVGRWIRTQQHYYDKCPKRVYYLSLEFYMGRTLQNTMINLGLQNACDEAIYQLGLDIEELEEIEEDAGLGNGGLGRLAACFLDSMATLGLAAYGYGIRYEYGIFNQKIRDGWQVEEADDWLRYGNPWEKSRPEFMLPVHFYGKVEHTNTGTKWIDTQVVLALPYDTPVPGYMNNTVNTMRLWSARAPNDFNLRDFNVGDYIQAVLDRNLAENISRVLYPNDNFFEGKELRLKQEYFVVAATLQDIIRRFKASKFGSTRGAGTVFDAFPDQVAIQLNDTHPALAIPELMRIFVDIEKLPWSKAWELTQKTFAYTNHTVLPEALERWPVDLVEKLLPRHLEIIYEINQKHLDRIVALFPKDVDRLRRMSLIEEEGSKRINMAHLCIVGSHAVNGVAKIHSDIVKTKVFKDFSELEPDKFQNKTNGITPRRWLLLCNPGLAELIAEKIGEDYVKDLSQLTKLHSFLGDDVFLRELAKVKQENKLKFSQFLETEYKVKINPSSMFDVQVKRIHEYKRQLLNCLHVITMYNRIKKDPKKLFVPRTVIIGGKAAPGYHMAKMIIKLITSVADVVNNDPMVGSKLKVIFLENYRVSLAEKVIPATDLSEQISTAGTEASGTGNMKFMLNGALTIGTMDGANVEMAEEAGEENLFIFGMRIDDVAALDKKGYEAKEYYEALPELKLVIDQIDNGFFSPKQPDLFKDIINMLFYHDRFKVFADYEAYVKCQDKVSQLYMNPKAWNTMVLKNIAASGKFSSDRTIKEYAQNIWNVEPSDLKISLSNESNKVNGN

SEQ ID NO: 345 - protein, 184 aa, Homo sapiens
MKPDETPMFDPSLLKEVDWSQNTATFSPAISPTHPGEGLVLRPLCTADLNRGFFKVLGQLTETGVVSPEQFMKSFEHMKKSGDYYVTVVEDVTLGQIVATATLIIEHKFIHSCAKRGRVEDVVVSDECRGKQLGKLLLSTLTLLSKKLNCYKITLECLPQNVGFYKKFGYTVSEENYMCRRFLK

SEQ ID NO: 346 - protein, 144 aa, Homo sapiens
MAFTFAAFCYMLALLLTAALIFFAIWHIIAFDELKTDYKNPIDQCNTLNPLVLPEYLIHAFFCVMFLCAAEWLTLGLNMPLLAYHIWRYMSRPVMSGPGLYDPTTIMNADILAYCQKEGWCKLAFYLLAFFYYLYGMIYVLVSS

SEQ ID NO: 347 - protein, 247 aa, Homo sapiens
MSGKDRIEIFPSRMAQTIMKARLKGAQTGRNLLKKKSDALTLRFRQILKKIIETKMLMGEVMREAAFSLAEAKFTAGDFSTTVIQNVNKAQVKIRAKKDNVAGVTLPVFEHYHEGTDSYELTGLARGGEQLAKLKRNYAKAVELLVELASLQTSFVTLDEAIKITNRRVNAIEHVIIPRIERTLAYIITELDEREREEFYRLKKIQEKKKILKEKSEKDLEQRRAAGEVLEPANLLAEEKDEDLLFE

SEQ ID NO: 348 - protein, 255 aa, Homo sapiens
MSSIGTGYDLSASTFSPDGRVFQVEYAMKAVENSSTAIGIRCKDGVVFGVEKLVLSKLYEEGSNKRLFNVDRHVGMAVAGLLADARSLADIAREEASNFRSNFGYNIPLKHLADRVAMYVHAYTLYSAVRPFGCSFMLGSYSVNDGAQLYMIDPSGVSYGYWGCAIGKARQAAKTEIEKLQMKEMTCRDIVKEVAKIIYIVHDEVKDKAFELELSWVGELTNGRHEIVPKDIREEAEKYAKESLKEEDESDDDNM

SEQ ID NO: 349 - protein, 216 aa, Homo sapiens
MQAGKPILYSYFRSSCSWRVRIALALKGIDYETVPINLIKDGGQQFSKDFQALNPMKQVPTLKIDGITIHQSLAIIEYLEEMRPTPRLLPQDPKKRASVRMISDLIAGGIQPLQNLSVLKQVGEEMQLTWAQNAITCGFNALEQILQSTAGIYCVGDEVTMADLCLVPQVANAERFKVDLTPYPTISSINKRLLVLEAFQVSHPCRQPDTPTELRA

SEQ ID NO: 350 - protein, 338 aa, Homo sapiens
MAKWGEGDPRWIVEERADATNVNNWHWTERDASNWSTDKLKTLFLAVQVQNEEGKCEVTEVSKLDGEASINNRKGKLIFFYEWSVKLNWTGTSKSGVQYKGHVEIPNLSDENSVDEVEISVSLAKDEPDTNLVALMKEEGVKLLREAMGIYISTLKTEFTQGMILPTMNGESVDPVGQPALKTEERKAKPAPSKTQARPVGVKIPTCKITLKETFLTSPEELYRVFTTQELVQAFTHAPATLEADRGGKFHMVDGNVSGEFTDLVPEKHIVMKWRFKSWPEGHFATITLTFIDKNGETELCMEGRGIPAPEEERTRQGWQRYYFEGIKQTFGYGARLF

SEQ ID NO: 351 - protein, 76 aa, Homo sapiens
MRALRDRAGLLLCVLLLAALLEAALGLPVKKPRLRGPRPGSLTRLAEPPFQVRASSERSPAGARNLALCGVAGQGR

SEQ ID NO: 352 - protein, 562 aa, Homo sapiens
MRPEPGGCCCRRTVRANGCVANGEVRNGYVRSSAAAAAAAAAGQIHHVTQNGGLYKRPFNEAFEETPMLVAVLTYVGYGVLTLFGYLRDFLRYWRIEKCHHATEREEQKDFVSLYQDFENFYTRNLYMRIRDNWNRPICSVPGARVDIMERQSHDYNWSFKYTGNIIKGVINMGSYNYLGFARNTGSCQEAAAKVLEEYGAGVCSTRQEIGNLDKHEELEELVARFLGVEAAMAYGMGFATNSMNIPALVGKGCLILSDELNHASLVLGARLSGATIRIFKHNNMQSLEKLLKDAIVYGQPRTRRPWKKILILVEGIYSMEGSIVRLPEVIALKKKYKAYLYLDEAHSIGALGPTGRGVVEYFGLDPEDVDVMMGTFTKSFGASGGYIGGKKELIDYLRTHSHSAVYATSLSPPVVEQIITSMKCIMGQDGTSLGKECVQQLAENTRYFRRRLKEMGFIIYGNEDSPVVPLMLYMPAKIGAFGREMLKRNIGVVVVGFPATPIIESRARFCLSAAHTKEILDTALKEIDEVGDLLQLKYSRHRLVPLLDRPFDETTYEETED

SEQ ID NO: 353 - protein, 985 aa, Homo sapiens
MIRHAGAPARGDPTGPVPVVGKGEEEEEEDGMRLCLPANPKNCLPHRRGISILEKLIKTCPVWLQLSLGQAEVARILHRVVAGMFLVRRDSSSKQLVLCVHFPSLNESSAEVLEYTIKEEKSILYLEGSALVFEDIFRLIAFYCVSRDLLPFTLRLPQAILEASSFTDLETIANLGLGFWDSSLNPPQERGKPAEPPRDRAPGFPLVSSLRPTAHDANCACEIELSVGNDRLWFVNPIFIEDCSSALPTDQPPLGNCPARPLPPTSDATSPTSRWAPRRPPPPPPVLPLQPCSPAQPPVLPALAPAPACPLPTSPPVPAPHVTPHAPGPPDHPNQPPMMTCERLPCPTAGLGPLREEAMKPGAASSPLQQVPAPPLPAKKNLPTAPPRRRVSERVSLEDQSPGMAAEGDQLSLPPQGTSDGPEDTPRESTEQGQDTEVKASDPHSMPELPRTAKQPPVPPPRKKRISRQLASTLPAPLENAELCTQAMALETPTPGPPREGQSPASQAGTQHPPAQATAHSQSSPEFKGSLASLSDSLGVSVMATDQDSYSTSSTEEELEQFSSPSVKKKPSMILGKARHRLSFASFSSMFHAFLSNNRKLYKKVVELAQDKGSYFGSLVQDYKVYSLEMMARQTSSTEMLQEIRTMMTQLKSYLLQSTELKALVDPALHSEEELEAIVESALYKCVLKPLKEAINSCLHQIHSKDGSLQQLKENQLVILATTTTDLGVTTSVPEVPMMEKILQKFTSMHKAYSPEKKISILLKTCKLIYDSMALGNPGKPYGADDFLPVLMYVLARSNLTEMLLNVEYMMELMDPALQLGEGSYYLTTTYGALEHIKSYDKITVTRQLSVEVQDSIHRWERRRTLNKARASRSSVQDFICVSYLEPEQQARTLASRADTQAQALCAQCAEKFAVERPQAHRLFVLVDGRCFQLADDALPHCIKGYLLRSEPKRDFHFVYRPLDGGGGGGGGSPPCLVVREPNFL

SEQ ID NO: 354 - protein, 389 aa, Homo sapiens
MGKMAAAVGSVATLATEPGEDAFRKLFRFYRQSRPGTADLEGVIDFSAAHAARGKGPGAQKVIKSQLNVSSVSEQNAYRAGLQPVSKWQAYGLKGYPGFIFIPNPFLPGYQWHWVKQCLKLYSQKPNVCNLDKHMSKEETQDLWEQSKEFLRYKEATKRRPRSLLEKLRWVTVGYHYNWDSKKYSADHYTPFPSDLGFLSEQVAAACGFEDFRAEAGILNYYRLDSTLGIHVDRSELDHSKPLLSFSFGQSAIFLLGGLQRDEAPTAMFMHSGDIMIMSGFSRLLNHAVPRVLPNPEGEGLPHCLEAPLPAVLPRDSMVEPCSMEDWQVCASYLKTARVNMTVRQVLATDQNFPLEPIEDEKRDISTEGFCHLDDQNSEVKRARINPDS

SEQ ID NO: 355 - protein, 457 aa, Homo sapiens
MRSAAVLALLLCAGQVTALPVNSPMNKGDTEVMKCIVEVISDTLSKPSPMPVSQECFETLRGDERILSILRHQNLLKELQDLALQGAKERAHQQKKHSGFEDELSEVLENQSSQAELKEAVEEPSSKDVMEKREDSKEAEKSGEATDGARPQALPEPMQESKAEGNNQAPGEEEEEEEEATNTHPPASLPSQKYPGPQAEGDSEGLSQGLVDREKGLSAEPGWQAKREEEEEEEEEAEAGEEAVPEEEGPTVVLNPHPSLGYKEIRKGESRSEALAVDGAGKPGAEEAQDPEGKGEQEHSQQKEEEEEMAVVPQGLFRGGKSGELEQEEERLSKEWEDSKRWSKMDQLAKELTAEKRLEGQEEEEDNRDSSMKLSFRARAYGFRGPGPQLRRGWRPSSREDSLEAGLPLQVRGYPEEKKEEEGSANRRPEDQELESLSAIEAELEKVAHQLQALRRG

SEQ ID NO: 356 - protein, 339 aa, Homo sapiens
MNWELLLWLLVLCALLLLLVQLLRFLRADGDLTLLWAEWQGRRPEWELTDMVVWVTGASSGIGEELAYQLSKLGVSLVLSARRVHELERVKRRCLENGNLKEKDILVLPLDLTDTGSHEAATKAVLQEFGRIDILVNNGGMSQRSLCMDTSLDVYRKLIELNYLGTVSLTKCVLPHMIERKQGKIVTVNSILGIISVPLSIGYCASKHALRGFFNGLRTELATYPGIIVSNICPGPVQSNIVENSLAGEVTKTIGNNGDQSHKMTTSRCVRLMLISMANDLKEVWISEQPFLLVTYLWQYMPTWAWWITNKMGKKRIENFKSGVDADSSYFKIFKTKHD

SEQ ID NO: 357 - protein, 349 aa, Homo sapiens
MEAHNASAPFNFTLPPNFGKRPTDLALSVILVFMLFFIMLSLGCTMEFSKIKAHLWKPKGLAIALVAQYGIMPLTAFVLGKVFRLKNIEALAILVCGCSPGGNLSNVFSLAMKGDMNLSIVMTTCSTFCALGMMPLLLYIYSRGIYDGDLKDKVPYKGIVISLVLVLIPCTIGIVLKSKRPQYMRYVIKGGMIIILLCSVAVTVLSAINVGKSIMFAMTPLLIATSSLMPFIGFLLGYVLSALFCLNGRCRRTVSMETGCQNVQLCSTILNVAFPPEVIGPLFFFPLLYMIFQLGEGLLLIAIFWCYEKFKTPKDKTKMIYTAATTEETIPGALGNGTYKGEDCSPCTA

SEQ ID NO: 358 - protein, 431 aa, Homo sapiens
MSVNVNRSVSDQFYRYKMPRLIAKVEGKGNGIKTVIVNMVDVAKALNRPPTYPTKYFGCELGAQTQFDVKNDRYIVNGSHEANKLQDMLDGFIKKFVLCPECENPETDLHVNPKKQTIGNSCKACGYRGMLDTHHKLCTFILKNPPENSDSGTGKKEKEKKNRKGKDKENGSVSSSETPPPPPPPNEINPPPHTMEEEEDDDWGEDTTEEAQRRRMDEISDHAKVLTLSDDLERTIEERVNILFDFVKKKKEEGVIDSSDKEIVAEAERLDVKAMGPLVLTEVLFNEKIREQIKKYRRHFLRFCHNNKKAQRYLLHGLECVVAMHQAQLISKIPHILKEMYDADLLEEEVIISWSEKASKKYVSKELAKEIRVKAEPFIKWLKEAEEESSGGEEEDEDENIEVVYSKAASVPKVETVKSDNKDDDIDIDAI

SEQ ID NO: 359 - protein, 252 aa, Homo sapiens
MSSEVSARRDAKKLVRSPSGLRMVPEHRAFGSPFGLEEPQWVPDKECRRCMQCDAKFDFLTRKHHCRRCGKCFCDRCCSQKVPLRRMCFVDPVRQCAECALVSLKEAEFYDKQLKVLLSGATFLVTFGNSEKPETMTCRLSNNQRYLFLDGDSHYEIEIVHISTVQILTEGFPPGEKDIHAYTSLRGSQPASEGGNARATGMFLQYTVPGTEGVTQLKLTVVEDVTVGRRQAVAWLVAMHKAAKLLYESRDQ

SEQ ID NO: 360 - protein, 396 aa, Homo sapiens
MPRVKAAQAGRQSSAKRHLAEQFAVGEIITDMAKKEWKVGLPIGQGGFGCIYLADMNSSESVGSDAPCVVKVEPSDNGPLFTELKFYQRAAKPEQIQKWIRTRKLKYLGVPKYWGSGLHDKNGKSYRFMIMDRFGSDLQKIYEANAKRFSRKTVLQLSLRILDILEYIHEHEYVHGDIKASNLLLNYKNPDQVYLVDYGLAYRYCPEGVHKEYKEDPKRCHDGTIEFTSIDAHNGVAPSRRGDLEILGYCMIQWLTGHLPWEDNLKDPKYVRDSKIRYRENIASLMDKCFPEKNKPGEIAKYMETVKLLDYTEKPLYENLRDILLQGLKAIGSKDDGKLDLSVVENGGLKAKTITKKRKKEIEESKEPGVEDTEWSNTQTEEAIQTRSRTRKRVQK

SEQ ID NO: 361 - protein, 808 aa, Homo sapiens
MRLLLLVPLLLAPAPGSSAPKVRRQSDTWGPWSQWSPCSRTCGGGVSFRERPCYSQRRDGGSSCVGPARSHRSCRTESCPDGARDFRAEQCAEFDGAEFQGRRYRWLPYYSAPNKCELNCIPKGENFYYKHREAVVDGTPCEPGKRDVCVDGSCRVVGCDHELDSSKQEDKCLRCGGDGTTCYPVAGTFDANDLSRGYNQILIVPMGATSILIDEAAASRNFLAVKNVRGEYYLNGHWTIEAARALPAASTILHYERGAEGDLAPERLHARGPTSEPLVIELISQEPNPGVHYEYHLPLRRPSPGFSWSHGSWSDCSAECGGGHQSRLVFCTIDHEAYPDHMCQRQPRPADRRSCNLHPCPETKRWKAGPWAPCSASCGGGSQSRSVYCISSDGAGIQEAVEEAECAGLPGKPPAIQACNLQRCAAWSPEPWGECSVSCGVGVRKRSVTCRGERGSLLHTAACSLEDRPPLTEPCVHEDCPLLSDQAWHVGTWGLCSKSCSSGTRRRQVICAIGPPSHCGSLQHSKPVDVEPCNTQPCHLPQEVPSMQDVHTPASNPWMPLGPQESPASDSRGQWWAAQEHPSARGDHRGERGDPRGDQGTHLSALGPAPSLQQPPYQQPLRSGSGPHDCRHSPHGCCPDGHTASLGPQWQGCPGAPCQQSRYGCCPDRVSVAEGPHHAGCTKSYGGDSTGGMPRSRAVASTVHNTHQPQAQQNEPSECRGSQFGCCYDNVATAAGPLGEGCVGQPSHGLAWQVWSPRWCRQPWGSWCGSPAQTTLPRNPRLPGRKMASPSPLTGVCDGPPTSSDRCV

SEQ ID NO: 362 - protein, 318 aa, Homo sapiens
MPKRGKKGAVAEDGDELRTEPEAKKSKTAAKKNDKEAAGEGPALYEDPPDQKTSPSGKPATLKICSWNVDGLRAWIKKKGLDWVKEEAPDILCLQETKCSENKLPAELQELPGLSHQYWSAPSDKEGYSGVGLLSRQCPLKVSYGIGDEEHDQEGRVIVAEFDSFVLVTAYVPNAGRGLVRLEYRQRWDEAFRKFLKGLASRKPLVLCGDLNVAHEEIDLRNPKGNKKNAGFTPQERQGFGELLQAVPLADSFRHLYPNTPYAYTFWTYMMNARSKNVGWRLDYFLLSHSLLPALCDSKIRSKALGSDHCPITLYLAL

SEQ ID NO: 363 - protein, 306 aa, Homo sapiens
MAAAAAAAAAAGAAGGRGSGPGRRRHLVPGAGGEAGEGAPGGAGDYGNGLESEELEPEELLLEPEPEPEPEEEPPRPRAPPGAPGPGPGSGAPGSQEEEEEPGLVEGDPGDGAIEDPELEAIKARVREMEEEAEKLKELQNEVEKQMNMSPPPGNAGPVIMSIEEKMEADARSIYVGNVDYGATAEELEAHFHGCGSVNRVTILCDKFSGHPKGFAYIEFSDKESVRTSLALDESLFRGRQIKVIPKRTNRPGISTTDRGFPRARYRARTTNYNSSRSRFYSGFNSRPRGRVYRGRARATSWYSPY

SEQ ID NO: 364 - protein, 561 aa, Homo sapiens
MAIATSTQLARALYDNTAESPQELSFRRGDVLRVLQREGAGGLDGWCLCSLHGQQGIVPANRVKLLPAGPAPKPSLSPASPAQPGSPYPAPDHSNEDQEVYVVPPPARPCPTSGPPAGPCPPSPDLIYKIPRASGTQLAAPRDALEVYDVPPTALRVPSSGPYDCPASFSHPLTRVAPQPPGEDDAPYDVPLTPKPPAELEPDLEWEGGREPGPPIYAAPSNLKRASALLNLYEAPEELLADGEGGGTDEGIYDVPLLGPEAPPSPEPPGALASHDQDTLAQLLARSPPPPHRPRLPSAESLSRRPLPALPVPEAPSPSPVPSPAPGRKGSIQDRPLPPPPPRLPGYGGPKVEGDPEGREMEDDPAGHHNEYEGIPMAEEYDYVHLKGMDKAQGSRPPDQACTGDPELPERGMPAPQEALSPGEPLVVSTGDLQLLYFYAGQCQSHYSALQAAVAALMSSTQANQPPRLFVPHSKRVVVAAHRLVFVGDTLGRLAASAPLRAQVRAAGTALGQALRATVLAVKGAALGYPSSPAIQEMVQCVTELAGQALQFTTLLTSLAP

SEQ ID NO: 365 - protein, 504 aa, Homo sapiens
MVLADLGRKITSALRSLSNATIINEEVLNAMLKEVCTALLEADVNIKLVKQLRENVKSAIDLEEMASGLNKRKMIQHAVFKELVKLVDPGVKAWTPTKGKQNVIMFVGLQGSGKTTTCSKLAYYYQRKGWKTCLICADTFRAGAFDQLKQNATKARIPFYGSYTEMDPVIIASEGVEKFKNENFEIIIVDTSGRHKQEDSLFEEMLQVANAIQPDNIVYVMDASIGQACEAQAKAFKDKVDVASVIVTKLDGHAKGGGALSAVAATKSPIIFIGTGEHIDDFEPFKTQPFISKLLGMGDIEGLIDKVNELKLDDNEALIEKLKHGQFTLRDMYEQFQNIMKMGPFSQILGMIPGFGTDFMSKGNEQESMARLKKLMTIMDSMNDQELDSTDGAKVFSKQPGRIQRVARGSGVSTRDVQELLTQYTKFAQMVKKMGGIKGLFKGGDMSKNVSQSQMAKLNQQMAKMMDPRVLHHMGGMAGLQSMMRQFQQGAAGNMKGMMGFNNM

SEQ ID NO: 366 - protein, 640 aa, Homo sapiens
MAALYRPGLRLNWHGLSPLGWPSCRSIQTLRVLSGDLGQLPTGIRDFVEHSARLCQPEGIHICDGTEAENTATLTLLEQQGLIRKLPKYNNCWLARTDPKDVARVESKTVIVTPSQRDTVPLPPGGARGQLGNWMSPADFQRAVDERFPGCMQGRTMYVLPFSMGPVGSPLSRIGVQLTDSAYVVASMRIMTRLGTPVLQALGDGDFVKCLHSVGQPLTGQGEPVSQWPCNPEKTLIGHVPDQREIISFGSGYGGNSLLGKKCFALRIASRLARDEGWLAEHMLILGITSPAGKKRYVAAAFPSACGKTNLAMMRPALPGWKVECVGDDIAWMRFDSEGRLRAINPENGFFGVAPGTSATTNPNAMATIQSNTIFTNVAETSDGGVYWEGIDQPLPPGVTVTSWLGKPWKPGDKEPCAHPNSRFCAPARQCPIMDPAWEAPEGVPIDAIIFGGRRPKGVPLVYEAFNWRHGVFVGSAMRSESTAAAEHKGKIIMHDPFAMRPFFGYNFGHYLEHWLSMEGRKGAQLPRIFHVNWFRRDEAGHFLWPGFGENARVLDWICRRLEGEDSARETPIGLVPKEGALDLSGLRAIDTTQLFSLPKDFWEQEVRDIRSYLTEQVNQDLPKEVLAELEALERRVHKM

SEQ ID NO: 367 - protein, 317 aa, Homo sapiens
MFQAAERPQEWAMEGPRDGLKKERLLDDRHDSGLDSMKDEEYEQMVKELQEIRLEPQEVPRGSEPWKQQLTEDGDSFLHLAIIHEEKALTMEVIRQVKGDLAFLNFQNNLQQTPLHLAVITNQPEIAEALLGAGCDPELRDFRGNTPLHLACEQGCLASVGVLTQSCTTPHLHSILKATNYNGHTCLHLASIHGYLGIVELLVSLGADVNAQEPCNGRTALHLAVDLQNPDLVSLLLKCGADVNRVTYQGYSPYQLTWGRPSTRIQQQLGQLTLENLQMLPESEDEESYDTESEFTEFTEDELPYDDCVFGGQRLTL

SEQ ID NO: 368 - protein, 239 aa, Homo sapiens
MAKPCGVRLSGEARKQVEVFRQNLFQEAEEFLYRFLPQKIIYLNQLLQEDSLNVADLTSLRAPLDIPIPDPPPKDDEMETDKQEKKEVHKCGFLPGNEKVLSLLALVKPEVWTLKEKCILVITWIQHLIPKIEDGNDFGVAIQEKVLERVNAVKTKVEAFQTTISKYFSERGDAVAKASKETHVMDYRALVHERDEAAYGELRAMVLDLRAFYAELYHIISSNLEKIVNPKGEEKPSMY

SEQ ID NO: 369 - protein, 323 aa, Homo sapiens
MPVHSRGDKKETNHHDEMEVDYAENEGSSSEDEDTESSSVSEDGDSSEMDDEDCERRRMECLDEMSNLEKQFTDLKDQLYKERLSQVDAKLQEVIAGKAPEYLEPLATLQENMQIRTKVAGIYRELCLESVKNKYECEIQASRQHCESEKLLLYDTVQSELEEKIRRLEEDRHSIDITSELWNDELQSRKKRKDPFSPDKKKPVVVSGPYIVYMLQDLDILEDWTTIRKAMATLGPHRVKTEPPVKLEKHLHSARSEEGRLYYDGEWYIRGQTICIDKKDECPTSAVITTINHDEVWFKRPDGSKSKLYISQLQKGKYSIKHS

SEQ ID NO: 370 - protein, 717 aa, Homo sapiens
MAVAVRTLQEQLEKAKESLKNVDENIRKLTGRDPNDVRPIQARLLALSGPGGGRGRGSLLLRRGFSDSGGGPPAKQRDLEGAVSRLGGERRTRRESRQESDPEDDDVKKPALQSSVVATSKERTRRDLIQDQNMDEKGKQRNRRIFGLLMGTLQKFKQESTVATERQKRRQEIEQKLEVQAEEERKQVENERRELFEERRAKQTELRLLEQKVELAQLQEEWNEHNAKIIKYIRTKTKPHLFYIPGRMCPATQKLIEESQRKMNALFEGRRIEFAEQINKMEARPRRQSMKEKEHQVVRNEEQKAEQEEGKVAQREEELEETGNQHNDVEIEEAGEEEEKEIAIVHSDAEKEQEEEEQKQEMEVKMEEETEVRESEKQQDSQPEEVMDVLEMVENVKHVIADQEVMETNRVESVEPSENEASKELEPEMEFEIEPDKECKTLSPGKENVSALDMEKESEEKEEKESEPQPEPVAQPQPQSQPQLQLQSQSQPVLQSQPPSQPEDLSLAVLQPTPQVTQEQGHLLPERKDFPVESVKLTEVPVEPVLTVHPESKSKTKTRSRSRGRARNKTSKSRSRSSSSSSSSSSSTSSSSGSSSSSGSSSSRSSSSSSSSTSGSSSRDSSSSTSSSSESRSRSRGRGHNRDRKHRRSVDRKRRDTSGLERSHKSSKGGSSRDTKGSKDKNSRSDRKRSISESSRSGKRSSRSERDRKSDRKDKRR

SEQ ID NO: 371 - protein, 567 aa, Homo sapiens
MHGRLKVKTSEEQAEAKRLEREQKLKLYQSATQAVFQKRQAGELDESVLELTSQILGANPDFATLWNCRREVLQQLETQKSPEELAALVKAELGFLESCLRVNPKSYGTWHHRCWLLGRLPEPNWTRELELCARFLEVDERNFHCWDYRRFVATQAAVPPAEELAFTDSLITRNFSNYSSWHYRSCLLPQLHPQPDSGPQGRLPEDVLLKELELVQNAFFTDPNDQSAWFYHRWLLGRADPQDALRCLHVSRDEACLTVSFSRPLLVGSRMEILLLMVDDSPLIVEWRTPDGRNRPSHVWLCDLPAASLNDQLPQHTFRVIWTAGDVQKECVLLKGRQEGWCRDSTTDEQLFRCELSVEKSTVLQSELESCKELQELEPENKWCLLTIILLMRALDPLLYEKETLQYFQTLKAVDPMRATYLDDLRSKFLLENSVLKMEYAEVRVLHLAHKDLTVLCHLEQLLLVTHLDLSHNRLRTLPPALAALRCLEVLQASDNAIESLDGVTNLPRLQELLLCNNRLQQPAVLQPLASCPRLVLLNLQGNPLCQAVGILEQLAELLPSVSSVLT

SEQ ID NO: 372 - protein, 793 aa, Homo sapiens
MDSWFILVLLGSGLICVSANNATTVAPSVGITRLINSSTAEPVKEEAKTSNPTSSLTSLSVAPTFSPNITLGPTYLTTVNSSDSDNGTTRTASTNSIGITISPNGTWLPDNQFTDARTEPWEGNSSTAATTPETFPPSDETPIIAVMVALSSLLVIVFIIIVLYMLRFKKYKQAGSHSNSFRLSNGRTEDVEPQSVPLLARSPSTNRKYPPLPVDKLEEEINRRMADDNKLFREEFNALPACPIQATCEAASKEENKEKNRYVNILPYDHSRVHLTPVEGVPDSDYINASFINGYQEKNKFIAAQGPKEETVNDFWRMIWEQNTATIVMVTNLKERKECKCAQYWPDQGCWTYGNIRVSVEDVTVLVDYTVRKFCIQQVGDMTNRKPQRLITQFHFTSWPDFGVPFTPIGMLKFLKKVKACNPQYAGAIVVHCSAGVGRTGTFVVIDAMLDMMHTERKVDVYGFVSRIRAQRCQMVQTDMQYVFIYQALLEHYLYGDTELEVTSLETHLQKIYNKIPGTSNNGLEEEFKKLTSIKIQNDKMRTGNLPANMKKNRVLQIIPYEFNRVIIPVKRGEENTDYVNASFIDGYRQKDSYIASQGPLLHTIEDFWRMIWEWKSCSIVMLTELEERGQEKCAQYWPSDGLVSYGDITVELKKEEECESYTVRDLLVTNTRENKSRQIRQFHFHGWPEVGIPSDGKGMISIIAAVQKQQQQSGNHPITVHCSAGAGRTGTFCALSTVLERVKAEGILDVFQTVKSLRLQRPHMVQTLEQYEFCYKVVQEYIDAFSDYANFK

SEQ ID NO: 373 - protein, 370 aa, Homo sapiens
MAAERQEALREFVAVTGAEEDRARFFLESAGWDLQIALASFYEDGGDEDIVTISQATPSSVSRGTAPSDNRVTSFRDLIHDQDEDEEEEEGQRFYAGGSERSGQQIVGPPRKKSPNELVDDLFKGAKEHGAVAVERVTKSPGETSKPRPFAGGGYRLGAAPEEESAYVAGEKRQHSSQDVHVVLKLWKSGFSLDNGELRSYQDPSNAQFLESIRRGEVPAELRRLAHGGQVNLDMEDHRDEDFVKPKGAFKAFTGEGQKLGSTAPQVLSTSSPAQQAENEAKASSSILIDESEPTTNIQIRLADGGRLVQKFNHSHRISDIRLFIVDARPAMAATSFILMTTFPNKELADESQTLKEANLLNAVIVQRLT

SEQ ID NO: 374 - protein, 403 aa, Homo sapiens
MDRSKENCISGPVKATAPVGGPKRVLVTQQFPCQNPLPVNSGQAQRVLCPSNSSQRIPLQAQKLVSSHKPVQNQKQKQLQATSVPHPVSRPLNNTQKSKQPLPSAPENNPEEELASKQKNEESKKRQWALEDFEIGRPLGKGKFGNVYLAREKQSKFILALKVLFKAQLEKAGVEHQLRREVEIQSHLRHPNILRLYGYFHDATRVYLILEYAPLGTVYRELQKLSKFDEQRTATYITELANALSYCHSKRVIHRDIKPENLLLGSAGELKIADFGWSVHAPSSRRTTLCGTLDYLPPEMIEGRMHDEKVDLWSLGVLCYEFLVGKPPFEANTYQETYKRISRVEFTFPDFVTEGARDLISRLLKHNPSQRPMLREVLEHPWITANSSKPSNCQNKESASKQS

SEQ ID NO: 375 - protein, 681 aa, Homo sapiens
MNASSEGESFAGSVQIPGGTTVLVELTPDIHICGICKQQFNNLDAFVAHKQSGCQLTGTSAAAPSTVQFVSEETVPATQTQTTTRTITSETQTITVSAPEFVFEHGYQTYLPTESNENQTATVISLPAKSRTKKPTTPPAQKRLNCCYPGCQFKTAYGMKDMERHLKIHTGDKPHKCEVCGKCFSRKDKLKTHMRCHTGVKPYKCKTCDYAAADSSSLNKHLRIHSDERPFKCQICPYASRNSSQLTVHLRSHTGDAPFQCWLCSAKFKISSDLKRHMRVHSGEKPFKCEFCNVRCTMKGNLKSHIRIKHSGNNFKCPHCDFLGDSKATLRKHSRVHQSEHPEKCSECSYSCSSKAALRIHERIHCTDRPFKCNYCSFDTKQPSNLSKHMKKFHGDMVKTEALERKDTGRQSSRQVAKLDAKKSFHCDICDASFMREDSLRSHKRQHSEYSESKNSDVTVLQFQIDPSKQPATPLTVGHLQVPLQPSQVPQFSEGRVKIIVGHQVPQANTIVQAAAAAVNIVPPALVAQNPEELPGNSRLQILRQVSLIAPPQSSRCPSEAGAMTQPAVLLTTHEQTDGATLHQTLIPTASGGPQEGSGNQTFITSSGITCTDFEGLNALIQEGTAEVTVVSDGGQNIAVATTAPPVFSSSSQQELPKQTYSIIQGAAHPALLCPADSIPD

SEQ ID NO: 376 - protein, 276 aa, Homo sapiens
MPVPASWPHPPGPFLLLTLLLGLTEVAGEEELQMIQPEKLLLVTVGKTATLHCTVTSLLPVGPVLWFRGVGPGRELIYNQKEGHFPRVTTVSDLTKRNNMDFSIRISSITPADVGTYYCVKFRKGSPENVEFKSGPGTEMALGAKPSAPVVLGPAARTTPEHTVSFTCESHGFSPRDITLKWFKNGNELSDFQTNVDPTGQSVAYSIRSTARVVLDPWDVRSQVICEVAHVTLQGDPLRGTANLSEAIRGPASSLTALLLIAVLLGPIYVPWKQKT

SEQ ID NO: 377 - protein, 843 aa, Homo sapiens
MAKPLTDSEKRKQISVRGLAGLGDVAEVRKSFNRHLHFTLVKDRNVATPRDYFFALAHTVRDHLVGRWIRTQQHYYERDPKRIYYLSLEFYMGRTLQNTMVNLGLQNACDEAIYQLGLDLEELEEIEEDAGLGNGGLGRLAACFLDSMATLGLAAYGYGIRYEFGIFNQKIVNGWQVEEADDWLRYGNPWEKARPEYMLPVHFYGRVEHTPDGVKWLDTQVVLAMPYDTPVPGYKNNTVNTMRLWSAKAPNDFKLQDFNVGDYIEAVLDRNLAENISRVLYPNDNFFEGKELRLKQEYFVVAATLQDIIRRFKSSKFGCRDPVRTCFETFPDKVAIQLNDTHPALSIPELMRILVDVEKVDWDKAWEITKKTCAYTNHTVLPEALERWPVSMFEKLLPRHLEIIYAINQRHLDHVAALFPGDVDRLRRMSVIEEGDCKRINMAHLCVIGSHAVNGVARIHSEIVKQSVFKDFYELEPEKFQNKTNGITPRRWLLLCNPGLADTIVEKIGEEFLTDLSQLKKLLPLVSDEVFIRDVAKVKQENKLKFSAFLEKEYKVKINPSSMFDVHVKRIHEYKRQLLNCLHVVTLYNRIKRDPAKAFVPRTVMIGGKAAPGYHMAKLIIKLVTSIGDVVNHDPVVGDRLKVIFLENYRVSLAEKVIPAADLSQQISTAGTEASGTGNMKFMLNGALTIGTMDGANVEMAEEAGAENLFIFGLRVEDVEALDRKGYNAREYYDHLPELKQAVDQISSGFFSPKEPDCFKDIVNMLMHHDRFKVFADYEAYMQCQAQVDQLYRNPKEWTKKVIRNIACSGKFSSDRTITEYAREIWGVEPSDLQIPPPNIPRD

SEQ ID NO: 378 - protein, 238 aa, Homo sapiens
MLTTLLPILLLSGWAFCSQDASDGLQRLHMLQISYFRDPYHVWYQGNASLGGHLTHVLEGPDTNTTIIQLQPLQEPESWARTQSGLQSYLLQFHGLVRLVHQERTLAFPLTIRCFLGCELPPEGSRAHVFFEVAVNGSSFVSFRPERALWQADTQVTSGVVTFTLQQLNAYNRTRYELREFLEDTCVQYVQKHISAENTKGSQTSRSYTSLVLGVLVGSFIIAGVAVGIFLCTGGRRC

SEQ ID NO: 379 - protein, 253 aa, Homo sapiens
MPLLPSTVGLAGLLFWAGQAVNALIMPNATPAPAQPESTAMRLLSGLEVPRYRRKRHISVRDMNALLDYHNHIRASVYPPAANMEYMVWDKRLARAAEAWATQCIWAHGPSQLMRYVGQNLSIHSGQYRSVVDLMKSWSEEKWHYLFPAPRDCNPHCPWRCDGPTCSHYTQMVWASSNRLGCAIHTCSSISVWGNTWHRAAYLVCNYAIKGNWIGESPYKMGKPCSSCPPSYQGSCNSNMCFKGLKSNKFTWF

SEQ ID NO: 380 - protein, 431 aa, Homo sapiens
MYRTKVGLKDRQQLYKLIISQLLYDGYISIANGLINEIKPQSVCAPSEQLLHLIKLGMENDDTAVQYAIGRSDTVAPGTGIDLEFDADVQTMSPEASEYETCYVTSHKGPCRVATYSRDGQLIATGSADASIKILDTERMLAKSAMPIEVMMNETAQQNMENHPVIRTLYDHVDEVTCLAFHPTEQILASGSRDYTLKLFDYSKPSAKRAFKYIQEAEMLRSISFHPSGDFILVGTQHPTLRLYDINTFQCFVSCNPQDQHTDAICSVNYNSSANMYVTGSKDGCIKLWDGVSNRCITTFEKAHDGAEVCSAIFSKNSKYILSSGKDSVAKLWEISTGRTLVRYTGAGLSGRQVHRTQAVFNHTEDYVLLPDERTISLCCWDSRTAERRNLLSLGHNNIVRCIVHSPTNPGFMTCSDDFRARFWYRRSTTD

SEQ ID NO: 381 - protein, 303 aa, Homo sapiens
MARRGPGWRPLLLLVLLAGAAQGGLYFRRGQTCYRPLRGDGLAPLGRSTYPRPHEYLSPADLPKSWDWRNVDGVNYASITRNQHIPQYCGSCWAHASTSAMADRINIKRKGAWPSTLLSVQNVIDCGNAGSCEGGNDLSVWDYAHQHGIPDETCNNYQAKDQECDKFNQCGTCNEFKECHAIRNYTLWRVGDYGSLSGREKMMAEIYANGPISCGIMATERLANYTGGIYAEYQDTTYINHVVSVAGWGISDGTEYWIVRNSWGEPWGERGWLRIVTSTYKDGKGARYNLAIEEHCTFGDPIV

SEQ ID NO: 382 - protein, 722 aa, Homo sapiens
MPLHQLGDKPLTFPSPNSAMENGLDHTPPSRRASPGTPLSPGSLRSAAHSPLDTSKQPLCQLWAEKHGARGTHEVRYVSAGQSVACGWWAFAPPCLQVLNTPKGILFFLCAAAFLQGMTVNGFINTVITSLERRYDLHSYQSGLIASSYDIAACLCLTFVSYFGGSGHKPRWLGWGVLLMGTGSLVFALPHFTAGRYEVELDAGVRTCPANPGAVCADSTSGLSRYQLVFMLGQFLHGVGATPLYTLGVTYLDENVKSSCSPVYIAIFYTAAILGPAAGYLIGGALLNIYTEMGRRTELTTESPLWVGAWWVGFLGSGAAAFFTAVPILGYPRQLPGSQRYAVMRAAEMHQLKDSSRGEASNPDFGKTIRDLPLSIWLLLKNPTFILLCLAGATEATLITGMSTFSPKFLESQFSLSASEAATLFGYLVVPAGGGGTFLGGFFVNKLRLRGSAVIKFCLFCTVVSLLGILVFSLHCPSVPMAGVTASYGGSLLPEGHLNLTAPCNAACSCQPEHYSPVCGSDGLMYFSLCHAGCPAATETNVDGQKVYRDCSCIPQNLSSGFGHATAGKCTSTCQRKPLLLVFIFVVIFFTFLSSIPALTATLRCVRDPQRSFALGIQWIVVRILGGIPGPIAFGWVIDKACLLWQDQCGQQGSCLVYQNSAMSRYILIMGLLYKVLGVLFFAIACFLYKPLSESSDGLETCLPSQSSAPDSATDSQLQSSV

SEQ ID NO: 383 - protein, 391 aa, Homo sapiens
MSGPVPSRARVYTDVNTHRPREYWDYESHVVEWGNQDDYQLVRKLGRGKYSEVFEAINITNNEKVVVKILKPVKKKKIKREIKILENLRGGPNIITLADIVKDPVSRTPALVFEHVNNTDFKQLYQTLTDYDIRFYMYEILKALDYCHSMGIMHRDVKPHNVMIDHEHRKLRLIDWGLAEFYHPGQEYNVRVASRYFKGPELLVDYQMYDYSLDMWSLGCMLASMIFRKEPFFHGHDNYDQLVRIAKVLGTEDLYDYIDKYNIELDPRFNDILGRHSRKRWERFVHSENQHLVSPEALDFLDKLLRYDHQSRLTAREAMEHPYFYTVVKDQARMGSSSMPGGSTPVSSANMMSGISSVPTPSPLGPLAGSPVIAAANPLGMPVPAAAGAQQ

SEQ ID NO: 384 - protein, 425 aa, Homo sapiens
MYPSNKKKKVWREEKERLLKMTLEERRKEYLRDYIPLNSILSWKEEMKGKGQNDEENTQETSQVKKSLTEKVSLYRGDITLLEVDAIVNAANASLLGGGGVDGCIHRAAGPCLLAECRNLNGCDTGHAKITCGYDLPAKYVIHTVGPIARGHINGSHKEDLANCYKSSLKLVKENNIRSVAFPCISTGIYGFPNEPAAVIALNTIKEWLAKNHHEVDRIIFCVFLEVDFKIYKKKMNEFFSVDDNNEEEEDVEMKEDSDENGPEEKQSVEEMEEQSQDADGVNTVTVPGPASEEAVEDCKDEDFAKDENITKGGEVTDHSVRDQDHPDGQENDSTKNEIKIETESQSSYMETEELSSNQEDAVIVEQPEVIPLTEDQEEKEGEKAPGEDTPRMPGKSEGSSDLENTPGPDAGAQDEAKEQRNGTK

SEQ ID NO: 385 - protein, 234 aa, Homo sapiens
MRAPLCLLLLVAHAVDMLALNRRKKQVGTGLGGNCTGCIICSEENGCSTCQQRLFLFIRREGIRQYGKCLHDCPPGYFGIRGQEVNRCKKCGATCESCFSQDFCIRCKRQFYLYKGKCLPTCPPGTLAHQNTRECQGECELGPWGGWSPCTHNGKTCGSAWGLESRVREAGRAGHEEAATCQVLSESRKCPIQRPCPGERSPGQKKGRKDRRPRKDRKLDRRLDVRPRQPGLQP

SEQ ID NO: 386 - protein, 254 aa, Homo sapiens [sequence omitted]

SEQ ID NO: 387 - protein, 118 aa, Homo sapiens
MSSKRAKAKTTKKRPQRATSNVFAMFDQSQIQEFKEAFNMIDQNRDGFIDKEDLHDMLASLGFIHEDHLRELLTTMGDRFTDEEVDEMYREAPIDKKGNFNYVEFTRILKHGAKDKDD

SEQ ID NO: 388 - protein, 587 aa, Homo sapiens
MHPLQCVLQVQRSLGWGPLASVSWLSLRMCRAHSSLSSTMCPSPERQEDGARKDFSSRLAAGPTFQHFLKSASAPQEKLSSEVEDPPPYLMMDELLGRQRKVYLETYGCQMNVNDTEIAWSILQKSGYLRTSNLQEADVILLVTCSIREKAEQTIWNRLHQLKALKTRRPRSRVPLRIGILGCMAERLKEEILNREKMVDILAGPDAYRDLPRLLAVAESGQQAANVLLSLDETYADVMPVQTSASATSAFVSIMRGCDNMCSYCIVPFTRGRERSRPIASILEEVKKLSEQGLKEVTLLGQNVNSFRDNSEVQFNSAVPTNLSRGFTTNYKTKQGGLRFAHLLDQVSRVDPEMRIRFTSPHPKDFPDEVLQLIHERDNICKQIHLPAQSGSSRVLEAMRRGYSREAYVELVHHIRESIPGVSLSSDFIAGFCGETEEDHVQTVSLLREVQYNMGFLFAYSMRQKTRAYHRLKDDVPEEVKLRRLEELITIFREEATKANQTSVGCTQLVLVEGLSKRSATDLCGRNDGNLKVIFPDAEMEDVNNPGLRVRAQPGDYVLVKITSASSQTLRGHVLCRTTLRDSSAYC

SEQ ID NO: 389 - protein, 505 aa, Homo sapiens
MASGRRAPRTGLLELRAGAGSGAGGERWQRVLLSLAEDVLTVSPADGDPGPEPGAPREQEPAQLNGAAEPGAGPPQLPEALLLQRRRVTVRKADAGGLGISIKGGRENKMPILISKIFKGLAADQTEALFVGDAILSVNGEDLSSATHDEAVQVLKKTGKEVVLEVKYMKDVSPYFKNSTGGTSVGWDSPPASPLQRQPSSPGPTPRNFSEAKHMSLKMAYVSKRCTPNDPEPRYLEICSADGQDTLFLRAKDEASARSWATAIQAQVNTLTPRVKDELQALLAATSTAGSQDIKQIGWLTEQLPSGGTAPTLALLTEKELLLYLSLPETREALSRPARTAPLIATRLVHSGPSKGSVPYDAELSFALRTGTRHGVDTHLFSVESPQELAAWTRQLVDGCHRAAEGVQEVSTACTWNGRPCSLSVHIDKGFTLWAAEPGAARAVLLRQPFEKLQMSSDDGASLLFLDFGGAEGEIQLDLHSCPKTIVFIIHSFLSAKVTRLGLLA

SEQ ID NO: 390 - protein, 125 aa, Homo sapiens
MAGPSLACCLLGLLALTSACYIQNCPLGGKRAAPDLDVRKCLPCGPGGKGRCFGPNICCAEELGCFVGTAEALRCQEENYLPSPCQSGQKACGSGGRCAVLGLCCSPDGCHADPACDAEATFSQR

SEQ ID NO: 391 - protein, 224 aa, Homo sapiens
MSVFGKLFGAGGGKAGKGGPTPQEAIQRLRDTEEMLSKKQEFLEKKIEQELTAAKKHGTKNKRAALQALKRKKRYEKQLAQIDGTLSTIEFQREALENANTNTEVLKNMGYAAKAMKAAHDNMDIDKVDELMQDIADQQELAEEISTAISKPVGFGEEFDEDELMAELEELEQEELDKNLLEISGPETVPLPNVPSIALPSKPAKKKEEEDDDMKELENWAGSM

SEQ ID NO: 392 - protein, 481 aa, Homo sapiens
MGALARALPSILLALLLTSTPEALGANPGLVARITDKGLQYAAQEGLLALQSELLRITLPDFTGDLRIPHVGRGRYEFHSLNIHSCELLHSALRPVPGQGLSLSISDSSIRVQGRWKVRKSFFKLQGSFDVSVKGISISVNLLLGSESSGRPTVTASSCSSDIADVEVDMSGDLGWLLNLFHNQIESKFQKVLESRICEMIQKSVSSDLQPYLQTLPVTTEIDSFADIDYSLVEAPRATAQMLEVMFKGEIFHRNHRSPVTLLAAVMSLPEEHNKMVYFAISDYVFNTASLVYHEEGYLNFSITDDMIPPDSNIRLTTKSFRPFVPRLARLYPNMNLELQGSVPSAPLLNFSPGNLSVDPYMEIDAFVLLPSSSKEPVFRLSVATNVSATLTFNTSKITGFLKPGKVKVELKESKVGLFNAELLEALLNYYILNTFYPKFNDKLAEGFPLPLLKRVQLYDLGLQIHKDFLFLGANVQYMRV

SEQ ID NO: 393 - protein, 141 aa, Homo sapiens
MARPLCTLLLLMATLAGALASSSKEENRIIPGGIYDADLNDEWVQRALHFAISEYNKATEDEYYRRPLQVLRAREQTFGGVNYFFDVEVGRTICTKSQPNLDTCAFHEQPELQKKQLCSFEIYEVPWEDRMSLVNSRCQEA

SEQ ID NO: 394 - protein, 102 aa, Homo sapiens
MPACRLGPLAAALLLSLLLFGFTLVSGTGAEKTGVCPELQADQNCTQECVSDSECADNLKCCSAGCATFCSLPNALFHWHLKTRRLWEISGPRPRRPTWDSS

SEQ ID NO: 395 - protein, 432 aa, Homo sapiens
MSDKLPYKVADIGLAAWGRKALDIAENEMPGLMRMRERYSASKPLKGARIAGCLHMTVETAVLIETLVTLGAEVQWSSCNIFSTQDHAAAAIAKAGIPVYAWKGETDEEYLWCIEQTLYFKDGPLNMILDDGGDLTNLIHTKYPQLLPGIRGISEETTTGVHNLYKMMANGILKVPAINVNDSVTKSKFDNLYGCRESLIDGIKRATDVMIAGKVAVVAGYGDVGKGCAQALRGFGARVIITEIDPINALQAAMEGYEVTTMDEACQEGNIFVTTTGCIDIILGRHFEQMKDDAIVCNIGHFDVEIDVKWLNENAVEKVNIKPQVDRYRLKNGRRIILLAEGRLVNLGCAMGHPSFVMSNSFTNQVMAQIELWTHPDKYPVGVHFLPKKLDEAVAEAHLGKLNVKLTKLTEKQAQYLGMSCDGPFKPDHYRY

SEQ ID NO: 396 - protein, 89 aa, Homo sapiens
MQLQASLSFLLILTLCLELRSELARDTIKDLLPNVCAFPMEKGPCQTYMTRWFFNFETGECELFAYGGCGGNSNNFLRKEKCEKFCKFT

SEQ ID NO: 397 - protein, 435 aa, Homo sapiens
MAAPLVLVLVVAVTVRAALFRSSLAEFISERVEVVSPLSSWKRVVEGLSLLDLGVSPYSGAVFHETPLIIYLFHFLIDYAELVFMITDALTAIALYFAIQDFNKVVFKKQKLLLELDQYAPDVAELIRTPMEMRYIPLKVALFYLLNPYTILSCVAKSTCAINNTLIAFFILTTIKGSAFLSAIFLALATYQSLYPLTLFVPGLLYLLQRQYIPVKMKSKAFWIFSWEYAMMYVGSLVVIICLSFFLLSSWDFIPAVYGFILSVPDLTPNIGLFWYFFAEMFEHFSLFFVCVFQINVFFYTIPLAIKLKEHPIFFMFIQIAVIAIFKSYPTVGDVALYMAFFPVWNHLYRFLRNIFVLTCIIIVCSLLFPVLWHLWIYAGSANSNFFYAITLTFNVGQILLISDYFYAFLRREYYLTHGLYLTAKDGTEAMLVLK

SEQ ID NO: 398 - protein, 319 aa, Homo sapiens
MSSPQAPEDGQGCGDRGDPPGDLRSVLVTTVLNLEPLDEDLFRGRHYWVPAKRLFGGQIVGQALVAAAKSVSEDVHVHSLHCYFVRAGDPKLPVLYQVERTRTGSSFSVRSVKAVQHGKPIFICQASFQQAQPSPMQHQFSMPTVPPPEELLDCETLIDQYLRDPNLQKRYPLALNRIAAQEVPIEIKPVNPSPLSQLQRMEPKQMFWVRARGYIGEGDMKMHCCVAAYISDYAFLGTALLPHQWQHKVHFMVSLDHSMWFHAPFRADHWMLYECESPWAGGSRGLVHGRLWRQDGVLAVTCAQEGVIRVKPQVSESKL

SEQ ID NO: 399 - protein, 416 aa, Homo sapiens
MSEADGLRQRRPLRPQVVTDDDGQAPEAKDGSSFSGRVFRVTFLMLAVSLTVPLLGAMMLLESPIDPQPLSFKEPPLLLGVLHPNTKLRQAERLFENQLVGPESIAHIGDVMFTGTADGRVVKLENGEIETIARFGSGPCKTRDDEPVCGRPLGIRAGPNGTLFVADAYKGLFEVNPWKREVKLLLSSETPIEGKNMSFVNDLTVTQDGRKIYFTDSSSKWQRRDYLLLVMEGTDDGRLLEYDTVTREVKVLLDQLRFPNGVQLSPAEDFVLVAETTMARIRRVYVSGLMKGGADLFVENMPGFPDNIRPSSSGGYWVGMSTIRPNPGFSMLDFLSERPWIKRMIFKLFSQETVMKFVPRYSLVLELSDSGAFRRSLHDPDGLVATYISEVHEHDGHLYLGSFRSPFLCRLSLQAV

SEQ ID NO: 400 - protein, 289 aa, Homo sapiens
MVGVKPVGSDPDFQPELSGAGSRLAVVKFTMRGCGPCLRIAPAFSSMSNKYPQAVFLEVDVHQCQGTAATNNISATPTFLFFRNKVRIDQYQGADAVGLEEKIKQHLENDPGSNEDTDIPKGYMDLMPFINKAGCECLNESDEHGFDNCLRKDTTFLESDCDEQLLITVAFNQPVKLYSMKFQGPDNGQGPKYVKIFINLPRSMDFEEAERSEPTQALELTEDDIKEDGIVPLRYVKFQNVNSVTIFVQSNQGEEETTRISYFTFIGTPVQATNMNDFKRVVGKKGESH

SEQ ID NO: 401 - protein, 171 aa, Homo sapiens
MSSKRTKTKTKKRPQRATSNVFAMFDQSQIQEFKEAFNMIDQNRDGFIDKEDLHDMLASLGKNPTDEYLDAMMNEAPGPINFTMFLTMFGEKLNGTDPEDVIRNAFACFDEEATGTIQEDYLRELLTTMGDRFTDEEVDELYREAPIDKKGNFNYIEFTRILKHGAKDKDD

SEQ ID NO: 402 - protein, 264 aa, Homo sapiens
MESGKTASPKSMPKDAQMMAQILKDMGITEYEPRVINQMLEFAFRYVTTILDDAKIYSSHAKKATVDADDVRLAIQCRADQSFTSPPPRDFLLDIARQRNQTPLPLIKPYSGPRLPPDRYCLTAPNYRLKSLQKKASTSAGRITVPRLSVGSVTSRPSTPTLGTPTPQTMSVSTKVGTPMSLTGQRFTVQMPTSQSPAVKASIPATSAVQNVLINPSLIGSKNILITTNMMSSQNTANESSNALKRKREDDDDDDDDDDDYDNL

SEQ ID NO: 403 - protein, 393 aa, Homo sapiens
MALKVATVAGSAAKAVLGPALLCRPWEVLGAHEVPSRNIFSEQTIPPSAKYGGRHTVTMIPGDGIGPELMLHVKSVFRHACVPVDFEEVHVSSNADEEDIRNAIMAIRRNRVALKGNIETNHNLPPSHKSRNNILRTSLDLYANVIHCKSLPGVVTRHKDIDILIVRENTEGEYSSLEHESVAGVVESLKIITKAKSLRIAEYAFKLAQESGRKKVTAVHKANIMKLGDGLFLQCCREVAARYPQITFENMIVDNTTMQLVSRPQQFDVMVMPNLYGNIVNNVCAGLVGGPGLVAGANYGHVYAVFETATRNTGKSIANKNIANPTATLLASCMMLDHLKLHSYATSIRKAVLASMDNENMHTPDIGGQGTTSEAIQDVIRHIRVINGRAVEA

SEQ ID NO: 404 - protein, 341 aa, Homo sapiens
MATWRRDGRLTGGQRLLCAGLAGTLSLSLTAPLELATVLAQVGVVRGHARGPWATGHRVWRAEGLRALWKGNAVACLRLFPCSAVQLAAYRKFVVLFTDDLGHISQWSSIMAGSLAGMVSTIVTYPTDLIKTRLIMQNILEPSYRGLLHAFSTIYQQEGFLALYRGVSLTVVGALPFSAGSLLVYMNLEKIWNGPRDQFSLPQNFANVCLAAAVTQTLSFPFETVKRKMQAQSPYLPHSGGVDVHFSGAVDCFRQIVKAQGVLGLWNGLTANLLKIVPYFGIMFSTFEFCKRICLYQNGYILSPLSYKLTPGVDQSLQPQELRELKKFFKTRKPKPKKPTL

SEQ ID NO: 405 - protein, 2828 aa, Homo sapiens
MPKRAHWGALSVVLILLWGHPRVALACPHPCACYVPSEVHCTFRSLASVPAGIAKHVERINLGFNSIQALSETSFAGLTKLELLMIHGNEIPSIPDGALRDLSSLQVFKFSYNKLRVITGQTLQGLSNLMRLHIDHNKIEFIHPQAFNGLTSLRLLHLEGNLLHQLHPSTFSTFTFLDYFRLSTIRHLYLAENMVRTLPASMLRNMPLLENLYLQGNPWTCDCEMRWFLEWDAKSRGILKCKKDKAYEGGQLCAMCFSPKKLYKHEIHKLKDMTCLKPSIESPLRQNRSRSIEEEQEQEEDGGSQLILEKFQLPQWSISLNMTDEHGNMVNLVCDIKKPMDVYKIHLNQTDPPDIDINATVALDFECPMTRENYEKLWKLIAYYSEVPVKLHRELMLSKDPRVSYQYRQDADEEALYYTGVRAQILAEPEWVMQPSIDIQLNRRQSTAKKVLLSYYTQYSQTISTKDTRQARGRSWVMIEPSGAVQRDQTVLEGGPCQLSCNVKASESPSIFWVLPDGSILKAPMDDPDSKFSILSSGWLRIKSMEPSDSGLYQCIAQVRDEMDRMVYRVLVQSPSTQPAEKDTVTIGKNPGESVTLPCNALAIPEAHLSWILPNRRIINDLANTSHVYMLPNGTLSIPKVQVSDSGYYRCVAVNQQGADHFTVGITVTKKGSGLPSKRGRRPGAKALSRVREDIVEDEGGSGMGDEENTSRRLLHPKDQEVFLKTKDDAINGDKKAKKGRRKLKLWKHSEKEPETNVAEGRRVFESRRRINMANKQINPERWADILAKVRGKNLPKGTEVPPLIKTTSPPSLSLEVTPPFPAISPPSASPVQTVTSAEESSADVPLLGEEEHVLGTISSASMGLEHNHNGVILVEPEVTSTPLEEVVDDLSEKTEEITSTEGDLKGTAAPTLISEPYEPSPTLHTLDTVYEKPTHEETATEGWSAADVGSSPEPTSSEYEPPLDAVSLAESEPMQYFDPDLETKSQPDEDKMKEDTFAHLTPTPTIWVNDSSTSQLFEDSTIGEPGVPGQSHLQGLTDNIHLVKSSLSTQDTLLIKKGMKEMSQTLQGGNMLEGDPTHSRSSESEGQESKSITLPDSTLGIMSSMSPVKKPAETTVGTLLDKDTTTATTTPRQKVAPSSTMSTHPSRRRPNGRRRLRPNKFRHRHKQTPPTTFAPSETFSTQPTQAPDIKISSQVESSLVPTAWVDNTVNTPKQLEMEKNAEPTSKGTPRRKHGKRPNKHRYTPSTVSSRASGSKPSPSPENKHRNIVTPSSETILLPRTVSLKTEGPYDSLDYMTTTRKIYSSYPKVQETLPVTYKPTSDGKEIKDDVATNVDKHKSDILVTGESITNAIPTSRSLVSTMGEFKEESSPVGFPGTPTWNPSRTAQPGRLQTGIPVTTSGENLTDPPLLKELEDVDFTSEFLSSLTVSTPFHQEEAGSSTTLSSIKVEVASSQAETTTLDQDHLETTVAILLSETRPQNHTPTAARMKEPASSSPSTILMSLGQTTTTKPALPSPRISQASRDSKENVFLNYVGNPETEATPVNNEGTQHMSGPNELSTPSSDQDAFNLSTKLELEKQVFGSRSLPRGPDSQRQDGRVHASHQLTRVPAKPILPTATVRLPEMSTQSASRYFVTSQSPRHWTNKPEITTYPSGALPENKQFTTPRLSSTTIPLPLHMSKPSIPSKFTDRRTDQFNGYSKVFGNNNIPEARNPVGKPPSPRIPHYSNGRLPFFTNKTLSFPQLGVTRRPQIPTSPAPVMRERKVIPGSYNRIHSHSTFHLDFGPPAPPLLHTPQTTGSPSTNLQNIPMVSSTQSSISFITSSVQSSGSFHQSSSKFFAGGPPASKFWSLGEKPQILTKSPQTVSVTAETDTVFPCEATGKPKPFVTWTKVSTGALMTPNTRIQRFEVLKNGTLVIRKVQVQDRGQYMCTASNLHGLDRMVVLLSVTVQQPQILASHYQDVTVYLGDTIAMECLAKGTPAPQISWIFPDRRVWQTVSPVEGRITLHENRTLSIKEASFSDRGVYKCVASNAAGADSLAIRLHVAALPPVIHQEKLENISLPPGLSIHIHCTAKAAPLPSVRWVLGDGTQIRPSQFLHGNLFVFPNGTLYIRNLAPKDSGRYECVAANLVGSARRTVQLNVQRAAANARITGTSPRRTDVRYGGTLKLDCSASGDPWPRILWRLPSKRMIDALFSFDSRIKVFANGTLVVKSVTDKDAGDYLCVARNKVGDDYVVLKVDVVMKPAKIEHKEENDHKVFYGGDLKVDCVATGLPNPEISWSLPDGSLVNSFMQSDDSGGRTKRYVVFNNGTLYFNEVGMREEGDYTCFAENQVGKDEMRVRVKVVTAPATIRNKTYLAVQVPYGDVVTVACEAKGEPMPKVTWLSPTNKVIPTSSEKYQIYQDGTLLIQKAQRSDSGNYTCLVRNSAGEDRKTVWIHVNVQPPKINGNPNPITTVREIAAGGSRKLIDCKAEGIPTPRVLWAFPEGVVLPAPYYGNRITVHGNGSLDIRSLRKSDSVQLVCMARNEGGEARLILQLTVLEPMEKPIFHDPISEKITAMAGHTISLNCSAAGTPTPSLVWVLPNGTDLQSGQQLQRFYHKADGMLHISGLSSVDAGAYRCVARNAAGHTERLVSLKVGLKPEANKQYHNLVSIINGETLKLPCTPPGAGQGRFSWTLPNGMHLEGPQTLGRVSLLDNGTLTVREASVFDRGTYVCRMETEYGPSVTSIPVIVIAYPPRITSEPTPVIYTRPGNTVKLNCMAMGIPKADITWELPDKSHLKAGVQARLYGNRFLHPQGSLTIQHATQRDAGFYKCMAKNILGSDSKTTYIHVF

SEQ ID NO: 406 - protein, 387 aa, Homo sapiens
MVFAFWKVFLILSCLAGQVSVVQVTIPDGFVNVTVGSNVTLICIYTTTVASREQLSIQWSFFHKKEMEPISIYFSQGGQAVAIGQFKDRITGSNDPGNASITISHMQPADSGIYICDVNNPPDFLGQNQGILNVSVLVKPSKPLCSVQGRPETGHTISLSCLSALGTPSPVYYWHKLEGRDIVPVKENFNPTTGILVIGNLTNFEQGYYQCTAINRLGNSSCEIDLTSSHPEVGIIVGALIGSLVGAAIIISVVCFARNKAKAKAKERNSKTIAELEPMTKINPRGESEAMPREDATQLEVTLPSSIHETGPDTIQEPDYEPKPTQEPAPEPAPGSEPMAVPDLDIELELEPETQSELEPEPEPEPESEPGVVVEPLSEDEKGVVKA

SEQ ID NO: 407 - protein, 226 aa, Homo sapiens
MEGCVSNLMVCNLAYSGKLEELKESILADKSLATRTDQDSRTALHWACSAGHTEIVEFLLQLGVPVNDKDDAGWSPLHIAASAGRDEIVKALLGKGAQVNAVNQNGCTPLHYAASKNRHEIAVMLLEGGANPDAKDHYEATAMHRAAAKGNLKMIHILLYYKASTNIQDTEGNTPLHLACDEERVEEAKLLVSQGASIYIENKEEKTPLQVAKGGLGLILKRMVEG

SEQ ID NO: 408 - protein, 578 aa, Homo sapiens
MKIPFLLLFFLWEAESHAASRPNIILVMADDLGIGDPGCYGNKTIRTPNIDRLASGGVKLTQHLAASPLCTPSRAAFMTGRYPVRSGMASWSRTGVFLFTASSGGLPTDEITFAKLLKDQGYSTALIGKWHLGMSCHSKTDFCHHPLHHGFNYFYGISLTNLRDCKPGEGSVFTTGFKRLVFLPLQIVGVTLLTLAALNCLGLLHVPLGVFFSLLFLAALILTLFLGFLHYFRPLNCFMMRNYEIIQQPMSYDNLTQRLTVEAAQFIQRNTETPFLLVLSYLHVHTALFSSKDFAGKSQHGVYGDAVEEMDWSVGQILNLLDELRLANDTLIYFTSDQGAHVEEVSSKGEIHGGSNGIYKGGKANNWEGGIRVPGILRWPRVIQAGQKIDEPTSNMDIFPTVAKLAGAPLPEDRIIDGRDLMPLLEGKSQRSDHEFLFHYCNAYLNAVRWHPQNSTSIWKAFFFTPNFNPVGSNGCFATHVCFCFGSYVTHHDPPLLFDISKDPRERNPLTPASEPRFYEILKVMQEAADRHTQTLPEVPDQFSWNNFLWKPWLQLCCPSTGLSCQCDREKQDKRLSR

SEQ ID NO: 409 - protein, 195 aa, Homo sapiens
MAAEDVVATGADPSDLESGGLLHEIFTSPLNLLLLGLCIFLLYKIVRGDQPAASGDSDDDEPPPLPRLKRRDFTPAELRRFDGVQDPRILMAINGKVFDVTKGRKFYGPEGPYGVFAGRDASRGLATFCLDKEALKDEYDDLSDLTAAQQETLSDWESQFTFKYHHVGKLLKEGEEPTVYSDEEEPKDESARKND

SEQ ID NO: 410 - protein, 1041 aa, Homo sapiens
MENMFLQSSMLTCIFLLISGSCELCAEENFSRSYPCDEKKQNDSVIAECSNRRLQEVPQTVGKYVTELDLSDNFITHITNESFQGLQNLTKINLNHNPNVQHQNGNPGIQSNGLNITDGAFLNLKNLRELLLEDNQLPQIPSGLPESLTELSLIQNNIYNITKEGISRLINLKNLYLAWNCYFNKVCEKTNIEDGVFETLTNLELLSLSFNSLSHVPPKLPSSLRKLFLSNTQIKYISEEDFKGLINLTLLDLSGNCPRCFNAPFPCVPCDGGASINIDRFAFQNLTQLRYLNLSSTSLRKINAAWFKNMPHLKVLDLEFNYLVGEIASGAFLTMLPRLEILDLSFNYIKGSYPQHINISRNFSKLLSLRALHLRGYVFQELREDDFQPLMQLPNLSTINLGINFIKQIDFKLFQNFSNLEIIYLSENRISPLVKDTRQSYANSSSFQRHIRKRRSTDFEFDPHSNFYHFTRPLIKPQCAAYGKALDLSLNSIFFIGPNQFENLPDIACLNLSANSNAQVLSGTEFSAIPHVKYLDLTNNRLDFDNASALTELSDLEVLDLSYNSHYFRIAGVTHHLEFIQNFTNLKVLNLSHNNIYTLTDKYNLESKSLVELVFSGNRLDILWNDDDNRYISIFKGLKNLTRLDLSLNRLKHIPNEAFLNLPASLTELHINDNMLKFFNWTLLQQFPRLELLDLRGNKLLFLTDSLSDFTSSLRTLLLSHNRISHLPSGFLSEVSSLKHLDLSSNLLKTINKSALETKTTTKLSMLELHGNPFECTCDIGDFRRWMDEHLNVKIPRLVDVICASPGDQRGKSIVSLELTTCVSDVTAVILFFFTFFITTMVMLAALAHHLFYWDVWFIYNVCLAKVKGYRSLSTSQTFYDAYISYDTKDASVTDWVINELRYHLEESRDKNVLLCLEERDWDPGLAIIDNLMQSINQSKKTVFVLTKKYAKSWNFKTAFYLALQRLMDENMDVIIFILLEPVLQHSQYLRLRQRICKSSILQWPDNPKAEGLFWQTLRNVVLTENDSRYNNMYVDSIKQY

SEQ ID NO: 411 - protein, 485 aa, Homo sapiens
MAAVWQQVLAVDARYNAYRTPTFPQFRTQYIRRRSQLLRENAKAGHPPALRRQYLRLRGQLLGQRYGPLSEPGSARAYSNSIVRSSRTTLDRMEDFEDDPRALGARGHRRSVSRGSYQLQAQMNRAVYEDRPPGSVVPTSAAEASRAMAGDTSLSENYAFAGMYHVFDQHVDEAVPRVRFANDDRHRLACCSLDGSISLCQLVPAPPTVLRVLRGHTRGVSDFAWSLSNDILVSTSLDATMRIWASEDGRCIREIPDPDSAELLCCTFQPVNNNLTVVGNAKHNVHVMNISTGKKVKGGSSKLTGRVLALSFDAPGRLLWAGDDRGSVFSFLFDMATGKLTKAKRLVVHEGSPVTSISARSWVSREARDPSLLINACLNKLLLYRVVDNEGTLQLKRSFPIEQSSHPVRSIFCPLMSFRQGACVVTGSEDMCVHFFDVERAAKAAVNKLQGHSAPVLDVSFNCDESLLASSDASGMVIVWRREQK

SEQ ID NO: 412 - protein, 452 aa, Homo sapiens [sequence omitted]

SEQ ID NO: 413 - protein, 1268 aa, Homo sapiens
MIAAPEIPTDFNLLQESETHFSSDTDFEDIEGKNQKQGKGKTCKKGKKGPAEKGKGGNGGGKPPSGPNRMNGHHQQNGVENMMLFEVVKMGKSAMQSVVDDWIESYKHDRDIALLDLINFFIQCSGCKGVVTAEMFRHMQNSEIIRKMTEEFDEDSGDYPLTMAGPQWKKFKSSFCEFIGVLVRQCQYSIIYDEYMMDTVISLLTGLSDSQVRAFRHTSTLAAMKLMTALVNVALNLSINMDNTQRQYEAERNKMIGKRANERLELLLQKRKELQENQDEIENMMNAIFKGVFVHRYRDAIAEIRAICIEEIGIWMKMYSDAFLNDSYLKYVGWTMHDKQGEVRLKCLTALQGLYYNKELNSKLELFTSRFKDRIVSMTLDKEYDVAVQAIKLLTLVLQSSEEVLTAEDCENVYHLVYSAHRPVAVAAGEFLYKKLFSRRDPEEDGMMKRRGRQGPNANLVKTLVFFFLESELHEHAAYLVDSMWDCATELLKDWECMNSLLLEEPLSGEEALTDRQESALIEIMLCTIRQAAECHPPVGRGTGKRVLTAKEKKTQLDDRTKITELFAVALPQLLAKYSVDAEKVTNLLQLPQYFDLEIYTTGRLEKHLDALLRQIRNIVEKHTDTDVLEACSKTYHALCNEEFTIFNRVDISRSQLIDELADKFNRLLEDFLQEGEEPDEDDAYQVLSTLKRITAFHNAHDLSKWDLFACNYKLLKTGIENGDMPEQIVIHALQCTHYVILWQLAKITESSSTKEDLLRLKKQMRVFCQICQHYLTNVNTTVKEQAFTILCDILMIFSHQIMSGGRDMLEPLVYTPDSSLQSELLSFILDHVFIEQDDDNNSADGQQEDEASKIEALHKRRNLLAAFCKLIVYTVVEMNTAADIFKQYMKYYNDYGDIIKETMSKTRQIDKIQCAKTLILSLQQLFNEMIQENGYNFDRSSSTFSGIKELARRFALTFGLDQLKTREAIAMLHKDGIEFAFKEPNPQGESHPPLNLAFLDILSEFSSKLLRQDKRTVYVYLEKFMTFQMSLRREDVWLPLMSYRNSLLAGGDDDTMSVISGISSRGSTVRSKKSKPSTGKRKVVEGMQLSLTEESSSSDSMWLSREQTLHTPVMMQTPQLTSTIMREPKRLRPEDSFMSVYPMQTEHHQTPLDYNTQVTWMLAQRQQEEARQQQERAAMSYVKLRTNLQHAIRRGTSLMEDDEEPIVEDVMMSSEGRIEDLNEGMDFDTMDIDLPPSKNRRERTELKPDFFDPASIMDESVLGVSMF

SEQ ID NO: 414 - protein, 461 aa, Homo sapiens
MQRVNMIMAESPGLITICLLGYLLSAECTVFLDHENANKILNRPKRYNSGKLEEFVQGNLERECMEEKCSFEEAREVFENTERTTEFWKQYVDGDQCESNPCLNGGSCKDDINSYECWCPFGFEGKNCELDVTCNIKNGRCEQFCKNSADNKVVCSCTEGYRLAENQKSCEPAVPFPCGRVSVSQTSKLTRAETVFPDVDYVNSTEAETILDNITQSTQSFNDFTRVVGGEDAKPGQFPWQVVLNGKVDAFCGGSIVNEKWIVTAAHCVETGVKITVVAGEHNIEETEHTEQKRNVIRIIPHHNYNAAINKYNHDIALLELDEPLVLNSYVTPICIADKEYTNIFLKFGSGYVSGWGRVFHKGRSALVLQYLRVPLVDRATCLRSTKFTIYNNMFCAGFHEGGRDSCQGDSGGPHVTEVEGTSFLTGIISWGEECAMKGKYGIYTKVSRYVNWIKEKTKLT

SEQ ID NO: 415 - protein, 745 aa, Homo sapiens [sequence omitted]

SEQ ID NO: 416 - protein, 1711 aa, Homo sapiens
MISTAPLYSGVHNWTSSDRIRMCGINEERRAPLSDEESTTGDCQHFGSQEFCVSSSFSKVELTAVGSGSNARGADPDGSATEKLGHKSEDKPDDPQPKMDYAGNVAEAEGLLVPLSSPGDGLKLPASDSAEASNSRADCSWTPLNTQMSKQVDCSPAGVKALDSRQGVGEKNTFILATLGTGVPVEGTLPLVTTNFSPLPAPICPPAPGSASVPHSVPDAFQVPLSVPAPVPHSGLVPVQVATSVPAPSPPLAPVPALAPAPPSVPTLISDSNPLSVSASVLVPVPASAPPSGPVPLSAPAPAPLSVPVSAPPLALIQAPVPPSAPTLVLAPVPTPVLAPMPASTPPAAPAPPSVPMPTPTPSSGPPSTPTLIPAFAPTPVPAPTPAPIFTPAPTPMPAATPAAIPTSAPIPASFSLSRVCFPAAQAPAMQKVPLSFQPGTVLTPSQPLVYIPPPSCGQPLSVATLPTTLGVSSTLTLPVLPSYLQDRCLPGVLASPELRSYPYAFSVARPLTSDSKLVSLEVNRLPCTSPSGSTTTQPAPDGVPGPLADTSLVTASAKVLPTPQPLLPAPSGSSAPPHPAKMPSGTEQQTEGTSVTFSPLKSPPQLEREMASPPECSEMPLDLSSKSNRQKLPLPNQRKTPPMPVLTPVHTSSKALLSTVLSRSQRTTQAAGGNVTSCLGSTSSPFVIFPEIVRNGDPSTWVKNSTALISTIPGTYVGVANPVPASLLLNKDPNLGLNRDPRHLPKQEPISIIDQGEPKGTGATCGKKGSQAGAEGQPSTVKRYTPARIAPGLPGCQTKELSLWKPTGPANIYPRCSVNGKPTSTQVLPVGWSPYHQASLLSIGISSAGQLTPSQGAPIRPTSVVSEFSGVPSLSSSEAVHGLPEGQPRPGGSFVPEQDPVTKNKTCRIAAKPYEEQVNPVLLTLSPQTGTLALSVQPSGGDIRMNQGPEESESHLCSDSTPKMEGPQGACGLKLAGDTKPKNQVLATYMSHELVLATPQNLPKMPELPLLPHDSHPKELILDVVPSSRRGSSTERPQLGSQVDLGRVKMEKVDGDVVFNLATCFRADGLPVAPQRGQAEVRAKAGQARVKQESVGVFACKNKWQPDDVTESLPPKKMKCGKEKDSEEQQLQPQAKAVVRSSHRPKCRKLPSDPQESTKKSPRGASDSGKEHNGVRGKHKHRKPTKPESQSPGKRADSHEEGSLEKKAKSSFRDFIPVVLSTRTRSQSGSICSSFAGMADSDMGSQEVFPTEEEEEVTPTPAKRRKVRKTQRDTQYRSHHAQDKSLLSQGRRHLWRAREMPWRTEAARQMWDTNEEEEEEEEEGLLKRKKRRRQKSRKYQTGEYLTEQEDEQRRKGRADLKARKQKTSSSQSLEHRLRNRNLLLPNKVQGISDSPNGFLPNNLEEPACLENSEKPSGKRKCKTKHMATVSEEAKDVVLYCLQKDSEDVNHRDNAGYTALHEACSRGWTDILNILLEHGANVNCSAQDGTRPVHDAVVNDNLETIWLLLSYGADPTLATYSGQTAMKLASSDTMKRFLSDHLSDLQGRAEGDPGVSWDFYSSSVLEEKDGFACDLLHNPPGSSDQEGDDPMEEDDFMFELSDKPLLPCYNLQVSVSRGPCNWFLFSDVLKRLKLSSRIFQARFPHFEITTMPKAEFYRQVASSQLLTPAERPGGLDDRSPPGSSETVELVRYEPDLLRLLGSEVEFQSCNS

SEQ ID NO: 417 - protein, 647 aa, Homo sapiens
MAAGLATWLPFARAAAVGWLPLAQQPLPPAPGVKASRGDEVLVVNVSGRRFETWKNTLDRYPDTLLGSSEKEFFYDADSGEYFFDRDPDMFRHVLNFYRTGRLHCPRQECIQAFDEELAFYGLVPELVGDCCLEEYRDRKKENAERLAEDEEAEQAGDGPALPAGSSLRQRLWRAFENPHTSTAALVFYYVTGFFIAVSVIANVVETIPCRGSARRSSREQPCGERFPQAFFCMDTACVLIFTGEYLLRLFAAPSRCRFLRSVMSLIDVVAILPYYIGLLVPKNDDVSGAFVTLRVFRVFRIFKFSRHSQGLRILGYTLKSCASELGFLLFSLTMAIIIFATVMFYAEKGTNKTNFTSIPAAFWYTIVTMTTLGYGDMVPSTIAGKIFGSICSLSGVLVIALPVPVIVSNFSRIYHQNQRADKRRAQQKVRLARIRLAKSGTTNAFLQYKQNGGLEDSGSGEEQALCVRNRSAFEQQHHHLLHCLEKTTCHEFTDELTFSEALGAVSPGGRTSRSTSVSSQPVGPGSLLSSCCPRRAKRRAIRLANSTASVSRGSMQELDMLAGLRRSHAPQSRSSLNAKPHDSLDLNCDSRDFVAAIISIPTPPANTPDESQPSSPGGGGRAGSTLRNSSLGTPCLFPETVKISSL

SEQ ID NO: 418 - protein, 611 aa, Homo sapiens
MEELVVEVRGSNGAFYKAFVKDVHEDSITVAFENNWQPDRQIPFHDVRFPPPVGYNKDINESDEVEVYSRANEKEPCCWWLAKVRMIKGEFYVIEYAACDATYNEIVTIERLRSVNPNKPATKDTFHKIKLDVPEDLRQMCAKEAAHKDFKKAVGAFSVTYDPENYQLVILSINEVTSKRAHMLIDMHFRSLRTKLSLIMRNEEASKQLESSRQLASRFHEQFIVREDLMGLAIGTHGANIQQARKVPGVTAIDLDEDTCTFHIYGEDQDAVKKARSFLEFAEDVIQVPRNLVGKVIGKNGKLIQEIVDKSGVVRVRIEAENEKNVPQEEEIMPPNSLPSNNSRVGPNAPEEKKHLDIKENSTHFSQPNSTKVQRGMVPFVFVGTKDSIANATVLLDYHLNYLKEVDQLRLERLQIDEQLRQIGASSRPPPNRTDKEKSYVTDDGQGMGRGSRPYRNRGHGRRGPGYTSGTNSEASNASETESDHRDELSDWSLAPTEEERESFLRRGDGRRRGGGGRGQGGRGRGGGFKGNDDHSRTDNRPRNPREAKGRTTDGSLQIRVDCNNERSVHTKTLQNTSSEGSRLRTGKDRNQKKEKPDSVDGQQPLVNGVP

SEQ ID NO: 419 - protein, 265 aa, Homo sapiens
MPLPVALQTRLAKRGILKHLEPEPEEEIIAEDYDDDPVDYEATRLEGLPPSWYKVFDPSCGLPYYWNADTDLVSWLSPHDPNSVVTKSAKKLRSSNADAEEKLDRSHDKSDRGHDKSDRSHEKLDRGHDKSDRGHDKSDRDRERGYDKVDRERERDRERDRDRGYDKADREEGKERRHHRREELAPYPKSKKAVSRKDEELDPMDPSSYSDAPRGTWSTGLPKRNEAKTGADTTAAGPLFQQRPYPSPGAVLRANAEASRTKQQD

SEQ ID NO: 420 - protein, 350 aa, Homo sapiens
MGCFFSKRRKADKESRPENEEERPKQYSWDQREKVDPKDYMFSGLKDETVGRLPGTVAGQQFLIQDCENCNIYIFDHSATVTIDDCTNCIIFLGPVKGSVFFRNCRDCKCTLACQQFRVRDCRKLEVFLCCATQPIIESSSNIKFGCFQWYYPELAFQFKDAGLSIFNNTWSNIHDFTPVSGELNWSLLPEDAVVQDYVPIPTTEELKAVRVSTEANRSIVPISRGQRQKSSDESCLVVLFAGDYTIANARKLIDEMVGKGFFLVQTKEVSMKAEDAQRVFREKAPDFLPLLNKGPVIALEFNGDGAVEVCQLIVNEIFNGTKMFVSESKETASGDVDSFYNFADIQMGI

SEQ ID NO: 421 - protein, 755 aa, Homo sapiens
MSGTNLDGNDEFDEQLRMQELYGDGKDGDTQTDAGGEPDSLGQQPTDTPYEWDLDKKAWFPKITEDFIATYQANYGFSNDGASSSTANVEDVHARTAEEPPQEKAPEPTDARKKGEKRKAESGWFHVEEDRNTNVYVSGLPPDITVDEFIQLMSKFGIIMRDPQTEEFKVKLYKDNQGNLKGDGLCCYLKRESVELALKLLDEDEIRGYKLHVEVAKFQLKGEYDASKKKKKCKDYKKKLSMQQKQLDWRPERRAGPSRMRHERVVIIKNMFHPMDFEDDPLVLNEIREDLRVECSKFGQIRKLLLFDRHPDGVASVSFRDPEEADYCIQTLDGRWFGGRQITAQAWDGTTDYQVEETSREREERLRGWEAFLNAPEANRGLRRSDSVSASERAGPSRARHFSEHPSTSKMNAQETATGMAFEEPIDEKKFEKTEDGGEFEEGASENNAKESSPEKEAEEGCPEKESEEGCPKRGFEGSCSQKESEEGNPVRGSEEDSPKKESKKKTLKNDCEENGLAKESEDDLNKESEEEVGPTKESEEDDSEKESDEDCSEKQSEDGSEREFEENGLEKDLDEEGSEKELHENVLDKELEENDSENSEFEDDGSEKVLDEEGSEREFDEDSDEKEEEEDTYEKVFDDESDEKEDEEYADEKGLEAADKKAEEGDADEKLFEESDDKEDEDADGKEVEDADEKLFEDDDSNEKLFDEEEDSSEKLFDDSDERGTLGGFGSVEEGPLSTGSSFILSSDDDDDDI

SEQ ID NO: 422 - protein, 207 aa, Homo sapiens
MAPFEPLASGILLLLWLIAPSRACTCVPPHPQTAFCNSDLVIRAKFVGTPEVNQTTLYQRYEIKMTKMYKGFQALGDAADIRFVYTPAMESVCGYFHRSHNRSEEFLIAGKLQDGLLHITTCSFVAPWNSLSLAQRRGFTKTYTVGCEECTVFPCLSIPCKLQSGTHCLWTDQLLQGSEKGFQSRHLACLPREPGLCTWQSLRSQIA

SEQ ID NO: 423 - protein, 1313 aa, Homo sapiens
MSGWRYLICVSFLLTILLELTYQGPPVPASSSTKLLMTSYSMRSTVVSRYAHTLVTSVLFNPHAEAHEAIFDLDLPHLAFISNFTMTINNKVYIAEVKEKHQAKKIYEEAHQQGKTAAHVGIRDRESEKFRISTSLAAGTEVTFSLAYEELLQRHQGQYQLVVSLRPGQLVKRLSIEVTVSERTGISYVHIPPLRTGRLRTNAHASEVDSPPSTRIERGETCVRITYCPTLQDQSSISGSGIMADFLVQYDVVMEDIIGDVQIYDDYFIHYFAPRGLPPMEKNVVFVIDVSSSMFGTKMEQTKTAMNVILSDLQANDYFNIISFSDTVNVWKAGGSIQATIQNVHSAKDYLHCMEADGWTDVNSALLAAASVLNHSNQEPGRGPSVGRIPLIIFLTDGEPTAGVTTPSVILSNVRQALGHRVSLFSLAFGDDADFTLLRRLSLENRGIARRIYEDTDAALQLKGLYEEISMPLLADVRLNYLGGLVGASPWAVFPNYFGGSELVVAGQVQPGKQELGIHLAARGPKDQLLVAHHSEGATNNSQKAFGCPGEPAPNVAHFIRRLWAYVTIGELLDAHFQARDTTTRHLLAAKVLNLSLEYNFVTPLTSLVMVQPKQASEETRRQTSTSAGPDTIMPSSSSRHGLGVSTAQPALVPKVISPKSRPVKPKFYLSSTTTASTKKMLSSKELEPLGESPHTLSMPTYPKAKIPAQQDSGTLAQPTLRTKPTILVPSNSGTLLPLKPGSLSHQNPDILPTNSRTQVPPVKPGIPASPKADTVKCVTPLHSKPGAPSHPQLGALTSQAPKGLPQSRPGVSTLQVPKYPLHTRPRVPAPKTRNNMPHLGPGILLSKTPKILLSLKPSAPPHQISTSISLSKPETPNPHMPQTPLPPRPDRPRPPLPESLSTFPNTISSSTGPSSTTTTSVLGEPLPMPFTPTLPPGRFWHQYDLLPGPQRTRQVLGPSRPGVPTMSLLNSSRPTPEGSPPNLPILLPSSILPEAISLLLLPEELELLSESMVESKFVESLNPPAFYTFLTPDEDGSPNWDGNSEEILGGAGGSMESQGSSVGLAKGTLPSIFTFSSSVDGDPHFVIQIPHSEEKICFTLNGHPGDLLQLIEDPKAGLHVSGKLLGAPPRPGHKDQTRTYFQIITVTTDKPRAYTITISRSSISLRGEGTLRLSWDQPALLKRPQLELYVAAAARLTLRLGPYLEFLVLRHRYRHPSTLQLPHLGFYVANGSGLSPSARGLIGQFQHADIRLVTGPMGPCLRRHHGPDVPVILGKRLLKDSPRLLPRWASCWLVKRSHVELLLGHPYLSYVL

SEQ ID NO: 424 - protein, 606 aa, Homo sapiens
MSDTSESGAGLTRFQAEASEKDSSSMMQTLLTVTQNVEVPETPKASKALEVSEDVKVSKASGVSKATEVSKTPEAREAPATQASSTTQLTDTQVLAAENKSLAADTKKQNADPQAVTMPATETKKVSHVADTKVNTKAQETEAAPSQAPADEPEPESAAAQSQENQDTRPKVKAKKARKVKHLDGEEDGSSDQSQASGTTGGRRVSKALMASMARRASRGPIAFWARRASRTRLAAWARRALLSLRSPKARRGKARRRAAKLQSSQEPEAPPPRDVALLQGRANDLVKYLLAKDQTKIPIKRSDMLKDIIKEYTDVYPEIIERAGYSLEKVFGIQLKEIDKNDHLYILLSTLEPTDAGILGTTKDSPKLGLLMVLLSIIFMNGNRSSEAVIWEVLRKLGLRPGIHHSLFGDVKKLITDEFVKQKYLDYARVPNSNPPEYEFFWGLRSYYETSKMKVLKFACKVQKKDPKEWAAQYREAMEADLKAAAEAAAEAKARAEIRARMGIGLGSENAAGPCNWDEADIGPWAKARIQAGAEAKAKAQESGSASTGASTSTNNSASASASTSGGFSAGASLTATLTFGLFAGLGGAGASTSGSSGACGFSYK

SEQ ID NO: 425 - protein, 429 aa, Homo sapiens
MQLRNPELHLGCALALRFLALVSWDIPGARALDNGLARTPTMGWLHWERFMCNLDCQEEPDSCISEKLFMEMAELMVSEGWKDAGYEYLCIDDCWMAPQRDSEGRLQADPQRFPHGIRQLANYVHSKGLKLGIYADVGNKTCAGFPGSFGYYDIDAQTFADWGVDLLKFDGCYCDSLENLADGYKHMSLALNRTGRSIVYSCEWPLYMWPFQKPNYTEIRQYCNHWRNFADIDDSWKSIKSILDWTSFNQERIVDVAGPGGWNDPDMLVIGNFGLSWNQQVTQMALWAIMAAPLFMSNDLRHISPQAKALLQDKDVIAINQDPLGKQGYQLRQGDNFEVWERPLSGLAWAVAMINRQEIGGPRSYTIAVASLGKGVACNPACFITQLLPVKRKLGFYEWTSRLRSHINPTGTVLLQLENTMQMSLKDLL

SEQ ID NO: 426 - protein, 325 aa, Homo sapiens
MDMWTALLILQALLLPSLADGATPALRFVAVGDWGGVPNAPFHTAREMANAKEIARTVQILGADFILSLGDNFYFTGVQDINDKRFQETFEDVFSDRSLRKVPWYVLAGNHDHLGNVSAQIAYSKISKRWNFPSPFYRLHFKIPQTNVSVAIFMLDTVTLCGNSDDFLSQQPERPRDVKLARTQLSWLKKQLAAAREDYVLVAGHYPVWSIAEHGPTHCLVKQLRPLLATYGVTAYLCGHDHNLQYLQDENGVGYVLSGAGNFMDPSKRHQRKVPNGYLRFHYGTEDSLGGFAYVEISSKEMTVTYIEASGKSLFKTRLPRRARP

SEQ ID NO: 427 - protein, 291 aa, Homo sapiens
MVREQYTTATEGICIERPENQYVYKIGIYGWRKRCLYLFVLLLLIILVVNLALTIWILKVMWFSPAGMGHLCVTKDGLRLEGESEFLFPLYAKEIHSRVDSSLLLQSTQNVTVNARNSEGEVTGRLKVGPKMVEVQNQQFQINSNDGKPLFTVDEKEVVVGTDKLRVTGPEGALFEHSVETPLVRADPFQDLRLESPTRSLSMDAPRGVHIQAHAGKIEALSQMDILFHSSDGMLVLDAETVCLPKLVQGTWGPSGSSQSLYEICVCPDGKLYLSVAGVSTTCQEHNHICL

SEQ ID NO: 428 - protein, 779 aa, Homo sapiens
MQQALELALDRAEYVIESARQRPPKRKYLSSGRKSVFQKLYDLYIEECEKEPEVKKLRRNVNLLEKLVMQETLSCLVVNLYPGNEGYSLMLRGKNGSDSETIRLPYEEGELLEYLDAEELPPILVDLLEKSQVNIFHCGCVIAEIRDYRQSSNMKSPGYQSRHILLRPTMQTLICDVHSITSDNHKWTQEDKLLLESQLILATAEPLCLDPSIAVTCTANRLLYNKQKMNTRPMKRCFKRYSRSSLNRQQDLSHCPPPPQLRLLDFLQKRKERKAGQHYDLKISKAGNCVDMWKRSPCNLAIPSEVDVEKYAKVEKSIKSDDSQPTVWPAHDVKDDYVFECEAGTQYQKTKLTILQSLGDPLYYGKIQPCKADEESDSQMSPSHSSTDDHSNWFIIGSKTDAERVVNQYQELVQNEAKCPVKMSHSSSGSASLSQVSPGKETDQTETVSVQSSVLGKGVKHRPPPIKLPSSSGNSSSGNYFTPQQTSSFLKSPTPPPSSKPSSIPRKSSVDLNQVSMLSPAALSPASSSQRTTATQVMANSAGLNFINVVGSVCGAQALMSGSNPMLGCNTGAITPAGINLSGLLPSGGLLPNALPSAMQAASQAGVPFGLKNTSSLRPLNLLQLPGGSLIFNTLQQQQQQLSQFTPQQPQQPTTCSPQQPGEQGSEQGSTSQEQALSAQQAAVINLTGVGSFMQSQAAVLSQLGSAENRPEQSLPQQRFQLSSAFQQQQQQIQQLRFLQHQMAMAAAAAQTAQLHHHRHTGSQSKSKMKRGTPTTPKF

SEQ ID NO: 429 - protein, 242 aa, Homo sapiens
MNLHVKTLSLMTWRSRFLEESFWSLEETAALAKQLPLKSPSENIFLHIVDLSDPKQIWKFVENFKQEHKLHVLINNAGCMVNKRELTEDGLEKNFAANTLGVYILTTGLIPVLEKEHDPRVITVSSGGMLVQKLNTNDLQSERTPFDGTMVYAQNKRQQVVLTERWAQGHPAIHFSSMHPGWADTPGVRQAMPGFHARFGDRLRSEAQGADTMLWLALSSAAAAQPSGRFFQGDFLPGCEGS

SEQ ID NO: 430 - protein, 510 aa, Homo sapiens
MRPGLSFLLALLFFLGQAAGDLGDVGPPIPSPGFSSFPGVDSSSSFSSSSRSGSSSSRSLGSGGSVSQLFSNFTGSVDDRGTCQCSVSLPDTTFPVDRVERLEFTAHVLSQKFEKELSKVREYVQLISVYEKKLLNLTVRIDIMEKDTISYTELDFELIKVEVKEMEKLVIQLKESFGGSSEIVDQLEVEIRNMTLLVEKLETLDKNNVLAIRREIVALKTKLKECEASKDQNTPVVHPPPTPGSCGHGGVVNISKPSVVQLNWRGFSYLYGAWGRDYSPQHPNKGLYWVAPLNTDGRLLEYYRLYNTLDDLLLYINARELRITYGQGSGTAVYNNNMYVNMYNTGNIARVNLTTNTIAVTQTLPNAAYNNRFSYANVAWQDIDFAVDENGLWVIYSTEASTGNMVISKLNDTTLQVLNTWYTKQYKPSASNAFMVCGVLYATRTMNTRTEEIFYYYDTNTGKEGKLDIVMHKMQEKVQSINYNPFDQKLYVYNDGYLLNYDLSVLQKPQ

SEQ ID NO: 431 - protein, 683 aa, Homo sapiens
MASGPGSQEREGLLIVKLEEDCAWSQELPPPDPGPSPEASHLRFRRFRFQEAAGPREALSRLQELCHGWLRPEMRTKEQILELLVLEQFLTILPQEIQSRVQELHPESGEEAVTLVEDMQRELGRLRQQVTNHGRGTEVLLEEPLPLETARESPSFKLEPMETERSPGPRLQELLGPSPQRDPQAVKERALSAPWLSLFPPEGNMEDKEMTGPQLPESLEDVAMYISQEEWGHQDPSKRALSRDTVQESYENVDSLESHIPSQEVPGTQVGQGGKLWDPSVQSCKEGLSPRGPAPGEEKFENLEGVPSVCSENIHPQVLLPDQARGEVPWSPELGRPHDRSQGDWAPPPEGGMEQALAGASSGRELGRPKELQPKKLHLCPLCGKNFSNNSNLIRHQRIHAAERLCMGVDCTEIFGGNPRFLSLHRAHLGEEAHKCLECGKCFSQNTHLTRHQRTHTGEKPYQCNICGKCFSCNSNLHRHQRTHTGEKPYKCPECGEIFAHSSNLLRHQRIHTGERPYKCPECGKSFSRSSHLVIHERTHERERLYPFSECGEAVSDSTPFLTNHGAHKAEKKLFECLTCGKSFRQGMHLTRHQRTHTGEKPYKCTLCGENFSHRSNLIRHQRIHTGEKPYTCHECGDSFSHSSNRIRHLRTHTGERPYKCSECGESFSRSSRLMSHQRTHTG

SEQ ID NO: 432 - protein, 660 aa, Homo sapiens
MEALMARGALTGPLRALCLLGCLLSHAAAAPSPIIKFPGDVAPKTDKELAVQYLNTFYGCPKESCNLFVLKDTLKKMQKFFGLPQTGDLDQNTIETMRKPRCGNPDVANYNFFPRKPKWDKNQITYRIIGYTPDLDPETVDDAFARAFQVWSDVTPLRFSRIHDGEADIMINFGRWEHGDGYPFDGKDGLLAHAFAPGTGVGGDSHFDDDELWTLGEGQVVRVKYGNADGEYCKFPFLFNGKEYNSCTDTGRSDGFLWCSTTYNFEKDGKYGFCPHEALFTMGGNAEGQPCKFPFRFQGTSYDSCTTEGRTDGYRWCGTTEDYDRDKKYGFCPETAMSTVGGNSEGAPCVFPFTFLGNKYESCTSAGRSDGKMWCATTANYDDDRKWGFCPDQGYSLFLVAAHEFGHAMGLEHSQDPGALMAPIYTYTKNFRLSQDDIKGIQELYGASPDIDLGTGPTPTLGPVTPEICKQDIVFDGIAQIRGEIFFFKDRFIWRTVTPRDKPMGPLLVATFWPELPEKIDAVYEAPQEEKAVFFAGNEYWIYSASTLERGYPKPLTSLGLPPDVQRVDAAFNWSKNKKTYIFAGDKFWRYNEVKKKMDPGFPKLIADAWNAIPDNLDAVVDLQGGGHSYFFKGAYYLKLENQSLKSVKFGSIKSDWLGC

SEQ ID NO: 433 - protein, 554 aa, Homo sapiens
MSADGGGIQDTQDKETPPEVPDRGHPHQEMPSKLGEAVPSGDTQESLHIKMEPEEPHSEGASQEDGAQGAWGWAPLSHGSKEKALFLPGGALPSPRIPVLSREGRTRDRQMAAALLTAWSQMPVTFEDVALYLSREEWGRLDHTQQNFYRDVLQKKNGLSLGFPFSRPFWAPQAHGKGEASGSSRQAGDEKEWRGACTGAVEVGQRVQTSSVAALGNVKPFRTRAGRVQWGVPQCAQEAACGRSSGPAKDSGQPAEPDRTPDAAPPDPSPTEPQEYRVPEKPNEEEKGAPESGEEGLAPDSEVGRKSYRCEQCGKGFSWHSHLVTHRRTHTGEKPYACTDCGKRFGRSSHLIQHQIIHTGEKPYTCPACRKSFSHHSTLIQHQRIHTGEKPYVCDRCAKRFTRRSDLVTHQGTHTGAKPHKCPICAKCFTQSSALVTHQRTHTGVKPYPCPECGKCFSQRSNLIAHNRTHTGEKPYHCLDCGKSFSHSSHLTAHQRTHRGVRPYACPLCGKSFSRRSNLHRHEKIHTTGPKALAMLMLGAAAAGALATPPPAPT

SEQ ID NO: 434 - protein, 422 aa, Homo sapiens
MLDLEVVPERSLGNEQWEFTLGMPLAQAVAILQKHCRIIKNVQVLYSEQSPLSHDLILNLTQDGIKLMFDAFNQRLKVIEVCDLTKVKLKYCGVHFNSQAIAPTIEQIDQSFGATHPGVYNSAEQLFHLNFRGLSFSFQLDSWTEAPKYEPNFAHGLASLQIPHGATVKRMYIYSGNSLQDTKAPMMPLSCFLGNVYAESVDVLRDGTGPAGLRLRLLAAGCGPGLLADAKMRVFERSVYFGDSCQDVLSMLGSPHKVFYKSEDKMKIHSPSPHKQVPSKCNDYFFNYFTLGVDILFDANTHKVKKFVLHTNYPGHYNFNIYHRCEFKIPLAIKKENADGQTETCTTYSKWDNIQELLGHPVEKPVVLHRSSSPNNTNPFGSTFCFGLQRMIFEVMQNNHIASVTLYGPPRPGSHLRTAELP

SEQ ID NO: 435 - protein, 122 aa, Homo sapiens
MTTATRQEVLGLYRSIFRLARKWQATSGQMEDTIKEKQYILNEARTLFRKNKNLTDTDLIKQCIDECTARIEIGLHYKIPYPRPIHLPPMGLTPLRGRGLRSQEKLRKLSKPVYLRSHDEVS

SEQ ID NO: 436 - protein, 127 aa, Homo sapiens
MGDKPIWEQIGSSFIQHYYQLFDNDRTQLGAIYIDASCLTWEGQQFQGKAAIVEKLSSLPFQKIQHSITAQDHQPTPDSCIISMVVGQLKADEDPIMGFHQMFLLKNINDAWVCTNDMFRLALHNFG

SEQ ID NO: 437 - protein, 193 aa, Homo sapiens
MLGVLELLLLGAAWLAGPARGQNETEPIVLEGKCLVVCDSNPTSDPTGTALGISVRSGSAKVAFSAIRSTNHEPSEMSNRTMIIYFDQVLVNIGNNFDSERSTFIAPRKGIYSFNFHVVKVYNRQTIQVSLMLNGWPVISAFAGDQDVTREAASNGVLIQMEKGDRAYLKLERGNLMGGWKYSTFSGFLVFPL

SEQ ID NO: 438 - protein, 163 aa, Homo sapiens
MDALEGESFALSFSSASDAEFDAVVGYLEDIIMDDEFQLLQRNFMDKYYLEFEDTEENKLIYTPIFNEYISLVEKYIEEQLLQRIPEFNMAAFTTTLQHHKDEVAGDIFDMLLTFTDFLAFKEMFLDYRAEKEGRGLDLSSGLVVTSLCKSSSLPASQNNLRH

SEQ ID NO: 439 - protein, 93 aa, Homo sapiens
MDRLQTALLVVLVLLAVALQATEAGPYGANMEDSVCCRDYVRYRLPLRVVKHFYWTSDSCPRPGVVLLTFRDKEICADPRVPWVKMILNKLSQ

SEQ ID NO: 440 - protein, 94 aa, Homo sapiens
MAPLKMLALVTLLLGASLQHIHAARGTNVGRECCLEYFKGAIPLRKLKTWYQTSEDCSRDAIVFVTVQGRAICSDPNNKRVKNAVKYLQSLERS

SEQ ID NO: 441 - protein, 455 aa, Homo sapiens
MAGSGRLVLRPWIRELILGSETPSSPRAGQLLEDAEAAVAGPSHAPDTSDVGATLLVSDGTHSVRCLVTREALDTSDWEEKEFGFRGTEGRLLLLQDCGVHVQVAEGGAPAEFYLQVDRFSLLPTEQPRLRVPGCNQDLDVQKKLYDCLEEHLSESTSSNAGLSLSQLLDEMREDQEHQGALVCLAESCLTLEGPCTAPPVTHWAASRCKATGEAVYTVPSSMLCISENDQLILSSLGPCQRTQGPELPPPDPALQDLSLTLIASPPSSPSSSGTPALPGHMSSEESGTSISLLPALSLAAPDPGQRSSSQPSPAICSAPATLTPRSPHASRTPSSPLQSCTPSLSPRSHVPSPHQALVTRPQKPSLEFKEFVGLPCKNRPPFPRTGATRGAQEPCSVWEPPKRHRDGSAFQYEYEPPCTSLCARVQAVRLPPQLMAWALHFLMDAQPGSEPTPM

SEQ ID NO: 442 - protein, 275 aa, Homo sapiens
MPYANQPTVRITELTDENVKFIIENTDLAVANSIRRVFIAEVPIIAIDWVQIDANSSVLHDEFIAHRLGLIPLISDDIVDKLQYSRDCTCEEFCPECSVEFTLDVRCNEDQTRHVTSRDLISNSPRVIPVTSRNRDNDPNDYVEQDDILIVKLRKGQELRLRAYAKKGFGKEHAKWNPTAGVAFEYDPDNALRHTVYPKPEEWPKSEYSELDEDESQAPYDPNGKPERFYYNVESCGSLRPETIVLSALSGLKKKLSDLQTQLSHEIQSDVLTIN

SEQ ID NO: 443 - protein, 669 aa, Homo sapiens
MGSDPSAPGRPGWTGSLLGDREEAARPRLLPLLLVLLGCLGLGVAAEDAEVHAENWLRLYGYLPQPSRHMSTMRSAQILASALAEMQRFYGIPVTGVLDEETKEWMKRPRCGVPDQFGVRVKANLRRRRKRYALTGRKWNNHHLTFSIQNYTEKLGWYHSMEAVRRAFRVWEQATPLVFQEVPYEDIRLRRQKEADIMVLFASGFHGDSSPFDGTGGFLAHAYFPGPGLGGDTHFDADEPWTFSSTDLHGNNLFLVAVHELGHALGLEHSSNPNAIMAPFYQWKDVDNFKLPEDDLRGIQQLYGTPDGQPQPTQPLPTVTPRRPGRPDHRPPRPPQPPPPGGKPERPPKPGPPVQPRATERPDQYGPNICDGDFDTVAMLRGEMFVFKGRWFWRVRHNRVLDNYPMPIGHFWRGLPGDISAAYERQDGRFVFFKGDRYWLFREANLEPGYPQPLTSYGLGIPYDRIDTAIWWEPTGHTFFFQEDRYWRFNEETQRGDPGYPKPISVWQGIPASPKGAFLSNDAAYTYFYKGTKYWKFDNERLRMEPGYPKSILRDFMGCQEHVEPGPRWPDVARPPFNPHGGAEPGADSAEGDVGDGDGDFGAGVNKDGGSRVVVQMEEVARTVNVVMVLVPLLLLLCVLGLTYALVQMQRKGAPRVLLYCKRSLQEWV

SEQ ID NO: 444 - protein, 377 aa, Homo sapiens
MTDDESESVLSDSHEGSELELPVIQLCGLVEELSYVNSALKTETEMFEKYYAKLEPRDQRPPRLSEIKISAADYAQFRGRRRSKSRTGMDRGVGLTADQKLELVQKEVADMKDDLRHTRANAERDLQHHEAIIEEAEIRWSEVSREVHEFEKDILKAISKKKGSILATQKVMKYIEDMNRRRDNMKEKLRLKNVSLKVQRKKMLLQLRQKEEVSEALHDVDFQQLKIENAQFLETIEARNQELTQLKLSSGNTLQVLNAYKSKLHKAMEIYLNLDKEILLRKELLEKIEKETLQVEEDRAKAEAVNKRLRKQLAEFRAPQVMTYVREKILNADLEKSIRMWERKVEIAEMSLKGHRKAWNRMKITNEQLQADYLAGK

SEQ ID NO: 445 - protein, 169 aa, Homo sapiens
MICLVLTIFANLFPAACTGAHERTFLAVKPDGVQRRLVGEIVRRFERKGFKLVALKLVQASEELLREHYAELRERPFYGRLVKYMASGPVVAMVWQGLDVVRTSRALIGATNPADAPPGTIRGDFCIEVGKNLIHGSDSVESARREIALWFRADELLCWEDSAGHWLYE

SEQ ID NO: 446 - protein, 324 aa, Homo sapiens
MPELAVQKVVVHPLVLLSVVDHFNRIGKVGNQKRVVGVLLGSWQKKVLDVSNSFAVPFDEDDKDDSVWFLDHDYLENMYGMFKKVNARERIVGWYHTGPKLHKNDIAINELMKRYCPNSVLVIIDVKPKDLGLPTEAYISVEEVHDDGTPTSKTFEHVTSEIGAEEAEEVGVEHLLRDIKDTTVGTLSQRITNQVHGLKGLNSKLLDIRSYLEKVATGKLPINHQIIYQLQDVFNLLPDVSLQEFVKAFYLKTNDQMVVVYLASLIRSVVALHNLINNKIANRDAEKKEGQEKEESKKDRKEDKEKDKDKEKSDVKKEEKKEKK

SEQ ID NO: 447 - protein, 473 aa, Homo sapiens
MATQAKRPRVAGPVDGGDLDPVACFLSWCRRVGLELSPKVSERAGGRRTRGGARAALTSPPAQVAVSRQGTVAGYGMVARESVQAGELLFVVPRAALLSQHTCSIGGLLERERVALQSQSGWVPLLLALLHELQAPASRWRPYFALWPELGRLEHPMFWPEEERRCLLQGTGVPEAVEKDLANIRSEYQSIVLPFMEAHPDLFSLRVRSLELYHQLVALVMAYSFQEPLEEEEDEKEPNSPVMVPAADILNHLANHNANLEYSANCLRMVATQPIPKGHEIFNTYGQMANWQLIHMYGFVEPYPDNTDDTADIQMVTVREAALQGTKTEAERHLVYERWDFLCKLEMVGEEGAFVIGREEVLTEEELTTTLKVLCMPAEEFRELKDQDGGGDDKREEGSLTITNIPKLKASWRQLLQNSVLLTLQTYATDLKTDQGLLSNKEVYAKLSWREQQALQVRYGQKMILHQLLELTS

SEQ ID NO: 448 - protein, 462 aa, Homo sapiens
MAQVSINNDYSEWDLSTDAGERARLLQSPCVDTAPKSEWEASPGGLDRGTTSTLGAIFIVVNACLGAGLLNFPAAFSTAGGVAAGIALQMGMLVFIISGLVILAYCSQASNERTYQEVVWAVCGKLTGVLCEVAIAVYTFGTCIAFLIIIGDQQDKIIAVMAKEPEGASGPWYTDRKFTISLTAFLFILPLSIPREIGFQKYASFLSVVGTWYVTAIVIIKYIWPDKEMTPGNILTRPASWMAVFNAMPTICFGFQCHVSSVPVFNSMQQPEVKTWGGVVTAAMVIALAVYMGTGICGFLTFGAAVDPDVLLSYPSEDMAVAVARAFIILSVLTSYPILHFCGRAVVEGLWLRYQGVPVEEDVGRERRRRVLQTLVWFLLTLLLALFIPDIGKVISVIGGLAACFIFVFPGLCLIQAKLSEMEEVKPASWWVLVSYGVLLVTLGAFIFGQTTANAIFVDLLA

SEQ ID NO: 449 - protein, 515 aa, Homo sapiens
MEAREPGRPTPTYHLVPNTSQSQVEEDVSSPPQRSSETMQLKKEISLLNGVSLVVGNMIGSGIFVSPKGVLVHTASYGMSLIVWAIGGLFSVVGALCYAELGTTITKSGASYAYILEAFGGFIAFIRLWVSLLVVEPTGQAIIAITFANYIIQPSFPSCDPPYLACRLLAAACICLLTFVNCAYVKWGTRVQDTFTYAKVVALIAIIVMGLVKLCQGHSEHFQDAFEGSSWDMGNLSLALYSALFSYSGWDTLNFVTEEIKNPERNLPLAIGISMPIVTLIYILTNVAYYTVLNISDVLSSDAVAVTFADQTFGMFSWTIPIAVALSCFGGLNASIFASSRLFFVGSREGHLPDLLSMIHIERFTPIPALLFNCTMALIYLIVEDVFQLINYFSFSYWFFVGLSVVGQLYLRWKEPKRPRPLKLSVFFPIVFCICSVFLVIVPLFTDTINSLIGIGIALSGVPFYFMGVYLPESRRPLFIRNVLAAITRGTQQLCFCVLTELDVAEEKKDERKTD

SEQ ID NO: 450 - protein, 412 aa, Homo sapiens
MGLHLRPYRVGLLPDGLLFLLLLLMLLADPALPAGRHPPVVLVPGDLGNQLEAKLDKPTVVHYLCSKKTESYFTIWLNLELLLPVIIDCWIDNIRLVYNKTSRATQFPDGVDVRVPGFGKTFSLEFLDPSKSSVGSYFHTMVESLVGWGYTRGEDVRGAPYDWRRAPNENGPYFLALREMIEEMYQLYGGPVVLVAHSMGNMYTLYFLQRQPQAWKDKYIRAFVSLGAPWGGVAKTLRVLASGDNNRIPVIGPLKIREQQRSAVSTSWLLPYNYTWSPEKVFVQTPTINYTLRDYRKFFQDIGFEDGWLMRQDTEGLVEATMPPGVQLHCLYGTGVPTPDSFYYESFPDRDPKICFGDGDGTVNLKSALQCQAWQSRQEHQVLLQELPGSEHIEMLANATTLAYLKRVLLGP

SEQ ID NO: 451 - protein, 79 aa, Homo sapiens
MHPDLSPHLHTEECNVLINLLKECHKNHNILKFFGYCNDVDRELRKCLKNEYVENRTKSREHGIAMRKKLFNPPEESEK

SEQ ID NO: 452 - protein, 525 aa, Homo sapiens
MSRQLLPVLLLLLLRASCPWGQEQGARSPSEEPPEEEIPKEDGILVLSRHTLGLALREHPALLVEFYAPWCGHCQALAPEYSKAAAVLAAESMVVTLAKVDGPAQRELAEEFGVTEYPTLKFFRNGNRTHPEEYTGPRDAEGIAEWLRRRVGPSAMRLEDEAAAQALIGGRDLVVIGFFQDLQDEDVATFLALAQDALDMTFGLTDRPRLFQQFGLTKDTVVLFKKFDEGRADFPVDEELGLDLGDLSRFLVTHSMRLVTEFNSQTSAKIFAARILNHLLLFVNQTLAAHRELLAGFGEAAPRFRGQVLFVVVDVAADNEHVLQYFGLKAEAAPTLRLVNLETTKKYAPVDGGPVTAASITAFCHAVLNGQVKPYLLSQEIPPDWDQRPVKTLVGKNFEQVAFDETKNVFVKFYAPWCTHCKEMAPAWEALAEKYQDHEDIIIAELDATANELDAFAVHGFPTLKYFPAGPGRKVIEYKSTRDLETFSKFLDNGGVLPTEEPPEEPAAPFPEPPANSTMGSKEEL

SEQ ID NO: 453 - protein, 1807 aa, Homo sapiens
MAKPTSKDSGLKEKFKILLGLGTPRPNPRSAEGKQTEFIITAEILRELSMECGLNNRIRMIGQICEVAKTKKFEEHAVEALWKAVADLLQPERPLEARHAVLALLKAIVQGQGERLGVLRALFFKVIKDYPSNEDLHERLEVFKALTDNGRHITYLEEELADFVLQWMDVGLSSEFLLVLVNLVKFNSCYLDEYIARMVQMICLLCVRTASSVDIEVSLQVLDAVVCYNCLPAESLPLFIVTLCRTINVKELCEPCWKLMRNLLGTHLGHSAIYNMCHLMEDRAYMEDAPLLRGAVFFVGMALWGAHRLYSLRNSPTSVLPSFYQAMACPNEVVSYEIVLSITRLIKKYRKELQVVAWDILLNIIERLLQQLQTLDSPELRTIVHDLLTTVEELCDQNEFHGSQERYFELVERCADQRPESSLLNLISYRAQSIHPAKDGWIQNLQALMERFFRSESRGAVRIKVLDVLSFVLLINRQFYEEELINSVVISQLSHIPEDKDHQVRKLATQLLVDLAEGCHTHHFNSLLDIIEKVMARSLSPPPELEERDVAAYSASLEDVKTAVLGLLVILQTKLYTLPASHATRVYEMLVSHIQLHYKHSYTLPIASSIRLQAFDFLLLLRADSLHRLGLPNKDGVVRFSPYCVCDYMEPERGSEKKTSGPLSPPTGPPGPAPAGPAVRLGSVPYSLLFRVLLQCLKQESDWKVLKLVLGRLPESLRYKVLIFTSPCSVDQLCSALCSMLSGPKTLERLRGAPEGFSRTDLHLAVVPVLTALISYHNYLDKTKQREMVYCLEQGLIHRCASQCVVALSICSVEMPDIIIKALPVLVVKLTHISATASMAVPLLEFLSTLARLPHLYRNFAAEQYASVFAISLPYTNPSKFNQYIVCLAHHVIAMWFIRCRLPFRKDFVPFITKGLRSNVLLSFDDTPEKDSFRARSTSLNERPKSLRIARPPKQGLNNSPPVKEFKESSAAEAFRCRSISVSEHVVRSRIQTSLTSASLGSADENSVAQADDSLKNLHLELTETCLDMMARYVFSNFTAVPKRSPVGEFLLAGGRTKTWLVGNKLVTVTTSVGTGTRSLLGLDSGELQSGPESSSSPGVHVRQTKEAPAKLESQAGQQVSRGARDRVRSMSGGHGLRVGALDVPASQFLGSATSPGPRTAPAAKPEKASAGTRVPVQEKTNLAAYVPLLTQGWAEILVRRPTGNTSWLMSLENPLSPFSSDINNMPLQELSNALMAAERFKEHRDTALYKSLSVPAASTAKPPPLPRSNTVASFSSLYQSSCQGQLHRSVSWADSAVVMEEGSPGEVPVLVEPPGLEDVEAALGMDRRTDAYSRSSSVSSQEEKSLHAEELVGRGIPIERVVSSEGGRPSVDLSFQPSQPLSKSSSSPELQTLQDILGDPGDKADVGRLSPEVKARSQSGTLDGESAAWSASGEDSRGQPEGPLPSSSPRSPSGLRPRGYTISDSAPSRRGKRVERDALKSRATASNAEKVPGINPSFVFLQLYHSPFFGDESNKPILLPNESQSFERSVQLLDQIPSYDTHKIAVLYVGEGQSNSELAILSNEHGSYRYTEFLTGLGRLIELKDCQPDKVYLGGLDVCGEDGQFTYCWHDDIMQAVFHIATLMPTKDVDKHRCDKKRHLGNDFVSIVYNDSGEDFKLGTIKGQFNFVHVIVTPLDYECNLVSLQCRKDMEGLVDTSVAKIVSDRNLPFVARQMALHANMASQVHHSRSNPTDIYPSKWIARLRHIKRLRQRICEEAAYSNPSLPLVHPPSHSKAPAQTPAEPTPGYEVGQRKRLISSVEDFTEFV

SEQ ID NO: 454 - protein, 480 aa, Homo sapiens
MATVPGLQPLPTLEQDLEQEEILIVKVEEDFCLEEEPSVETEDPSPETFRQLFRLFCYQEVAGPREALSRLWELCCRWLRPELRTKEQILELLVLEQFLTVLPGEIQARVREQQPESGEEAVVLVEGLQRKPRKHRQRGSELLSDDEVPLGIGGQFLKHQAEAQPEDLSLEEEARFSSQQPPAQLSHRPQRGPLLWPERGPPAPRHQEMASASPFLSAWSQVPVNLEDVAVYLSGEEPRCMDPAQRDAPLENEGPGIQLEDGGDGREDAPLRMEWYRVLSARCQGPGHPLPGQRPAPVRGLVRPDQPRGGPPPGRRASHGADKPYTCPECGKGFSKTSHLTKHQRTHTGERPYKCLVCGKGFSDRSNFSTHQRVHTGEKPYPCPECGKRFSQSSSLVIHRRTHSGERPYACTQCGKRFNNSSHFSAHRRTHTGEKPYTCPACGRGFRRGTDLHKHQRTHMGAGSLPTLQPVAPGGPGAKA

SEQ ID NO: 455 - protein, 187 aa, Homo sapiens
MGGLFWRSALRGLRCGPRAPGPSLLVRHGSGGPSWTRERTLVAVKPDGVQRRLVGDVIQRFERRGFTLVGMKMLQAPESVLAEHYQDLRRKPFYPALIRYMSSGPVVAMVWEGYNVVRASRAMIGHTDSAEAAPGTIRGDFSVHISRNVIHASDSVEGAQREIQLWFQSSELVSWADGGQHSSIHPA

SEQ ID NO: 456 - protein, 292 aa, Homo sapiens
MAQPPPDVEGDDCLPAYRHLFCPDLLRDKVAFITGGGSGIGFRIAEIFMRHGCHTVIASRSLPRVLTAARKLAGATGRRCLPLSMDVRAPPAVMAAVDQALKEFGRIDILINCAAGNFLCPAGALSFNAFKTVMDIDTSGTFNVSRVLYEKFFRDHGGVIVNITATLGNRGQALQVHAGSAKAAVDAMTRHLAVEWGPQNIRVNSLAPGPISGTEGLRRLGGPQASLSTKVTASPLQRLGNKTEIAHSVLYLASPLASYVTGAVLVADGGAWLTFPNGVKGLPDFASFSAKL

SEQ ID NO: 457 - protein, 303 aa, Homo sapiens
MKGKEEKEGGARLGAGGGSPEKSPSAQELKEQGNRLFVGRKYPEAAACYGRAITRNPLVAVYYTNRALCYLKMQQHEQALADCRRALELDGQSVKAHFFLGQCQLEMESYDEAIANLQRAYSLAKEQRLNFGDDIPSALRIAKKKRWNSIEERRIHQESELHSYLSRLIAAERERELEECQRNHEGDEDDSHVRAQQACIEAKHDKYMADMDELFSQVDEKRKKRDIPDYLCGKISFELMREPCITPSGITYDRKDIEEHLQRVGHFDPVTRSPLTQEQLIPNLAMKEVIDAFISENGWVEDY

SEQ ID NO: 458 - protein, 1086 aa, Homo sapiens
MATVGEWSCVRCTFLNPAGQRQCSICEAPRHKPDLNHILRLSVEEQKWPCARCTFRNFLGKEACEVCGFTPEPAPGAAFLPVLNGVLPKPPAILGEPKGSCQEEAGPVRTAGLVATEPARGQCEDKDEEEKEEQEEEEGAAEPRGGWACPRCTLHNTPVASSCSVCGGPRRLSLPRIPPEALVVPEVVAPAGFHVVPAAPPPGLPGEGAEANPPATSQGPAAEPEPPRVPPFSPFSSTLQNNPVPRSRREVPPQLQPPVPEAAQPSPSAGCRGAPQGSGWAGASRLAELLSGKRLSVLEEEATEGGTSRVEAGSSTSGSDIIDLAGDTVRYTPASPSSPDFTTWSCAKCTLRNPTVAPRCSACGCSKLHGFQEHGEPPTHCPDCGADKPSPCGRSCGRVSSAQKAARVLPERPGQWACPACTLLNALRAKHCAACHTPQLLVAQRRGAAPLRRRESMHVEQRRQTDEGEAKALWENIVAFCRENNVSFVDDSFPPGPESVGFPAGDSVQQRVRQWLRPQEINCSVFRDHRATWSVFHTLRPSDILQGLLGNCWFLSALAVLAERPDLVERVMVTRSLCAEGAYQVRLCKDGTWTTVLVDDMLPCDEAGCLLFSQAQRKQLWVALIEKALAKLHGSYFALQAGRAIEGLATLTGAPCESLALQLSSTNPREEPVDTDLIWAKMLSSKEAGFLMGASCGGGNMKVDDSAYESLGLRPRHAYSILDVRDVQGTRLLRLRNPWGRFSWNGSWSDEWPHWPGHLRGELMPHGSSEGVFWMEYGDFVRYFDSVDICKVHSDWQEARVQGCFPSSASAPVGVTALTVLERASLEFALFQEGSRRSDAVDSHLLDLCILVFRATFGSGGHLSLGRLLAHSKRAVKKFVSCDVMLEPGEYAVVCCAFNHWGPPLPGTPAPQASSPSAGVPRASPEPPGHVLAVYSSRLVMVEPVEAQPTTLADAIILLTESRGERHEGREGMTCYYLTHGWAGLIVVVENRHPKAYLHVQCDCTDSFNVVSTRGSLRTQDSVPPLHRQVLVILSQLEGNAGFSITHRLAHRKAAQAFLSDWTASKGTHSPPLTPEVAGLHGPRPL

SEQ ID NO: 459 - protein, 316 aa, Homo sapiens
MSAEVETSEGVDESEKKNSGALEKENQMRMADLSELLKEGTKEAHDRAENTQFVKDFLKGNIKKELFKLATTALYFTYSALEEEMERNKDHPAFAPLYFPMELHRKEALTKDMEYFFGENWEEQVQCPKAAQKYVERIHYIGQNEPELLVAHAYTRYMGDLSGGQVLKKVAQRALKLPSTGEGTQFYLFENVDNAQQFKQLYRARMNALDLNMKTKERIVEEANKAFEYNMQIFNELDQAGSTLARETLEDGFPVHDGKGDMRKCPFYAAEQDKGALEGSSCPFRTAMAVLRKPSLQFILAAGVALAAGLLAWYYM

SEQ ID NO: 460 - protein, 213 aa, Homo sapiens
MPDENIFLFVPNLIGYARIVFAIISFYFMPCCPLTASSFYLLSGLLDAFDGHAARALNQGTRFGAMLDMLTDRCSTMCLLVNLALLYPGATLFFQISMSLDVASHWLHLHSSVVRGSESHKMIDLSGNPVLRIYYTSRPALFTLCAGNELFYCLLYLFHFSEGPLVGSVGLFRMGLWVTAPIALLKSLISVIHLITAARNMAALDAADRAKKK

SEQ ID NO: 461 - protein, 412 aa, Homo sapiens
MILASVLRSGPGGGLPLRPLLGPALALRARSTSATDTHHVEMARERSKTVTSFYNQSAIDAAAEKPSVRLTPTMMLYAGRSQDGSHLLKSARYLQQELPVRIAHRIKGFRCLPFIIGCNPTILHVHELYIRAFQKLTDFPPIKDQADEAQYCQLVRQLLDDHKDVVTLLAEGLRESRKHIEDEKLVRYFLDKTLTSRLGIRMLATHHLALHEDKPDFVGIICTRLSPKKIIEKWVDFARRLCEHKYGNAPRVRINGHVAARFPFIPMPLDYILPELLKNAMRATMESHLDTPYNVPDVVITIANNDVDLIIRISDRGGGIAHKDLDRVMDYHFTTAEASTQDPRISPLFGHLDMHSGAQSGPMHGFGFGLPTSRAYAEYLGGSLQLQSLQGIGTDVYLRLRHIDGREESFRI

SEQ ID NO: 462 - protein, 458 aa, Homo sapiens
MAAQGAAAAVAAGTSGVAGEGEPGPGENAAAEGTAPSPGRVSPPTPARGEPEVTVEIGETYLCRRPDSTWHSAEVIQSRVNDQEGREEFYVHYVGFNRRLDEWVDKNRLALTKTVKDAVQKNSEKYLSELAEQPERKITRNQKRKHDEINHVQKTYAEMDPTTAALEKEHEAITKVKYVDKIHIGNYEIDAWYFSPFPEDYGKQPKLWLCEYCLKYMKYEKSYRFHLGQCQWRQPPGKEIYRKSNISVYEVDGKDHKIYCQNLCLLAKLFLDHKTLYFDVEPFVFYILTEVDRQGAHIVGYFSKEKESPDGNNVACILTLPPYQRRGYGKFLIAFSYELSKLESTVGSPEKPLSDLGKLSYRSYWSWVLLEILRDFRGTLSIKDLSQMTSITQNDIISTLQSLNMVKYWKGQHVICVTPKLVEEHLKSAQYKKPPITVDSVCLKWAPPKHKQVKLSKK

SEQ ID NO: 463 - protein, 458 aa, Homo sapiens
MITKTHKVDLGLPEKKKKKKVVKEPETRYSVLNNDDYFADVSPLRATSPSKSVAHGQAPEMPLVKKKKKKKKGVSTLCEEHVEPETTLPARRTEKSPSLRKQVFGHLEFLSGEKKNKKSPLAMSHASGVKTSPDPRQGEEETRVGKKLKKHKKEKKGAQDPTAFSVQDPWFCEAREARDVGDTCSVGKKDEEQAALGQKRKRKSPREHNGKVKKKKKIHQEGDALPGHSKPSRSMESSPRKGSKKKPVKVEAPEYIPISDDPKASAKKKMKSKKKVEQPVIEEPALKRKKKKKRKESGVAGDPWKEETDTDLEVVLEKKGNMDEAHIDQVRRKALQEEIDRESGKTEASETRKWTGTQFGQWDTAGFENEDQKLKFLRLMGGFKNLSPSFSRPASTIARPNMALGKKAADSLQQNLQRDYDRAMSWKYSRGAGLGFSTAPNKIFYIDRNASKSVKLED

SEQ ID NO: 464 - protein, 3065 aa, Homo sapiens
MEEKQQIILANQDGGTVAGAAPTFFVILKQPGNGKTDQGILVTNQDACALASSVSSPVKSKGKICLPADCTVGGITVTLDNNSMWNEFYHRSTEMILTKQGRRMFPYCRYWITGLDSNLKYILVMDISPVDNHRYKWNGRWWEPSGKAEPHVLGRVFIHPESPSTGHYWMHQPVSFYKLKLTNNTLDQEGHIILHSMHRYLPRLHLVPAEKAVEVIQLNGPGVHTFTFPQTEFFAVTAYQNIQITQLKIDYNPFAKGFRDDGLNNKPQRDGKQKNSSDQEGNNISSSSGHRVRLTEGQGSEIQPGDLDPLSRGHETSGKGLEKTSLNIKRDFLGFMDTDSALSEVPQLKQEISECLIASSFEDDSRVASPLDQNGSFNVVIKEEPLDDYDYELGECPEGVTVKQEETDEETDVYSNSDDDPILEKQLKRHNKVDNPEADHLSSKWLPSSPSGVAKAKMFKLDTGKMPVVYLEPCAVTRSTVKISELPDNMLSTSRKDKSSMLAELEYLPTYIENSNETAFCLGKESENGLRKHSPDLRVVQKYPLLKEPQWKYPDISDSISTERILDDSKDSVGDSLSGKEDLGRKRTTMLKIATAAKVVNANQNASPNVPGKRGRPRKLKLCKAGRPPKNTGKSLISTKNTPVSPGSTFPDVKPDLEDVDGVLFVSFESKEALDIHAVDGTTEESSSLQASTTNDSGYRARISQLEKELIEDLKTLRHKQVIHPGLQEVGLKLNSVDPTMSIDLKYLGVQLPLAPATSFPFWNLTGTNPASPDAGFPFVSRTGKTNDFTKIKGWRGKFHSASASRNEGGNSESSLKNRSAFCSDKLDEYLENEGKLMETSMGFSSNAPTSPVVYQLPTKSTSYVRTLDSVLKKQSTISPSTSYSLKPHSVPPVSRKAKSQNRQATFSGRTKSSYKSILPYPVSPKQKYSHVILGDKVTKNSSGIISENQANNFVVPTLDENIFPKQISLRQAQQQQQQQQGSRPPGLSKSQVKLMDLEDCALWEGKPRTYITEERADVSLTTLLTAQASLKTKPIHTIIRKRAPPCNNDFCRLGCVCSSLALEKRQPAHCRRPDCMFGCTCLKRKVVLVKGGSKTKHFQRKAAHRDPVFYDTLGEEAREEEEGIREEEEQLKEKKKRKKLEYTICETEPEQPVRHYPLWVKVEGEVDPEPVYIPTPSVIEPMKPLLLPQPEVLSPTVKGKLLTGIKSPRSYTPKPNPVIREEDKDPVYLYFESMMTCARVRVYERKKEDQRQPSSSSSPSPSFQQQTSCHSSPENHNNAKEPDSEQQPLKQLTCDLEDDSDKLQEKSWKSSCNEGESSSTSYMHQRSPGGPTKLIEIISDCNWEEDRNKILSILSQHINSNMPQSLKVGSFIIELASQRKSRGEKNPPVYSSRVKISMPSCQDQDDMAEKSGSETPDGPLSPGKMEDISPVQTDALDSVRERLHGGKGLPFYAGLSPAGKLVAYKRKPSSSTSGLIQVASNAKVAASRKPRTLLPSTSNSKMASSSGTATNRPGKNLKAFVPAKRPIAARPSPGGVFTQFVMSKVGALQQKIPGVSTPQTLAGTQKFSIRPSPVMVVTPVVSSEPVQVCSPVTAAVTTTTPQVFLENTTAVTPMTAISDVETKETTYSSGATTTGVVEVSETNTSTSVTSTQSTATVNLTKTTGITTPVASVAFPKSLVASPSTITLPVASTASTSLVVVTAAASSSMVTTPTSSLGSVPIILSGINGSPPVSQRPENAAQIPVATPQVSPNTVKRAGPRLLLIPVQQGSPTLRPVSNTQLQGHRMVLQPVRSPSGMNLFRHPNGQIVQLLPLHQLRGSNTQPNLQPVMFRNPGSVMGIRLPAPSKPSETPPSSTSSSAFSVMNPVIQAVGSSSAVNVITQAPSLLSSGASFVSQAGTLTLRISPPEPQSFASKTGSETKITYSSGGQPVGTASLIPLQSGSFALLQLPGQKPVPSSILQHVASLQMKRESQNPDQKDETNSIKREQETKKVLQSEGEAVDPEANVIKQNSGAATSEETLNDSLEDRGDHLDEECLPEEGCATVKPSEHSCITGSHTDQDYKDVNEEYGARNRKSSKEKVAVLEVRTISEKASNKTVQNLSKVQHQKLGDVKVEQQKGFDNPEENSSEFPVTFKEESKFELSGSKVMEQQSNLQPEAKEKECGDSLEKDRERWRKHLKGPLTRKCVGASQECKKEADEQLIKETKTCQENSDVFQQEQGISDLLGKSGITEDARVLKTECDSWSRISNPSAFSIVPRRAAKSSRGNGHFQGHLLLPGEQIQPKQEKKGGRSSADFTVLDLEEDDEDDNEKTDDSIDEIVDVVSDYQSEEVDDVEKNNCVEYIEDDEEHVDIETVEELSEEINVAHLKTTAAHTQSFKQPSCTHISADEKAAERSRKAPPIPLKLKPDYWSDKLQKEAEAFAYYRRTHTANERRRRGEMRDLFEKLKITLGLLHSSKVSKSLILTRAFSEIQGLTDQADKLIGQKNLLTRKRNILIRKVSSLSGKTEEVVLKKLEYIYAKQQALEAQKRKKKMGSDEFDISPRISKQQEGSSASSVDLGQMFINNRRGKPLILSRKKDQATENTSPLNTPHTSANLVMTPQGQLLTLKGPLFSGPVVAVSPDLLESDLKPQVAGSAVALPENDDLFMMPRIVNVTSLATEGGLVDMGGSKYPHEVPDSKPSDHLKDTVRNEDNSLEDKGRISSRGNRDGRVTLGPTQVFLANKDSGYPQIVDVSNMQKAQEFLPKKISGDMRGIQYKWKESESRGERVKSKDSSFHKLKMKDLKDSSIEMELRKVTSAIEEAALDSSELLTNMEDEDDTDETLTSLLNEIAFLNQQLNDDSVGLAELPSSMDTEFPGDARRAFISKVPPGSRATFQVEHLGTGLKELPDVQGESDSISPLLLHLEDDDFSENEKQLAEPASEPDVLKIVIDSEIKDSLLSNKKAIDGGKNTSGLPAEPESVSSPPTLHMKTGLENSNSTDTLWRPMPKLAPLGLKVANPSSDADGQSLKVMPCLAPIAAKVGSVGHKMNLTGNDQEGRESKVMPTLAPVVAKLGNSGASPSSAGK

SEQ ID NO: 465 - protein, 295 aa, Homo sapiens
MQPEGAEKGKSFKQRLVLKSSLAKETLSEFLGTFILIVLGCGCVAQAILSRGRFGGVITINVGFSMAVAMAIYVAGGVSGGHINPAVSLAMCLFGRMKWFKLPFYVGAQFLGAFVGAATVFGIYYDGLMSFAGGKLLIVGENATAHIFATYPAPYLSLANAFADQVVATMILLIIVFAIFDSRNLGAPRGLEPIAIGLLIIVIASSLGLNSGCAMNPARDLSPRLFTALAGWGFEVFRAGNNFWWIPVVGPLVGAVIGGLIYVLVIEIHHPEPDSVFKTEQSEDKPEKYELSVIM

SEQ ID NO: 466 - protein, 450 aa, Homo sapiens
MSAIQAAWPSGTECIAKYNFHGTAEQDLPFCKGDVLTIVAVTKDPNWYKAKNKVGREGIIPANYVQKREGVKAGTKLSLMPWFHGKITREQAERLLYPPETGLFLVRESTNYPGDYTLCVSCDGKVEHYRIMYHASKLSIDEEVYFENLMQLVEHYTSDADGLCTRLIKPKVMEGTVAAQDEFYRSGWALNMKELKLLQTIGKGEFGDVMLGDYRGNKVAVKCIKNDATAQAFLAEASVMTQLRHSNLVQLLGVIVEEKGGLYIVTEYMAKGSLVDYLRSRGRSVLGGDCLLKFSLDVCEAMEYLEGNNFVHRDLAARNVLVSEDNVAKVSDFGLTKEASSTQDTGKLPVKWTAPEALREKKFSTKSDVWSFGILLWEIYSFGRVPYPRIPLKDVVPRVEKGYKMDAPDGCPPAVYEVMKNCWHLDAAMRPSFLQLREQLEHIKTHELHL

SEQ ID NO: 467 - protein, 335 aa, Homo sapiens
MWATLPLLCAGAWLLGVPVCGAAELCVNSLEKFHFKSWMSKHRKTYSTEEYHHRLQTFASNWRKINAHNNGNHTFKMALNQFSDMSFAEIKHKYLWSEPQNCSATKSNYLRGTGPYPPSVDWRKKGNFVSPVKNQGACGSCWTFSTTGALESAIAIATGKMLSLAEQQLVDCAQDFNNHGCQGGLPSQAFEYILYNKGIMGEDTYPYQGKDGYCKFQPGKAIGFVKDVANITIYDEEAMVEAVALYNPVSFAFEVTQDFMMYRTGIYSSTSCHKTPDKVNHAVLAVGYGEKNGIPYWIVKNSWGPQWGMNGYFLIERGKNMCGLAACASYPIPLV

SEQ ID NO: 468 - protein, 1361 aa, Homo sapiens
MGAAGRQDFLFKAMLTISWLTLTCFPGATSTVAAGCPDQSPELQPWNPGHDQDHHVHIGQGKTLLLTSSATVYSIHISEGGKLVIKDHDEPIVLRTRHILIDNGGELHAGSALCPFQGNFTIILYGRADEGIQPDPYYGLKYIGVGKGGALELHGQKKLSWTFLNKTLHPGGMAEGGYFFERSWGHRGVIVHVIDPKSGTVIHSDRFDTYRSKKESERLVQYLNAVPDGRILSVAVNDEGSRNLDDMARKAMTKLGSKHFLHLGFRHPWSFLTVKGNPSSSVEDHIEYHGHRGSAAARVFKLFQTEHGEYFNVSLSSEWVQDVEWTEWFDHDKVSQTKGGEKISDLWKAHPGKICNRPIDIQATTMDGVNLSTEVVYKKGQDYRFACYDRGRACRSYRVRFLCGKPVRPKLTVTIDTNVNSTILNLEDNVQSWKPGDTLVIASTDYSMYQAEEFQVLPCRSCAPNQVKVAGKPMYLHIGEEIDGVDMRAEVGLLSRNIIVMGEMEDKCYPYRNHICNFFDFDTFGGHIKFALGFKAAHLEGTELKHMGQQLVGQYPIHFHLAGDVDERGGYDPPTYIRDLSIHHTFSRCVTVHGSNGLLIKDVVGYNSLGHCFFTEDGPEERNTFDHCLGLLVKSGTLLPSDRDSKMCKMITEDSYPGYIPKPRQDCNAVSTFWMANPNNNLINCAAAGSEETGFWFIFHHVPTGPSVGMYSPGYSEHIPLGKFYNNRAHSNYRAGMIIDNGVKTTEASAKDKRPFLSIISARYSPHQDADPLKPREPAIIRHFIAYKNQDHGAWLRGGDVWLDSCRFADNGIGLTLASGGTFPYDDGSKQEIKNSLFVGESGNVGTEMMDNRIWGPGGLDHSGRTLPIGQNFPIRGIQLYDGPINIQNCTFRKFVALEGRHTSALAFRLNNAWQSCPHNNVTGIAFEDVPITSRVFFGEPGPWFNQLDMDGDKTSVFHDVDGSVSEYPGSYLTKNDNWLVRHPDCINVPDWRGAICSGCYAQMYIQAYKTSNLRMKIIKNDFPSHPLYLEGALTRSTHYQQYQPVVTLQKGYTIHWDQTAPAELAIWLINFNKGDWIRVGLCYPRGTTFSILSDVHNRLLKQTSKTGVFVRTLQMDKVEQSYPGRSHYYWDEDSGLLFLKLKAQNEREKFAFCSMKGCERIKIKALIPKNAGVSDCTATAYPKFTERAVVDVPMPKKLFGSQLKTKDHFLEVKMESSKQHFFHLWNDFAYIEVDGKKYPSSEDGIQVVVIDGNQGRVVSHTSFRNSILQGIPWQLFNYVATIPDNSIVLMASKGRYVSRGPWTRVLEKLGADRGLKLKEQMAFVGFKGSFRPIWVTLDTEDHKAKIFQVVPIPVVKKKKL

SEQ ID NO: 469 - protein, 541 aa, Homo sapiens
MFSWMGRQAGGRERAGGADAVQTVTGGLRSLYLRKVLPLEEAYRFHEFHSPALEDADFENKPMILLVGQYSTGKTTFIRYLLEQDFPGMRIGPEPTTDSFIAVMYGETEGSTPGNALVVDPKKPFRKLSRFGNAFLNRFMCSQLPNQVLKSISVIDSPGILSGEKQRISRGYDFCQVLQWFAERVDRIILLFDAHKLDISDEFSEAIKAFRGQDDKIRVVLNKADQVDTQQLMRVYGALMWSLGKVINTPEVLRVYIGSFWAQPLQNTDNRRLFEAEAQDLFRDIQSLPQKAAVRKLNDLIKRARLAKVHAYIISYLKKEMPSVFGKENKKRELISRLPEIYIQLQREYQISAGDFPEVKAMQEQLENYDFTKFHSLKPKLIEAVDNMLSNKISPLMNLISQEETSTPTQLVQGGAFDGTTEGPFNQGYGEGAKEGADEEEWVVAKDKPVYDELFYTLSPINGKISGVNAKKEMVTSKLPNSVLGKIWKLADCDCDGMLDEEEFALAKHLIKIKLDGYELPSSLPPHLVPPSHRKSLPKAD

SEQ ID NO: 470 - protein, 395 aa, Homo sapiens
MSLVDLGKKLLEAARAGQDDEVRILMANGAPFTTDWLGTSPLHLAAQYGHYSTTEVLLRAGVSRDARTKVDRTPLHMAASEGHASIVEVLLKHGADVNAKDMLKMTALHWATEHNHQEVVELLIKYGADVHTQSKFCKTAFDISIDNGNEDLAEILQIAMQNQINTNPESPDTVTIHAATPQFIIGPGGVVNLTGLVSSENSSKATDETGVSAVQFGNSSTSVLATLAALAEASAPLSNSSETPVVATEEVVTAESVDGAIQQVVSSGGQQVITIVTDGIQLGNLHSIPTSGIGQPIIVTMPDGQQVLTVPATDIAEETVISEEPPAKRQCIEIIENRVESAEIEEREALQKQLDEANREAQKYRQQLLKKEQEAEAYRQKLEAMTRLQTNKEAV

SEQ ID NO: 471 - protein, 468 aa, Homo sapiens
MGFLGTGTWILVLVLPIQAFPKPGGSQDKSLHNRELSAERPLNEQIAEAEEDKIKKTYPPENKPGQSNYSFVDNLNLLKAITEKEKIEKERQSIRSSPLDNKLNVEDVDSTKNRKLIDDYDSTKSGLDHKFQDDPDGLHQLDGTPLTAEDIVHKIAARIYEENDRAVFDKIVSKLLNLGLITESQAHTLEDEVAEVLQKLISKEANNYEEDPNKPTSWTENQAGKIPEKVTPMAAIQDGLAKGENDETVSNTLTLTNGLERRTKTYSEDNFEELQYFPNFYALLKSIDSEKEAKEKETLITIMKTLIDFVKMMVKYGTISPEEGVSYLENLDEMIALQTKNKLEKNATDNISKLFPAPSEKSHEETDSTKEEAAKMEKEYGSLKDSTKDDNSNPGGKTDEPKGKTEAYLEAIRKNIEWLKKHDKKGNKEDYDLSKMRDFINKQADAYVEKGILDKEEAEAIKRIYSSL

SEQ ID NO: 472 - protein, 304 aa, Homo sapiens
MAVTKELLQMDLYALLGIEEKAADKEVKKAYRQKALSCHPDKNPDNPRAAELFHQLSQALEVLTDAAARAAYDKVRKAKKQAAERTQKLDEKRKKVKLDLEARERQAQAQESEEEEESRSTRTLEQEIERLREEGSRQLEEQQRLIREQIRQERDQRLRGKAENTEGQGTPKLKLKWKCKKEDESKGGYSKDVLLRLLQKYGEVLNLVLSSKKPGTAVVEFATVKAAELAVQNEVGLVDNPLKISWLEGQPQDAVGRSHSGLSKGSVLSERDYESLVMMRMRQAAERQQLIARMQQEDQEGPPT

SEQ ID NO: 473 - protein, 973 aa, Homo sapiens
MASILDEYENSLSRSAVLQPGCPSVGIPHSGYVNAQLEKEVPIFTKQRIDFTPSERITSLVVSSNQLCMSLGKDTLLRIDLGKANEPNHVELGRKDDAKVHKMFLDHTGSHLLIALSSTEVLYVNRNGQKVRPLARWKGQLVESVGWNKALGTESSTGPILVGTAQGHIFEAELSASEGGLFGPAPDLYFRPLYVLNEEGGPAPVCSLEAERGPDGRSFVIATTRQRLFQFIGRAAEGAEAQGFSGLFAAYTDHPPPFREFPSNLGYSELAFYTPKLRSAPRAFAWMMGDGVLYGALDCGRPDSLLSEERVWEYPEGVGPGASPPLAIVLTQFHFLLLLADRVEAVCTLTGQVVLRDHFLEKFGPLKHMVKDSSTGQLWAYTERAVFRYHVQREARDVWRTYLDMNRFDLAKEYCRERPDCLDTVLAREADFCFRQRRYLESARCYALTQSYFEEIALKFLEARQEEALAEFLQRKLASLKPAERTQATLLTTWLTELYLSRLGALQGDPEALTLYRETKECFRTFLSSPRHKEWLFASRASIHELLASHGDTEHMVYFAVIMQDYERVVAYHCQHEAYEEALAVLARHRDPQLFYKFSPILIRHIPRQLVDAWIEMGSRLDARQLIPALVNYSQGGEVQQVSQAIRYMEFCVNVLGETEQAIHNYLLSLYARGRPDSLLAYLEQAGASPHRVHYDLKYALRLCAEHGHHRACVHVYKVLELYEEAVDLALQVDVDLAKQCADLPEEDEELRKKLWLKIARHVVQEEEDVQTAMACLASCPLLKIEDVLPFFPDFVTIDHFKEAICSSLKAYNHHIQELQREMEEATASAQRIRRDLQELRGRYGTVEPQDKCATCDFPLLNRPFYLFLCGHMFHADCLLQAVRPGLPAYKQARLEELQRKLGAAPPPAKGSARAKEAEGGAATAGPSREQLKADLDELVAAECVYCGELMIRSIDRPFIDPQRYEEEQLSWL

SEQ ID NO: 474 - protein, 172 aa, Homo sapiens
MSVPGPSSPDGALTRPPYCLEAGEPTPGLSDTSPDEGLIEDLTIEDKAVEQLAEGLLSHYLPDLQRSKQALQELTQNQVVLLDTLEQEISKFKECHSMLDINALFAEAKHYHAKLVNIRKEMLMLHEKTSKLKKRALKLQQKRQKEELEREQQREKEFEREKQLTARPAKRM

SEQ ID NO: 475 - protein, 417 aa, Homo sapiens
MEFVKCLGHPEEFYNLVRFRIGGKRKVMPKMDQDSLSSSLKTCYKYLNQTSRSFAAVIQALDGEMRNAVCIFYLVLRALDTLEDDMTISVEKKVPLLHNFHSFLYQPDWRFMESKEKDRQVLEDFPTISLEFRNLAEKYQTVIADICRRMGIGMAEFLDKHVTSEQEWDKYCHYVAGLVGIGLSRLFSASEFEDPLVGEDTERANSMGLFLQKTNIIRDYLEDQQGGREFWPQEVWSRYVKKLGDFAKPENIDLAVQCLNELITNALHHIPDVITYLSRLRNQSVFNFCAIPQVMAIATLAACYNNQQVFKGAVKIRKGQAVTLMMDATNMPAVKAIIYQYMEEIYHRIPDSDPSSSKTRQIISTIRTQNLPNCQLISRSHYSPIYLSFVMLLAALSWQYLTTLSQVTEDYVQTGEH

SEQ ID NO: 476 - protein, 859 aa, Homo sapiens
MYSGAGPALAPPAPPPPIQGYAFKPPPRPDFGTSGRTIKLQANFFEMDIPKIDIYHYELDIKPEKCPRRVNREIVEHMVQHFKTQIFGDRKPVFDGRKNLYTAMPLPIGRDKVELEVTLPGEGKDRIFKVSIKWVSCVSLQALHDALSGRLPSVPFETIQALDVVMRHLPSMRYTPVGRSFFTASEGCSNPLGGGREVWFGFHQSVRPSLWKMMLNIDVSATAFYKAQPVIEFVCEVLDFKSIEEQQKPLTDSQRVKFTKEIKGLKVEITHCGQMKRKYRVCNVTRRPASHQTFPLQQESGQTVECTVAQYFKDRHKLVLRYPHLPCLQVGQEQKHTYLPLEVCNIVAGQRCIKKLTDNQTSTMIRATARSAPDRQEEISKLMRSASFNTDPYVREFGIMVKDEMTDVTGRVLQPPSILYGGRNKAIATPVQGVWDMRNKQFHTGIEIKVWAIACFAPQRQCTEVHLKSFTEQLRKISRDAGMPIQGQPCFCKYAQGADSVEPMFRHLKNTYAGLQLVVVILPGKTPVYAEVKRVGDTVLGMATQCVQMKNVQRTTPQTLSNLCLKINVKLGGVNNILLPQGRPPVFQQPVIFLGADVTHPPAGDGKKPSIAAVVGSMDAHPNRYCATVRVQQHRQEIIQDLAAMVRELLIQFYKSTRFKPTRIIFYRDGVSEGQFQQVLHHELLAIREACIKLEKDYQPGITFIVVQKRHHTRLFCTDKNERVGKSGNIPAGTTVDTKITHPTEFDFYLCSHAGIQGTSRPSHYHVLWDDNRFSSDELQILTYQLCHTYVRCTRSVSIPAPAYYAHLVAFRARYHLVDKEHDSAEGSHTSGQSNGRDHQALAKAVQVHQDTLRTMYFA

SEQ ID NO: 477 - protein, 2768 aa, Homo sapiens
MALVLEIFTLLASICWVSANIFEYQVDAQPLRPCELQRETAFLKQADYVPQCAEDGSFQTVQCQNDGRSCWCVGANGSEVLGSRQPGRPVACLSFCQLQKQQILLSGYINSTDTSYLPQCQDSGDYAPVQCDVQQVQCWCVDAEGMEVYGTRQLGRPKRCPRSCEIRNRRLLHGVGDKSPPQCSAEGEFMPVQCKFVNTTDMMIFDLVHSYNRFPDAFVTFSSFQRRFPEVSGYCHCADSQGRELAETGLELLLDEIYDTIFAGLDLPSTFTETTLYRILQRRFLAVQSVISGRFRCPTKCEVERFTATSFGHPYVPSCRRNGDYQAVQCQTEGPCWCVDAQGKEMHGTRQQGEPPSCAEGQSCASERQQALSRLYFGTSGYFSQHDLFSSPEKRWASPRVARFATSCPPTIKELFVDSGLLRPMVEGQSQQFSVSENLLKEAIRAIFPSRGLARLALQFTTNPKRLQQNLFGGKFLVNVGQFNLSGALGTRGTFNFSQFFQQLGLASFLNGGRQEDLAKPLSVGLDSNSSTGTPEAAKKDGTMNKPTVGSFGFEINLQENQNALKFLASLLELPEFLLFLQHAISVPEDVARDLGDVMETVLSSQTCEQTPERLFVPSCTTEGSYEDVQCFSGECWCVNSWGKELPGSRVRGGQPRCPTDCEKQRARMQSLMGSQPAGSTLFVPACTSEGHFLPVQCFNSECYCVDAEGQAIPGTRSAIGKPKKCPTPCQLQSEQAFLRTVQALLSNSSMLPTLSDTYIPQCSTDGQWRQVQCNGPPEQVFELYQRWEAQNKGQDLTPAKLLVKIMSYREAASGNFSLFIQSLYEAGQQDVFPVLSQYPSLQDVPLAALEGKRPQPRENILLEPYLFWQILNGQLSQYPGSYSDFSTPLAHFDLRNCWCVDEAGQELEGMRSEPSKLPTCPGSCEEAKLRVLQFIRETEEIVSASNSSRFPLGESFLVAKGIRLRNEDLGLPPLFPPREAFAEQFLRGSDYAIRLAAQSTLSFYQRRRFSPDDSAGASALLRSGPYMPQCDAFGSWEPVQCHAGTGHCWCVDEKGGFIPGSLTARSLQIPQCPTTCEKSRTSGLLSSWKQARSQENPSPKDLFVPACLETGEYARLQASGAGTWCVDPASGEELRPGSSSSAQCPSLCNVLKSGVLSRRVSPGYVPACRAEDGGFSPVQCDQAQGSCWCVMDSGEEVPGTRVTGGQPACESPRCPLPFNASEVVGGTILCETISGPTGSAMQQCQLLCRQGSWSVFPPGPLICSLESGRWESQLPQPRACQRPQLWQTIQTQGHFQLQLPPGKMCSADYADLLQTFQVFILDELTARGFCQIQVKTFGTLVSIPVCNNSSVQVGCLTRERLGVNVTWKSRLEDIPVASLPDLHDIERALVGKDLLGRFTDLIQSGSFQLHLDSKTFPAETIRFLQGDHFGTSPRTWFGCSEGFYQVLTSEASQDGLGCVKCPEGSYSQDEECIPCPVGFYQEQAGSLACVPCPVGRTTISAGAFSQTHCVTDCQRNEAGLQCDQNGQYRASQKDRGSGKAFCVDGEGRRLPWWETEAPLEDSQCLMMQKFEKVPESKVIFDANAPVAVRSKVPDSEFPVMQCLTDCTEDEACSFFTVSTTEPEISCDFYAWTSDNVACMTSDQKRDALGNSKATSFGSLRCQVKVRSHGQDSPAVYLKKGQGSTTTLQKRFEPTGFQNMLSGLYNPIVFSASGANLTDAHLFCLLACDRDLCCDGFVLTQVQGGAIICGLLSSPSVLLCNVKDWMDPSEAWANATCPGVTYDQESHQVILRLGDQEFIKSLTPLEGTQDTFTNFQQVYLWKDSDMGSRPESMGCRKDTVPRPASPTEAGLTTELFSPVDLNQVIVNGNQSLSSQKHWLFKHLFSAQQANLWCLSRCVQEHSFCQLAEITESASLYFTCTLYPEAQVCDDIMESNAQGCRLILPQMPKALFRKKVILEDKVKNFYTRLPFQKLMGISIRNKVPMSEKSISNGFFECERRCDADPCCTGFGFLNVSQLKGGEVTCLTLNSLGIQMCSEENGGAWRILDCGSPDIEVHTYPFGWYQKPIAQNNAPSFCPLVVLPSLTEKVSLDSWQSLALSSVVVDPSIRHFDVAHVSTAATSNFSAVRDLCLSECSQHEACLITTLQTQPGAVRCMFYADTQSCTHSLQGQNCRLLLREEATHIYRKPGISLLSYEASVPSVPISTHGRLLGRSQAIQVGTSWKQVDQFLGVPYAAPPLAERRFQAPEPLNWTGSWDASKPRASCWQPGTRTSTSPGVSEDCLYLNVFIPQNVAPNASVLVFFHNTMDREESEGWPAIDGSFLAAVGNLIVVTASYRVGVFGFLSSGSGEVSGNWGLLDQVAALTWVQTHIRGFGGDPRRVSLAADRGGADVASIHLLTARATNSQLFRRAVLMGGSALSPAAVISHERAQQQAIALAKEVSCPMSSSQEVVSCLRQKPANVLNDAQTKLLAVSGPFHYWGPVIDGHFLREPPARALKRSLWVEVDLLIGSSQDDGLINRAKAVKQFEESRGRTSSKTAFYQALQNSLGGEDSDARVEAAATWYYSLEHSTDDYASFSRALENATRDYFIICPIIDMASAWAKRARGNVFMYHAPENYGHGSLELLADVQFALGLPFYPAYEGQFSLEEKSLSLKIMQYFSHFIRSGNPNYPYEFSRKVPTFATPWPDFVPRAGGENYKEFSELLPNRQGLKKADCSFWSKYISSLKTSADGAKGGQSAESEEEELTAGSGLREDLLSLQEPGSKTYSK

SEQ ID NO: 478 - protein, 419 aa, Homo sapiens
MPGRGRCPDCGSTELVEDSHYSQSQLVCSDCGCVVTEGVLTTTFSDEGNLREVTYSRSTGENEQVSRSQQRGLRRVRDLCRVLQLPPTFEDTAVAYYQQAYRHSGIRAARLQKKEVLVGCCVLITCRQHNWPLTMGAICTLLYADLDVFSSTYMQIVKLLGLDVPSLCLAELVKTYCSSFKLFQASPSVPAKYVEDKEKMLSRTMQLVELANETWLVTGRHPLPVITAATFLAWQSLQPADRLSCSLARFCKLANVDLPYPASSRLQELLAVLLRMAEQLAWLRVLRLDKRSVVKHIGDLLQHRQSLVRSAFRDGTAEVETREKEPPGWGQGQGEGEVGNNSLGLPQGKRPASPALLLPPCMLKSPKRICPVPPVSTVTGDENISDSEIEQYLRTPQEVRDFQRAQAARQAATSVPNPP

SEQ ID NO: 479 - protein, 540 aa, Homo sapiens
MNGEAICSALPTIPYHKLADLRYLSRGASGTVSSARHADWRVQVAVKHLHIHTPLLDSERKDVLREAEILHKARFSYILPILGICNEPEFLGIVTEYMPNGSLNELLHRKTEYPDVAWPLRFRILHEIALGVNYLHNMTPPLLHHDLKTQNILLDNEFHVKIADFGLSKWRMMSLSQSRSSKSAPEGGTIIYMPPENYEPGQKSRASIKHDIYSYAVITWEVLSRKQPFEDVTNPLQIMYSVSQGHRPVINEESLPYDIPHRARMISLIESGWAQNPDERPSFLKCLIELEPVLRTFEEITFLEAVIQLKKTKLQSVSSAIHLCDKKKMELSLNIPVNHGPQEESCGSSQLHENSGSPETSRSLPAPQDNDFLSRKAQDCYFMKLHHCPGNHSWDSTISGSQRAAFCDHKTTPCSSAIINPLSTAGNSERLQPGIAQQWIQSKREDIVNQMTEACLNQSLDALLSRDLIMKEDYELVSTKPTRTSKVRQLLDTTDIQGEEFAKVIVQKLKDNKQMGLQPYPEILVVSRSPSLNLLQNKSM

SEQ ID NO: 480 - protein, 472 aa, Homo sapiens
MKFLIFAFFGGVHLLSLCSGKAICKNGISKRTFEEIKEEIASCGDVAKAIINLAVYGKAQNRSYERLALLVDTVGPRLSGSKNLEKAIQIMYQNLQQDGLEKVHLEPVRIPHWERGEESAVMLEPRIHKIAILGLGSSIGTPPEGITAEVLVVTSFDELQRRASEARGKIVVYNQPYINYSRTVQYRTQGAVEAAKVGALASLIRSVASFSIYSPHTGIQEYQDGVPKIPTACITVEDAEMMSRMASHGIKIVIQLKMGAKTYPDTDSFNTVAEITGSKYPEQVVLVSGHLDSWDVGQGAMDDGGGAFISWEALSLIKDLGLRPKRTLRLVLWTAEEQGGVGAFQYYQLHKVNISNYSLVMESDAGTFLPTGLQFTGSEKARAIMEEVMSLLQPLNITQVLSHGEGTDINFWIQAGVPGASLLDDLYKYFFFHHSHGDTMTVMDPKQMNVAAAVWAVVSYVVADMEEMLPRS

SEQ ID NO: 481 - protein, 335 aa, Homo sapiens
MKLPARVFFTLGSRLPCGLAPRRFFSYGTKILYQNTEALQSKFFSPLQKAMLPPNSFQGKVAFITGGGTGLGKGMTTLLSSLGAQCVIASRKMDVLKATAEQISSQTGNKVHAIQCDVRDPDMVQNTVSELIKVAGHPNIVINNAAGNFISPTERLSPNAWKTITDIVLNGTAFVTLEIGKQLIKAQKGAAFLSITTIYAETGSGFVVPSASAKAGVEAMSKSLAAEWGKYGMRFNVIQPGPIKTKGAFSRLDPTGTFEKEMIGRIPCGRLGTVEELANLAAFLCSDYASWINGAVIKFDGGEEVLISGEFNDLRKVTKEQWDTIEELIRKTKGS

SEQ ID NO: 482 - protein, 314 aa, Homo sapiens
MGIGRSEGGRRGAALGVLLALGAALLAVGSASEYDYVSFQSDIGPYQSGRFYTKPPQCVDIPADLRLCHNVGYKKMVLPNLLEHETMAEVKQQASSWVPLLNKNCHAGTQVFLCSLFAPVCLDRPIYPCRWLCEAVRDSCEPVMQFFGFYWPEMLKCDKFPEGDVCIAMTPPNATEASKPQGTTVCPPCDNELKSEAIIEHLCASEFALRMKIKEVKKENGDKKIVPKKKKPLKLGPIKKKDLKKLVLYLKNGADCPCHQLDNLSHHFLIMGRKVKSQYLLTAIHKWDKKNKEFKNFMKKMKNHECPTFQSVFK

SEQ ID NO: 483 - protein, 562 aa, Homo sapiens
MDAMKRGLCCVLLLCGAVFVSPSQEIHARFRRGARSYQVICRDEKTQMIYQQHQSWLRPVLRSNRVEYCWCNSGRAQCHSVPVKSCSEPRCFNGGTCQQALYFSDFVCQCPEGFAGKCCEIDTRATCYEDQGISYRGTWSTAESGAECTNWNSSALAQKPYSGRRPDAIRLGLGNHNYCRNPDRDSKPWCYVFKAGKYSSEFCSTPACSEGNSDCYFGNGSAYRGTHSLTESGASCLPWNSMILIGKVYTAQNPSAQALGLGKHNYCRNPDGDAKPWCHVLKNRRLTWEYCDVPSCSTCGLRQYSQPQFRIKGGLFADIASHPWQAAIFAKHRRSPGERFLCGGILISSCWILSAAHCFQERFPPHHLTVILGRTYRVVPGEEEQKFEVEKYIVHKEFDDDTYDNDIALLQLKSDSSRCAQESSVVRTVCLPPADLQLPDWTECELSGYGKHEALSPFYSERLKEAHVRLYPSSRCTSQHLLNRTVTDNMLCAGDTRSGGPQANLHDACQGDSGGPLVCLNDGRMTLVGIISWGLGCGQKDVPGVYTKVTNYLDWIRDNMRP

SEQ ID NO: 484 - protein, 224 aa, Homo sapiens
MVAAVLLGLSWLCSPLGALVLDFNNIRSSADLHGARKGSQCLSDTDCNTRKFCLQPRDEKPFCATCRGLRRRCQRDAMCCPGTLCVNDVCTTMEDATPILERQLDEQDGTHAEGTTGHPVQENQPKRKPSIKKSQGRKGQEGESCLRTFDCGPGLCCARHFWTKICKPVLLEGQVCSRRGHKDTAQAPEIFQRCDCGPGLLCRSQLTSNRQHARLRVCQKIEKL

SEQ ID NO: 485 - protein, 358 aa, Homo sapiens
MAERQEEQRGSPPLRAEGKADAEVKLILYHWTHSFSSQKVRLVIAEKALKCEEHDVSLPLSEHNEPWFMRLNSTGEVPVLIHGENIICEATQIIDYLEQTFLDERTPRLMPDKESMYYPRVQHYRELLDSLPMDAYTHGCILHPELTVDSMIPAYATTRIRSQIGNTESELKKLAEENPDLQEAYIAKQKRLKSKLLDHDNVKYLKKILDELEKVLDQVETELQRRNEETPEEGQQPWLCGESFTLADVSLAVTLHRLKFLGFARRNWGNGKRPNLETYYERVLKRKTFNKVLGHVNNILISAVLPTAFRVAKKRAPKVLGTTLVVGLLAGVGYFAFMLFRKRLGSMILAFRPRPNYF

SEQ ID NO: 486 - protein, 991 aa, Homo sapiens
MSKKPPNRPGITFEIGARLEALDYLQKWYPSRIEKIDYEEGKMLVHFERWSHRYDEWIYWDSNRLRPLERPALRKEGLKDEEDFFDFKAGEEVLARWTDCRYYPAKIEAINKEGTFTVQFYDGVIRCLKRMHIKAMPEDAKGQDWIALVKAAAAAAAKNKTGSKPRTSANSNKDKDKDERKWFKVPSKKEETSTCIATPDVEKKEDLPTSSETFGLHVENVPKMVFPQPESTLSNKRKNNQGNSFQAKRARLNKITGLLASKAVGVDGAEKKEDYNETAPMLEQAISPKPQSQKKNEADISSSANTQKPALLSSTLSSGKARSKKCKHESGDSSGCIKPPKSPLSPELIQVEDLTLVSQLSSSVINKTSPPQPVNPPRPFKHSERRRRSQRLATLPMPDDSVEKVSSPSPATDGKVFSISSQNQQESSVPEVPDVAHLPLEKLGPCLPLDLSRGSEVTAPVASDSSYRNECPRAEKEDTQMLPNPSSKAIADGRGAPAAAGISKTEKKVKLEDKSSTAFGKRKEKDKERREKRDKDHYRPKQKKKKKKKKKSKQHDYSDYEDSSLEFLERCSSPLTRSSGSSLASRSMFTEKTTTYQYPRAILSVDLSGENLSDVDFLDDSSTESLLLSGDEYNQDFDSTNFEESQDEDDALNEIVRCICEMDEENGFMIQCEECLCWQHSVCMGLLEESIPEQYICYICRDPPGQRWSAKYRYDKEWLNNGRMCGLSFFKENYSHLNAKKIVSTHHLLADVYGVTEVLHGLQLKIGILKNKHHPDLHLWACSGKRKDQDQIIAGVEKKIAQDTVNREEKKYVQNHKEPPRLPLKMEGTYITSEHSYQKPQSFGQDCKSLADPGSSDDDDVSSLEEEQEFHMRSKNSLQYSAKEHGMPEKNPAEGNTVFVYNDKKGTEDPGDSHLQWQLNLLTHIENVQNEVTSRMDLIEKEVDVLESWLDFTGELEPPDPLARLPQLKRHIKQLLIDMGKVQQIATLCSV

SEQ ID NO: 487 - protein, 445 aa, Homo sapiens
MAEYDLTTRIAHFLDRHLVFPLLEFLSVKEIYNEKELLQGKLDLLSDTNMVDFAMDVYKNLYSDDIPHALREKRTTVVAQLKQLQAETEPIVKMFEDPETTRQMQSTRDGRMLFDYLADKHGFRQEYLDTLYRYAKFQYECGNYSGAAEYLYFFRVLVPATDRNALSSLWGKLASEILMQNWDAAMEDLTRLKETIDNNSVSSPLQSLQQRTWLIHWSLFVFFNHPKGRDNIIDLFLYQPQYLNAIQTMCPHILRYLTTAVITNKDVRKRRQVLKDLVKVIQQESYTYKDPITEFVECLYVNFDFDGAQKKLRECESVLVNDFFLVACLEDFIENARLFIFETFCRIHQCISINMLADKLNMTPEEAERWIVNLIRNARLDAKIDSKLGHVVMGNNAVSPYQQVIEKTKSLSFRSQMLAMNIEKKLNQNSRSEAPNWATQDSGFY

SEQ ID NO: 488 - protein, 297 aa, Homo sapiens
MAKVSELYDVTWEEMRDKMRKWREENSRNSEQIVEVGEELINEYASKLGDDIWIIYEQVMIAALDYGRDDLALFCLQELRRQFPGSHRVKRLTGMRFEAMERYDDAIQLYDRILQEDPTNTAARKRKIAIRKAQGKNVEAIRELNEYLEQFVGDQEAWHELAELYINEHDYAKAAFCLEELMMTNPHNHLYCQQYAEVKYTQGGLENLELSRKYFAQALKLNNRNMRALFGLYMSASHIASNPKASAKTKKDNMKYASWAASQINRAYQFAGRSKKETKYSLKAVEDMLETLQITQS

SEQ ID NO: 489 - protein, 280 aa, Homo sapiens
MRWFLPWTLAAVTAAAASTVLATALSPAPTTMDFTPAPLEDTSSRPQFCKWPCECPPSPPRCPLGVSLITDGCECCKMCAQQLGDNCTEAAICDPHRGLYCDYSGDRPRYAIGVCAHAVGEVEAWHRNCIAYTSPWSPCSTSCGLGVSTRISNVNAQCWPEQESRLCNLRPCDVDIHTLIKAGKKCLAVYQPEASMNFTLAGCISTRSYQPKYCGVCMDNRCCIPYKSKTIDVSFQCPDGLGFSRQVLWINACFCNLSCRNPNDIFADLESYPDFSEIAN

SEQ ID NO: 490 - protein, 179 aa, Homo sapiens
MAKTAMAYKEKMKELSMLSLICSCFYPEPRNINIYTYDDMEVKQINKRASGQAFELILKPPSPISEAPRTLASPKKKDLSLEEIQKKLEAAEERRKSQEAQVLKQLAEKREHEREVLQKALEENNNFSKMAEEKLILKMEQIKENREANLAAIIERLQEKERHAAEVRRNKELQVELSG

SEQ ID NO: 491 - protein, 131 aa, Homo sapiens
MADVVVGKDKGGEQRLISLPLSRIRVIMKSSPEVSSINQEALVLTAKATELFVQCLATYSYRHGSGKEKKVLTYSDLANTAQQSETFQFLADILPKKILASKYLKMLKEEKREEDEENDNDNESDHDEADS

SEQ ID NO: 492 - protein, 193 aa, Homo sapiens [sequence omitted]

SEQ ID NO: 493 - protein, 158 aa, Homo sapiens
MLLFALLLAMELPLVAASATMRAQWTYSLRCHDCAVINDFNCPNIRVCPYHIRRCMTISIRINSRELLVYKNCTNNCTFVYAAEQPPEAPGKIFKTNSFYWVCCCNSMVCNAGGPTNLERDMLPDEVTEEELPEGTVRLGVSKLLLSFASIIVSNILP

SEQ ID NO: 494 - protein, 2798 aa, Homo sapiens
MTSIHFVVHPLPGTEDQLNDRLREVSEKLNKYNLNSHPPLNVLEQATIKQCVVGPNHAAFLLEDGRVCRIGFSVQPDRLELGKPDNNDGSKLNSNSGAGRTSRPGRTSDSPWFLSGSETLGRLAGNTLGSRWSSGVGGSGGGSSGRSSAGARDSRRQTRVIRTGRDRGSGLLGSQPQPVIPASVIPEELISQAQVVLQGKSRSVIIRELQRTNLDVNLAVNNLLSRDDEDGDDGDDTASESYLPGEDLMSLLDADIHSAHPSVIIDADAMFSEDISYFGYPSFRRSSLSRLGSSRVLLLPLERDSELLRERESVLRLRERRWLDGASFDNERGSTSKEGEPNLDKKNTPVQSPVSLGEDLQWWPDKDGTKFICIGALYSELLAVSSKGELYQWKWSESEPYRNAQNPSLHHPRATFLGLTNEKIVLLSANSIRATVATENNKVATWVDETLSSVASKLEHTAQTYSELQGERIVSLHCCALYTCAQLENSLYWWGVVPFSQRKKMLEKARAKNKKPKSSAGISSMPNITVGTQVCLRNNPLYHAGAVAFSISAGIPKVGVLMESVWNMNDSCRFQLRSPESLKNMEKASKTTEAKPESKQEPVKTEMGPPPSPASTCSDASSIASSASMPYKRRRSTPAPKEEEKVNEEQWSLREVVFVEDVKNVPVGKVLKVDGAYVAVKFPGTSSNTNCQNSSGPDADPSSLLQDCRLLRIDELQVVKTGGTPKVPDCFQRTPKKLCIPEKTEILAVNVDSKGVHAVLKTGNWVRYCIFDLATGKAEQENNFPTSSIAFLGQNERNVAIFTAGQESPIILRDGNGTIYPMAKDCMGGIRDPDWLDLPPISSLGMGVHSLINLPANSTIKKKAAVIIMAVEKQTLMQHILRCDYEACRQYLMNLEQAVVLEQNLQMLQTFISHRCDGNRNILHACVSVCFPTSNKETKEEEEAERSERNTFAERLSAVEAIANAISVVSSNGPGNRAGSSSSRSLRLREMMRRSLRAAGLGRHEAGASSSDHQDPVSPPIAPPSWVPDPPAMDPDGDIDFILAPAVGSLTTAATGTGQGPSTSTIPGPSTEPSVVESKDRKANAHFILKLLCDSVVLQPYLRELLSAKDARGMTPFMSAVSGRAYPAAITILETAQKIAKAEISSSEKEEDVFMGMVCPSGTNPDDSPLYVLCCNDTCSFTWTGAEHINQDIFECRTCGLLESLCCCTECARVCHKGHDCKLKRTSPTAYCDCWEKCKCKTLIAGQKSARLDLLYRLLTATNLVTLPNSRGEHLLLFLVQTVARQTVEHCQYRPPRIREDRNRKTASPEDSDMPDHDLEPPRFAQLALERVLQDWNALKSMIMFGSQENKDPLSASSRIGHLLPEEQVYLNQQSGTIRLDCFTHCLIVKCTADILLLDTLLGTLVKELQNKYTPGRREEAIAVTMRFLRSVARVFVILSVEMASSKKKNNFIPQPIGKCKRVFQALLPYAVEELCNVAESLIVPVRMGIARPTAPFTLASTSIDAMQGSEELFSVEPLPPRPSSDQSSSSSQSQSSYIIRNPQQRRISQSQPVRGRDEEQDDIVSADVEEVEVVEGVAGEEDHHDEQEEHGEENAEAEGQHDEHDEDGSDMELDLLAAAETESDSESNHSNQDNASGRRSVVTAATAGSEAGASSVPAFFSEDDSQSNDSSDSDSSSSQSDDIEQETFMLDEPLERTTNSSHANGAAQAPRSMQWAVRNTQHQRAASTAPSSTSTPAASSAGLIYIDPSNLRRSGTISTSAAAAAAALEASNASSYLTSASSLARAYSIVIRQISDLMGLIPKYNHLVYSQIPAAVKLTYQDAVNLQNYVEEKLIPTWNWMVSIMDSTEAQLRYGSALASAGDPGHPNHPLHASQNSARRERMTAREEASLRTLEGRRRATLLSARQGMMSARGDFLNYALSLMRSHNDEHSDVLPVLDVCSLKHVAYVFQALIYWIKAMNQQTTLDTPQLERKRTRELLELGIDNEDSEHENDDDTNQSATLNDKDDDSLPAETGQNHPFFRRSDSMTFLGCIPPNPFEVPLAEAIPLADQPHLLQPNARKEDLFGRPSQGLYSSSASSGKCLMEVTVDRNCLEVLPTKMSYAANLKNVMNMQNRQKKEGEEQPVLPEETESSKPGPSAHDLAAQLKSSLLAEIGLTESEGPPLTSFRPQCSFMGMVISHDMLLGRWRLSLELFGRVFMEDVGAEPGSILTELGGFEVKESKFRREMEKLRNQQSRDLSLEVDRDRDLLIQQTMRQLNNHFGRRCATTPMAVHRVKVTFKDEPGEGSGVARSFYTAIAQAFLSNEKLPNLECIQNANKGTHTSLMQRLRNRGERDREREREREMRRSSGLRAGSRRDRDRDFRRQLSIDTRPFRPASEGNPSDDPEPLPAHRQALGERLYPRVQAMQPAFASKITGMLLELSPAQLLLLLASEDSLRARVDEAMELIIAHGRENGADSILDLGLVDSSEKVQENRKRHGSSRSVVDMDLDDTDDGDDNAPLFYQPGKRGFYTPRPGKNTEARLNCFRNIGRILGLCLLQNELCPITLNRHVIKVLLGRKVNWHDFAFFDPVMYESLRQLILASQSSDADAVFSAMDLAFAIDLCKEEGGGQVELIPNGVNIPVTPQNVYEYVRKYAEHRMLVVAEQPLHAMRKGLLDVLPKNSLEDLTAEDFRLLVNGCGEVNVQMLISFTSFNDESGENAEKLLQFKRWFWSIVEKMSMTERQDLVYFWTSSPSLPASEEGFQPMPSITIRPPDDQHLPTANTCISRLYVPLYSSKQILKQKLLLAIKTKNFGFV

SEQ ID NO: 495 - protein, 549 aa, Homo sapiens
MEFAELIKTPRVDNVVLHRPFYPAVEGTLCLTGHHLILSSRQDNTEELWLLHSNIDAIDKRFVGSLGTIIIKCKDFRIIQLDIPGMEECLNIASSIEALSTLDSITLMYPFFYRPMFEVIEDGWHSFLPEQEFELYSSATSEWRLSYVNKEFAVCPSYPPIVTVPKSIDDEALRKVATFRHGGRFPVLSYYHKKNGMVIMRSGQPLTGTNGRRCKEDEKLINATLRAGKRGYIIDTRSLNVAQQTRAKGGGFEQEAHYPQWRRIHKSIERYHILQESLIKLVEACNDQTHNMDRWLSKLEASNWLTHIKEILTTACLAAQCIDREGASILIHGTEGTDSTLQVTSLAQIILEPRSRTIRGFEALIEREWLQAGHPFQQRCAQSAYCNTKQKWEAPVFLLFLDCVWQILRQFPCSFEFNENFLIMLFEHAYASQFGTFLGNNESERCKLKLQQKTMSLWSWVNQPSELSKFTNPLFEANNLVIWPSVAPQSLPLWEGIFLRWNRSSKYLDEAYEEMVNIIEYNKELQAKVNILRRQLAELETEDGMQESP

SEQ ID NO: 496 - protein, 190 aa, Homo sapiens
MAEKTQKSVKIAPGAVVCVESEIRGDVTIGPRTVIHPKARIIAEAGPIVIGEGNLIEEQALIINAYPDNITPDTEDPEPKPMIIGTNNVFEVGCYSQAMKMGDNNVIESKAYVGRNVILTSGCIIGACCNLNTFEVIPENTVIYGADCLRRVQTERPQPQTLQLDFLMKILPNYHHLKKTMKGSSTPVKN

SEQ ID NO: 497 - protein, 522 aa, Homo sapiens
MALLPRALSAGAGPSWRRAARAFRGFLLLLPEPAALTRALSRAMACRQEPQPQGPPPAAGAVASYDYLVIGGGSGGLASARRAAELGARAAVVESHKLGGTCVNVGCVPKKVMWNTAVHSEFMHDHADYGFPSCEGKFNWRVIKEKRDAYVSRLNAIYQNNLTKSHIEIIRGHAAFTSDPKPTIEVSGKKYTAPHILIATGGMPSTPHESQIPGASLGITSDGFFQLEELPGRSVIVGAGYIAVEMAGILSALGSKTSLMIRHDKVLRSFDSMISTNCTEELENAGVEVLKFSQVKEVKKTLSGLEVSMVTAVPGRLPVMTMIPDVDCLLWAIGRVPNTKDLSLNKLGIQTDDKGHIIVDEFQNTNVKGIYAVGDVCGKALLTPVAIAAGRKLAHRLFEYKEDSKLDYNNIPTVVFSHPPIGTVGLTEDEAIHKYGIENVKTYSTSFTPMYHAVTKRKTKCVMKMVCANKEEKVVGIHMQGLGCDEMLQGFAVAVKMGATKADFDNTVAIHPTSSEELVTLR

SEQ ID NO: 498 - protein, 309 aa, Homo sapiens
MDDKAFTKELDQWVEQLNECKQLNENQVRTLCEKAKEILTKESNVQEVRCPVTVCGDVHGQFHDLMELFRIGGKSPDTNYLFMGDYVDRGYYSVETVTLLVALKVRYPERITILRGNHESRQITQVYGFYDECLRKYGNANVWKYFTDLFDYLPLTALVDGQIFCLHGGLSPSIDTLDHIRALDRLQEVPHEGPMCDLLWSDPDDRGGWGISPRGAGYTFGQDISETFNHANGLTLVSRAHQLVMEGYNWCHDRNVVTIFSAPNYCYRCGNQAAIMELDDTLKYSFLQFDPAPRRGEPHVTRRTPDYFL

SEQ ID NO: 499 - protein, 235 aa, Homo sapiens
MEEETHTDAKIRAENGTGSSPRGPGCSLRHFACEQNLLSRPDGSASFLQGDTSVLAGVYGPAEVKVSKEIFNKATLEVILRPKIGLPGVAEKSRERLIRNTCEAVVLGTLHPRTSITVVLQVVSDAGSLLACCLNAACMALVDAGVPMRALFCGVACALDSDGTLVLDPTSKQEKEARAVLTFALDSVERKLLMSSTKGLYSDTELQQCLAAAQAASQHVFRFYRESLQRRYSKS

SEQ ID NO: 500 - protein, 1327 aa, Homo sapiens
MEAPLQTGMVLGVMIGAGVAVVVTAVLILLVVRRLRVPKTPAPDGPRYRFRKRDKVLFYGRKIMRKVSQSTSSLVDTSVSATSRPRMRKKLKMLNIAKKILRIQKETPTLQRKEPPPAVLEADLTEGDLANSHLPSEVLYMLKNVRVLGHFEKPLFLELCRHMVFQRLGQGDYVFRPGQPDASIYVVQDGLLELCLPGPDGKECVVKEVVPGDSVNSLLSILDVITGHQHPQRTVSARAARDSTVLRLPVEAFSAVFTKYPESLVRVVQIIMVRLQRVTFLALHNYLGLTNELFSHEIQPLRLFPSPGLPTRTSPVRGSKRMVSTSATDEPRETPGRPPDPTGAPLPGPTGDPVKPTSLETPSAPLLSRCVSMPGDISGLQGGPRSDFDMAYERGRISVSLQEEASGGSLAAPARTPTQEPREQPAGACEYSYCEDESATGGCPFGPYQGRQTSSIFEAAKQELAKLMRIEDPSLLNSRVLLHHAKAGTIIARQGDQDVSLHFVLWGCLHVYQRMIDKAEDVCLFVAQPGELVGQLAVLTGEPLIFTLRAQRDCTFLRISKSDFYEIMRAQPSVVLSAAHTVAARMSPFVRQMDFAIDWTAVEAGRALYRQGDRSDCTYIVLNGRLRSVIQRGSGKKELVGEYGRGDLIGVVEALTRQPRATTVHAVRDTELAKLPEGTLGHIKRRYPQVVTRLIHLLSQKILGNLQQLQGPFPAGSGLGVPPHSELTNPASNLATVAILPVCAEVPMVAFTLELQHALQAIGPTLLLNSDIIRARLGASALDSIQEFRLSGWLAQQEDAHRIVLYQTDASLTPWTVRCLRQADCILIVGLGDQEPTLGQLEQMLENTAVRALKQLVLLHREEGAGPTRTVEWLNMRSWCSGHLHLRCPRRLFSRRSPAKLHELYEKVFSRRADRHSDFSRLARVLTGNTIALVLGGGGARGCSHIGVLKALEEAGVPVDLVGGTSIGSFIGALYAEERSASRTKQRAREWAKSMTSVLEPVLDLTYPVTSMFTGSAFNRSIHRVFQDKQIEDLWLPYFNVTTDITASAMRVHKDGSLWRYVRASMTLSGYLPPLCDPKDGHLLMDGGYINNLPADIARSMGAKTVIAIDVGSQDETDLSTYGDSLSGWWLLWKRLNPWADKVKVPDMAEIQSRLAYVSCVRQLEVVKSSSYCEYLRPPIDCFKTMDFGKFDQIYDVGYQYGKAVFGGWSRGNVIEKMLTDRRSTDLNESRRADVLAFPSSGFTDLAEIVSRIEPPTSYVSDGCADGEESDCLTEYEEDAGPDCSRDEGGSPEGASPSTASEMEEEKSILRQRRCLPQEPPGSATDA

SEQ ID NO: 501 - protein, 290 aa, Homo sapiens
MGHPPLLPLLLLLHTCVPASWGLRCMQCKTNGDCRVEECALGQDLCRTTIVRLWEEGEELELVEKSCTHSEKTNRTLSYRTGLKITSLTEVVCGLDLCNQGNSGRAVTYSRSRYLECISCGSSDMSCERGRHQSLQCRSPEEQCLDVVTHWIQEGEEVLELENLPQNGRQCYSCKGNSTHGCSSEETFLIDCRGPMNQCLVATGTHEPKNQSYMVRGCATASMCQHAHLGDAFSMNHIDVSCCTKSGCNHPDLDVQYRSGAAPQPGPAHLSLTITLLMTARLWGGTLLWT

SEQ ID NO: 502 - protein, 531 aa, Homo sapiens
MAPTIQTQAQREDGHRPNSHRTLPERSGVVCRVKYCNSLPDIPFDPKFITYPFDQNRFVQYKATSLEKQHKHDLLTEPDLGVTIDLINPDTYRIDPNVLLDPADEKLLEEEIQAPTSSKRSQQHAKVVPWMRKTEYISTEFNRYGISNEKPEVKIGVSVKQQFTEEEIYKDRDSQITAIEKTFEDAQKSISQHYSKPRVTPVEVMPVFPDFKMWINPCAQVIFDSDPAPKDTSGAAALEMMSQAMIRGMMDEEGNQFVAYFLPVEETLKKRKRDQEEEMDYAPDDVYDYKIAREYNWNVKNKASKGYEENYFFIFREGDGVYYNELETRVRLSKRRAKAGVQSGTNALLVVKHRDMNEKELEAQEARKAQLENHEPEEEEEEEMETEEKEAGGSDEEQEKGSSSEKEGSEDEHSGSESEREEGDRDEASDKSGSGEDESSEDEARAARDKEEIFGSDADSEDDADSDDEDRGQAQGGSDNDSDSGSNGGGQRSRSHSRSASPFPSGSEHSAQEDGSEAAASDSSEADSDSD

SEQ ID NO: 503 - protein, 692 aa, Homo sapiens
MRACAGSTREAGSGAQDLSTLLCLEESMEEQDEKPPEPPKVCAQDSFLPQEIIIKVEGEDTGSLTIPSQEGVNFKIVTVDFTREEQGTCNPAQRTLDRDVILENHRDLVSWDLATAVGKKDSTSKQRIFDEEPANGVKIERFTRDDPWLSSCEEVDDCKDQLEKQQEKQEILLQEVAFTQRKAVIHERVCKSDETGEKSGLNSSLFSSPVIPIRNHFHKHVSHAKKWHLNAAVNSHQKINENETLYENNECGKPPQSIHLIQFTRTQTKDKSYGFSDRIQSFCHGTPLHIHEKIHGGGKTFDFKECGQVLNPKISHNEQQRIPFEESQYKCSETSHSSSLTQNMRNNSEEKPFECNQCGKSFSWSSHLVAHQRTHTGEKPYECSECGKSFSRSSHLVSHQRTHTGEKPYRCNQCGKSFSQSYVLVVHQRTHTGEKPYECNQCGKSFRQSYKLIAHQRTHTGEKPYECNQCGKSFIQSYKLIAHQRIHTGEKPYECNQCGKSFSQSYKLVAHQRTHTGEKPFECNQCGKSFSWSSQLVAHQRTHTGEKPYECSECGKSFNRSSHLVMHQRIHTGEKPYECNQCGKSFSQSYVLVVHQRTHTGEKPYECSQCGKSFRQSSCLTQHQRTHTGEKPFECNQCGKTFSLSARLIVHQRTHTGEKPFTCIQCGKAFINSYKLIRHQATHTEEKLYECN

SEQ ID NO: 504 - protein, 328 aa, Homo sapiens
MAAGIVASRRLRDLLTRRLTGSNYPGLSISLRLTGSSAQEEASGVALGEAPDHSYESLRVTSAQKHVLHVQLNRPNKRNAMNKVFWREMVECFNKISRDADCRAVVISGAGKMFTAGIDLMDMASDILQPKGDDVARISWYLRDIITRYQETFNVIERCPKPVIAAVHGGCIGGGVDLVTACDIRYCAQDAFFQVKEVDVGLAADVGTLQRLPKVIGNQSLVNELAFTARKMMADEALGSGLVSRVFPDKEVMLDAALALAAEISSKSPVAVQSTKVNLLYSRDHSVAESLNYVASWNMSMLQTQDLVKSVQATTENKELKTVTFSKL

SEQ ID NO: 505 - protein, 589 aa, Homo sapiens
MSRRLLPRAEKRRRRLEQRQQPDEQRRRSGAMVKMAAAGGGGGGGRYYGGGSEGGRAPKRLKTDNAGDQHGGGGGGGGGAGAAGGGGGGENYDDPHKTPASPVVHIRGLIDGVVEADLVEALQEFGPISYVVVMPKKRQALVEFEDVLGACNAVNYAADNQIYIAGHPAFVNYSTSQKISRPGDSDDSRSVNSVLLFTILNPIYSITTDVLYTICNPCGPVQRIVIFRKNGVQAMVEFDSVQSAQRAKASLNGADIYSGCCTLKIEYAKPTRLNVFKNDQDTWDYTNPNLSGQGDPGSNPNKRQRQPPLLGDHPAEYGGPHGGYHSHYHDEGYGPPPPHYEGRRMGPPVGGHRRGPSRYGPQYGHPPPPPPPPEYGPHADSPVLMVYGLDQSKMNCDRVFNVFCLYGNVEKVKFMKSKPGAAMVEMADGYAVDRAITHLNNNFMFGQKLNVCVSKQPAIMPGQSYGLEDGSCSYKDFSESRNNRFSTPEQAAKNRIQHPSNVLHFFNAPLEVTEENFFEICDELGVKRPSSVKVFSGKSERSSSGLLEWESKSDALETLGFLNHYQMKNPNGPYPYTLKLCFSTAQHAS

SEQ ID NO: 506 - protein, 518 aa, Homo sapiens
MAASMARRLWPLLTRRGFRPRGGCISNDSPRRSFTTEKRNRNLLYEYAREGYSALPQLDIERFCACPEEAAHALELRKGELRSADLPAIISTWQELRQLQEQIRSLEEEKAAVTEAVRALLANQDSGEVQQDPKYQGLRARGREIRKELVHLYPREAQLEEQFYLQALKLPNQTHPDVPVGDESQARVLHMVGDKPVFSFQPRGHLEIGEKLDIIRQKRLSHVSGHRSYYLRGAGALLQHGLVNFTFNKLLRRGFTPMTVPDLLRGAVFEGCGMTPNANPSQIYNIDPARFKDLNLAGTAEVGLAGYFMDHTVAFRDLPVRMVCSSTCYRAETNTGQEPRGLYRVHHFTKVEMFGVTGPGLEQSSQLLEEFLSLQMEILTELGLHFRVLDMPTQELGLPAYRKFDIEAWMPGRGRFGEVTSASNCTDFQSRRLHIMFQTEAGELQFAHTVNATACAVPRLLIALLESNQQKDGSVLVPPALQSYLGTDRITAPTHVPLQYIGPNQPRKPGLPGQPAVS

SEQ ID NO: 507 - protein, 428 aa, Homo sapiens
MTQFLPPNLLALFAPRDPIPYLPPLEKLPHEKHHNQPYCGIAPYIREFEDPRDAPPPTRAETREERMERKRREKIERRQQEVETELKMWDPHNDPNAQGDAFKTLFVARVNYDTTESKLRREFEVYGPIKRIHMVYSKRSGKPRGYAFIEYEHERDMHSAYKHADGKKIDGRRVLVDVERGRTVKGWRPRRLGGGLGGTRRGGADVNIRHSGRDDTSRYDERDRDRDRERERRERSRERDKERERRRSRSRDRRRRSRSRDKEERRRSRERSKDKDRDRKRRSSRSRERARRERERKEELRGGGGDMAEPSEAGDAPPDDGPPGELGPDGPDGPEEKGRDRDRERRRSHRSERERRRDRDRDRDRDREHKRGERGSERGRDEARGGGGGQDNGLEGLGNDSRDMYMESEGGDGYLAPENGYLMEAAPE

SEQ ID NO: 508 - protein, 579 aa, Homo sapiens
MLRSGPASGPSVPTGRAMPSRRVARPPAAPELGALGSPDLSSLSLAVSRSTDELEIIDEYIKENGFGLDGGQPGPGEGLPRLVSRGAASLSTVTLGPVAPPATPPPWGCPLGRLVSPAPGPGPQPHLVITEQPKQRGMRFRYECEGRSAGSILGESSTEASKTLPAIELRDCGGLREVEVTACLVWKDWPHRVHPHSLVGKDCTDGICRVRLRPHVSPRHSFNNLGIQCVRKKEIEAAIERKIQLGIDPYNAGSLKNHQEVDMNVVRICFQASYRDQQGQMRRMDPVLSEPVYDKKSTNTSELRICRINKESGPCTGGEELYLLCDKVQKEDISVVFSRASWEGRADFSQADVHRQIAIVFKTPPYEDLEIVEPVTVNVFLQRLTDGVCSEPLPFTYLPRDHDSYGVDKKRKRGMPDVLGELNSSDPHGIESKRRKKKPAILDHFLPNHGSGPFLPPSALLPDPDFFSGTVSLPGLEPPGGPDLLDDGFAYDPTAPTLFTMLDLLPPAPPHASAVVCSGGAGAVVGETPGPEPLTLDSYQAPGPGDGGTASLVGSNMFPNHYREAAFGGGLLSPGPEAT

SEQ ID NO: 509 - protein, 691 aa, Homo sapiens
MEIAPQEAPPVPGADGDIEEAPAEAGSPSPASPPADGRLKAAAKRVTFPSDEDIVSGAVEPKDPWRHAQNVTVDEVIGAYKQACQKLNCRQIPKLLRQLQEFTDLGHRLDCLDLKGEKLDYKTCEALEEVFKRLQFKVVDLEQTNLDEDGASALFDMIEYYESATHLNISFNKHIGTRGWQAAAHMMRKTSCLQYLDARNTPLLDHSAPFVARALRIRSSLAVLHLENASLSGRPLMLLATALKMNMNLRELYLADNKLNGLQDSAQLGNLLKFNCSLQILDLRNNHVLDSGLAYICEGLKEQRKGLVTLVLWNNQLTHTGMAFLGMTLPHTQSLETLNLGHNPIGNEGVRHLKNGLISNRSVLRLGLASTKLTCEGAVAVAEFIAESPRLLRLDLRENEIKTGGLMALSLALKVNHSLLRLDLDREPKKEAVKSFIETQKALLAEIQNGCKRNLVLAREREEKEQPPQLSASMPETTATEPQPDDEPAAGVQNGAPSPAPSPDSDSDSDSDGEEEEEEEGERDETPCPALVPPTDSLGPGDRSPPGSPSTPTEQRISVSSPGRGHKVFVVTRVESPPERAEPPASPTPPSPPPPPSPPASPSLPPAGAIDTRDTGSSEPQPPPEPPRSGPPLPNGLKPEFALALPPEPPPGPEVKGGSCGLEHELSCSKNEKELEELLLEASQESGQETL

SEQ ID NO: 510 - protein, 365 aa, Homo sapiens
MGVPRPQPWALGLLLFLLPGSLGAESHLSLLYHLTAVSSPAPGTPAFWVSGWLGPQQYLSYNSLRGEAEPCGAWVWENQVSWYWEKETTDLRIKEKLFLEAFKALGGKGPYTLQGLLGCELGPDNTSVPTAKFALNGEEFMNFDLKQGTWGGDWPEALAISQRWQQQDKAANKELTFLLFSCPHRLREHLERGRGNLEWKEPPSMRLKARPSSPGFSVLTCSAFSFYPPELQLRFLRNGLAAGTGQGDFGPNSDGSFHASSSLTVKSGDEHHYCCIVQHAGLAQPLRVELESPAKSSVLVVGIVIGVLLLTAAAVGGALLWRRMRSGLPAPWISLRGDDTGVLLPTPGEAQDADLKDVNVIPATA

SEQ ID NO: 511 - protein, 241 aa, Homo sapiens
MASLSGLASALESYRGRDRLIRVLGYCCQLVGGVLVEQCPARSEVGTRLLVVSTQLSHCRTILRLFDDLAMFVYTKQYGLGAQEEDAFVRCVSVLGNLADQLYYPCEHVAWAADARVLHVDSSRWWTLSTTLWALSLLLGVARSLWMLLKLRQRLRSPTAPFTSPLPRGKRRAMEAQMQSEALSLLSNLADLANAVHWLPRGVLWAGRFPPWLVGLMGTISSILSMYQAARAGGQAEATTP

SEQ ID NO: 512 - protein, 299 aa, Homo sapiens
MDLSELERDNTGRCRLSSPVPAVCRKEPCVLGVDEAGRGPVLGPMVYAICYCPLPRLADLEALKVADSKTLLESERERLFAKMEDTDFVGWALDVLSPNLISTSMLGRVKYNLNSLSHDTATGLIQYALDQGVNVTQVFVDTVGMPETYQARLQQSFPGIEVTVKAKADALYPVVSAASICAKVARDQAVKKWQFVEKLQDLDTDYGSGYPNDPKTKAWLKEHVEPVFGFPQFVRFSWRTAQTILEKEAEDVIWEDSASENQEGLRKITSYFLNEGSQARPRSSHRYFLERGLESATSL

SEQ ID NO: 513 - protein, 464 aa, Homo sapiens
MDFQHRPGGKTGSGGVASSSESNRDRRERLRQLALETIDINKDPYFMKNHLGSYECKLCLTLHNNEGSYLAHTQGKKHQTNLARRAAKEAKEAPAQPAPEKVKVEVKKFVKIGRPGYKVTKQRDSEMGQQSLLFQIDYPEIAEGIMPRHRFMSAYEQRIEPPDRRWQYLLMAAEPYETIAFKVPSREIDKAEGKFWTHWNRETKQFFLQFHFKMEKPPAPPSLPAGPPGVKRPPPPLMNGLPPRPPLPESLPPPPPGGLPLPPMPPTGPAPSGPPGPPQLPPPAPGVHPPAPVVHPPASGVHPPAPGVHPPAPGVHPPAPGVHPPTSGVHPPAPGVHPPAPGVHPPAPGVHPPAPGVHPPAPGVHPPPSAGVHPQAPGVHPAAPAVHPQAPGVHPPAPGMHPQAPGVHPQPPGVHPSAPGVHPQPPGVHPSNPGVHPPTPMPPMLRPPLPSEGPGNIPPPPPTN

SEQ ID NO: 514 - protein, 560 aa, Homo sapiens
MRDLPLTSLALVLSALGALLGTEALRAEEPAVGTSGLIFREDLDWPPGSPQEPLCLVALGGDSNGSSSPLRVVGALSAYEQAFLGAVQRARWGPRDLATFGVCNTGDRQAALPSLRRLGAWLRDPGGQRLVVLHLEEVTWEPTPSLRFQEPPPGGAGPPELALLVLYPGPGPEVTVTRAGLPGAQSLCPSRDTRYLVLAVDRPAGAWRGSGLALTLQPRGEDSRLSTARLQALLFGDDHRCFTRMTPALLLLPRSEPAPLPAHGQLDTVPFPPPRPSAELEESPPSADPFLETLTRLVRALRVPPARASAPRLALDPDALAGFPQGLVNLSDPAALERLLDGEEPLLLLLRPTAATTGDPAPLHDPTSAPWATALARRVAAELQAAAAELRSLPGLPPATAPLLARLLALCPGGPGGLGDPLRALLLLKALQGLRVEWRGRDPRGPGRAQRSAGATAADGPCALRELSVDLRAERSVLIPETYQANNCQGVCGWPQSDRNPRYGNHVVLLLKMQVRGAALARPPCCVPTAYAGKLLISLSEERISAHHVPNMVATECGCR

SEQ ID NO: 515 - protein, 242 aa, Homo sapiens
MGEASPPAPARRHLLVLLLLLSTLVIPSAAAPIHDADAQESSLGLTGLQSLLQGFSRLFLKGNLLRGIDSLFSAPMDFRGLPGNYHKEENQEHQLGNNTLSSHLQIDKMTDNKTGEVLISENVVASIQPAEGSFEGDLKVPRMEEKEALVPIQKATDSFHTELHPRVAFWIIKLPRRRSHQDALEGGHWLSEKRHRLQAIRDGLRKGTHKDVLEEGTESSSHSRLSPRKTHLLYILRPSRQL

SEQ ID NO: 516 - protein, 108 aa, Homo sapiens
MKALCLLLLPVLGLLVSSKTLCSMEEAINERIQEVAGSLIFRAISSIGLECQSVTSRGDLATCPRGFAVTGCTCGSACGSWDVRAETTCHCQCAGMDWTGARCCRVQP

SEQ ID NO: 517 - protein, 648 aa, Homo sapiens
MEGAGYRVVFEKGGVYLHTSAKKYQDRDSLIAGVIRVVEKDNDVLLHWAPVEEAGDSTQILFSKKDSSGGDSCASEEEPTFDPGYEPDWAVISTVRPQLCHSEPTRGAEPSCPQGSWAFSVSLGELKSIRRSKPGLSWAYLVLVTQAGGSLPALHFHRGGTRALLRVLSRYLLLASSPQDSRLYLVFPHDSSALSNSFHHLQLFDQDSSNVVSRFLQDPYSTTFSSFSRVTNFFRGALQPQPEGAASDLPPPPDDEPEPGFEVISCVELGPRPTVERGPPVTEEEWARHVGPEGRLQQVPELKNRIFSGGLSPSLRREAWKFLLGYLSWEGTAEEHKAHIRKKTDEYFRMKLQWKSVSPEQERRNSLLHGYRSLIERDVSRTDRTNKFYEGPENPGLGLLNDILLTYCMYHFDLGYVQGMSDLLSPILYVIQNEVDAFWCFCGFMELVQGNFEESQETMKRQLGRLLLLLRVLDPLLCDFLDSQDSGSLCFCFRWLLIWFKREFPFPDVLRLWEVLWTGLPGPNLHLLVACAILDMERDTLMLSGFGSNEILKHINELTMKLSVEDVLTRAEALHRQLTACPELPHNVQEILGLAPPAEPHSPSPTASPLPLSPTRAPPTPPPSTDTAPQPDSSLEILPEEEDEGADS

SEQ ID NO: 518 - protein, 396 aa, Homo sapiens
MGERKGVNKYYPPDFNPEKHGSLNRYHNSHPLRERARKLSQGILIIRFEMPYNIWCDGCKNHIGMGVRYNAEKKKVGNYYTTPIYRFRMKCHLCVNYIEMQTDPANCDYVIVSGAQRKEERWDMADNEQVLTTEHEKKQKLETDAMFRLEHGEADRSTLKKALPTLSHIQEAQSAWKDDFALNSMLRRRFREKKKAIQEEEERDQALQAKASLTIPLVPETEDDRKLAALLKFHTLDSYEDKQKLKRTEIISRSWFPSAPGSASSSKVSGVLKKLAQSRRTALATSPITVGDLGIVRRRSRDVPESPQHAADTPKSGEPRVPEEAAQDRPMSPGDCPPETTETPKCSSPRGQEGSRQDKPLSPAGSSQEAADTPDTRHPCSLGSSLVADYSDSESE

SEQ ID NO: 519 - protein, 264 aa, Homo sapiens
MCHKNGFPQEGGITAAFLQKRKLRLSKNHRPARAKVTEHVRGTRPGRATAGPAASTRAAGSLFFDRWGNRGPAGCRGSSHLPQQLKFTTSDSCDRIKDEFQLLQAQYHSLKLECDKLASEKSEMQRHYVMYYEMSYGLNIEMHKQAEIVKRLNGICAQVLPYLSQEHQQQVLGAIERAKQVTAPELNSIIRQQLQAHQLSQLQALALPLTPLPVGLQPPSLPAVSAGTGLLSLSALGSQAHLSKEDKNGHDGDTHQEDDGEKSD

SEQ ID NO: 520 - protein, 313 aa, Homo sapiens
MDNKKRLAYAIIQFLHDQLRHGGLSSDAQESLEVAIQCLETAFGVTVEDSDLALPQTLPEIFEAAATGKEMPQDLRSPARTPPSEEDSAEAERLKTEGNEQMKVENFEAAVHFYGKAIELNPANAVYFCNRAAAYSKLGNYAGAVQDCERAICIDPAYSKAYGRMGLALSSLNKHVEAVAYYKKALELDPDNETYKSNLKIAELKLREAPSPTGGVGSFDIAGLLNNPGFMSMASNLMNNPQIQQLMSGMISGGNNPLGTPGTSPSQNDLASLIQAGQQFAQQMQQQNPELIEQLRSQIRSRTPSASNDDQQE

SEQ ID NO: 521 - protein, 334 aa, Homo sapiens
MKPPPRRRAAPARYLGEVTGPATWSAREKRQLVRLLQARQGQPEPDATELARELRGRSEAEIRVFLQQLKGRVAREAIQKVHPGGLQGPRRREAQPPAPIEVWTDLAEKITGPLEEALAVAFSQVLTIAATEPVTLLHSKPPKPTQARGKPLLLSAPGGQEDPAPEIPSSAPAAPSSAPRTPDPAPEKPSESSAGPSTEEDFAVDFEKIYKYLSSVSRSGRSPELSAAESAVVLDLLMSLPEELPLLPCTALVEHMTETYLRLTAPQPIPAGGSLGPAAEGDGAGSKAPEETPPATEKAEHSELKSPWQAAGICPLNPFLVPLELLGRAATPAR

SEQ ID NO: 522 - protein, 321 aa, Homo sapiens
MKPGFSPRGGGFGGRGGFGDRGGRGGRGGFGGGRGRGGGFRGRGRGGGGGGGGGGGGGRGGGGFHSGGNRGRGRGGKRGNQSGKNVMVEPHRHEGVFICRGKEDALVTKNLVPGESVYGEKRVSISEGDDKIEYRAWNPFRSKLAAAILGGVDQIHIKPGAKVLYLGAASGTTVSHVSDIVGPDGLVYAVEFSHRSGRDLINLAKKRTNIIPVIEDARHPHKYRMLIAMVDVIFADVAQPDQTRIVALNAHTFLRNGGHFVISIKANCIDSTASAEAVFASEVKKMQQENMKPQEQLTLEPYERDHAVVVGVYRPPPKVKN

SEQ ID NO: 523 - protein, 229 aa, Homo sapiens
MTPQLLLALVLWASCPPCSGRKGPPAALTLPRVQCRASRYPIAVDCSWTLPPAPNSTSPVSFIATYRLGMAARGHSWPCLQQTPTSTSCTITDVQLFSMAPYVLNVTAVHPWGSSSSFVPFITEHIIKPDPPEGVRLSPLAERQLQVQWEPPGSWPFPEIFSLKYWIRYKRQGAARFHRVGPIEATSFILRAVRPRARYYVQVAAQDLTDYGELSDWSLPATATMSLGK

SEQ ID NO: 524 - protein, 244 aa, Homo sapiens
MEVTGVSAPTVTVFISSSLNTFRSEKRYSRSLTIAEFKCKLELLVGSPASCMELELYGVDDKFYSKLDQEDALLGSYPVDDGCRIHVIDHSGARLGEYEDVSRVEKYTISQEAYDQRQDTVRSFLKRSKLGRYNEEERAQQEAEAAQRLAEEKAQASSIPVGSRCEVRAAGQSPRRGTVMYVGLTDFKPGYWIGVRYDEPLGKNDGSVNGKRYFECQAKYGAFVKPAVVTVGDFPEEDYGLDEI

SEQ ID NO: 525 - protein, 125 aa, Homo sapiens
MEPDGTYEPGFVGIRFCQECNNMLYPKEDKENRILLYACRNCDYQQEADNSCIYVNKITHEVDELTQIIADVSQDPTLPRTEDHPCQKCGHKEAVFFQSHSARAEDAMRLYYVCTAPHCGHRWTE

SEQ ID NO: 526 - protein, 651 aa, Homo sapiens
MGPASPAARGLSRRPGQPPLPLLLPLLLLLLRAQPAIGSLAGGSPGAAEAPGSAQVAGLCGRLTLHRDLRTGRWEPDPQRSRRCLRDPQRVLEYCRQMYPELQIARVEQATQAIPMERWCGGSRSGSCAHPHHQVVPFRCLPGEFVSEALLVPEGCRFLHQERMDQCESSTRRHQEAQEACSSQGLILHGSGMLLPCGSDRFRGVEYVCCPPPGTPDPSGTAVGDPSTRSWPPGSRVEGAEDEEEEESFPQPVDDYFVEPPQAEEEEETVPPPSSHTLAVVGKVTPTPRPTDGVDIYFGMPGEISEHEGFLRAKMDLEERRMRQINEVMREWAMADNQSKNLPKADRQALNEHFQSILQTLEEQVSGERQRLVETHATRVIALINDQRRAALEGFLAALQADPPQAERVLLALRRYLRAEQKEQRHTLRHYQHVAAVDPEKAQQMRFQVHTHLQVIEERVNQSLGLLDQNPHLAQELRPQIQELLHSEHLGPSELEAPAPGGSSEDKGGLQPPDSKDADTPMTLPKGSTEQDAASPEKEKMNPLEQYERKVNASVPRGFPFHSSEIQRDELAPAGTGVSREAVSGLLIMGAGGGSLIVLSMLLLRRKKPYGAISHGVVEVDPMLTLEEQQLRELQRHGYENPTYRFLEERP

SEQ ID NO: 527 - protein, 758 aa, Homo sapiens
MGRDTRSRSRSAGRRGRRRQSQSGSRSRSRSHGRRNRRRREDEGRRRRRRRSRERRSDSEEERWQRSGMRSRSPPRPKWHSRDGSSQSDSGEEQSRGQWARRRRRARSWSPSSSASSSASPGRSQSPRAAAAALSQQQSLQERLRLREERKQQEELMKAFETPEEKRARRLAKKEAKERKKREKMGWGEEYMGYTNTDNPFGDNNLLGTFIWNKALEKKGISHLEEKELKERNKRIQEDNRLELQKVKQLRLEREREKAMREQELEMLQREKEAEHFKTWEEQEDNFHLQQAKLRSKIRIRDGRAKPIDLLAKYISAEDDDLAVEMHEPYTFLNGLTVADMEDLLEDIQVYMELEQGKNADFWRDMTTITEDEISKLRKLEASGKGPGERREGVNASVSSDVQSVFKGKTYNQLQVIFQGIEGKIRAGGPNLDMGYWESLLQQLRAHMARARLRERHQDVLRQKLYKLKQEQGVESEPLFPILKQEPQSPSRSLEPEDAAPTPPGPSSEGGPAEAEVDGATPTEGDGDGDGEGEGEGEAVLMEEDLIQQSLDDYDAGRYSPRLLTAHELPLDAHVLEPDEDLQRLQLSRQQLQVTGDASESAEDIFFRRAKEGMGQDEAQFSVEMPLTGKAYLWADKYRPRKPRFFNRVHTGFEWNKYNQTHYDFDNPPPKIVQGYKFNIFYPDLIDKRSTPEYFLEACADNKDFAILRFHAGPPYEDIAFKIVNREWEYSHRHGFRCQFANGIFQLWFHFKRYRYRR

SEQ ID NO: 528 - protein, 531 aa, Homo sapiens
MAATLDLKSKEEKDAELDKRIEALRRKNEALIRRYQEIEEDRKKAELEGVAVTAPRKGRSVEKENVAVESEKNLGPSRRSPGTPRPPGASKGGRTPPQQGGRAGMGRASRSWEGSPGEQPRGGGAGGRGRRGRGRGSPHLSGAGDTSISDRKSKEWEERRRQNIEKMNEEMEKIAEYERNQREGVLEPNPVRNFLDDPRRRSGPLEESERDRREESRRHGRNWGGPDFERVRCGLEHERQGRRAGLGSAGDMTLSMTGRERSEYLRWKQEREKIDQERLQRHRKPTGQWRREWDAEKTDGMFKDGPVPAHEPSHRYDDQAWARPPKPPTFGEFLSQHKAEASSRRRRKSSRPQAKAAPRAYSDHDDRWETKEGAASPAPETPQPTSPETSPKETPMQPPEIPAPAHRPPEDEGEENEGEEDEEWEDISEDEEEEEIEVEEGDEEEPAQDHQAPEAAPTGIPCSEQAHGVPFSPEEPLLEPQAPGTPSSPFSPPSGHQPVSDWGEEVELNSPRTTHLAGALSPGEAWPFESV

SEQ ID NO: 529 - protein, 390 aa, Homo sapiens
MPPSGLRLLPLLLPLLWLLVLTPGRPAAGLSTCKTIDMELVKRKRIEAIRGQILSKLRLASPPSQGEVPPGPLPEAVLALYNSTRDRVAGESAEPEPEPEADYYAKEVTRVLMVETHNEIYDKFKQSTHSIYMFFNTSELREAVPEPVLLSRAELRLLRLKLKVEQHVELYQKYSNNSWRYLSNRLLAPSDSPEWLSFDVTGVVRQWLSRGGEIEGFRLSAHCSCDSRDNTLQVDINGFTTGRRGDLATIHGMNRPFLLLMATPLERAQHLQSSRHRRALDTNYCFSSTEKNCCVRQLYIDFRKDLGWKWIHEPKGYHANFCLGPCPYIWSLDTQYSKVLALYNQHNPGASAAPCCVPQALEPLPIVYYVGRKPKVEQLSNMIVRSCKCS

SEQ ID NO: 530 - protein, 257 aa, Homo sapiens
MAAPWASLRLVAPMWNGRIRGIHRLGAAVAPEGNQKKKRTILQFLTNYFYDVEALRDYLLQREMYKVHEKNRSYTWLEKQHGPYGAGAFFILKQGGAVKFRDKEWIRPDKYGHFSQEFWNFCEVPVEAVDAGDCDINYEGLDNLLRLKELQSLSLQRCCHVDDWCLSRLYPLADSLQELSLAGCPRISERGLACLHHLQNLRRLDISDLPAVSNPGLTQILVEEMLPNCEVVGVDWAEGLKSGPEEQPRDTASPVPA

SEQ ID NO: 531 - protein, 434 aa, Homo sapiens
MSADGAEADGSTQVTVEEPVQQPSVVDRVASMPLISSTCDMVSAAYASTKESYPHIKTVCDAAEKGVRTLTAAAVSGAQPILSKLEPQIASASEYAHRGLDKLEENLPILQQPTEKVLADTKELVSSKVSGAQEMVSSAKDTVATQLSEAVDATRGAVQSGVDKTKSVVTGGVQSVMGSRLGQMVLSGVDTVLGKSEEWADNHLPLTDAELARIATSLDGFDVASVQQQRQEQSYFVRLGSLSERLRQHAYEHSLGKLRATKQRAQEALLQLSQVLSLMETVKQGVDQKLVEGQEKLHQMWLSWNQKQLQGPEKEPPKPEQVESRALTMFRDIAQQLQATCTSLGSSIQGLPTNVKDQVQQARRQVEDLQATFSSIHSFQDLSSSILAQSRERVASAREALDHMVEYVAQNTPVTWLVGPFAPGITEKAPEEKK

SEQ ID NO: 532 - protein, 285 aa, Homo sapiens
MSDDFLWFEGIAFPTMGFRSETLRKVRDEFVIRDEDVIILTYPKSGTNWLAEILCLMHSKGDAKWIQSVPIWERSPWVESEIGYTALSETESPRLFSSHLPIQLFPKSFFSSKAKVIYLMRNPRDVLVSGYFFWKNMKFIKKPKSWEEYFEWFCQGTVLYGSWFDHIHGWMPMREEKNFLLLSYEELKQDTGRTIEKICQFLGKTLEPEELNLILKNSSFQSMKENKMSNYSLLSVDYVVDKAQLLRKGVSGDWKNHFTVAQAEDFDKLFQEKMADLPRELFPWE

SEQ ID NO: 533 - protein, 378 aa, Homo sapiens
MVDYSVWDHIEVSDDEDETHPNIDTASLFRWRHQARVERMEQFQKEKEELDRGCRECKRKVAECQRKLKELEVAEGGKAELERLQAEAQQLRKEERSWEQKLEEMRKKEKSMPWNVDTLSKDGFSKSMVNTKPEKTEEDSEEVREQKHKTFVEKYEKQIKHFGMLRRWDDSQKYLSDNVHLVCEETANYLVIWCIDLEVEEKCALMEQVAHQTIVMQFILELAKSLKVDPRACFRQFFTKIKTADRQYMEGFNDELEAFKERVRGRAKLRIEKAMKEYEEEERKKRLGPGGLDPVEVYESLPEELQKCFDVKDVQMLQDAISKMDPTDAKYHMQRCIDSGLWVPNSKASEAKEGEEAGPGDPLLEAVPKTGDEKDVSV

SEQ ID NO: 534 - protein, 185 aa, Homo sapiens
MAAQKDQQKDAEAEGLSGTTLLPKLIPSGAGREWLERRRATIRPWSTFVDQQRFSRPRNLGELCQRLVRNVEYYQSNYVFVFLGLILYCVVTSPMLLVALAVFFGACYILYLRTLESKLVLFGREVSPAHQYALAGGISFPFFWLAGAGSAVFWVLGATLVVIGSHAAFHQIEAVDGEELQMEPV

SEQ ID NO: 535 - protein, 578 aa, Homo sapiens
MRQQDAPKPTPAACRCSGLARRVLTIAFALLILGLMTWAYAAGVPLASDRYGLLAFGLYGAFLSAHLVAQSLFAYLEHRRVAAAARGPLDAATARSVALTISAYQEDPAYLRQCLASARALLYPRARLRVLMVVDGNRAEDLYMVDMFREVFADEDPATYVWDGNYHQPWEPAAAGAVGAGAYREVEAEDPGRLAVEALVRTRRCVCVAQRWGGKREVMYTAFKALGDSVDYVQVCDSDTRLDPMALLELVRVLDEDPRVGAVGGDVRILNPLDSWVSFLSSLRYWVAFNVERACQSYFHCVSCISGPLGLYRNNLLQQFLEAWYNQKFLGTHCTFGDDRHLTNRMLSMGYATKYTSRSRCYSETPSSFLRWLSQQTRWSKSYFREWLYNALWWHRHHAWMTYEAVVSGLFPFFVAATVLRLFYAGRPWALLWVLLCVQGVALAKAAFAAWLRGCLRMVLLSLYAPLYMCGLLPAKFLALVTMNQSGWGTSGRRKLAANYVPLLPLALWALLLLGGLVRSVAHEARADWSGPSRAAEAYHLAAGAGAYVGYWVAMLTLYWVGVRRLCRRRTGGYRVQV

SEQ ID NO: 536 - protein, 219 aa, Homo sapiens
MASAGDTQAGPRDAADQNFDYMFKLLLIGNSSVGKTSFLFRYADDSFTPAFVSTVGIDFKVKTVYRHDKRIKLQIWDTAGQERYRTITTAYYRGAMGFLLMYDIANQESFAAVQDWATQIKTYSWDNAQVILVGNKCDLEDERVVPAEDGRRLADDLGFEFFEASAKENINVKQVFERLVDVICEKMNESLEPSSSSGSNGKGPAVGDAPAPQPSSCSC

SEQ ID NO: 537 - protein, 508 aa, Homo sapiens
MDHLGASLWPQVGSLCLLLAGAAWAPPPNLPDPKFESKAALLAARGPEELLCFTERLEDLVCFWEEAASAGVGPGNYSFSYQLEDEPWKLCRLHQAPTARGAVRFWCSLPTADTSSFVPLELRVTAASGAPRYHRVIHINEVVLLDAPVGLVARLADESGHVVLRWLPPPETPMTSHIRYEVDVSAGNGAGSVQRVEILEGRTECVLSNLRGRTRYTFAVRARMAEPSFGGFWSAWSEPVSLLTPSDLDPLILTLSLILVVILVLLTVLALLSHRRALKQKIWPGIPSPESEFEGLFTTHKGNFQLWLYQNDGCLWWSPCTPFTEDPPASLEVLSERCWGTMQAVEPGTDDEGPLLEPVGSEHAQDTYLVLDKWLLPRNPPSEDLPGPGGSVDIVAMDEGSEASSCSSALASKPSPEGASAASFEYTILDPSSQLLRPWTLCPELPPTPPHLKYLYLVVSDSGISTDYSSGDSQGAQGGLSDGPYSNPYENSLIPAAEPLPPSYVACS

SEQ ID NO: 538 - protein, 209 aa, Homo sapiens
MDSDETGFEHSGLWVSVLAGLLLGACQAHPIPDSSPLLQFGGQVRQRYLYTDDAQQTEAHLEIREDGTVGGAADQSPESLLQLKALKPGVIQILGVKTSRFLCQRPDGALYGSLHFDPEACSFRELLLEDGYNVYQSEAHGLPLHLPGNKSPHRDPAPRGPARFLPLPGLPPALPEPPGILAPQPPDVGSSDPLSMVGPSQGRSPSYAS

SEQ ID NO: 539 - protein, 104 aa, Homo sapiens
MSTNNMSDPRRPNKVLRYKPPPSECNPALDDPTPDYMNLLGMIFSMCGLMLKWCAWVAVYCSFISFANSRSSEDTKQMMSSFMLSISAVVMSYLQNPQPMTPPW

SEQ ID NO: 540 - protein, 438 aa, Homo sapiens
MALRGVSVRLLSRGPGLHVLRTWVSSAAQTEKGGRTQSQLAKSSRPEFDWQDPLVLEEQLTTDEILIRDTFRTYCQERLMPRILLANRNEVFHREIISEMGELGVLGPTIKGYGCAGVSSVAYGLLARELERVDSGYRSAMSVQSSLVMHPIYAYGSEEQRQKYLPQLAKGELLGCFGLTEPNSGSDPSSMETRAHYNSSNKSYTLNGTKTWITNSPMADLFVVWARCEDGCIRGFLLEKGMRGLSAPRIQGKFSLRASATGMIIMDGVEVPEENVLPGASSLGGPFGCLNNARYGIAWGVLGASEFCLHTARQYALDRMQFGVPLARNQLIQKKLADMLTEITLGLHACLQLGRLKDQDKAAPEMVSLLKRNNCGKALDIARQARDMLGGNGISDEYHVIRHAMNLEAVNTYEGTHDIHALILGRAITGIQAFTASK

SEQ ID NO: 541 - protein, 360 aa, Homo sapiens
MIPLLLAALLCVPAGALTCYGDSGQPVDWFVVYKLPALRGSGEAAQRGLQYKYLDESSGGWRDGRALINSPEGAVGRSLQPLYRSNTSQLAFLLYNDQPPQPSKAQDSSMRGHTKGVLLLDHDGGFWLVHSVPNFPPPASSAAYSWPHSACTYGQTLLCVSFPFAQFSKMGKQLTYTYPWVYNYQLEGIFAQEFPDLENVVKGHHVSQEPWNSSITLTSQAGAVFQSFAKFSKFGDDLYSGWLAAALGTNLQVQFWHKTVGILPSNCSDIWQVLNVNQIAFPGPAGPSFNSTEDHSKWCVSPKGPWTCVGDMNRNQGEEQRGGGTLCAQLPALWKAFQPLVKNYQPCNGMARKPSRAYKI

SEQ ID NO: 542 - protein, 264 aa, Homo sapiens
MNILPKKSWHVRNKDNVARVRRDEAQAREEEKERERRVLLAQQEARTEFLRKKARHQNSLPELEAAEAGAPGSGPVDLFRELLEEGKGVIRGNKEYKEEKRQEKERQEKALGILTYLGQSAAEAQTQPPWYQLPPGRGGPPPGPAPDEKIKSRLDPLREMQKHLGKKRQHGGDEGSRSRKEKEGSEKQRPKEPPSLDQLRAERLRREAAERSRAEALLARVQGRALQEGQPEEDETDDRRRRYNSQFNPQLARRPRQQDPHLTH

SEQ ID NO: 543 - protein, 176 aa, Homo sapiens [sequence omitted]

SEQ ID NO: 544 - protein, 407 aa, Homo sapiens
MLFDKVKAFSVQLDGATAGVEPVFSGGQAVAGRVLLELSSAARVGALRLRARGRAHVHWTESRSAGSSTAYTQSYSERVEVVSHRATLLAPDTGETTTLPPGRHEFLFSFQLPPTLVTSFEGKHGSVRYCIKATLHRPWVPARRARKVFTVIEPVDINTPALLAPQAGAREKVARSWYCNRGLVSLSAKIDRKGYTPGEVIPVFAEIDNGSTRPVLPRAAVVQTQTFMARGARKQKRAVVASLAGEPVGPGQRALWQGRALRIPPVGPSILHCRVLHVDYALKVCVDIPGTSKLLLELPLVIGTIPLHPFGSRSSSVGSHASFLLDWRLGALPERPEAPPEYSEVVADTEEAALGQSPFPLPQDPDMSLEGPFFAYIQEFRYRPPPLYSEEDPNPLLGDMRPRCMTC

SEQ ID NO: 545 - protein, 728 aa, Homo sapiens
MAGPEGFQYRALYPFRRERPEDLELLPGDVLVVSRAALQALGVAEGGERCPQSVGWMPGLNERTRQRGDFPGTYVEFLGPVALARPGPRPRGPRPLPARPRDGAPEPGLTLPDLPEQFSPPDVAPPLLVKLVEAIERTGLDSESHYRPELPAPRTDWSLSDVDQWDTAALADGIKSFLLALPAPLVTPEASAEARRALREAAGPVGPALEPPTLPLHRALTLRFLLQHLGRVASRAPALGPAVRALGATFGPLLLRAPPPPSSPPPGGAPDGSEPSPDFPALLVEKLLQEHLEEQEVAPPALPPKPPKAKPASTVLANGGSPPSLQDAEWYWGDISREEVNEKLRDTPDGTFLVRDASSKIQGEYTLTLRKGGNNKLIKVFHRDGHYGFSEPLTFCSVVDLINHYRHESLAQYNAKLDTRLLYPVSKYQQDQIVKEDSVEAVGAQLKVYHQQYQDKSREYDQLYEEYTRTSQELQMKRTAIEAFNETIKIFEEQGQTQEKCSKEYLERFRREGNEKEMQRILLNSERLKSRIAEIHESRTKLEQQLRAQASDNREIDKRMNSLKPDLMQLRKIRDQYLVWLTQKGARQKKINEWLGIKNETEDQYALMEDEDDLPHHEERTWYVGKINRTQAEEMLSGKRDGTFLIRESSQRGCYACSVVVDGDTKHCVIYRTATGFGFAEPYNLYGSLKELVLHYQHASLVQHNDALTVTLAHPVRAPGPGPPPAAR

SEQ ID NO: 546 - protein, 101 aa, Homo sapiens
MNLERVSNEEKLNLCRKYYLGGFAFLPFLWLVNIFWFFREAFLVPAYTEQSQIKGYVWRSAVGFLFWVIVLTSWITIFQIYRPRWGALGDYLSFTIPLGTP

SEQ ID NO: 547 - protein, 757 aa, Homo sapiens
MVPDTACVLLLTLAALGASGQGQSPLGSDLGPQMLRELQETNAALQDVRELLRQQVREITFLKNTVMECDACGMQQSVRTGLPSVRPLLHCAPGFCFPGVACIQTESGARCGPCPAGFTGNGSHCTDVNECNAHPCFPRVRCINTSPGFRCEACPPGYSGPTHQGVGLAFAKANKQVCTDINECETGQHNCVPNSVCINTRGSFQCGPCQPGFVGDQASGCQRRAQRFCPDGSPSECHEHADCVLERDGSRSCVCAVGWAGNGILCGRDTDLDGFPDEKLRCPERQCRKDNCVTVPNSGQEDVDRDGIGDACDPDADGDGVPNEKDNCPLVRNPDQRNTDEDKWGDACDNCRSQKNDDQKDTDQDGRGDACDDDIDGDRIRNQADNCPRVPNSDQKDSDGDGIGDACDNCPQKSNPDQADVDHDFVGDACDSDQDQDGDGHQDSRDNCPTVPNSAQEDSDHDGQGDACDDDDDNDGVPDSRDNCRLVPNPGQEDADRDGVGDVCQDDFDADKVVDKIDVCPENAEVTLTDFRAFQTVVLDPEGDAQIDPNWVVLNQGREIVQTMNSDPGLAVGYTAFNGVDFEGTFHVNTVTDDDYAGFIFGYQDSSSFYVVMWKQMEQTYWQANPFRAVAEPGIQLKAVKSSTGPGEQLRNALWHTGDTESQVRLLWKDPRNVGWKDKKSYRWFLQHRPQVGYIRVRFYEGPELVADSNVVLDTTMRGGRLGVFCFSQENIIWANLRYRCNDTIPEDYETHQLRQA

SEQ ID NO: 548 - protein, 224 aa, Homo sapiens
MTLFHFGNCFALAYFPYFITYKCSGLSEYNAFWKCVQAGVTYLFVQLCKMLFLATFFPTWEGGIYDFIGEFMKASVDVADLIGLNLVMSRNAGKGEYKIMVAALGWATAELIMSRCIPLWVGARGIEFDWKYIQMSIDSNISLVHYIVASAQVWMITRYDLYHTFRPAVLLLMFLSVYKAFVMETFVHLCSLGSWAALLARAVVTGLLALSTLALYVAVVNVHS

SEQ ID NO: 549 - protein, 84 aa, Homo sapiens
MALSSQIWAACLLLLLLLASLTSGSVFPQQTGQLAELQPQDRAGARASWMPMFQRRRRRDTHFPICIFCCGCCHRSKCGMCCKT

SEQ ID NO: 550 - protein, 176 aa, Homo sapiens
MDLPDSASRVFCGRILSMVNTDDVNAIILAQKNMLDRFEKTNEMLLNFNNLSSARLQQMSERFLHHTRTLVEMKRDLDSIFRRIRTLKGKLARQHPEAFSHIPEASFLEEEDEDPIPPSTTTTIATSEQSTGSCDTSPDTVSPSLSPGFEDLSHVQPGSPAINGRSQTDDEEMTGE

SEQ ID NO: 551 - protein, 548 aa, Homo sapiens
MKTPADTGFAFPDWAYKPESSPGSRQIQLWHFILELLRKEEYQGVIAWQGDYGEFVIKDPDEVARLWGVRKCKPQMNYDKLSRALRYYYNKRILHKTKGKRFTYKFNFNKLVLVNYPFIDVGLAGGAVPQSAPPVPSGGSHFRFPPSTPSEVLSPTEDPRSPPACSSSSSSLFSAVVARRLGRGSVSDCSDGTSELEEPLGEDPRARPPGPPDLGAFRGPPLARLPHDPGVFRVYPRPRGGPEPLSPFPVSPLAGPGSLLPPQLSPALPMTPTHLAYTPSPTLSPMYPSGGGGPSGSGGGSHFSFSPEDMKRYLQAHTQSVYNYHLSPRAFLHYPGLVVPQPQRPDKCPLPPMAPETPPVPSSASSSSSSSSSPFKFKLQPPPLGRRQRAAGEKAVAGADKSGGSAGGLAEGAGALAPPPPPPQIKVEPISEGESEEVEVTDISDEDEEDGEVFKTPRAPPAPPKPEPGEAPGASQCMPLKLRFKRRWSEDCRLEGGGGPAGGFEDEGEDKKVRGEGPGEAGGPLTPRRVSSDLQHATAQLSLEHRDS

SEQ ID NO: 552 - protein, 483 aa, Homo sapiens
MSGGGPSGGGPGGSGRARTSSFAEPGGGGGGGGGGPGGSASGPGGTGGGKASVGAMGGGVGASSSGGGPGGSGGGGSGGPGAGTSFPPPGVKLGRDSGKVTTVVATLGQGPERSQEVAYTDIKVIGNGSFGVVYQARLAETRELVAIKKVLQDKRFKNRELQIMRKLDHCNIVRLRYFFYSSGEKKDELYLNLVLEYVPETVYRVARHFTKAKLTIPILYVKVYMYQLFRSLAYIHSQGVCHRDIKPQNLLVDPDTAVLKLCDFGSAKQLVRGEPNVSYICSRYYRAPELIFGATDYTSSIDVWSAGCVLAELLLGQPIFPGDSGVDQLVEIIKVLGTPTREQIREMNPNYTEFKFPQIKAHPWTKVFKSRTPPEAIALCSSLLEYTPSSRLSPLEACAHSFFDELRCLGTQLPNNRPLPPLFNFSAGELSIQPSLNAILIPPHLRSPAGTTTLTPSSQALTETPTSSDWQSTDATPTLTNSS

SEQ ID NO: 553 - protein, 388 aa, Homo sapiens
MGRARRFQWPLLLLWAAAAGPGAGQEVQTENVTVAEGGVAEITCRLHQYDGSIVVIQNPARQTLFFNGTRALKDERFQLEEFSPRRVRIRLSDARLEDEGGYFCQLYTEDTHHQIATLTVLVAPENPVVEVREQAVEGGEVELSCLVPRSRPAATLRWYRDRKELKGVSSSQENGKVWSVASTVRFRVDRKDDGGIIICEAQNQALPSGHSKQTQYVLDVQYSPTARIHASQAVVREGDTLVLTCAVTGNPRPNQIRWNRGNESLPERAEAVGETLTLPGLVSADNGTYTCEASNKHGHARALYVLVVYDPGAVVEAQTSVPYAIVGGILALLVFLIICVLVGMVWCSVRQKGSYLTHEASGLDEQGEAREAFLNGSDGHKRKEEFFI

SEQ ID NO: 554 - protein, 355 aa, Homo sapiens [sequence omitted]

SEQ ID NO: 555 - protein, 634 aa, Homo sapiens
MPSDLAKKKAAKKKEAAKARQRPRKGHEENGDVVTEPQVAEKNEANGRETTEVDLLTKELEDFEMKKAAARAVTGVLASHPNSTDVHIINLSLTFHGQELLSDTKLELNSGRRYGLIGLNGIGKSMLLSAIGKREVPIPEHIDIYHLTREMPPSDKTPLHCVMEVDTERAMLEKEAERLAHEDAECEKLMELYERLEELDADKAEMRASRILHGLGFTPAMQRKKLKDFSGGWRMRVALARALFIRPFMLLLDEPTNHLDLDACVWLEEELKTFKRILVLVSHSQDFLNGVCTNIIHMHNKKLKYYTGNYDQYVKTRLELEENQMKRFHWEQDQIAHMKNYIARFGHGSAKLARQAQSKEKTLQKMMASGLTERVVSDKTLSFYFPPCGKIPPPVIMVQNVSFKYTKDGPCIYNNLEFGIDLDTRVALVGPNGAGKSTLLKLLTGELLPTDGMIRKHSHVKIGRYHQHLQEQLDLDLSPLEYMMKCYPEIKEKEEMRKIIGRYGLTGKQQVSPIRNLSDGQKCRVCLAWLAWQNPHMLFLDEPTNHLDIETIDALADAINEFEGGMMLVSHDFRLIQQVAQEIWVCEKQTITKWPGDILAYKEHLKSKLVDEEPQLTKRTHNVCTLTLASLPRP

SEQ ID NO: 556 - protein, 728 aa, Homo sapiens
MWVTKLLPALLLQHVLLHLLLLPIAIPYAEGQRKRRNTIHEFKKSAKTTLIKIDPALKIKTKKVNTADQCANRCTRNKGLPFTCKAFVFDKARKQCLWFPFNSMSSGVKKEFGHEFDLYENKDYIRNCIIGKGRSYKGTVSITKSGIKCQPWSSMIPHEHSFLPSSYRGKDLQENYCRNPRGEEGGPWCFTSNPEVRYEVCDIPQCSEVECMTCNGESYRGLMDHTESGKICQRWDHQTPHRHKFLPERYPDKGFDDNYCRNPDGQPRPWCYTLDPHTRWEYCAIKTCADNTMNDTDVPLETTECIQGQGEGYRGTVNTIWNGIPCQRWDSQYPHEHDMTPENFKCKDLRENYCRNPDGSESPWCFTTDPNIRVGYCSQIPNCDMSHGQDCYRGNGKNYMGNLSQTRSGLTCSMWDKNMEDLHRHIFWEPDASKLNENYCRNPDDDAHGPWCYTGNPLIPWDYCPISRCEGDTTPTIVNLDHPVISCAKTKQLRVVNGIPTRTNIGWMVSLRYRNKHICGGSLIKESWVLTARQCFPSRDLKDYEAWLGIHDVHGRGDEKCKQVLNVSQLVYGPEGSDLVLMKLARPAVLDDFVSTIDLPNYGCTIPEKTSCSVYGWGYTGLINYDGLLRVAHLYIMGNEKCSQHHRGKVTLNESEICAGAEKIGSGPCEGDYGGPLVCEQHKMRMVLGVIVPGRGCAIPNRPGIFVRVAYYAKWIHKIILTYKVPQS

SEQ ID NO: 557 - protein, 1786 aa, Homo sapiens
MGLLQLLAFSFLALCRARVRAQEPEFSYGCAEGSCYPATGDLLIGRAQKLSVTSTCGLHKPEPYCIVSHLQEDKKCFICNSQDPYHETLNPDSHLIENVVTTFAPNRLKIWWQSENGVENVTIQLDLEAEFHFTHLIMTFKTFRPAAMLIERSSDFGKTWGVYRYFAYDCEASFPGISTGPMKKVDDIICDSRYSDIEPSTEGEVIFRALDPAFKIEDPYSPRIQNLLKITNLRIKFVKLHTLGDNLLDSRMEIREKYYYAVYDMVVRGNCFCYGHASECAPVDGFNEEVEGMVHGHCMCRHNTKGLNCELCMDFYHDLPWRPAEGRNSNACKKCNCNEHSISCHFDMAVYLATGNVSGGVCDDCQHNTMGRNCEQCKPFYYQHPERDIRDPNFCERCTCDPAGSQNEGICDSYTDFSTGLIAGQCRCKLNVEGEHCDVCKEGFYDLSSEDPFGCKSCACNPLGTIPGGNPCDSETGHCYCKRLVTGQHCDQCLPEHWGLSNDLDGCRPCDCDLGGALNNSCFAESGQCSCRPHMIGRQCNEVEPGYYFATLDHYLYEAEEANLGPGVSIVERQYIQDRIPSWTGAGFVRVPEGAYLEFFIDNIPYSMEYDILIRYEPQLPDHWEKAVITVQRPGRIPTSSRCGNTIPDDDNQVVSLSPGSRYVVLPRPVCFEKGTNYTVRLELPQYTSSDSDVESPYTLIDSLVLMPYCKSLDIFTVGGSGDGVVTNSAWETFQRYRCLENSRSVVKTPMTDVCRNIIFSISALLHQTGLACECDPQGSLSSVCDPNGGQCQCRPNVVGRTCNRCAPGTFGFGPSGCKPCECHLQGSVNAFCNPVTGQCHCFQGVYARQCDRCLPGHWGFPSCQPCQCNGHADDCDPVTGECLNCQDYTMGHNCERCLAGYYGDPIIGSGDHCRPCPCPDGPDSGRQFARSCYQDPVTLQLACVCDPGYIGSRCDDCASGYFGNPSEVGGSCQPCQCHNNIDTTDPEACDKETGRCLKCLYHTEGEHCQFCRFGYYGDALQQDCRKCVCNYLGTVQEHCNGSDCQCDKATGQCLCLPNVIGQNCDRCAPNTWQLASGTGCDPCNCNAAHSFGPSCNEFTGQCQCMPGFGGRTCSECQELFWGDPDVECRACDCDPRGIETPQCDQSTGQCVCVEGVEGPRCDKCTRGYSGVFPDCTPCHQCFALWDVIIAELTNRTHRFLEKAKALKISGVIGPYRETVDSVERKVSEIKDILAQSPAAEPLKNIGNLFEEAEKLIKDVTEMMAQVEVKLSDTTSQSNSTAKELDSLQTEAESLDNTVKELAEQLEFIKNSDIRGALDSITKYFQMSLEAEERVNASTTEPNSTVEQSALMRDRVEDVMMERESQFKEKQEEQARLLDELAGKLQSLDLSAAAEMTCGTPPGASCSETECGGPNCRTDEGERKCGGPGCGGLVTVAHNAWQKAMDLDQDVLSALAEVEQLSKMVSEAKLRADEAKQSAEDILLKTNATKEKMDKSNEELRNLIKQIRNFLTQDSADLDSIEAVANEVLKMEMPSTPQQLQNLTEDIRERVESLSQVEVILQHSAADIARAEMLLEEAKRASKSATDVKVTADMVKEALEEAEKAQVAAEKAIKQADEDIQGTQNLLTSIESETAASEETLFNASQRISELERNVEELKRKAAQNSGEAEYIEKVVYTVKQSAEDVKKTLDGELDEKYKKVENLIAKKTEESADARRKAEMLQNEAKTLLAQANSKLQLLKDLERKYEDNQRYLEDKAQELARLEGEVRSLLKDISQKVAVYSTCL

SEQ ID NO: 558 - protein, 147 aa, Homo sapiens
MALKRIQKELTDLQRDPPAQCSAGPVGDDLFHWQATIMGPNDSPYQGGVFFLTIHFPTDYPFKPPKVAFTTKIYHPNINSNGSICLDILRSQWSPALTVSKVLLSICSLLCDPNPDDPLVPEIAHTYKADREKYNRLAREWTQKYAM

SEQ ID NO: 559 - protein, 419 aa, Homo sapiens
MAMRLILFFGALFGHIYCLETFVGDQVLEIVPSNEEQIKNLLQLEAQEHLQLDFWKSPTTPGETAHVRVPFVNVQAVKVFLESQGIAYSIMIEDVQVLLDKENEEMLFNRRRERSGNFNFGAYHTLEEISQEMDNLVAEHPGLVSKVNIGSSFENRPMNVLKFSTGGDKPAIWLDAGIHAREWVTQATALWTANKIVSDYGKDPSITSILDALDIFLLPVTNPDGYVFSQTKNRMWRKTRSKVSGSLCVGVDPNRNWDAGFGGPGASSNPCSDSYHGPSANSEVEVKSIVDFIKSHGKVKAFITLHSYSQLLMFPYGYKCTKLDDFDELSEVAQKAAQSLRSLHGTKYKVGPICSVIYQASGGSIDWSYDYGIKYSFAFELRDTGRYGFLLPARQILPTAEETWLGLKAIMEHVRDHPY

SEQ ID NO: 560 - protein, 421 aa, Homo sapiens
MRWILFIGALIGSSICGQEKFFGDQVLRINVRNGDEISKLSQLVNSNNLKLNFWKSPSSFNRPVDVLVPSVSLQAFKSFLRSQGLEYAVTIEDLQALLDNEDDEMQHNEGQERSSNNFNYGAYHSLEAIYHEMDNIAADFPDLARRVKIGHSFENRPMYVLKFSTGKGVRRPAVWLNAGIHSREWISQATAIWTARKIVSDYQRDPAITSILEKMDIFLLPVANPDGYVYTQTQNRLWRKTRSRNPGSSCIGADPNRNWNASFAGKGASDNPCSEVYHGPHANSEVEVKSVVDFIQKHGNFKGFIDLHSYSQLLMYPYGYSVKKAPDAEELDKVARLAAKALASVSGTEYQVGPTCTTVYPASGSSIDWAYDNGIKFAFTFELRDTGTYGFLLPANQIIPTAEETWLGLKTIMEHVRDNLY

SEQ ID NO: 561 - protein, 387 aa, Homo sapiens
MVHCSCVLFRKYGNFIDKLRLFTRGGSGGMGYPRLGGEGGKGGDVWVVAQNRMTLKQLKDRYPRKRFVAGVGANSKISALKGSKGKDCEIPVPVGISVTDENGKIIGELNKENDRILVAQGGLGGKLLTNFLPLKGQKRIIHLDLKLIADVGLVGFPNAGKSSLLSCVSHAKPAIADYAFTTLKPELGKIMYSDFKQISVADLPGLIEGAHMNKGMGHKFLKHIERTRQLLFVVDISGFQLSSHTQYRTAFETIILLTKELELYKEELQTKPALLAVNKMDLPDAQDKFHELMSQLQNPKDFLHLFEKNMIPERTVEFQHIIPISAVTGEGIEELKNCIRKSLDEQANQENDALHKKQLLNLWISDTMSSTEPPSKHAVTTSKMDII

SEQ ID NO: 562 - protein, 235 aa, Homo sapiens
MDPARPLGLSILLLFLTEAALGDAAQEPTGNNAEICLLPLDYGPCRALLLRYYYDRYTQSCRQFLYGGCEGNANNFYTWEACDDACWRIEKVPKVCRLQVSVDDQCEGSTEKYFFNLSSMTCEKFFSGGCHRNRIENRFPDEATCMGFCAPKKIPSFCYSPKDEGLCSANVTRYYFNPRYRTCDAFTYTGCGGNDNNFVSREDCKRACAKALKKKKKMPKLRFASRIRKIRKKQF

SEQ ID NO: 563 - protein, 118 aa, Homo sapiens
MRRAGLGEGVPPGNYGNYGYANSGYSACEEENERLTESLRSKVTAIKSLSIEIGHEVKTQNKLLAEMDSQFDSTTGFLGKTMGKLKILSRGSQTKLLCYMMLFSLFVFFIIYWIIKLR

SEQ ID NO: 564 - protein, 491 aa, Homo sapiens [sequence omitted]

SEQ ID NO: 565 - protein, 338 aa, Homo sapiens
MAAGCSEAPRPAAASDGSLVGQAGVLPCLELPTYAAACALVNSRYSCLVAGPHQRHIALSPRYLNRKRTGIREQLDAELLRYSESLLGVPIAYDNIKVVGELGDIYDDQGHIHLNIEADFVIFCPEPGQKLMGIVNKVSSSHIGCLVHGCFNASIPKPEQLSAEQWQTMEINMGDELEFEVFRLDSDAAGVFCIRGKLNITSLQFKRSEVSEEVTENGTEEAAKKPKKKKKKKDPETYEVDSGTTKLADDADDTPMEESALQNTNNANGIWEEEPKKKKKKKKHQEVQDQDPVFQGSDSSGYQSDHKKKKKKRKHSEEAEFTPPLKCSPKRKGKSNFL

SEQ ID NO: 566 - protein, 354 aa, Homo sapiens
MGRLVAVGLLGIALALLGERLLALRNRLKASREVESVDLPHCHLIKGIEAGSEDIDILPNGLAFFSVGLKFPGLHSFAPDKPGGILMMDLKEEKPRARELRISRGFDLASFNPHGISTFIDNDDTVYLFVVNHPEFKNTVEIFKFEEAENSLLHLKTVKHELLPSVNDITAVGPAHFYATNDHYFSDPFLKYLETYLNLHWANVVYYSPNEVKVVAEGFDSANGINISPDDKYIYVADILAHEIHVLEKHTNMNLTQLKVLELDTLVDNLSIDPSSGDIWVGCHPNGQKLFVYDPNNPPSSEVLRIQNILSEKPTVTTVYANNGSVLQGSSVASVYDGKLLIGTLYHRALYCEL

SEQ ID NO: 567 - protein, 769 aa, Homo sapiens
MCGSALAFFTAAFVCLQNDRRGPASFLWAAWVFSLVLGLGQGEDNRCASSNAASCARCLALGPECGWCVQEDFISGGSRSERCDIVSNLISKGCSVDSIEYPSVHVIIPTENEINTQVTPGEVSIQLRPGAEANFMLKVHPLKKYPVDLYYLVDVSASMHNNIEKLNSVGNDLSRKMAFFSRDFRLGFGSYVDKTVSPYISIHPERIHNQCSDYNLDCMPPHGYIHVLSLTENITEFEKAVHRQKISGNIDTPEGGFDAMLQAAVCESHIGWRKEAKRLLLVMTDQTSHLALDSKLAGIVVPNDGNCHLKNNVYVKSTTMEHPSLGQLSEKLIDNNINVIFAVQGKQFHWYKDLLPLLPGTIAGEIESKAANLNNLVVEAYQKLISEVKVQVENQVQGIYFNITAICPDGSRKPGMEGCRNVTSNDEVLFNVTVTMKKCDVTGGKNYAIIKPIGFNETAKIHIHRNCSCQCEDNRGPKGKCVDETFLDSKCFQCDENKCHFDEDQFSSESCKSHKDQPVCSGRGVCVCGKCSCHKIKLGKVYGKYCEKDDFSCPYHHGNLCAGHGECEAGRCQCFSGWEGDRCQCPSAAAQHCVNSKGQVCSGRGTCVCGRCECTDPRSIGRFCEHCPTCYTACKENWNCMQCLHPHNLSQAILDQCKTSCALMEQQHYVDQTSECFSSPSYLRIFFIIFIVTFLIGLLKVLIIRQVILQWNSNKIKSSSDYRVSASKKDKLILQSVCTRAVTYRREKPEEIKMDISKLNAHETFRCNF

SEQ ID NO: 568 - protein, 540 aa, Homo sapiens
MQQVLENLTELPSSTGAEEIDLIFLKGIMENPIVKSLAKAHERLEDSKLEAVSDNNLELVNEILEDITPLINVDENVAELVGILKEPHFQSLLEAHDIVASKCYDSPPSSPEMNNSSINNQLLPVDAIRILGIHKRAGEPLGVTFRVENNDLVIARILHGGMIDRQGLLHVGDIIKEVNGHEVGNNPKELQELLKNISGSVTLKILPSYRDTITPQQVFVKCHFDYNPYNDNLIPCKEAGLKFSKGEILQIVNREDPNWWQASHVKEGGSAGLIPSQFLEEKRKAFVRRDWDNSGPFCGTISSKKKKKMMYLTTRNAEFDRHEIQIYEEVAKMPPFQRKTLVLIGAQGVGRRSLKNRFIVLNPTRFGTTVPFTSRKPREDEKDGQAYKFVSRSEMEADIKAGKYLEHGEYEGNLYGTKIDSILEVVQTGRTCILDVNPQALKVLRTSEFMPYVVFIAAPELETLRAMHKAVVDAGITTKLLTDSDLKKTVDESARIQRAYNHYFDLIIINDNLDKAFEKLQTAIEKLRMEPQWVPISWVY

SEQ ID NO: 569 - protein, 1023 aa, Homo sapiens
MFHLRTCAAKLRPLTASQTVKTFSQNRPAAARTFQQIRCYSAPVAAEPFLSGTSSNYVEEMYCAWLENPKSVHKSWDIFFRNTNAGAPPGTAYQSPLPLSRGSLAAVAHAQSLVEAQPNVDKLVEDHLAVQSLIRAYQIRGHHVAQLDPLGILDADLDSSVPADIISSTDKLGFYGLDESDLDKVFHLPTTTFIGGQESALPLREIIRRLEMAYCQHIGVEFMFINDLEQCQWIRQKFETPGIMQFTNEEKRTLLARLVRSTRFEEFLQRKWSSEKRFGLEGCEVLIPALKTIIDKSSENGVDYVIMGMPHRGRLNVLANVIRKELEQIFCQFDSKLEAADEGSGDVKYHLGMYHRRINRVTDRNITLSLVANPSHLEAADPVVMGKTKAEQFYCGDTEGKKVMSILLHGDAAFAGQGIVYETFHLSDLPSYTTHGTVHVVVNNQIGFTTDPRMARSSPYPTDVARVVNAPIFHVNSDDPEAVMYVCKVAAEWRSTFHKDVVVDLVCYRRNGHNEMDEPMFTQPLMYKQIRKQKPVLQKYAELLVSQGVVNQPEYEEEISKYDKICEEAFARSKDEKILHIKHWLDSPWPGFFTLDGQPRSMSCPSTGLTEDILTHIGNVASSVPVENFTIHGGLSRILKTRGEMVKNRTVDWALAEYMAFGSLLKEGIHIRLSGQDVERGTFSHRHHVLHDQNVDKRTCIPMNHLWPNQAPYTVCNSSLSEYGVLGFELGFAMASPNALVLWEAQFGDFHNTAQCIIDQFICPGQAKWVRQNGIVLLLPHGMEGMGPEHSSARPERFLQMCNDDPDVLPDLKEANFDINQLYDCNWVVVNCSTPGNFFHVLRRQILLPFRKPLIIFTPKSLLRHPEARSSFDEMLPGTHFQRVIPEDGPAAQNPENVKRLLFCTGKVYYDLTRERKARDMVGQVAITRIEQLSPFPFDLLLKEVQKYPNAELAWCQEEHKNQGYYDYVKPRLRTTISRAKPVWYAGRDPAAAPATGNKKTHLTELQRLLDTAFDLDVFKNFS

SEQ ID NO: 570 - protein, 196 aa, Homo sapiens
MEIISSKLFILLTLATSSLLTSNIFCADELVMSNLHSKENYDKYSEPRGYPKGERSLNFEELKDWGPKNVIKMSTPAVNKMPHSFANLPLRFGRNVQEERSAGATANLPLRSGRNMEVSLVRRVPNLPQRFGRTTTAKSVCRMLSDLCQGSMHSPCANDLFYSMTCQHQEIQNPDQKQSRRLLFKKIDDAELKQEK

SEQ ID NO: 571 - protein, 114 aa, Homo sapiens
MAGGKAGKDSGKAKAKAVSRSQRAGLQFPVGRIHRHLKTRTTSHGRVGATAAVYSAAILEYLTAEVLELAGNASKDLKVKRITPRHLQLAIRGDEELDSLIKATIAGGEKRRCS

SEQ ID NO: 572 - protein, 162 aa, Homo sapiens
MGLETEKADVQLFMDDDSYSHHSGLEYADPEKFADSDQDRDPHRLNSHLKLGFEDVIAEPVTTHSFDKVWICSHALFEISKYVMYKFLTVFLAIPLAFIAGILFATLSCLHIWILMPFVKTCLMVLPSVQTIWKSVTDVIIAPLCTSVGRCFSSVSLQLSQD

SEQ ID NO: 573 - protein, 379 aa, Homo sapiens
MLKRCGRRLLLALAGALLACLLVLTADPPPPPLPAERGRRALRSLAGPAGAAPAPGLGAAAAAPGALVRDVHSLSEYFSLLTRARRDAGPPPGAAPRPADGHPRPLAEPLAPRDVFIAVKTTKKFHRARLDLLLETWISRHKEMTFIFTDGEDEALARHTGNVVITNCSAAHSRQALSCKMAVEYDRFIESGRKWFCHVDDDNYVNLRALLRLLASYPHTRDVYVGKPSLDRPIQAMERVSENKVRPVHFWFATGGAGFCISRGLALKMSPWASGGHFMNTAERIRLPDDCTIGYIVEALLGVPLIRSGLFHSHLENLQQVPTSELHEQVTLSYGMFENKRNAVHVKGPFSVEADPSRFRSIHCHLYPDTPWCPRTAIF

SEQ ID NO: 574 - protein, 211 aa, Homo sapiens
MRLFLWNAVLTLFVTSLIGALIPEPEVKIEVLQKPFICHRKTKGGDLMLVHYEGYLEKDGSLFHSTHKHNNGQPIWFTLGILEALKGWDQGLKGMCVGEKRKLIIPPALGYGKEGKGKIPPESTLIFNIDLLEIRNGPRSHESFQEMDLNDDWKLSKDEVKAYLKKEFEKHGAVVNESHHDALVEDIFDKEDEDKDGFISAREFTYKHDEL

SEQ ID NO: 575 - protein, 119 aa, Homo sapiens
MAGLMTIVTSLLFLGVCAHHIIPTGSVVIPSPCCMFFVSKRIPENRVVSYQLSSRSTCLKAGVIFTTKKGQQFCGDPKQEWVQRYMKNLDAKQKKASPRARAVAVKGPVQRYPGNQTTC

SEQ ID NO: 576 - protein, 181 aa, Homo sapiens
MPKGGRKGGHKGRARQYTSPEEIDAQLQAEKQKAREEEEQKEGGDGAAGDPKKEKKSLDSDESEDEEDDYQQKRKGVEGLIDIENPNRVAQTTKKVTQLDLDGPKELSRREREEIEKQKAKERYMKMHLAGKTEQAKADLARLAIIRKQREEAARKKEEERKAKDDATLSGKRMQSLSLNK

SEQ ID NO: 577 - protein, 144 aa, Homo sapiens
MPKVKRSRKAPPDGWELIEPTLDELDQKMREAETEPHEGKRKVESLWPIFRIHHQKTRYIFDLFYKRKAISRELYEYCIKEGYADKNLIAKWKKQGYENLCCLRCIQTRDTNFGTNCICRVPKSKLEVGRIIECTHCGCRGCSG

SEQ ID NO: 578 - protein, 465 aa, Homo sapiens
MTGRAMDPLPAAAVGAAAEAEADEEADPPASDLPTPQAIEPQAIVQQVPAPSRMQMPQGNPLLLSHTLQELLARDTVQVELIPEKKGLFLKHVEYEVSSQRFKSSVYRRYNDFVVFQEMLLHKFPYRMVPALPPKRMLGADREFIEARRRALKRFVNLVARHPLFSEDVVLKLFLSFSGSDVQNKLKESAQCVGDEFLNCKLATRAKDFLPADIQAQFAISRELIRNIYNSFHKLRDRAERIASRAIDNAADLLIFGKELSAIGSDTTPLPSWAALNSSTWGSLKQALKGLSVEFALLADKAAQQGKQEENDVVEKLNLFLDLLQSYKDLCERHEKGVLHKHQRALHKYSLMKRQMMSATAQNREPESVEQLESRIVEQENAIQTMELRNYFSLYCLHQETQLIHVYLPLTSHILRAFVNSQIQGHKEMSKVWNDLRPKLSCLFAGPHSTLTPPCSPPEDGLCPH

SEQ ID NO: 579 - protein, 505 aa, Homo sapiens
MSSVQQQPPPPRRVTNVGSLLLTPQENESLFTFLGKKCVTMSSAVVQLYAADRNCMWSKKCSGVACLVKDNPQRSYFLRIFDIKDGKLLWEQELYNNFVYNSPRGYFHTFAGDTCQVALNFANEEEAKKFRKAVTDLLGRRQRKSEKRRDPPNGPNLPMATVDIKNPEITTNRFYGPQVNNISHTKEKKKGKAKKKRLTKADIGTPSNFQHIGHVGWDPNTGFDLNNLDPELKNLFDMCGISEAQLKDRETSKVIYDFIEKTGGVEAVKNELRRQAPPPPPPSRGGPPPPPPPPHNSGPPPPPARGRGAPPPPPSRAPTAAPPPPPPSRPSVAVPPPPPNRMYPPPPPALPSSAPSGPPPPPPSVLGVGPVAPPPPPPPPPPPGPPPPPGLPSDGDHQVPTTAGNKAALLDQIREGAQLKKVEQNSRPVSCSGRDALLDQIRQGIQLKSVADGQESTPPTPAPTSGIVGALMEVMQKRSKAIHSSDEDEDEDDEEDFEDDDEWED

SEQ ID NO: 580 - protein, 320 aa, Homo sapiens
MPMYQVKPYHGGGAPLRVELPTCMYRLPNVHGRSYGPAPGAGHVQEESNLSLQALESRQDDILKRLYELKAAVDGLSKMIQTPDADLDVTNIIQADEPTTLTTNALDLNSVLGKDYGALKDIVINANPASPPLSLLVLHRLLCEHFRVLSTVHTHSSVKSVPENLLKCFGEQNKKQPRQDYQLGFTLIWKNVPKTQMKFSIQTMCPIEGEGNIARFLFSLFGQKHNAVNATLIDSWVDIAIFQLKEGSSKEKAAVFRSMNSALGKSPWLAGNELTVADVVLWSVLQQIGGCSVTVPANVQRWMRSCENLAPFNTALKLLK

SEQ ID NO: 581 - protein, 801 aa, Homo sapiens
MERLWGLFQRAQQLSPRSSQTVYQRVEGPRKGHLEEEEEDGEEGAETLAHFCPMELRGPEPLGSRPRQPNLIPWAAAGRRAAPYLVLTALLIFTGAFLLGYVAFRGSCQACGDSVLVVSEDVNYEPDLDFHQGRLYWSDLQAMFLQFLGEGRLEDTIRQTSLRERVAGSAGMAALTQDIRAALSRQKLDHVWTDTHYVGLQFPDPAHPNTLHWVDEAGKVGEQLPLEDPDVYCPYSAIGNVTGELVYAHYGRPEDLQDLRARGVDPVGRLLLVRVGVISFAQKVTNAQDFGAQGVLIYPEPADFSQDPPKPSLSSQQAVYGHVHLGTGDPYTPGFPSFNQTQFPPVASSGLPSIPAQPISADIASRLLRKLKGPVAPQEWQGSLLGSPYHLGPGPRLRLVVNNHRTSTPINNIFGCIEGRSEPDHYVVIGAQRDAWGPGAAKSAVGTAILLELVRTFSSMVSNGFRPRRSLLFISWDGGDFGSVGSTEWLEGYLSVLHLKAVVYVSLDNAVLGDDKFHAKTSPLLTSLIESVLKQVDSPNHSGQTLYEQVVFTNPSWDAEVIRPLPMDSSAYSFTAFVGVPAVEFSFMEDDQAYPFLHTKEDTYENLHKVLQGRLPAVAQAVAQLAGQLLIRLSHDRLLPLDFGRYGDVVLRHIGNLNEFSGDLKARGLTLQWVYSARGDYIRAAEKLRQEIYSSEERDERLTRMYNVRIMRVEFYFLSQYVSPADSPFRHIFMGRGDHTLGALLDHLRLLRSNSSGTPGATSSTGFQESRFRRQLALLTWTLQGAANALSGDVWNIDNNF

SEQ ID NO: 582 - protein, 449 aa, Homo sapiens
MLPAATASLLGPLLTACALLPFAQGQTPNYTRPVFLCGGDVKGESGYVASEGFPNLYPPNKECIWTITVPEGQTVSLSFRVFDLELHPACRYDALEVFAGSGTSGQRLGRFCGTFRPAPLVAPGNQVTLRMTTDEGTGGRGFLLWYSGRATSGTEHQFCGGRLEKAQGTLTTPNWPESDYPPGISCSWHIIAPPDQVIALTFEKFDLEPDTYCRYDSVSVFNGAVSDDSRRLGKFCGDAVPGSISSEGNELLVQFVSDLSVTADGFSASYKTLPRGTAKEGQGPGPKRGTEPKVKLPPKSQPPEKTEESPSAPDAPTCPKQCRRTGTLQSNFCASSLVVTATVKSMVREPGEGLAVTVSLIGAYKTGGLDLPSPPTGASLKFYVPCKQCPPMKKGVSYLLMGQVEENRGPVLPPESFVVLHRPNQDQILTNLSKRKCPSQPVRAAASQD

SEQ ID NO: 583 - protein, 759 aa, Homo sapiens
MAGLTLFVGRLPPSARSEQLEELFSQVGPVKQCFVVTEKGSKACRGFGYVTFSMLEDVQRALKEITTFEGCKINVTVAKKKLRNKTKEKGKNENSECPKKEPKAKKAKVADKKARLIIRNLSFKCSEDDLKTVFAQFGAVLEVNIPRKPDGKMRGFGFVQFKNLLEAGKALKGMNMKEIKGRTVAVDWAVAKDKYKDTQSVSAIGEEKSHESKHQESVKKKGREEEDMEEEENDDDDDDDDEEDGVFDDEDEEEENIESKVTKPVQIQKRAVKRPAPAKSSDHSEEDSDLEESDSIDDGEELAQSDTSTEEQEDKAVQVSNKKKRKLPSDVNEGKTVFIRNLSFDSEEEELGELLQQFGELKYVRIVLHPDTEHSKGCAFAQFMTQEAAQKCLLAASPENEAGGLKLDGRQLKVDLAVTRDEAAKLQTTKVKKPTGTRNLYLAREGLIRAGTKAAEGVSAADMAKRERFELLKHQKLKDQNIFVSRTRLCLHNLPKAVDDKQLRKLLLSATSGEKGVRIKECRVMRDLKGVHGNMKGQSLGYAFAEFQEHEHALKALRLINNNPEIFGPLKRPIVEFSLEDRRKLKMKELRIQRSLQKMRSKPATGEPQKGQPEPAKDQQQKAAQHHTEEQSKVPPEQKRKAGSTSWTGFQTKAEVEQVELPDGKKRRKVLALPSHRGPKIRLRDKGKVKPVHPKKPKPQINQWKQEKQQLSSEQVSRKKAKGNKTETRFNQLVEQYKQKLLGPSKGAPLAKRSKWFDS

SEQ ID NO: 584 - protein, 402 aa, Homo sapiens [sequence omitted]

SEQ ID NO: 585 - protein, 738 aa, Homo sapiens
MTSSGPGPRFLLLLPLLLPPAASASDRPRGRDPVNPEKLLVITVATAETEGYLRFLRSAEFFNYTVRTLGLGEEWRGGDVARTVGGGQKVRWLKKEMEKYADREDMIIMFVDSYDVILAGSPTELLKKFVQSGSRLLFSAESFCWPEWGLAEQYPEVGTGKRFLNSGGFIGFATTIHQIVRQWKYKDDDDDQLFYTRLYLDPGLREKLSLNLDHKSRIFQNLNGALDEVVLKFDRNRVRIRNVAYDTLPIVVHGNGPTKLQLNYLGNYVPNGWTPEGGCGFCNQDRRTLPGGQPPPRVFLAVFVEQPTPFLPRFLQRLLLLDYPPDRVTLFLHNNEVFHEPHIADSWPQLQDHFSAVKLVGPEEALSPGEARDMAMDLCRQDPECEFYFSLDADAVLTNLQTLRILIEENRKVIAPMLSRHGKLWSNFWGALSPDEYYARSEDYVELVQRKRVGVWNVPYISQAYVIRGDTLRMELPQRDVFSGSDTDPDMAFCKSFRDKGIFLHLSNQHEFGRLLATSRYDTEHLHPDLWQIFDNPVDWKEQYIHENYSRALEGEGIVEQPCPDVYWFPLLSEQMCDELVAEMEHYGQWSGGRHEDSRLAGGYENVPTVDIHMKQVGYEDQWLQLLRTYVGPMTESLFPGYHTKARAVMNFVVRYRPDEQPSLRPHHDSSTFTLNVALNHKGLDYEGGGCRFLRYDCVISSPRKGWALLHPGRLTHYHEGLPTTWGTRYIMVSFVDP

SEQ ID NO: 586 - protein, 121 aa, Homo sapiens
MVDMMDLPRSRINAGMLAQFIDKPVCFVGRLEKIHPTGKMFILSDGEGKNGTIELMEPLDEEISGIVEVVGRVTAKATILCTSYVQFKEDSHPFDLGLYNEAVKIIHDFPQFYPLGIVQHD

SEQ ID NO: 587 - protein, 152 aa, Homo sapiens
MEAVLNELVSVEDLLKFEKKFQSEKAAGSVSKSTQFEYAWCLVRSKYNDDIRKGIVLLEELLPKGSKEEQRDYVFYLAVGNYRLKEYEKALKYVRGLLQTEPQNNQAKELERLIDKAMKKDGLVGMAIVGGMALGVAGLAGLIGLAVSKSKS

SEQ ID NO: 588 - protein, 503 aa, Homo sapiens
MEEHGVTQTEHMATIEAHAVAQQVQQVHVATYTEHSMLSADEDSPSSPEDTSYDDSDILNSTAADEVTAHLAAAGPVGMAAAAAVATGKKRKRPHVFESNPSIRKRQQTRLLRKLRATLDEYTTRVGQQAIVLCISPSKPNPVFKVFGAAPLENVVRKYKSMILEDLESALAEHAPAPQEVNSELPPLTIDGIPVSVDKMTQAQLRAFIPEMLKYSTGRGKPGWGKESCKPIWWPEDIPWANVRSDVRTEEQKQRVSWTQALRTIVKNCYKQHGREDLLYAFEDQQTQTQATATHSIAHLVPSQTVVQTFSNPDGTVSLIQVGTGATVATLADASELPTTVTVAQVNYSAVADGEVEQNWATLQGGEMTIQTTQASEATQAVASLAEAAVAASQEMQQGATVTMALNSEAAAHAVATLAEATLQGGGQIVLSGETAAAVGALTGVQDANGLVQIPVSMYQTVVTSLAQGNGPVQVAMAPVTTRISDSAVTMDGQAVEVVTLEQ

SEQ ID NO: 589 - protein, 373 aa, Homo sapiens
MSLRRHIGNPEYLMKRIPQNPRYQHIKSRLDTGNSMTKYTEKLEEIKKNYRYKKDELFKRLKVTTFAQLIIQVASLSDQTLEVTAEEIQRLEDNDSAASDPDAETTARTNGKGNPGEQSPSPEQFINNAGAGDSSRSTLQSVISGVGELDLDKGPVKKAEPHTKDKPYPDCPFLLLDVRDRDSYQQCHIVGAYSYPIATLSRTMNPYSNDILEYKNAHGKIIILYDDDERLASQAATTMCERGFENLFMLSGGLKVLAQKFPEGLITGSLPASCQQALPPGSARKRSSPKGPPLPAENKWRFTPEDLKKIEYYLEEEQGPADHPSRLNQANSSGRESKVPGARSAQNLPGGGPASHSNPRSLSSGHLQGKPWK

SEQ ID NO: 590 - protein, 1169 aa, Homo sapiens
MEPRESGKAPVTFDDITVYLLQEEWVLLSQQQKELCGSNKLVAPLGPTVANPELFRKFGRGPEPWLGSVQGQRSLLEHHPGKKQMGYMGEMEVQGPTRESGQSLPPQKKAYLSHLSTGSGHIEGDWAGRNRKLLKPRSIQKSWFVQFPWLIMNEEQTALFCSACREYPSIRDKRSRLIEGYTGPFKVETLKYHAKSKAHMFCVNALAARDPIWAARFRSIRDPPGDVLASPEPLFTADCPIFYPPGPLGGFDSMAELLPSSRAELEDPGGDGAIPAMYLDCISDLRQKEITDGIHSSSDINILYNDAVESCIQDPSAEGLSEEVPVVFEELPVVFEDVAVYFTREEWGMLDKRQKELYRDVMRMNYELLASLGPAAAKPDLISKLERRAAPWIKDPNGPKWGKGRPPGNKKMVAVREADTQASAADSALLPGSPVEARASCCSSSICEEGDGPRRIKRTYRPRSIQRSWFGQFPWLVIDPKETKLFCSACIERPNLHDKSSRLVRGYTGPFKVETLKYHEVSKAHRLCVNTVEIKEDTPHTALVPEISSDLMANMEHFFNAAYSIAYHSRPLNDFEKILQLLQSTGTVILGKYRNRTACTQFIKYISETLKREILEDVRNSPCVSVLLDSSTDASEQACVGIYIRYFKQMEVKESYITLAPLYSETADGYFETIVSALDELDIPFRKPGWVVGLGTDGSAMLSCRGGLVEKFQEVIPQLLPVHCVAHRLHLAVVDACGSIDLVKKCDRHIRTVFKFYQSSNKRLNELQEGAAPLEQEIIRLKDLNAVRWVASRRRTLHALLVSWPALARHLQRVAEAGGQIGHRAKGMLKLMRGFHFVKFCHFLLDFLSIYRPLSEVCQKEIVLITEVNATLGRAYVALESLRHQAGPKEEEFNASFKDGRLHGICLDKLEVAEQRFQADRERTVLTGIEYLQQRFDADRPPQLKNMEVFDTMAWPSGIELASFGNDDILNLARYFECSLPTGYSEEALLEEWLGLKTIAQHLPFSMLCKNALAQHCRFPLLSKLMAVVVCVPISTSCCERGFKAMNRIRTDERTKLSNEVLNMLMMTAVNGVAVTEYDPQPAIQHWYLTSSGRRFSHVYTCAQVPARSPASARLRKEEMGALYVEEPRTQKPPILPSREAAEVLKDCIMEPPERLLYPHTSQEAPGMS

SEQ ID NO: 591 - protein, 335 aa, Homo sapiens
MVRRDRLRRMREWWVQVGLLAVPLLAAYLHIPPPQLSPALHSWKSSGKFFTYKGLRIFYQDSVGVVGSPEIVVLLHGFPTSSYDWYKIWEGLTLRFHRVIALDFLGFGFSDKPRPHHYSIFEQASIVEALLRHLGLQNRRINLLSHDYGDIVAQELLYRYKQNRSGRLTIKSLCLSNGGIFPETHRPLLLQKLLKDGGVLSPILTRLMNFFVFSRGLTPVFGPYTRPSESELWDMWAGIRNNDGNLVIDSLLQYINQRKKFRRRWVGALASVTIPIHFIYGPLDPVNPYPEFLELYRKTLPRSTVSILDDHISHYPQLEDPMGFLNAYMGFINSF

SEQ ID NO: 592 - protein, 163 aa, Homo sapiens
MRRLLIPLALWLGAVGVGVAELTEAQRRGLQVALEEFHKHPPVQWAFQETSVESAVDTPFPAGIFVRLEFKLQQTSCRKRDWKKPECKVRPNGRKRKCLACIKLGSEDKVLGRLVHCPIETQVLREAEEHQETQCLRVQRAGEDPHSFYFPGQFAFSKALPRS

SEQ ID NO: 593 - protein, 226 aa, Homo sapiens
MSWVQAASLIQGPGDKGDVFDEEADESLLAQREWQSNMQRRVKEGYRDGIDAGKAVTLQQGFNQGYKKGAEVILNYGRLRGTLSALLSWCHLHNNNSTLINKINNLLDAVGQCEEYVLKHLKSITPPSHVVDLLDSIEDMDLCHVVPAEKKIDEAKDERLCENNAEFNKNCSKSHSGIDCSYVECCRTQEHAHSENPSPTWILEQTASLVKQLGLSVDVLQHLKQL

SEQ ID NO: 594 - protein, 234 aa, Homo sapiens
MAERGYSFSLTTFSPSGKLVQIEYALAAVAGGAPSVGIKAANGVVLATEKKQKSILYDERSVHKVEPITKHIGLVYSGMGPDYRVLVHRARKLAQQYYLVYQEPIPTAQLVQRVASVMQEYTQSGGVRPFGVSLLICGWNEGRPYLFQSDPSGAYFAWKATAMGKNYVNGKTFLEKRYNEDLELEDAIHTAILTLKESFEGQMTEDNIEVGICNEAGFRRLTPTEVKDYLAAIA

SEQ ID NO: 595 - protein, 188 aa, Homo sapiens [sequence omitted]

SEQ ID NO: 596 - protein, 146 aa, Homo sapiens
MMWQKYAGSRRSMPLGARILFHGVFYAGGFAIVYYLIQKFHSRALYYKLAVEQLQSHPEAQEALGPPLNIHYLKLIDRENFVDIVDAKLKIPVSGSKSEGLLYVHSSRGGPFQRWHLDEVFLELKDGQQIPVFKLSGENGDEVKKE

SEQ ID NO: 597 - protein, 1158 aa, Homo sapiens
MAAVRGAPLLSCLLALLALCPGGRPQTVLTDDEIEEFLEGFLSELEPEPREDDVEAPPPPEPTPRVRKAQAGGKPGKRPGTAAEVPPEKTKDKGKKGKKDKGPKVPKESLEGSPRPPKKGKEKPPKATKKPKEKPPKATKKPKEKPPKATKKPKEKPPKATKKPPSGKRPPILAPSETLEWPLPPPPSPGPEELPQEGGAPLSNNWQNPGEETHVEAREHQPEPEEETEQPTLDYNDQIEREDYEDFEYIRRQKQPRPPPSRRRRPERVWPEPPEEKAPAPAPEERIEPPVKPLLPPLPPDYGDGYVIPNYDDMDYYFGPPPPQKPDAERQTDEEKEELKKPKKEDSSPKEETDKWAVEKGKDHKEPRKGEELEEEWTPTEKVKCPPIGMESHRIEDNQIRASSMLRHGLGAQRGRLNMQTGATEDDYYDGAWCAEDDARTQWIEVDTRRTTRFTGVITQGRDSSIHDDFVTTFFVGFSNDSQTWVMYTNGYEEMTFHGNVDKDTPVLSELPEPVVARFIRIYPLTWNGSLCMRLEVLGCSVAPVYSYYAQNEVVATDDLDFRHHSYKDMRQLMKVVNEECPTITRTYSLGKSSRGLKIYAMEISDNPGEHELGEPEFRYTAGIHGNEVLGRELLLLLMQYLCREYRDGNPRVRSLVQDTRIHLVPSLNPDGYEVAAQMGSEFGNWALGLWTEEGFDIFEDFPDLNSVLWGAEERKWVPYRVPNNNLPIPERYLSPDATVSTEVRAIIAWMEKNPFVLGANLNGGERLVSYPYDMARTPTQEQLLAAAMAAARGEDEDEVSEAQETPDHAIFRWLAISFASAHLTLTEPYRGGCQAQDYTGGMGIVNGAKWNPRTGTINDFSYLHTNCLELSFYLGCDKFPHESELPREWENNKEALLTFMEQVHRGIKGVVTDEQGIPIANATISVSGINHGVKTASGGDYWRILNPGEYRVTAHAEGYTPSAKTCNVDYDIGATQCNFILARSNWKRIREIMAMNGNRPIPHIDPSRPMTPQQRRLQQRRLQHRLRLRAQMRLRRLNATTTLGPHTVPPTLPPAPATTLSTTIEPWGLIPPTTAGWEESETETYTEVVTEFGTEVEPEFGTKVEPEFETQLEPEFETQLEPEFEEEEEEEKEEEIATGQAFPFTTVETYTVNFGDF

SEQ ID NO: 598 - protein, 202 aa, Homo sapiens
MSGRSVRAETRSRAKDDIKKVMAAIEKVRKWEKKWVTVGDTSLRIFKWVPVTDSKEKEKSKSNSSAAREPNGFPSDASANSSLLLEFQDENSNQSSVSDVYQLKVDSSTNSSPSPQQSESLSPAHTSDFRTDDSQPPTLGQEILEEPSLPSSEVADEPPTLTKEEPVPLETQVVEEEEDSGAPPLKRFCVDQPTVPQTASES

SEQ ID NO: 599 - protein, 198 aa, Homo sapiens
MKLYSLSVLYKGEAKVVLLKAAYDVSSFSFFQRSSVQEFMTFTSQLIVERSSKGTRASVKEQDYLCHVYVRNDSLAGVVIADNEYPSRVAFTLLEKVLDEFSKQVDRIDWPVGSPATIHYPALDGHLSRYQNPREADPMTKVQAELDETKIILHNTMESLLERGEKLDDLVSKSEVLGTQSKAFYKTARKQNSCCAIM

SEQ ID NO: 600 - protein, 562 aa, Homo sapiens
MSRSLLLWFLLFLLLLPPLPVLLADPGAPTPVNPCCYYPCQHQGICVRFGLDRYQCDCTRTGYSGPNCTIPGLWTWLRNSLRPSPSFTHFLLTHGRWFWEFVNATFIREMLMRLVLTVRSNLIPSPPTYNSAHDYISWESFSNVSYYTRILPSVPKDCPTPMGTKGKKQLPDAQLLARRFLLRRKFIPDPQGTNLMFAFFAQHFTHQFFKTSGKMGPGFTKALGHGVDLGHIYGDNLERQYQLRLFKDGKLKYQVLDGEMYPPSVEEAPVLMHYPRGIPPQSQMAVGQEVFGLLPGLMLYATLWLREHNRVCDLLKAEHPTWGDEQLFQTTRLILIGETIKIVIEEYVQQLSGYFLQLKFDPELLFGVQFQYRNRIAMEFNHLYHWHPLMPDSFKIGGGRNMDHHILHVAVDVIRESREMRLQPFNEYRKRFGMKPYTSFQELVGEKEMAAELEELYGDIDALEFYPGLLLEKCHPNSIFGESMIEIGAPFSLKGLLGNPICSPEYWKPSTFGGEVGFNIVKTATLKKLVCLNTKTCPYVSFRVPDASQDDGPAVERPSTEL

SEQ ID NO: 601 - protein, 683 aa, Homo sapiens
MSPHPEAITDCVTLNTVGQLAEGGYPLRFSTLFQEQQKMNISQASVSFKDVTIEFTQEEWQQMAPVQKNLYRDVMLENYSNLVSVGYCCFKPEVIFKLEQGEEPWFSEEEFSNQSHPKDYRGDDLIKQNKKIKDKHLEQAICINNKTLTTEEEKVLGKPFTLHVAAVASTKMSCKCNSWEVNLQSISEFIINNRNYSTKKIGCGNVCENSPFKINFEKTQTGEKFYEHNKNMKALNYNENLPKHPKFQTLEQAFECNKIGKAFNDKANCVKHNSSHTGETSSKDDEFRKNCDKKTLFDHRRTGTGKKHLHLNQCGKSFEKSTVEEYNKLNMGIKHYELNPSGNNFNRKAHLTDPQTAVIEENPLVSNDRTQTWVKSSEYHENKKSYQTSVHRVRRRSHSMMKPYKCNECGKSFCQKGHLIQHQRTHTGEKPFECSECGKTFSQKSHLSTHQRIHTAEKPYKCNECGKTFVQKSTLRGHQRIHTGEKPYECSECGKTFVQKSTLRDHHRIHTGEKSFQCNQCGKTFGQKSNLRIHQRTHTGEKTYQCNECEKSFWRKDHLIQHQKTHTGEKPFKCNECGKTFARTSTLRVHQRIHTGEKPFKCNECGKKFVRKAILSDHQRIHTGEKPFQCNKCGKTFGQKSNLRIHQRTHSGEKSYECNEYGKLCKKSTLSLYQKIQGEGNPY

SEQ ID NO: 602 - protein, 219 aa, Homo sapiens
MNRLFGKAKPKAPPPSLTDCIGTVDSRAESIDKKISRLDAELVKYKDQIKKMREGPAKNMVKQKALRVLKQKRMYEQQRDNLAQQSFNMEQANYTIQSLKDTKTTVDAMKLGVKEMKKAYKQVKIDQIEDLQDQLEDMMEDANEIQEALSRSYGTPELDEDDLEAELDALGDELLADEDSSYLDEAASAPAIPEGVPTDTKNKDGVLVDEFGLPQIPAS

SEQ ID NO: 603 - protein, 461 aa, Homo sapiens
MSRINKNVVLALLTLTSSAFLLFQLYYYKHYLSTKNGAGLSKSKGSRIGFDSTQWRAVKKFIMLTSNQNVPVFLIDPLILELINKNFEQVKNTSHGSTSQCKFFCVPRDFTAFALQYHLWKNEEGWFRIAENMGFQCLKIESKDPRLDGIDSLSGTEIPLHYICKLATHAIHLVVFHERSGNYLWHGHLRLKEHIDRKFVPFRKLQFGRYPGAFDRPELQQVTVDGLEVLIPKDPMHFVEEVPHSRFIECRYKEARAFFQQYLDDNTVEAVAFRKSAKELLQLAAKTLNKLGVPFWLSSGTCLGWYRQCNIIPYSKDVDLGIFIQDYKSDIILAFQDAGLPLKHKFGKVEDSLELSFQGKDDVKLDVFFFYEETDHMWNGGTQAKTGKKFKYLFPKFTLCWTEFVDMKVHVPCETLEYIEANYGKTWKIPVKTWDWKRSPPNVQPNGIWPISEWDEVIQLY

SEQ ID NO: 604 - protein, 96 aa, Homo sapiens
MPGPTPSGTNVGSSGRSPSKAVAARAAGSTVRQRKNASCGTRSAGRTTSAGTGGMWRFYTEDSPGLKVGPVPVLVMSLLFIASVFMLHIWGKYTRS

SEQ ID NO: 605 - protein, 1676 aa, Homo sapiens
MGLLGILCFLIFLGKTWGQEQTYVISAPKIFRVGASENIVIQVYGYTEAFDATISIKSYPDKKFSYSSGHVHLSSENKFQNSAILTIQPKQLPGGQNPVSYVYLEVVSKHFSKSKRMPITYDNGFLFIHTDKPVYTPDQSVKVRVYSLNDDLKPAKRETVLTFIDPEGSEVDMVEEIDHIGIISFPDFKIPSNPRYGMWTIKAKYKEDFSTTGTAYFEVKEYVLPHFSVSIEPEYNFIGYKNFKNFEITIKARYFYNKVVTEADVYITFGIREDLKDDQKEMMQTAMQNTMLINGIAQVTFDSETAVKELSYYSLEDLNNKYLYIAVTVIESTGGFSEEAEIPGIKYVLSPYKLNLVATPLFLKPGIPYPIKVQVKDSLDQLVGGVPVTLNAQTIDVNQETSDLDPSKSVTRVDDGVASFVLNLPSGVTVLEFNVKTDAPDLPEENQAREGYRAIAYSSLSQSYLYIDWTDNHKALLVGEHLNIIVTPKSPYIDKITHYNYLILSKGKIIHFGTREKFSDASYQSINIPVTQNMVPSSRLLVYYIVTGEQTAELVSDSVWLNIEEKCGNQLQVHLSPDADAYSPGQTVSLNMATGMDSWVALAAVDSAVYGVQRGAKKPLERVFQFLEKSDLGCGAGGGLNNANVFHLAGLTFLTNANADDSQENDEPCKEILRPRRTLQKKIEEIAAKYKHSVVKKCCYDGACVNNDETCEQRAARISLGPRCIKAFTECCVVASQLRANISHKDMQLGRLHMKTLLPVSKPEIRSYFPESWLWEVHLVPRRKQLQFALPDSLTTWEIQGVGISNTGICVADTVKAKVFKDVFLEMNIPYSVVRGEQIQLKGTVYNYRTSGMQFCVKMSAVEGICTSESPVIDHQGTKSSKCVRQKVEGSSSHLVTFTVLPLEIGLHNINFSLETWFGKEILVKTLRVVPEGVKRESYSGVTLDPRGIYGTISRRKEFPYRIPLDLVPKTEIKRILSVKGLLVGEILSAVLSQEGINILTHLPKGSAEAELMSVVPVFYVFHYLETGNHWNIFHSDPLIEKQKLKKKLKEGMLSIMSYRNADYSYSVWKGGSASTWLTAFALRVLGQVNKYVEQNQNSICNSLLWLVENYQLDNGSFKENSQYQPIKLQGTLPVEARENSLYLTAFTVIGIRKAFDICPLVKIDTALIKADNFLLENTLPAQSTFTLAISAYALSLGDKTHPQFRSIVSALKREALVKGNPPIYRFWKDNLQHKDSSVPNTGTARMVETTAYALLTSLNLKDINYVNPVIKWLSEEQRYGGGFYSTQDTINAIEGLTEYSLLVKQLRLSMDIDVSYKHKGALHNYKMTDKNFLGRPVEVLLNDDLIVSTGFGSGLATVHVTTVVHKTSTSEEVCSFYLKIDTQDIEASHYRGYGNSDYKRIVACASYKPSREESSSGSSHAVMDISLPTGISANEEDLKALVEGVDQLFTDYQIKDGHVILQLNSIPSSDFLCVRFRIFELFEVGFLSPATFTVYEYHRPDKQCTMFYSTSNIKIQKVCEGAACKCVEADCGQMQEELDLTISAETRKQTACKPEIAYAYKVSITSITVENVFVKYKATLLDIYKTGEAVAEKDSEITFIKKVTCTNAELVKGRQYLIMGKEALQIKYNFSFRYIYPLDSLTWIEYWPRDTTCSSCQAFLANLDEFAEDIFLNGC

SEQ ID NO: 606 - protein, 185 aa, Homo sapiens
MPRLFLFHLLEFCLLLNQFSRAVAAKWKDDVIKLCGRELVRAQIAICGMSTWSKRSLSQEDAPQTPRPVAEIVPSFINKDTETIIIMLEFIANLPPELKAALSERQPSLPELQQYVPALKDSNLSFEEFKKLIRNRQSEAADSNPSELKYLGLDTHSQKKRRPYVALFEKCCLIGCTKRSLAKYC

SEQ ID NO: 607 - protein, 147 aa, Homo sapiens
MGFIFSKSMNESMKNQKEFMLMNARLQLERQLIMQSEMRERQMAMQIAWSREFLKYFGTFFGLAAISLTAGAIKKKKPAFLVPIVPLSFILTYQYDLGYGTLLERMKGEAEDILETEKSKLQLPRGMITFESIEKARKEQSRFFIDK

SEQ ID NO: 608 - protein, 148 aa, Homo sapiens
MAESDWDTVTVLRKKGPTAAQAKSKQAILAAQRRGEDVETSKKWAAGQNKQHSITKNTAKLDRETEELHHDRVTLEVGKVIQQGRQSKGLTQKDLATKINEKPQVIADYESGRAIPNNQVLGKIERAIGLKLRGKDIGKPIEKGPRAK

SEQ ID NO: 609 - protein, 2677 aa, Homo sapiens
MSTCCWCTPGGASTIDFLKRYASNTPSGEFQTADEDLCYCLECVAEYHKARDELPFLHEVLWELETLRLINHFEKSMKAEIGDDDELYIVDNNGEMPLFDITGQDFENKLRVPLLEILKYPYLLLHERVNELCVEALCRMEQANCSFQVFDKHPGIYLFLVHPNEMVRRWAILTARNLGKVDRDDYYDLQEVLLCLFKVIELGLLESPDIYTSSVLEKGKLILLPSHMYDTTNYKSYWLGICMLLTILEEQAMDSLLLGSDKQNDFMQSILHTMEREADDDSVDPFWPALHCFMVILDRLGSKVWGQLMDPIVAFQTIINNASYNREIRHIRNSSVRTKLEPESYLDDMVTCSQIVYNYNPEKTKKDSGWRTAICPDYCPNMYEEMETLASVLQSDIGQDMRVHNSTFLWFIPFVQSLMDLKDLGVAYIAQVVNHLYSEVKEVLNQTDAVCDKVTEFFLLILVSVIELHRNKKCLHLLWVSSQQWVEAVVKCAKLPTTAFTRSSEKSSGNCSKGTAMISSLSLHSMPSNSVQLAYVQLIRSLLKEGYQLGQQSLCKRFWDKLNLFLRGNLSLGWQLTSQETHELQSCLKQIIRNIKFKAPPCNTFVDLTSACKISPASYNKEESEQMGKTSRKDMHCLEASSPTFSKEPMKVQDSVLIKADNTIEGDNNEQNYIKDVKLEDHLLAGSCLKQSSKNIFTERAEDQIKISTRKQKSVKEISSYTPKDCTSRNGPERGCDRGIIVSTRLLTDSSTDALEKVSTSNEDFSLKDDALAKTSKRKTKVQKDEICAKLSHVIKKQHRKSTLVDNTINLDENLTVSNIESFYSRKDTGVQKGDGFIHNLSLDPSGVLDDKNGEQKSQNNVLPKEKQLKNEELVIFSFHENNCKIQEFHVDGKELIPFTEMTNASEKKSSPFKDLMTVPESRDEEMSNSTSVIYSNLTREQAPDISPKSDTLTDSQIDRDLHKLSLLAQASVITFPSDSPQNSSQLQRKVKEDKRCFTANQNNVGDTSRGQVIIISDSDDDDDERILSLEKLTKQDKICLEREHPEQHVSTVNSKEEKNPVKEEKTETLFQFEESDSQCFEFESSSEVFSVWQDHPDDNNSVQDGEKKCLAPIANTTNGQGCTDYVSEVVKKGAEGIEEHTRPRSISVEEFCEIEVKKPKRKRSEKPMAEDPVRPSSSVRNEGQSDTNKRDLVGNDFKSIDRRTSTPNSRIQRATTVSQKKSSKLCTCTEPIRKVPVSKTPKKTHSDAKKGQNRSSNYLSCRTTPAIVPPKKFRQCPEPTSTAEKLGLKKGPRKAYELSQRSLDYVAQLRDHGKTVGVVDTRKKTKLISPQNLSVRNNKKLLTSQELQMQRQIRPKSQKNRRRLSDCESTDVKRAGSHTAQNSDIFVPESDRSDYNCTGGTEVLANSNRKQLIKCMPSEPETIKAKHGSPATDDACPLNQCDSVVLNGTVPTNEVIVSTSEDPLGGGDPTARHIEMAALKEGEPDSSSDAEEDNLFLTQNDPEDMDLCSQMENDNYKLIELIHGKDTVEVEEDSVSRPQLESLSGTKCKYKDCLETTKNQGEYCPKHSEVKAADEDVFRKPGLPPPASKPLRPTTKIFSSKSTSRIAGLSKSLETSSALSPSLKNKSKGIQSILKVPQPVPLIAQKPVGEMKNSCNVLHPQSPNNSNRQGCKVPFGESKYFPSSSPVNILLSSQSVSDTFVKEVLKWKYEMFLNFGQCGPPASLCQSISRPVPVRFHNYGDYFNVFFPLMVLNTFETVAQEWLNSPNRENFYQLQVRKFPADYIKYWEFAVYLEECELAKQLYPKENDLVFLAPERINEEKKDTERNDIQDLHEYHSGYVHKFRRTSVMRNGKTECYLSIQTQENFPANLNELVNCIVISSLVTTQRKLKAMSLLGSRNQLARAVLNPNPMDFCTKDLLTTTSERIIAYLRDFNEDQKKAIETAYAMVKHSPSVAKICLIHGPPGTGKSKTIVGLLYRLLTENQRKGHSDENSNAKIKQNRVLVCAPSNAAVDELMKKIILEFKEKCKDKKNPLGNCGDINLVRLGPEKSINSEVLKFSLDSQVNHRMKKELPSHVQAMHKRKEFLDYQLDELSRQRALCRGGREIQRQELDENISKVSKERQELASKIKEVQGRPQKTQSIIILESHIICCTLSTSGGLLLESAFRGQGGVPFSCVIVDEAGQSCEIETLTPLIHRCNKLILVGDPKQLPPTVISMKAQEYGYDQSMMARFCRLLEENVEHNMISRLPILQLTVQYRMHPDICLFPSNYVYNRNLKTNRQTEAIRCSSDWPFQPYLVFDVGDGSERRDNDSYINVQEIKLVMEIIKLIKDKRKDVSFRNIGIITHYKAQKTMIQKDLDKEFDRKGPAEVDTVDAFQGRQKDCVIVTCVRANSIQGSIGFLASLQRLNVTITRAKYSLFILGHLRTLMENQHWNQLIQDAQKRGAIIKTCDKNYRHDAVKILKLKPVLQRSLTHPPTIAPEGSRPQGGLPSSKLDSGFAKTSVAASLYHTPSDSKEITLTVTSKDPERPPVHDQLQDPRLLKRMGIEVKGGIFLWDPQPSSPQHPGATPPTGEPGFPVVHQDLSHIQQPAAVVAALSSHKPPVRGEPPAASPEASTCQSKCDDPEEELCHRREARAFSEGEQEKCGSETHHTRRNSRWDKRTLEQEDSSSKKRKLL

SEQ ID NO: 610 - protein, 466 aa, Homo sapiens
MSTRSVSSSSYRRMFGGPGTASRPSSSRSYVTTSTRTYSLGSALRPSTSRSLYASSPGGVYATRSSAVRLRSSVPGVRLLQDSVDFSLADAINTEFKNTRTNEKVELQELNDRFANYIDKVRFLEQQNKILLAELEQLKGQGKSRLGDLYEEEMRELRRQVDQLTNDKARVEVERDNLAEDIMRLREKLQEEMLQREEAENTLQSFRQDVDNASLARLDLERKVESLQEEIAFLKKLHEEEIQELQAQIQEQHVQIDVDVSKPDLTAALRDVRQQYESVAAKNLQEAEEWYKSKFADLSEAANRNNDALRQAKQESTEYRRQVQSLTCEVDALKGTNESLERQMREMEENFAVEAANYQDTIGRLQDEIQNMKEEMARHLREYQDLLNVKMALDIEIATYRKLLEGEESRISLPLPNFSSLNLRETNLDSLPLVDTHSKRTLLIKTVETRDGQVINETSQHHDDLE

SEQ ID NO: 611 - protein, 518 aa, Homo sapiens
MAFWAGGSPSVVDYFPSEDFYRCGYCKNESGSRSNGMWAHSMTVQDYQDLIDRGWRRSGKYVYKPVMNQTCCPQYTIRCRPLQFQPSKSHKKVLKKMLKFLAKGEVPKGSCEDEPMDSTMDDAVAGDFALINKLDIQCDLKTLSDDIKESLESEGKNSKKEEPQELLQSQDFVGEKLGSGEPSHSVKVHTVPKPGKGADLSKPPCRKAKEIRKERKRLKLMQQNPAGELEGFQAQGHPPSLFPPKAKSNQPKSLEDLIFESLPENASHKLEVRVVRSSPPSSQFKATLLESYQVYKRYQMVIHKNPPDTPTESQFTRFLCSSPLEAETPPNGPDCGYGSFHQQYWLDGKIIAVGVIDILPNCVSSVYLYYDPDYSFLSLGVYSALREIAFTRQLHEKTSQLSYYYMGFYIHSCPKMKYKGQYRPSDLLCPETYVWVPIEQCLPSLENSKYCRFNQDPEAVDEDRSTEPDRLQVFHKRAIMPYGVYKKQQKDPSEEAAVLQYASLVGQKCSERMLLFRN

SEQ ID NO: 612 - protein, 3354 aa, Homo sapiens
MGRHVATSCHVAWLLVLISGCWGQVNRLPFFTNHFFDTYLLISEDTPVGSSVTQLLAQDMDNDPLVFGVSGEEASRFFAVEPDTGVVWLRQPLDRETKSEFTVEFSVSDHQGVITRKVNIQVGDVNDNAPTFHNQPYSVRIPENTPVGTPIFIVNATDPDLGAGGSVLYSFQPPSQFFAIDSARGIVTVIRELDYETTQAYQLTVNATDQDKTRPLSTLANLAIIITDVQDMDPIFINLPYSTNIYEHSPPGTTVRIITAIDQDKGRPRGIGYTIVSGNTNSIFALDYISGVLTLNGLLDRENPLYSHGFILTVKGTELNDDRTPSDATVTTTFNILVIDINDNAPEFNSSEYSVAITELAQVGFALPLFIQVVDKDENLGLNSMFEVYLVGNNSHHFIISPTSVQGKADIRIRVAIPLDYETVDRYDFDLFANESVPDHVGYAKVKITLINENDNRPIFSQPLYNISLYENVTVGTSVLTVLATDNDAGTFGEVSYFFSDDPDRFSLDKDTGLIMLIARLDYELIQRFTLTIIARDGGGEETTGRVRINVLDVNDNVPTFQKDAYVGALRENEPSVTQLVRLRATDEDSPPNNQITYSIVSASAFGSYFDISLYEGYGVISVSRPLDYEQISNGLIYLTVMAMDAGNPPLNSTVPVTIEVFDENDNPPTFSKPAYFVSVVENIMAGATVLFLNATDLDRSREYGQESIIYSLEGSTQFRINARSGEITTTSLLDRETKSEYILIVRAVDGGVGHNQKTGIATVNITLLDINDNHPTWKDAPYYINLVEMTPPDSDVTTVVAVDPDLGENGTLVYSIQPPNKFYSLNSTTGKIRTTHAMLDRENPDPHEAELMRKIVVSVTDCGRPPLKATSSATVFVNLLDLNDNDPTFQNLPFVAEVLEGIPAGVSIYQVVAIDLDEGLNGLVSYRMPVGMPRMDFLINSSSGVVVTTTELDRERIAEYQLRVVASDAGTPTKSSTSTLTIHVLDVNDETPTFFPAVYNVSVSEDVPREFRVVWLNCTDNDVGLNAELSYFITGGNVDGKFSVGYRDAVVRTVVGLDRETTAAYMLILEAIDNGPVGKRHTGTATVFVTVLDVNDNRPIFLQSSYEASVPEDIPEGHSILQLKATDADEGEFGRVWYRILHGNHGNNFRIHVSNGLLMRGPRPLDRERNSSHVLIVEAYNHDLGPMRSSVRVIVYVEDINDEAPVFTQQQYSRLGLRETAGIGTSVIVVQATDRDSGDGGLVNYRILSGAEGKFEIDESTGLIITVNYLDYETKTSYMMNVSATDQAPPFNQGFCSVYITLLNELDEAVQFSNASYEAAILENLALGTEIVRVQAYSIDNLNQITYRFNAYTSTQAKALFKIDAITGVITVQGLVDREKGDFYTLTVVADDGGPKVDSTVKVYITVLDENDNSPRFDFTSDSAVSIPEDCPVGQRVATVKAWDPDAGSNGQVVFSLASGNIAGAFEIVTTNDSIGEVFVARPLDREELDHYILQVVASDRGTPPRKKDHILQVTILDINDNPPVIESPFGYNVSVNENVGGGTAVVQVRATDRDIGINSVLSYYITEGNKDMAFRMDRISGEIATRPAPPDRERQSFYHLVATVEDEGTPTLSATTHVYVTIVDENDNAPMFQQPHYEVLLDEGPDTLNTSLITIQALDLDEGPNGTVTYAIVAGNIVNTFRIDRHMGVITAAKELDYEISHGRYTLIVTATDQCPILSHRLTSTTTVLVNVNDINDNVPTFPRDYEGPFEVTEGQPGPRVWTFLAHDRDSGPNGQVEYSIMDGDPLGEFVISPVEGVLRVRKDVELDRETIAFYNLTICARDRGMPPLSSTMLVGIRVLDINDNDPVLLNLPMNITISENSPVSSFVAHVLASDADSGCNARLTFNITAGNRERAFFINATTGIVTVNRPLDRERIPEYKLTISVKDNPENPRIARRDYDLLLIFLSDENDNHPLFTKSTYQAEVMENSPAGTPLTVLNGPILALDADQDIYAVVTYQLLGAQSGLFDINSSTGVVTVRSGVIIDREAFSPPILELLLLAEDIGLLNSTAHLLITILDDNDNRPTFSPATLTVHLLENCPPGFSVLQVTATDEDSGLNGELVYRIEAGAQDRFLIHLVTGVIRVGNATIDREEQESYRLTVVATDRGTVPLSGTAIVTILIDDINDSRPEFLNPIQTVSVLESAEPGTVIANITAIDHDLNPKLEYHIVGIVAKDDTDRLVPNQEDAFAVNINTGSVMVKSPMNRELVATYEVTLSVIDNASDLPERSVSVPNAKLTVNVLDVNDNTPQFKPFGITYYMERILEGATPGTTLIAVAAVDPDKGLNGLVTYTLLDLVPPGYVQLEDSSAGKVIANRTVDYEEVHWLNFTVRASDNGSPPRAAEIPVYLEIVDINDNNPIFDQPSYQEAVFEDVPVGTIILTVTATDADSGNFALIEYSLGDGESKFAINPTTGDIYVLSSLDREKKDHYILTALAKDNPGDVASNRRENSVQVVIQVLDVNDCRPQFSKPQFSTSVYENEPAGTSVITMMATDQDEGPNGELTYSLEGPGVEAFHVDMDSGLVTTQRPLQSYEKFSLTVVATDGGEPPLWGTTMLLVEVIDVNDNRPVFVRPPNGTILHIREEIPLRSNVYEVYATDKDEGLNGAVRYSFLKTAGNRDWEFFIIDPISGLIQTAQRLDRESQAVYSLILVASDLGQPVPYETMQPLQVALEDIDDNEPLFVRPPKGSPQYQLLTVPEHSPRGTLVGNVTGAVDADEGPNAIVYYFIAAGNEEKNFHLQPDGCLLVLRDLDREREAIFSFIVKASSNRSWTPPRGPSPTLDLVADLTLQEVRVVLEDINDQPPRFTKAEYTAGVATDAKVGSELIQVLALDADIGNNSLVFYSILAIHYFRALANDSEDVGQVFTMGSMDGILRTFDLFMAYSPGYFVVDIVARDLAGHNDTAIIGIYILRDDQRVKIVINEIPDRVRGFEEEFIHLLSNITGAIVNTDNVQFHVDKKGRVNFAQTELLIHVVNRDTNRILDVDRVIQMIDENKEQLRNLFRNYNVLDVQPAISVRLPDDMSALQMAIIVLAILLFLAAMLFVLMNWYYRTVHKRKLKAIVAGSAGNRGFIDIMDMPNTNKYSFDGANPVWLDPFCRNLELAAQAEHEDDLPENLSEIADLWNSPTRTHGTFGREPAAVKPDDDRYLRAAIQEYDNIAKLGQIIREGPIKGSLLKVVLEDYLRLKKLFAQRMVQKASSCHSSISELIQTELDEEPGDHSPGQGSLRFRHKPPVELKGPDGIHVVHGSTGTLLATDLNSLPEEDQKGLGRSLETLTAAEATAFERNARTESAKSTPLHKLRDVIMETPLEITEL

SEQ ID NO: 613 - protein, 834 aa, Homo sapiens
MEEKTQIKTFLGSKLPKYGTKSVRSTLQPMPNGTPVNLLGTSKNSNVKSYIKNNGSDCPSSHSFNWRKANKYQLCAQGVEEPNNTQNSHDKIIDPEKRVPTQGMFDKNGIKGGLKSVSLFTSKLAKPSTMFVSSTEELNQKSFSGPSNLGKFTKGTLLGRTSYSSINTPKSQLNGFYGNRSAGSMQRPRANSCATRSSSGESLAQSPDSSKSINCEKMVRSQSFSHSIQNSFLPPSSITRSHSFNRAVDLTKPYQNQQLSIRVPLRSSMLTRNSRQPEVLNGNEHLGYGFNRPYAAGGKKLALPNGPGVTSTLGYRMVHPSLLKSSRSPFSGTMTVDGNKNSPADTCVEEDATVLAKDRAANKDQELIENESYRTKNNQTMKHDAKMRYLSDDVDDISLSSLSSSDKNDLSEDFSDDFIDIEDSNRTRITPEEMSLKEEKHENGPPQDMFDSPKENEKAFSKTDEWIDISVSDRSECTKHTSGNNLVSPDTDYRAGSSFELSPSDSSDGTYMWDEEGLEPIGNVHPVGSYESSEMNSIDILNNLESCDLEDDDLMLDVDLPEDAPLENVECDNMNRFDRPDRNVRQPQEGFWKRPPQRWSGQEHYHLSHPDHYHHHGKSDLSRGSPYRESPLGHFESYGGMPFFQAQKMFVDVPENTVILDEMTLRHMVQDCTAVKTQLLKLKRLLHQHDGSGSLHDIQLSLPSSPEPEDGDKVYKNEDLLNEIKQLKDEIKKKDEKIQLLELQLATQHICHQKCKEEKCTYADKYTQTPWRRIPGGYSAPSFSPWQGSFQGIPRTVPPHRRQTSSTTAFQQPSQTHRSHPGKTNKATTYRGPQ

SEQ ID NO: 614 - protein, 377 aa, Homo sapiens
MCEEEDSTALVCDNGSGLCKAGFAGDDAPRAVFPSIVGRPRHQGVMVGMGQKDSYVGDEAQSKRGILTLKYPIEHGIITNWDDMEKIWHHSFYNELRVAPEEHPTLLTEAPLNPKANREKMTQIMFETFNVPAMYVAIQAVLSLYASGRTTGIVLDSGDGVTHNVPIYEGYALPHAIMRLDLAGRDLTDYLMKILTERGYSFVTTAEREIVRDIKEKLCYVALDFENEMATAASSSSLEKSYELPDGQVITIGNERFRCPETLFQPSFIGMESAGIHETTYNSIMKCDIDIRKDLYANNVLSGGTTMYPGIADRMQKEITALAPSTMKIKIIAPPERKYSVWIGGSILASLSTFQQMWISKQEYDEAGPSIVHRKCF

SEQ ID NO: 615 - protein, 325 aa, Homo sapiens
MESKMGELPLDINIQEPRWDQSTFLGRARHFFTVTDPRNLLLSGAQLEASRNIVQNYRAGVVTPGITEDQLWRAKYVYDSAFHPDTGEKVVLIGRMSAQVPMNMTITGCMLTFYRKTPTVVFWQWVNQSFNAIVNYSNRSGDTPITVRQLGTAYVSATTGAVATALGLKSLTKHLPPLVGRFVPFAAVAAANCINIPLMRQRELQVGIPVADEAGQRLGYSVTAAKQGIFQVVISRICMAIPAMAIPPLIMDTLEKKDFLKRRPWLGAPLQVGLVGFCLVFATPLCCALFPQKSSIHISNLEPELRAQIHEQNPSVEVVYYNKGL

SEQ ID NO: 616 - protein, 1037 aa, Homo sapiens
MWRCGGRQGLCVLRRLSGGHAHHRAWRWNSNRACERALQYKLGDKIHGFTVNQVTSVPELFLTAVKLTHDDTGARYLHLAREDTNNLFSVQFRTTPMDSTGVPHILEHTVLCGSQKYPCRDPFFKMLNRSLSTFMNAFTASDYTLYPFSTQNPKDFQNLLSVYLDATFFPCLRELDFWQEGWRLEHENPSDPQTPLVFKGVVFNEMKGAFTDNERIFSQHLQNRLLPDHTYSVVSGGDPLCIPELTWEQLKQFHATHYHPSNARFFTYGNFPLEQHLKQIHEEALSKFQKIEPSTVVPAQTPWDKPREFQITCGPDSFATDPSKQTTISVSFLLPDITDTFEAFTLSLLSSLLTSGPNSPFYKALIESGLGTDFSPDVGYNGYTREAYFSVGLQGIAEKDIETVRSLIDRTIDEVVEKGFEDDRIEALLHKIEIQMKHQSTSFGLMLTSYIASCWNHDGDPVELLKLGNQLAKFRQCLQENPKFLQEKVKQYFKNNQHKLTLSMRPDDKYHEKQAQVEATKLKQKVEALSPGDRQQIYEKGLELRSQQSKPQDASCLPALKVSDIEPTIPVTELDVVLTAGDIPVQYCAQPTNGMVYFRAFSSLNTLPEELRPYVPLFCSVLTKLGCGLLDYREQAQQIELKTGGMSASPHVLPDDSHMDTYEQGVLFSSLCLDRNLPDMMQLWSEIFNNPCFEEEEHFKVLVKMTAQELANGIPDSGHLYASIRAGRTLTPAGDLQETFSGMDQVRLMKRIAEMTDIKPILRKLPRIKKHLLNGDNMRCSVNATPQQMPQTEKAVEDFLRSIGRSKKERRPVRPHTVEKPVPSSSGGDAHVPHGSQVIRKLVMEPTFKPWQMKTHFLMPFPVNYVGECIRTVPYTDPDHASLKILARLMTAKFLHTEIREKGGAYGGGAKLSHNGIFTLYSYRDPNTIETLQSFGKAVDWAKSGKFTQQDIDEAKLSVFSTVDAPVAPSDKGMDHFLYGLSDEMKQAHREQLFAVSHDKLLAVSDRYLGTGKSTHGLAILGPENPKIAKDPSWIIQ

SEQ ID NO: 617 - protein, 368 aa, Homo sapiens
MQPGSSRCEEETPSLLWGLDPVFLAFAKLYIRDILDMKESRQVPGVFLYNGHPIKQVDVLGTVIGVRERDAFYSYGVDDSTGVINCICWKKLNTESVSAAPSAARELSLTSQLKKLQETIEQKTKIEIGDTIRVRGSIRTYREEREIHATTYYKVDDPVWNIQIARMLELPTIYRKVYDQPFHSSALEKEEALSNPGALDLPSLTSLLSEKAKEFLMENRVQSFYQQELEMVESLLSLANQPVIHSASSDQVNFKKDTTSKAIHSIFKNAIQLLQEKGLVFQKDDGFDNLYYVTREDKDLHRKIHRIIQQDCQKPNHMEKGCHFLHILACARLSIRPGLSEAVLQQVLELLEDQSDIVSTMEHYYTAF

SEQ ID NO: 618 - protein, 198 aa, Homo sapiens
MDAILNYRSEDTEDYYTLLGCDELSSVEQILAEFKVRALECHPDKHPENPKAVETFQKLQKAKEILTNEESRARYDHWRRSQMSMPFQQWEALNDSVKTSMHWVVRGKKDLMLEESDKTHTTKMENEECNEQRERKKEELASTAEKTEQKEPKPLEKSVSPQNSDSSGFADVNGWHLRFRWSKDAPSELLRKFRNYEI

SEQ ID NO: 619 - protein, 207 aa, Homo sapiens
MLALRCGSRWLGLLSVPRSVPLRLPAARACSKGSGDPSSSSSSGNPLVYLDVDANGKPLGRVVLELKADVVPKTAENFRALCTGEKGFGYKGSTFHRVIPSFMCQAGDFTNHNGTGGKSIYGSRFPDENFTLKHVGPGVLSMANAGPNTNGSQFFICTIKTDWLDGKHVVFGHVKEGMDVVKKIESFGSKSGRTSKKIVITDCGQLS

SEQ ID NO: 620 - protein, 775 aa, Homo sapiens
MVGPEDAGACSGRNPKLLPVPAPDPVGQDRKVIRATGGFGGGVGAVEPPEEADEEEEADEEEETPPRQLLQRYLAAAGEQLEPGLCYCPLPAGQAGAPPPSAAPRSDACLLGSGSKHRGAEVADGRAPRHEGMTNGDSGFLPGRDCRDLEEARGLARAGGRESRRRRPYGRLRLEGPGDEDADGAGSPSDWASPLEDPLRSCCLVAADAQEPEGAGSDSGDSPASSCSSSEDSEQRGVGAGGPEEGAPPATSAERTNGGAEPRLGFSDIHFNSRNTFQVSRGQSARDHLPPAGPPVPLPAAEQGPAGASARARRSGGFADFFTRNLFPKRTKELKSVVHSAPGWKLFGKVPPRENLQKTSKIIQQEYEARTGRTCKPPPQSSRRKNFEFEPLSTTALILEDRPSNLPAKSVEEALRHRQEYDEMVAEAKKREIKEAHKRKRIMKERFKQEENIASAMVIWINEILPNWEVMRSTRRVRELWWQGLPPSVRGKVWSLAVGNELNITPELYEIFLSRAKERWKSFSETSSENDTEGVSVADREASLELIKLDISRTFPSLYIFQKGGPYHDVLHSILGAYTCYRPDVGYVQGMSFIAAVLILNLEEADAFIAFANLLNKPCQLAFFRVDHSMMLKYFATFEVFFEENLSKLFLHFKSYSLTPDIYLIDWIFTLYSKSLPLDLACRVWDVFCRDGEEFLFRTGLGILRLYEDILLQMDFIHIAQFLTKLPEDITSEKLFSCIAAIQMQNSTKKWTQVFASVMKDIKEGDKNSSPALKS

SEQ ID NO: 621 - protein, 707 aa, Homo sapiens
MPEEAGFPPAKRFRPGSGPPSRAGSFPPGRQVVMLLTAGSGGRGGGGGRRQQPPLAQPSASPYPEAVELQRRSLPIFQARGQLLAQLRNLDNAVLIGETGSGKTTQIPQYLYEGGISRQGIIAVTQPRRVAAISLATRVSDEKRTELGKLVGYTVRFDDVTSEDTRIKFLTDGMLLREAISDSLLRKYSCVILDEAHERTIHTDVLFGVVKAAQKRRKELGKLPLKVIVMSATMDVDLFSQYFNGAPVLYLEGRQHPIQVFYTKQPQNDYLHAALVSVFQIHQEAPSSQDILVFLTGQEEIEAMSKTCRDIAKHLPDGCPAMLVLPLYASLPYAQQLRVFQGAPKGYRKVIISTNIAETSITITGIKYVVDTGMVKAKKYNPDSGLEVLAVQRVSKTQAWQRTGRAGREDSGICYRLYTEDEFEKFDKMTVPEIQRCNLASVMLQLLAMKVPNVLTFDFMSKPSPDHIQAAIAQLDLLGALEHKDDQLTLTPMGRKMAAFPLEPKFAKTILMSPKFHCTEEILTIVSLLSVDSVLHNPPSRREEVQGVRKKFISSEGDHMTLLNIYRTFKNLGGNKDWCKENFVNSKNMTLVAEVRAQLRDICLKMSMPIASSRGDVESVRRCLAHSLFMSTAELQPDGTYATTDTHQPVAIHPSSVLFHCKPACVVYTELLYTNKCYMRDLCVIDAQWLYEAAPEYFRRKLRTARN

SEQ ID NO: 622 - protein, 556 aa, Homo sapiens
MPPERRRRMKLDRRTGAKPKRKPGMRPDWKAGAGPGGPPQKPAPSSQRKPPARPSAAAAAIAVAAAEEERRLRQRNRLRLEEDKPAVERCLEELVFGDVENDEDALLRRLRGPRVQEHEDSGDSEVENEAKGNFPPQKKPVWVDEEDEDEEMVDMMNNRFRKDMMKNASESKLSKDNLKKRLKEEFQHAMGGVPAWAETTKRKTSSDDESEEDEDDLLQRTGNFISTSTSLPRGILKMKNCQHANAERPTVARISSVQFHPGAQIVMVAGLDNAVSLFQVDGKTNPKIQSIYLERFPIFKACFSANGEEVLATSTHSKVLYVYDMLAGKLIPVHQVRGLKEKIVRSFEVSPDGSFLLINGIAGYLHLLAMKTKELIGSMKINGRVAASTFSSDSKKVYASSGDGEVYVWDVNSRKCLNRFVDEGSLYGLSIATSRNGQYVACGSNCGVVNIYNQDSCLQETNPKPIKAIMNLVTGVTSLTFNPTTEILAIASEKMKEAVRLVHLPSCTVFSNFPVIKNKNISHVHTMDFSPRSGYFALGNEKGKALMYRLHHYSDF

SEQ ID NO: 623 - protein, 351 aa, Homo sapiens
MADQDPAGISPLQQMVASGTGAVVTSLFMTPLDVVKVRLQSQRPSMASELMPSSRLWSLSYTKWKCLLYCNGVLEPLYLCPNGARCATWFQDPTRFTGTMDAFVKIVRHEGTRTLWSGLPATLVMTVPATAIYFTAYDQLKAFLCGRALTSDLYAPMVAGALARLGTVTVISPLELMRTKLQAQHVSYRELGACVRTAVAQGGWRSLWLGWGPTALRDVPFSALYWFNYELVKSWLNGFRPKDQTSVGMSFVAGGISGTVAAVLTLPFDVVKTQRQVALGAMEAVRVNPLHVDSTWLLLRRIRAESGTKGLFAGFLPRIIKAAPSCAIMISTYEFGKSFFQRLNQDRLLGG

SEQ ID NO: 624 - protein, 715 aa, Homo sapiens
MHLLPALAGVLATLVLAQPCEGTDPASPGAVETSVLRDCIAEAKLLVDAAYNWTQKSIKQRLRSGSASPMDLLSYFKQPVAATRTVVRAADYMHVALGLLEEKLQPQRSGPFNVTDVLTEPQLRLLSQASGCALRDQAERCSDKYRTITGRCNNKRRPLLGASNQALARWLPAEYEDGLSLPFGWTPSRRRNGFLLPLVRAVSNQIVRFPNERLTSDRGRALMFMQWGQFIDHDLDFSPESPARVAFTAGVDCERTCAQLPPCFPIKIPPNDPRIKNQRDCIPFFRSAPSCPQNKNRVRNQINALTSFVDASMVYGSEVSLSLRLRNRTNYLGLLAINQRFQDNGRALLPFDNLHDDPCLLTNRSARIPCFLAGDTRSTETPKLAAMHTLFMREHNRLATELRRLNPRWNGDKLYNEARKIMGAMVQIITYRDFLPLVLGKARARRTLGHYRGYCSNVDPRVANVFTLAFRFGHTMLQPFMFRLDSQYRASAPNSHVPLSSAFFASWRIVYEGGIDPILRGLMATPAKLNRQDAMLVDELRDRLFRQVRRIGLDLAALNMQRSRDHGLPGYNAWRRFCGLSQPRNLAQLSRVLKNQDLARKFLNLYGTPDNIDIWIGAIAEPLLPGARVGPLLACLFENQFRRARDGDRFWWQKRGVFTKRQRKALSRISLSRIICDNTGITTVSRDIFRANIYPRGFVNCSRIPRLNLSAWRGT

SEQ ID NO: 625 - protein, 695 aa, Homo sapiens
MEEKPGQPQPQHHHSHHHPHHHPQQQQQQPHHHHHYYFYNHSHNHHHHHHHQQPHQYLQHGAEGSPKAQPKPLKHEQKHTLQQHQETPKKKTGYGELNGNAGEREISLKNLSSDEATNPISRVLNGNQQVVDTSLKQTVKANTFGKAGIKTKNFIQKNSMDKKNGKSYENKSGENQSVDKSDTIPIPNGVVTNNSGYITNGYMGKGADNDGSGSESGYTTPKKRKARRNSAKGCENLNIVQDKIMQQETSVPTLKQGLETFKPDYSEQKGNRVDGSKPIWKYETGPGGTSRGKPAVGDMLRKSSDSKPGVSSKKFDDRPKGKHASAVASKEDSWTLFKPPPVFPVDNSSAKIVPKISYASKVKENLNKTIQNSSVSPTSSSSSSSSTGETQTQSSSRLSQVPMSALKSVTSANFSNGPVLAGTDGNVYPPGGQPLLTTAANTLTPISSGTDSVLQDMSLTSAAVEQIKTSLFIYPSNMQTMLLSTAQVDLPSQTDQQNLGDIFQNQWGLSFINEPSAGPETVTGKSSEHKVMEVTFQGEYPATLVSQGAEIIPSGTEHPVFPKAYELEKRTSPQVLGSILKSGTTSESGALSLEPSHIGDLQKADTSSQGALVFLSKDYEIESQNPLASPTNTLLGSAKEQRYQRGLERNDSWGSFDLRAAIVYHTKEMESIWNLQKQDPKRIITYNEAMDSPDQ

SEQ ID NO: 626 - protein, 761 aa, Homo sapiens
MSRKGPRAEVCADCSAPDPGWASISRGVLVCDECCSVHRSLGRHISIVKHLRHSAWPPTLLQMVHTLASNGANSIWEHSLLDPAQVQSGRRKANPQDKVHPIKSEFIRAKYQMLAFVHKLPCRDDDGVTAKDLSKQLHSSVRTGNLETCLRLLSLGAQANFFHPEKGTTPLHVAAKAGQTLQAELLVVYGADPGSPDVNGRTPIDYARQAGHHELAERLVECQYELTDRLAFYLCGRKPDHKNGHYIIPQMADSLDLSELAKAAKKKLQALSNRLFEELAMDVYDEVDRRENDAVWLATQNHSTLVTERSAVPFLPVNPEYSATRNQGRQKLARFNAREFATLIIDILSEAKRRQQGKSLSSPTDNLELSLRSQSDLDDQHDYDSVASDEDTDQEPLRSTGATRSNRARSMDSSDLSDGAVTLQEYLELKKALATSEAKVQQLMKVNSSLSDELRRLQREIHKLQAENLQLRQPPGPVPTPPLPSERAEHTPMAPGGSTHRRDRQAFSMYEPGSALKPFGGPPGDELTTRLQPFHSTELEDDAIYSVHVPAGLYRIRKGVSASAVPFTPSSPLLSCSQEGSRHTSKLSRHGSGADSDYENTQSGDPLLGLEGKRFLELGKEEDFHPELESLDGDLDPGLPSTEDVILKTEQVTKNIQELLRAAQEFKHDSFVPCSEKIHLAVTEMASLFPKRPALEPVRSSLRLLNASAYRLQSECRKTVPPEPGAPVDFQLLTQQVIQCAYDIAKAAKQLVTITTREKKQ

SEQ ID NO: 627 - protein, 196 aa, Homo sapiens [sequence omitted]

SEQ ID NO: 628 - protein, 207 aa, Homo sapiens
MAGPATQSPMKLMALQLLLWHSALWTVQEATPLGPASSLPQSFLLKCLEQVRKIQGDGAALQEKLVSECATYKLCHPEELVLLGHSLGIPWAPLSSCPSQALQLAGCLSQLHSGLFLYQGLLQALEGISPELGPTLDTLQLDVADFATTIWQQMEELGMAPALQPTQGAMPAFASAFQRRAGGVLVASHLQSFLEVSYRVLRHLAQP

SEQ ID NO: 629 - protein, 117 aa, Homo sapiens
MALETVPKDLRHLRACLLCSLVKTIDQFEYDGCDNCDAYLQMKGNREMVYDCTSSSFDGIIAMMSPEDSWVSKWQRVSNFKPGVYAVSVTGRLPQGIVRELKSRGVAYKSRDTAIKT

SEQ ID NO: 630 - protein, 478 aa, Homo sapiens
MAARPITLGIDLGTTSVKAALLRAAPDDPSGFAVLASCARAARAEAAVESAVAGPQGREQDVSRILQALHECLAALPRPQLRSVVGIGVSGQMHGVVFWKTGQGCEWTEGGITPVFEPRAVSHLVTWQDGRCSSEFLASLPQPKSHLSVATGFGCATIFWLLKYRPEFLKSYDAAGTIHDYVVAMLCGLPRPLMSDQNAASWGYFNTQSQSWNVETLRSSGFPVHLLPDIAEPGSVAGRTSHMWFEIPKGTQVGVALGDLQASVYSCMAQRTDAVLNISTSVQLAASMPSGFQPAQTPDPTAPVAYFPYFNRTYLGVAASLNGGNVLATFVHMLVQWMADLGLEVEESTVYSRMIQAAVQQRDTHLTITPTVLGERHLPDQLASVTRISSSDLSLGHVTRALCRGIVQNLHSMLPIQQLQEWGVERVMGSGSALSRNDVLKQEVQRAFPLPMSFGQDVDAAVGAALVMLRRHLNQKES

SEQ ID NO: 631 - protein, 124 aa, Homo sapiens
MSYIPGQPVTAVVQRVEIHKLRQGENLILGFSIGGGIDQDPSQNPFSEDKTDKGIYVTRVSEGGPAEIAGLQIGDKIMQVNGWDMTMVTHDQARKRLTKRSEEVVRLLVTRQSLQKAVQQSMLS

SEQ ID NO: 632 - protein, 525 aa, Homo sapiens
MRRRRRRDGFYPAPDFRDREAEDMAGVFDIDLDQPEDAGSEDELEEGGQLNESMDHGGVGPYELGMEHCEKFEISETSVNRGPEKIRPECFELLRVLGKGGYGKVFQVRKVTGANTGKIFAMKVLKKAMIVRNAKDTAHTKAERNILEEVKHPFIVDLIYAFQTGGKLYLILEYLSGGELFMQLEREGIFMEDTACFYLAEISMALGHLHQKGIIYRDLKPENIMLNHQGHVKLTDFGLCKESIHDGTVTHTFCGTIEYMAPEILMRSGHNRAVDWWSLGALMYDMLTGAPPFTGENRKKTIDKILKCKLNLPPYLTQEARDLLKKLLKRNAASRLGAGPGDAGEVQAHPFFRHINWEELLARKVEPPFKPLLQSEEDVSQFDSKFTRQTPVDSPDDSTLSESANQVFLGFTYVAPSVLESVKEKFSFEPKIRSPRRFIGSPRTPVSPVKFSPGDFWGRGASASTANPQTPVEYPMETSGIEQMDVTMSGEASAPLPIRQPNSGPYKKQAFPMISKRPEHLRMNL

SEQ ID NO: 633 - protein, 185 aa, Homo sapiens
MGKKQNKKKVEEVLEEEEEEYVVEKVLDRRVVKGKVEYLLKWKGFSDEDNTWEPEENLDCPDLIAEFLQSQKTAHETDKSEGGKRKADSDSEDKGEESKPKKKKEESEKPRGFARGLEPERIIGATDSSGELMFLMKWKNSDEADLVPAKEANVKCPQVVISFYEERLTWHSYPSEDDDKKDDKN

SEQ ID NO: 634 - protein, 392 aa, Homo sapiens
MAALRQPQVAELLAEARRAFREEFGAEPELAVSAPGRVNLIGEHTDYNQGLVLPMALELMTVLVGSPRKDGLVSLLTTSEGADEPQRLQFPLPTAQRSLEPGTPRWANYVKGVIQYYPAAPLPGFSAVVVSSVPLGGGLSSSASLEVATYTFLQQLCPDSGTIAARAQVCQQAEHSFAGMPCGIMDQFISLMGQKGHALLIDCRSLETSLVPLSDPKLAVLITNSNVRHSLASSEYPVRRRQCEEVARALGKESLREVQLEELEAARDLVSKEGFRRARHVVGEIRRTAQAAAALRRGDYRAFGRLMVESHRSLRDDYEVSCPELDQLVEAALAVPGVYGSRMTGGGFGGCTVTLLEASAAPHAMRHIQEHYGGTATFYLSQAADGAKVLCL

SEQ ID NO: 635 - protein, 140 aa, Homo sapiens
MAGWNAYIDNLMADGTCQDAAIVGYKDSPSVWAAVPGKTFVNITPAEVGVLVGKDRSSFYVNGLTLGGQKCSVIRDSLLQDGEFSMDLRTKSTGGAPTFNVTVTKTDKTLVLLMGKEGVHGGLINKKCYEMASHLRRSQY

SEQ ID NO: 636 - protein, 314 aa, Homo sapiens
MAATASAGAGGIDGKPRTSPKSVKFLFGGLAGMGATVFVQPLDLVKNRMQLSGEGAKTREYKTSFHALTSILKAEGLRGIYTGLSAGLLRQATYTTTRLGIYTVLFERLTGADGTPPGFLLKAVIGMTAGATGAFVGTPAEVALIRMTADGRLPADQRRGYKNVFNALIRITREEGVLTLWRGCIPTMARAVVVNAAQLASYSQSKQFLLDSGYFSDNILCHFCASMISGLVTTAASMPVDIAKTRIQNMRMIDGKPEYKNGLDVLFKVVRYEGFFSLWKGFTPYYARLGPHTVLTFIFLEQMNKAYKRLFLSG

SEQ ID NO: 637 - protein, 281 aa, Homo sapiens
MKLAAMIKKMCPSDSELSIPAKNCYRMVILGSSKVGKTAIVSRFLTGRFEDAYTPTIEDFHRKFYSIRGEVYQLDILDTSGNHPFPAMRRLSILTGDVFILVFSLDNRDSFEEVQRLRQQILDTKSCLKNKTKENVDVPLVICGNKGDRDFYREVDQREIEQLVGDDPQRCAYFEISAKKNSSLDQMFRALFAMAKLPSEMSPDLHRKVSVQYCDVLHKKALRNKKLLRAGSGGGGGDPGDAFGIVAPFARRPSVHSDLMYIREKASAGSQAKDKERCVIS

SEQ ID NO: 638 - protein, 282 aa, Homo sapiens
MLPLLRCVPRVLGSSVAGLRAAAPASPFRQLLQPAPRLCTRPFGLLSVRAGSERRPGLLRPRGPCACGCGCGSLHTDGDKAFVDFLSDEIKEERKIQKHKTLPKMSGGWELELNGTEAKLVRKVAGEKITVTFNINNSIPPTFDGEEEPSQGQKVEEQEPELTSTPNFVVEVIKNDDGKKALVLDCHYPEDEVGQEDEAESDIFSIREVSFQSTGESEWKDTNYTLNTDSLDWALYDHLMDFLADRGVDNTFADELVELSTALEHQEYITFLEDLKSFVKSQ

SEQ ID NO: 639 - protein, 1380 aa, Homo sapiens
MASGRDERPPWRLGRLLLLMCLLLLGSSARAAHIKKAEATTTTTSAGAEAAEGQFDRYYHEEELESALREAAAAGLPGLARLFSIGRSVEGRPLWVLRLTAGLGSLIPEGDAGPDAAGPDAAGPLLPGRPQVKLVGNMHGDETVSRQVLIYLARELAAGYRRGDPRLVRLLNTTDVYLLPSLNPDGFERAREGDCGFGDGGPSGASGRDNSRGRDLNRSFPDQFSTGEPPALDEVPEVRALIEWIRRNKFVLSGNLHGGSVVASYPFDDSPEHKATGIYSKTSDDEVFKYLAKAYASNHPIMKTGEPHCPGDEDETFKDGITNGAHWYDVEGGMQDYNYVWANCFEITLELSCCKYPPASQLRQEWENNRESLITLIEKVHIGVKGFVKDSITGSGLENATISVAGINHNITTGRFGDFYRLLVPGTYNLTVVLTGYMPLTVTNVVVKEGPATEVDFSLRPTVTSVIPDTTEAVSTASTVAIPNILSGTSSSYQPIQPKDFHHHHFPDMEIFLRRFANEYPNITRLYSLGKSVESRELYVMEISDNPGVHEPGEPEFKYIGNMHGNEVVGRELLLNLIEYLCKNFGTDPEVTDLVHNTRIHLMPSMNPDGYEKSQEGDSISVIGRNNSNNFDLNRNFPDQFVQITDPTQPETIAVMSWMKSYPFVLSANLHGGSLVVNYPFDDDEQGLATYSKSPDDAVFQQIALSYSKENSQMFQGRPCKNMYPNEYFPHGITNGASWYNVPGGMQDWNYLQTNCFEVTIELGCVKYPLEKELPNFWEQNRRSLIQFMKQVHQGVRGFVLDATDGRGILNATISVAEINHPVTTYKTGDYWRLLVPGTYKITASARGYNPVTKNVTVKSEGAIQVNFTLVRSSTDSNNESKKGKGASSSTNDASDPTTKEFETLIKDLSAENGLESLMLRSSSNLALALYRYHSYKDLSEFLRGLVMNYPHITNLTNLGQSTEYRHIWSLEISNKPNVSEPEEPKIRFVAGIHGNAPVGTELLLALAEFLCLNYKKNPAVTQLVDRTRIVIVPSLNPDGRERAQEKDCTSKIGQTNARGKDLDTDFTNNASQPETKAIIENLIQKQDFSLSVALDGGSMLVTYPYDKPVQTVENKETLKHLASLYANNHPSMHMGQPSCPNKSDENIPGGVMRGAEWHSHLGSMKDYSVTYGHCPEITVYTSCCYFPSAARLPSLWADNKRSLLSMLVEVHKGVHGFVKDKTGKPISKAVIVLNEGIKVQTKEGGYFHVLLAPGVHNIIAIADGYQQQHSQVFVHHDAASSVVIVFDTDNRIFGLPRELVVTVSGATMSALILTACIIWCICSIKSNRHKDGFHRLRQHHDEYEDEIRMMSTGSKKSLLSHEFQDETDTEEETLYSSKH

SEQ ID NO: 640 - protein, 250 aa, Homo sapiens
MAAGTSSYWEDLRKQARQLENELDLKLVSFSKLCTSYSHSSTRDGRRDRYSSDTTPLLNGSSQDRMFETMAIEIEQLLARLTGVNDKMAEYTNSAGVPSLNAALMHTLQRHRDILQDYTHEFHKTKANFMAIRERENLMGSVRKDIESYKSGSGVNNRRTELFLKEHDHLRNSDRLIEETISIAMATKENMTSQRGMLKSIHSKMNTLANRFPAVNSLIQRINLRKRRDSLILGGVIGICTILLLLYAFH

SEQ ID NO: 641 - protein, 483 aa, Homo sapiens
MKAFHTFCVVLLVFGSVSEAKFDDFEDEEDIVEYDDNDFAEFEDVMEDSVTESPQRVIITEDDEDETTVELEGQDENQEGDFEDADTQEGDTESEPYDDEEFEGYEDKPDTSSSKNKDPITIVDVPAHLQNSWESYYLEILMVTGLLAYIMNYIIGKNKNSRLAQAWFNTHRELLESNFTLVGDDGTNKEATSTGKLNQENEHIYNLWCSGRVCCEGMLIQLRFLKRQDLLNVLARMMRPVSDQVQIKVTMNDEDMDTYVFAVGTRKALVRLQKEMQDLSEFCSDKPKSGAKYGLPDSLAILSEMGEVTDGMMDTKMVHFLTHYADKIESVHFSDQFSGPKIMQEEGQPLKLPDTKRTLLFTFNVPGSGNTYPKDMEALLPLMNMVIYSIDKAKKFRLNREGKQKADKNRARVEENFLKLTHVQRQEAAQSRREEKKRAEKERIMNEEDPEKQRRLEEAALRREQKKLEKKQMKMKQIKVKAM

SEQ ID NO: 642 - protein, 131 aa, Homo sapiens
MAAAVAMETDDAGNRLRFQLELEFVQCLANPNYLNFLAQRGYFKDKAFVNYLKYLLYWKDPEYAKYLKYPQCLHMLELLQYEHFRKELVNAQCAKFIDEQQILHWQHYSRKRMRLQQALAEQQQQNNTSGK

SEQ ID NO: 643 - protein, 364 aa, Homo sapiens
MGILEKISEIEKEIARTQKNKATEYHLGLLKAKLAKYRAQLLEPSKSASSKGEGFDVMKSGDARVALIGFPSVGKSTFLSLMTSTASEAASYEFTTLTCIPGVIEYKGANIQLLDLPGIIEGAAQGKGRGRQVIAVARTADVIIMMLDATKGEVQRSLLEKELESVGIRLNKHKPNIYFKPKKGGGISFNSTVTLTQCSEKLVQLILHEYKIFNAEVLFREDCSPDEFIDVIVGNRVYMPCLYVYNKIDQISMEEVDRLARKPNSVVISCGMKLNLDYLLEMLWEYLALTCIYTKKRGQRPDFTDAIILRKGASVEHVCHRIHRSLASQFKYALVWGTSTKYSPQRVGLTHTMEHEDVIQIVKK

SEQ ID NO: 644 - protein, 614 aa, Homo sapiens
MSGYSSDRDRGRDRGFGAPRFGGSRAGPLSGKKFGNPGEKLVKKKWNLDELPKFEKNFYQEHPDLARRTAQEVETYRRSKEITVRGHNCPKPVLNFYEANFPANVMDVIARQNFTEPTAIQAQGWPVALSGLDMVGVAQTGSGKTLSYLLPAIVHINHQPFLERGDGPICLVLAPTRELAQQVQQVAAEYCRACRLKSTCIYGGAPKGPQIRDLERGVEICIATPGRLIDFLECGKTNLRRTTYLVLDEADRMLDMGFEPQIRKIVDQIRPDRQTLMWSATWPKEVRQLAEDFLKDYIHINIGALELSANHNILQIVDVCHDVEKDEKLIRLMEEIMSEKENKTIVFVETKRRCDELTRKMRRDGWPAMGIHGDKSQQERDWVLNEFKHGKAPILIATDVASRGLDVEDVKFVINYDYPNSSEDYIHRIGRTARSTKTGTAYTFFTPNNIKQVSDLISVLREANQAINPKLLQLVEDRGSGRSRGRGGMKDDRRDRYSAGKRGGFNTFRDRENYDRGYSSLLKRDFGAKTQNGVYSAANYTNGSFGSNFVSAGIQTSFRTGNPTGTYQNGYDSTQQYGSNVPNMHNGMNQQAYAYPATAAAPMIGYPMPTGYSQ

SEQ ID NO: 645 - protein, 99 aa, Homo sapiens
MKVSAALLCLLLIAATFIPQGLAQPDAINAPVTCCYNFTNRKISVQRLASYRRITSSKCPKEAVIFKTIVAKEICADPKQKWVQDSMDHLDKQTQTPKT

SEQ ID NO: 646 - protein, 96 aa, Homo sapiens
MQIITTALVCLLLAGMWPEDVDSKSMQVPFSRCCFSFAEQEIPLRAILCYRNTSSICSNEGLIFKLKRGKEACALDTVGWVQRHRKMLRHCPSKRK

SEQ ID NO: 647 - protein, 98 aa, Homo sapiens
MKVSAVLLCLLLMTAAFNPQGLAQPDALNVPSTCCFTFSSKKISLQRLKSYVITTSRCPQKAVIFRTKLGKEICADPKEKWVQNYMKHLGRKAHTLKT

SEQ ID NO: 648 - protein, 359 aa, Homo sapiens
MAEHGAHFTAASVADDQPSIFEVVAQDSLMTAVRPALQHVVKVLAESNPTHYGFLWRWFDEIFTLLDLLLQQHYLSRTSASFSENFYGLKRIVMGDTHKSQRLASAGLPKQQLWKSIMFLVLLPYLKVKLEKLVSSLREEDEYSIHPPSSRWKRFYRAFLAAYPFVNMAWEGWFLVQQLRYILGKAQHHSPLLRLAGVQLGRLTVQDIQALEHKPAKASMMQQPARSVSEKINSALKKAVGGVALSLSTGLSVGVFFLQFLDWWYSSENQETIKSLTALPTPPPPVHLDYNSDSPLLPKMKTVCPLCRKTRVNDTVLATSGYVFCYRCVFHYVRSHQACPITGYPTEVQHLIKLYSPEN

SEQ ID NO: 649 - protein, 837 aa, Homo sapiens
MAEPSQAPTPAPAAQPRPLQSPAPAPTPTPAPSPASAPIPTPTPAPAPAPAAAPAGSTGTGGPGVGSGGAGSGGDPARPGLSQQQRASQRKAQVRGLPRAKKLEKLGVFSACKANETCKCNGWKNPKPPTAPRMDLQQPAANLSELCRSCEHPLADHVSHLENVSEDEINRLLGMVVDVENLFMSVHKEEDTDTKQVYFYLFKLLRKCILQMTRPVVEGSLGSPPFEKPNIEQGVLNFVQYKFSHLAPRERQTMFELSKMFLLCLNYWKLETPAQFRQRSQAEDVATYKVNYTRWLCYCHVPQSCDSLPRYETTHVFGRSLLRSIFTVTRRQLLEKFRVEKDKLVPEKRTLILTHFPKFLSMLEEEIYGANSPIWESGFTMPPSEGTQLVPRPASVSAAVVPSTPIFSPSMGGGSNSSLSLDSAGAEPMPGEKRTLPENLTLEDAKRLRVMGDIPMELVNEVMLTITDPAAMLGPETSLLSANAARDETARLEERRGIIEFHVIGNSLTPKANRRVLLWLVGLQNVFSHQLPRMPKEYIARLVFDPKHKTLALIKDGRVIGGICFRMFPTQGFTEIVFCAVTSNEQVKGYGTHLMNHLKEYHIKHNILYFLTYADEYAIGYFKKQGFSKDIKVPKSRYLGYIKDYEGATLMECELNPRIPYTELSHIIKKQKEIIKKLIERKQAQIRKVYPGLSCFKEGVRQIPVESVPGIRETGWKPLGKEKGKELKDPDQLYTTLKNLLAQIKSHPSAWPFMEPVKKSEAPDYYEVIRFPIDLKTMTERLRSRYYVTRKLFVADLQRVIANCREYNPPDSEYCRCASALEKFFYFKLKEGGLIDK

SEQ ID NO: 650 - protein, 743 aa, Homo sapiens
MEAVAVAAAVGVLLLAGAGGAAGDEAREAAAVRALVARLLGPGPAADFSVSVERALAAKPGLDTYSLGGGGAARVRVRGSTGVAAAAGLHRYLRDFCGCHVAWSGSQLRLPRPLPAVPGELTEATPNRYRYYQNVCTQSYSFVWWDWARWEREIDWMALNGINLALAWSGQEAIWQRVYLALGLTQAEINEFFTGPAFLAWGRMGNLHTWDGPLPPSWHIKQLYLQHRVLDQMRSFGMTPVLPAFAGHVPEAVTRVFPQVNVTKMGSWGHFNCSYSCSFLLAPEDPIFPIIGSLFLRELIKEFGTDHIYGADTFNEMQPPSSEPSYLAAATTAVYEAMTAVDTEAVWLLQGWLFQHQPQFWGPAQIRAVLGAVPRGRLLVLDLFAESQPVYTRTASFQGQPFIWCMLHNFGGNHGLFGALEAVNGGPEAARLFPNSTMVGTGMAPEGISQNEVVYSLMAELGWRKDPVPDLAAWVTSFAARRYGVSHPDAGAAWRLLLRSVYNCSGEACRGHNRSPLVRRPSLQMNTSIWYNRSDVFEAWRLLLTSAPSLATSPAFRYDLLDLTRQAVQELVSLYYEEARSAYLSKELASLLRAGGVLAYELLPALDEVLASDSRFLLGSWLEQARAAAVSEAEADFYEQNSRYQLTLWGPEGNILDYANKQLAGLVANYYTPRWRLFLEALVDSVAQGIPFQQHQFDKNVFQLEQAFVLSKQRYPSQPRGDTVDLAKKIFLKYYPRWVAGSW

SEQ ID NO: 651 - protein, 1464 aa, Homo sapiens
MFSFVDLRLLLLLAATALLTHGQEEGQVEGQDEDIPPITCVQNGLRYHDRDVWKPEPCRICVCDNGKVLCDDVICDETKNCPGAEVPEGECCPVCPDGSESPTDQETTGVEGPKGDTGPRGPRGPAGPPGRDGIPGQPGLPGPPGPPGPPGPPGLGGNFAPQLSYGYDEKSTGGISVPGPMGPSGPRGLPGPPGAPGPQGFQGPPGEPGEPGASGPMGPRGPPGPPGKNGDDGEAGKPGRPGERGPPGPQGARGLPGTAGLPGMKGHRGFSGLDGAKGDAGPAGPKGEPGSPGENGAPGQMGPRGLPGERGRPGAPGPAGARGNDGATGAAGPPGPTGPAGPPGFPGAVGAKGEAGPQGPRGSEGPQGVRGEPGPPGPAGAAGPAGNPGADGQPGAKGANGAPGIAGAPGFPGARGPSGPQGPGGPPGPKGNSGEPGAPGSKGDTGAKGEPGPVGVQGPPGPAGEEGKRGARGEPGPTGLPGPPGERGGPGSRGFPGADGVAGPKGPAGERGSPGPAGPKGSPGEAGRPGEAGLPGAKGLTGSPGSPGPDGKTGPPGPAGQDGRPGPPGPPGARGQAGVMGFPGPKGAAGEPGKAGERGVPGPPGAVGPAGKDGEAGAQGPPGPAGPAGERGEQGPAGSPGFQGLPGPAGPPGEAGKPGEQGVPGDLGAPGPSGARGERGFPGERGVQGPPGPAGPRGANGAPGNDGAKGDAGAPGAPGSQGAPGLQGMPGERGAAGLPGPKGDRGDAGPKGADGSPGKDGVRGLTGPIGPPGPAGAPGDKGESGPSGPAGPTGARGAPGDRGEPGPPGPAGFAGPPGADGQPGAKGEPGDAGAKGDAGPPGPAGPAGPPGPIGNVGAPGAKGARGSAGPPGATGFPGAAGRVGPPGPSGNAGPPGPPGPAGKEGGKGPRGETGPAGRPGEVGPPGPPGPAGEKGSPGADGPAGAPGTPGPQGIAGQRGVVGLPGQRGERGFPGLPGPSGEPGKQGPSGASGERGPPGPMGPPGLAGPPGESGREGAPGAEGSPGRDGSPGAKGDRGETGPAGPPGAPGAPGAPGPVGPAGKSGDRGETGPAGPAGPVGPVGARGPAGPQGPRGDKGETGEQGDRGIKGHRGFSGLQGPPGPPGSPGEQGPSGASGPAGPRGPPGSAGAPGKDGLNGLPGPIGPPGPRGRTGDAGPVGPPGPPGPPGPPGPPSAGFDFSFLPQPPQEKAHDGGRYYRADDANVVRDRDLEVDTTLKSLSQQIENIRSPEGSRKNPARTCRDLKMCHSDWKSGEYWIDPNQGCNLDAIKVFCNMETGETCVYPTQPSVAQKNWYISKNPKDKRHVWFGESMTDGFQFEYGGQGSDPADVAIQLTFLRLMSTEASQNITYHCKNSVAYMDQQTGNLKKALLLQGSNEIEIRAEGNSRFTYSVTVDGCTSHTGAWGKTVIEYKTTKTSRLPIIDVAPLDVGAPDQEFGFDVGPVCFL

SEQ ID NO: 652 - protein, 148 aa, Homo sapiens
MASVVLALRTRTAVTSLLSPTPATALAVRYASKKSGGSSKNLGGKSSGRRQGIKKMEGHYVHAGNIIATQRHFRWHPGAHVGVGKNKCLYALEEGIVRYTKEVYVPHPRNTEAVDLITRLPKGAVLYKTFVHVVPAKPEGTFKLVAML

SEQ ID NO: 653 - protein, 307 aa, Homo sapiens
MTKAGSKGGNLRDKLDGNELDLSLSDLNEVPVKELAALPKATILDLSCNKLTTLPSDFCGLTHLVKLDLSKNKLQQLPADFGRLVNLQHLDLLNNKLVTLPVSFAQLKNLKWLDLKDNPLDPVLAKVAGDCLDEKQCKQCANKVLQHMKAVQADQERERQRRLEVEREAEKKREAKQRAKEAQERELRKREKAEEKERRRKEYDALKAAKREQEKKPKKEANQAPKSKSGSRPRKPPPRKHTRSWAVLKLLLLLLLFGVAGGLVACRVTELQQQPLCTSVNTIYDNAVQGLRRHEILQWVLQTDSQQ

SEQ ID NO: 654 - protein, 95 aa, Homo sapiens
MAAARLCLSLLLLSTCVALLLQPLLGAQGAPLEPVYPGDNATPEQMAQYAADLRRYINMLTRPRYGKRHKEDTLAFSEWGSPHAAVPRELSPLDL

SEQ ID NO: 655 - protein, 185 aa, Homo sapiens
MSGSFELSVQDLNDLLSDGSGCYSLPSQPCNEVTPRIYVGNASVAQDIPKLQKLGITHVLNAAEGRSFMHVNTNANFYKDSGITYLGIKANDTQEFNLSAYFERAADFIDQALAQKNGRVLVHCREGYSRSPTLVIAYLMMRQKMDVKSALSIVRQNREIGPNDGFLAQLCQLNDRLAKEGKLKP

SEQ ID NO: 656 - protein, 478 aa, Homo sapiens
MAPLRPLLILALLAWVALADQESCKGRCTEGFNVDKKCQCDELCSYYQSCCTDYTAECKPQVTRGDVFTMPEDEYTVYDDGEEKNNATVHEQVGGPSLTSDLQAQSKGNPEQTPVLKPEEEAPAPEVGASKPEGIDSRPETLHPGRPQPPAEEELCSGKPFDAFTDLKNGSLFAFRGQYCYELDEKAVRPGYPKLIRDVWGIEGPIDAAFTRINCQGKTYLFKGSQYWRFEDGVLDPDYPRNISDGFDGIPDNVDAALALPAHSYSGRERVYFFKGKQYWEYQFQHQPSQEECEGSSLSAVFEHFAMMQRDSWEDIFELLFWGRTSAGTRQPQFISRDWHGVPGQVDAAMAGRIYISGMAPRPSLAKKQRFRHRNRKGYRSQRGHSRGRNQNSRRPSRATWLSLFSSEESNLGANNYDDYRMDWLVPATCEPIQSVFFFSGDKYYRVNLRTRRVDTVDPPYPRSIAQYWLGCPAPGHL

SEQ ID NO: 657 - protein, 316 aa, Homo sapiens
MSGDTCLCPASGAKPKLSGFKGGGLGNKYVQLNVGGSLYYTTVRALTRHDTMLKAMFSGRMEVLTDKEGWILIDRCGKHFGTILNYLRDDTITLPQNRQEIKELMAEAKYYLIQGLVNMCQSALQDKKDSYQPVCNIPIITSLKEEERLIESSTKPVVKLLYNRSNNKYSYTSNSDDHLLKNIELFDKLSLRFNGRVLFIKDVIGDEICCWSFYGQGRKLAEVCCTSIVYATEKKQTKVEFPEARIYEETLNVLLYETPRVPDNSLLEATSRSRSQASPSEDEETFELRDRVRRIHVKRYSTYDDRQLGHQSTHRD

SEQ ID NO: 658 - protein, 176 aa, Homo sapiens
MGAPATRRCVEWLLGLYFLSHIPITLFMDLQAVLPRELYPVEFRNLLKWYAKEFKDPLLQEPPAWFKSFLFCELVFQLPFFPIATYAFLKGSCKWIRTPAIIYSVHTMTTLIPILSTFLFEDFSKASGFKGQRPETLHERLTLVSVYAPYLLIPFILLIFMLRSPYYKYEEKRKKK

SEQ ID NO: 659 - protein, 364 aa, Homo sapiens
MPHSYPALSAEQKKELSDIALRIVAPGKGILAADESVGSMAKRLSQIGVENTEENRRLYRQVLFSADDRVKKCIGGVIFFHETLYQKDDNGVPFVRTIQDKGIVVGIKVDKGVVPLAGTDGETTTQGLDGLSERCAQYKKDGADFAKWRCVLKISERTPSALAILENANVLARYASICQQNGIVPIVEPEILPDGDHDLKRCQYVTEKVLAAVYKALSDHHVYLEGTLLKPNMVTPGHACPIKYTPEEIAMATVTALRRTVPPAVPGVTFLSGGQSEEEASFNLNAINRCPLPRPWALTFSYGRALQASALNAWRGQRDNAGAATEEFIKRAEVNGLAAQGKYEGSGEDGGAAAQSLYIANHAY

SEQ ID NO: 660 - protein, 317 aa, Homo sapiens
MKTALILLSILGMACAFSMKNLHRRVKIEDSEENGVFKYRPRYYLYKHAYFYPHLKRFPVQGSSDSSEENGDDSSEEEEEEEETSNEGENNEESNEDEDSEAENTTLSATTLGYGEDATPGTGYTGLAAIQLPKKAGDITNKATKEKESDEEEEEEEEGNENEESEAEVDENEQGINGTSTNSTEAENGNGSSGGDNGEEGEEESVTGANAEDTTETGRQGKGTSKTTTSPNGGFEPTTPPQVYRTTSPPFGKTTTVEYEGEYEYTGANEYDNGYEIYESENGEPRGDNYRAYEDEYSYFKGQGYDGYDGQNYYHHQ

SEQ ID NO: 661 - protein, 519 aa, Homo sapiens
MFLLPLPAAGRVVVRRLAVRRFGSRSLSTADMTKGLVLGIYSKEKEDDVPQFTSAGENFDKLLAGKLRETLNISGPPLKAGKTRTFYGLHQDFPSVVLVGLGKKAAGIDEQENWHEGKENIRAAVAAGCRQIQDLELSSVEVDPCGDAQAAAEGAVLGLYEYDDLKQKKKMAVSAKLYGSGDQEAWQKGVLFASGQNLARQLMETPANEMTPTRFAEIIEKNLKSASSKTEVHIRPKSWIEEQAMGSFLSVAKGSDEPPVFLEIHYKGSPNANEPPLVFVGKGITFDSGGISIKASANMDLMRADMGGAATICSAIVSAAKLNLPINIIGLAPLCENMPSGKANKPGDVVRAKNGKTIQVDNTDAEGRLILADALCYAHTFNPKVILNAATLTGAMDVALGSGATGVFTNSSWLWNKLFEASIETGDRVWRMPLFEHYTRQVVDCQLADVNNIGKYRSAGACTAAAFLKEFVTHPKWAHLDIAGVMTNKDEVPYLRKGMTGRPTRTLIEFLLRFSQDNA

SEQ ID NO: 662 - protein, 114 aa, Homo sapiens
MSLPSSRAARVPGPSGSLCALLALLLLLTPPGPLASAGPVSAVLTELRCTCLRVTLRVNPKTIGKLQVFPAGPQCSKVEVVASLKNGKQVCLDPEAPFLKKVIQKILDSGNKKN

SEQ ID NO: 663 - protein, 842 aa, Homo sapiens
MKRGRLPSSSEDSDDNGSLSTTWSQNSRSQHRRSSCSRHEDRKPSEVFRTDLITAMKLHDSYQLNPDEYYVLADPWRQEWEKGVQVPVSPGTIPQPVARVVSEEKSLMFIRPKKYIVSSGSEPPELGYVDIRTLADSVCRYDLNDMDAAWLELTNEEFKEMGMPELDEYTMERVLEEFEQRCYDNMNHAIETEEGLGIEYDEDVVCDVCQSPDGEDGNEMVFCDKCNICVHQACYGILKVPEGSWLCRTCALGVQPKCLLCPKKGGAMKPTRSGTKWVHVSCALWIPEVSIGSPEKMEPITKVSHIPSSRWALVCSLCNEKFGASIQCSVKNCRTAFHVTCAFDRGLEMKTILAENDEVKFKSYCPKHSSHRKPEESLGKGAAQENGAPECSPRNPLEPFASLEQNREEAHRVSVRKQKLQQLEDEFYTFVNLLDVARALRLPEEVVDFLYQYWKLKRKVNFNKPLITPKKDEEDNLAKREQDVLFRRLQLFTHLRQDLERVRNLTYMVTRREKIKRSVCKVQEQIFNLYTKLLEQERVSGVPSSCSSSSLENMLLFNSPSVGPDAPKIEDLKWHSAFFRKQMGTSLVHSLKKPHKRDPLQNSPGSEGKTLLKQPDLCGRREGMVVPESFLGLEKTFAEARLISAQQKNGVVMPDHGKRRDNRFHCDLIKGDLKDKSFKQSHKPLRSTDVSQRHLDNTRAATSPGVGQSAPGTRKEIVPKCNGSLIKVNYNQTAVKVPTTPASPVKNWGGFRIPKKGERQQQGEAHDGACHQHSDYPYLGLGRVPAKERAKSKLKSDNENDGYVPDVEMSDSESEASEKKCIHTSSTISRRTDIIRRSILAS

SEQ ID NO: 664 - protein, 469 aa, Homo sapiens
MSALTPPTDMPTPTTDKITQAAMETIYLCKFRVSMDGEWLCLRELDDISLTPDPEPTHEDPNYLMANERMNLMNMAKLSIKGLIESALNLGRTLDSDYAPLQQFFVVMEHCLKHGLKAKKTFLGQNKSFWGPLELVEKLVPEAAEITASVKDLPGLKTPVGRGRAWLRLALMQKKLSEYMKALINKKELLSEFYEPNALMMEEEGAIIAGLLVGLNVIDANFCMKGEDLDSQVGVIDFSMYLKDGNSSKGTEGDGQITAILDQKNYVEELNRHLNATVNNLQAKVDALEKSNTKLTEELAVANNRIITLQEEMERVKEESSYILESNRKGPKQDRTAEGQALSEARKHLKEETQLRLDVEKELEMQISMRQEMELAMKMLEKDVCEKQDALVSLRQQLDDLRALKHELAFKLQSSDLGVKQKSELNSRLEEKTNQMAATIKQLEQSEKDLVKQAKTLNSAANKLIPKHH

SEQ ID NO: 665 - protein, 599 aa, Homo sapiens
MKLLKLTGFIFFLFFLTESLTLPTQPRDIENFNSTQKFIEDNIEYITIIAFAQYVQEATFEEMEKLVKDMVEYKDRCMADKTLPECSKLPNNVLQEKICAMEGLPQKHNFSHCCSKVDAQRRLCFFYNKKSDVGFLPPFPTLDPEEKCQAYESNRESLLNHFLYEVARRNPFVFAPTLLTVAVHFEEVAKSCCEEQNKVNCLQTRAIPVTQYLKAFSSYQKHVCGALLKFGTKVVHFIYIAILSQKFPKIEFKELISLVEDVSSNYDGCCEGDVVQCIRDTSKVMNHICSKQDSISSKIKECCEKKIPERGQCIINSNKDDRPKDLSLREGKFTDSENVCQERDADPDTFFAKFTFEYSRRHPDLSIPELLRIVQIYKDLLRNCCNTENPPGCYRYAEDKFNETTEKSLKMVQQECKHFQNLGKDGLKYHYLIRLTKIAPQLSTEELVSLGEKMVTAFTTCCTLSEEFACVDNLADLVFGELCGVNENRTINPAVDHCCKTNFAFRRPCFESLKADKTYVPPPFSQDLFTFHADMCQSQNEELQRKTDRFLVNLVKLKHELTDEELQSLFTNFANVVDKCCKAESPEVCFNEESPKIGN

SEQ ID NO: 666 - protein, 622 aa, Homo sapiens
MKWVESIFLIFLLNFTESRTLHRNEYGIASILDSYQCTAEISLADLATIFFAQFVQEATYKEVSKMVKDALTAIEKPTGDEQSSGCLENQLPAFLEELCHEKEILEKYGHSDCCSQSEEGRHNCFLAHKKPTPASIPLFQVPEPVTSCEAYEEDRETFMNKFIYEIARRHPFLYAPTILLWAARYDKIIPSCCKAENAVECFQTKAATVTKELRESSLLNQHACAVMKNFGTRTFQAITVTKLSQKFTKVNFTEIQKLVLDVAHVHEHCCRGDVLDCLQDGEKIMSYICSQQDTLSNKITECCKLTTLERGQCIIHAENDEKPEGLSPNLNRFLGDRDFNQFSSGEKNIFLASFVHEYSRRHPQLAVSVILRVAKGYQELLEKCFQTENPLECQDKGEEELQKYIQESQALAKRSCGLFQKLGEYYLQNAFLVAYTKKAPQLTSSELMAITRKMAATAATCCQLSEDKLLACGEGAADIIIGHLCIRHEMTPVNPGVGQCCTSSYANRRPCFSSLVVDETYVPPAFSDDKFIFHKDLCQAQGVALQTMKQEFLINLVKQKPQITEEQLEAVIADFSGLLEKCCQGQEQEVCFAEEGKRRQNESFIRCELFSLILTDLTLFVN

SEQ ID NO: 667 - protein, 134 aa, Homo sapiens
MKSLTWILGLWALAACFTPGESQRGPRGPYPPGPLAPPPPPCFPFGTGFVPPPHPPPYGPGRFPPPLSPPYGPGRIPPSPPPPYGPGRIQSHSLPPPYGPGYPQPPSQPRPYPPGPPFFPVNSPTDPALPTPAP

SEQ ID NO: 668 - protein, 104 aa, Homo sapiens
MSSAARSRLTRATRQEMLFLALLLLPVVVAFARAEAEEDGDLQCLCVKTTSQVRPRHITSLEVIKAGPHCPTAQLIATLKNGRKICLDLQALLYKKIIKEHLES

SEQ ID NO: 669 - protein, 969 aa, Homo sapiens
MAEDDPYLGRPEQMFHLDPSLTHTIFNPEVFQPQMALPTADGPYLQILEQPKQRGFRFRYVCEGPSHGGLPGASSEKNKKSYPQVKICNYVGPAKVIVQLVTNGKNIHLHAHSLVGKHCEDGICTVTAGPKDMVVGFANLGILHVTKKKVFETLEARMTEACIRGYNPGLLVHPDLAYLQAEGGGDRQLGDREKELIRQAALQQTKEMDLSVVRLMFTAFLPDSTGSFTRRLEPVVSDAIYDSKAPNASNLKIVRMDRTAGCVTGGEEIYLLCDKVQKDDIQIRFYEEEENGGVWEGFGDFSPTDVHRQFAIVFKTPKYKDINITKPASVFVQLRRKSDLETSEPKPFLYYPEIKDKEEVQRKRQKLMPNFSDSFGGGSGAGAGGGGMFGSGGGGGGTGSTGPGYSFPHYGFPTYGGITFHPGTTKSNAGMKHGTMDTESKKDPEGCDKSDDKNTVNLFGKVIETTEQDQEPSEATVGNGEVTLTYATGTKEESAGVQDNLFLEKAMQLAKRHANALFDYAVTGDVKMLLAVQRHLTAVQDENGDSVLHLAIIHLHSQLVRDLLEVTSGLISDDIINMRNDLYQTPLHLAVITKQEDVVEDLLRAGADLSLLDRLGNSVLHLAAKEGHDKVLSILLKHKKAALLLDHPNGDGLNAIHLAMMSNSLPCLLLLVAAGADVNAQEQKSGRTALHLAVEHDNISLAGCLLLEGDAHVDSTTYDGTTPLHIAAGRGSTRLAALLKAAGADPLVENFEPLYDLDDSWENAGEDEGVVPGTTPLDMATSWQVFDILNGKPYEPEFTSDDLLAQGDMKQLAEDVKLQLYKLLEIPDPDKNWATLAQKLGLGILNNAFRLSPAPSKTLMDNYEVSGGTVRELVEALRQMGYTEAIEVIQAASSPVKTTSQAHSLPLSPASTRQQIDELRDSDSVCDSGVETSFRKLSFTESLTSGASLLTLNKMPHDYGQEGPLEGKI

SEQ ID NO: 670 - protein, 593 aa, Homo sapiens
METPPLPPACTKQGHQKPLDSKDDNTEKHCPVTVNPWHMKKAFKVMNELRSQNLLCDVTIVAEDMEISAHRVVLAACSPYFHAMFTGEMSESRAKRVRIKEVDGWTLRMLIDYVYTAEIQVTEENVQVLLPAAGLLQLQDVKKTCCEFLESQLHPVNCLGIRAFADMHACTDLLNKANTYAEQHFADVVLSEEFLNLGIEQVCSLISSDKLTISSEEKVFEAVIAWVNHDKDVRQEFMARLMEHVRLPLLPREYLVQRVEEEALVKNSSACKDYLIEAMKYHLLPTEQRILMKSVRTRLRTPMNLPKLMVVVGGQAPKAIRSVECYDFKEERWHQVAELPSRRCRAGMVYMAGLVFAVGGFNGSLRVRTVDSYDPVKDQWTSVANMRDRRSTLGAAVLNGLLYAVGGFDGSTGLSSVEAYNIKSNEWFHVAPMNTRRSSVGVGVVGGLLYAVGGYDGASRQCLSTVECYNATTNEWTYIAEMSTRRSGAGVGVLNNLLYAVGGHDGPLVRKSVEVYDPTTNAWRQVADMNMCRRNAGVCAVNGLLYVVGGDDGSCNLASVEYYNPTTDKWTVVSSCMSTGRSYAGVTVIDKPL

SEQ ID NO: 671 - protein, 153 aa, Homo sapiens
MYRMQLLSCIALSLALVTNSAPTSSSTKKTQLQLEHLLLDLQMILNGINNYKNPKLTRMLTFKFYMPKKATELKHLQCLEEELKPLEEVLNLAQSKNFHLRPRDLISNINVIVLELKGSETTFMCEYADETATIVEFLNRWITFCQSIISTLT

SEQ ID NO: 672 - protein, 258 aa, Homo sapiens
MAEYSYVKSTKLVLKGTKTKSKKKKSKDKKRKREEDEETQLDIVGIWWTVTNFGEISGTIAIEMDKGTYIHALDNGLFTLGAPHKEVDEGPSPPEQFTAVKLSDSRIALKSGYGKYLGINSDGLVVGRSDAIGPREQWEPVFQNGKMALLASNSCFIRCNEAGDIEAKSKTAGEEEMIKIRSCAERETKKKDDIPEEDKGNVKQCEINYVKKFQSFQDHKLKISKEDSKILKKARKDGFLHETLLDRRAKLKADRYCK

SEQ ID NO: 673 - protein, 151 aa, Homo sapiens
MSIPFSNTHYRIPQGFGNLLEGLTREILREQPDNIPAFAAAYFESLLEKREKTNFDPAEWGSKVEDRFYNNHAFEEQEPPEKSDPKQEESQISGKEEETSVTILDSSEEDKEKEEVAAVKIQAAFRGHIAREEAKKMKTNSLQNEEKEENK

SEQ ID NO: 674 - protein, 267 aa, Homo sapiens
MGSACIKVTKYFLFLFNLIFFILGAVILGFGVWILADKSSFISVLQTSSSSLRMGAYVFIGVGAVTMLMGFLGCIGAVNEVRCLLGLYFAFLLLILIAQVTAGALFYFNMGKLKQEMGGIVTELIRDYNSSREDSLQDAWDYVQAQVKCCGWVSFYNWTDNAELMNRPEVTYPCSCEVKGEEDNSLSVRKGFCEAPGNRTQSGNHPEDWPVYQEGCMEKVQAWLQENLGIILGVGVGVAIIELLGMVLSICLCRHVHSEDYSKVPKY

SEQ ID NO: 675 - protein, 175 aa, Homo sapiens
MDIAIHHPWIRRPFFPFHSPSRLFDQFFGEHLLESDLFPTSTSLSPFYLRPPSFLRAPSWFDTGLSEMRLEKDRFSVNLDVKHFSPEELKVKVLGDVIEVHGKHEERQDEHGFISREFHRKYRIPADVDPLTITSSLSSDGVLTVNGPRKQVSGPERTIPITREEKPAVTAAPKK

SEQ ID NO: 676 - protein, 463 aa, Homo sapiens
MGAGPSLLLAALLLLLSGDGAVRCDTPANCTYLDLLGTWVFQVGSSGSQRDVNCSVMGPQEKKVVVYLQKLDTAYDDLGNSGHFTIIYNQGFEIVLNDYKWFAFFKYKEEGSKVTTYCNETMTGWVHDVLGRNWACFTGKKVGTASENVYVNIAHLKNSQEKYSNRLYKYDHNFVKAINAIQKSWTATTYMEYETLTLGDMIRRSGGHSRKIPRPKPAPLTAEIQQKILHLPTSWDWRNVHGINFVSPVRNQASCGSCYSFASMGMLEARIRILTNNSQTPILSPQEVVSCSQYAQGCEGGFPYLIAGKYAQDFGLVEEACFPYTGTDSPCKMKEDCFRYYSSEYHYVGGFYGGCNEALMKLELVHHGPMAVAFEVYDDFLHYKKGIYHHTGLRDPFNPFELTNHAVLLVGYGTDSASGMDYWIVKNSWGTGWGENGYFRIRRGTDECAIESIAVAATPIPKL

SEQ ID NO: 677 - protein, 459 aa, Homo sapiens
MAASGAVEPGPPGAAVAPSPAPAPPPAPDHLFRPISAEDEEQQPTEIESLCMNCYCNGMTRLLLTKIPFFREIIVSSFSCEHCGWNNTEIQSAGRIQDQGVRYTLSVRALEDMNREVVKTDSAATRIPELDFEIPAFSQKGALTTVEGLITRAISGLEQDQPARRANKDATAERIDEFIVKLKELKQVASPFTLIIDDPSGNSFVENPHAPQKDDALVITHYNRTRQQEEMLGLQEEAPAEKPEEEDLRNEVLQFSTNCPECNAPAQTNMKLVQIPHFKEVIIMATNCENCGHRTNEVKSGGAVEPLGTRITLHITDASDMTRDLLKSETCSVEIPELEFELGMAVLGGKFTTLEGLLKDIRELVTKNPFTLGDSSNPGQTERLQEFSQKMDQIIEGNMKAHFIMDDPAGNSYLQNVYAPEDDPEMKVERYKRTFDQNEELGLNDMKTEGYEAGLAPQR

SEQ ID NO: 678 - protein, 393 aa, Homo sapiens
MWWRVLSLLAWFPLQEASLTNHTETITVEEGQTLTLKCVTSLRKNSSLQWLTPSGFTIFLNEYPALKNSKYQLLHHSANQLSITVPNVTLQDEGVYKCLHYSDSVSTKEVKVIVLATPFKPILEASVIRKQNGEEHVVLMCSTMRSKPPPQITWLLGNSMEVSGGTLHEFETDGKKCNTTSTLIIHTYGKNSTVDCIIRHRGLQGRKLVAPFRFEDLVTDEETASDALERNSLSSQDPQQPTSTVSVTEDSSTSEIDKEEKEQTTQDPDLTTEANPQYLGLARKKSGILLLTLVSFLIFILFIIVQLFIMKLRKAHVIWKKENEVSEHTLESYRSRSNNEETSSEEKNGQSSHPMRCMNYITKLYSEAKTKRKENVQHSKLEEKHIQVPESIV

SEQ ID NO: 679 - protein, 778 aa, Homo sapiens
MSKRKLIPKLSIQSPVLHTNLNVQSTHPPLKKEDLHRISKDSLESDSESLTQEIMCHSEFDDRIRGNGMEPDSLDEEESPRWGSLHEMEEEASGKAAQMAREQNHHTWDQGANNRQQPIEDKYSDLRYDPNWKSKKEEGQLLSVEALPESTDSSLENLPLAPLYPSQETSMELSGGKGEQKESPQSAASLLGSEFLSPNYEHGARRSKPFSELSDSDLEEKSSSLSPYVKSSSSHNEVFLPGSRGPRRRKSKQHFVEKNKLTLGLPTPKTDSYLQLHNKKRGESHPEQISYPVRVTDKTSIQNAKEMENAAIDPEDKWHQRAQQLKNYQEHWSQYESTKSSNVPRGQPSDMVNDHQPSRRPAKLKIRKQCKHQNGLKSSTTEEVTASQGNQNNPPRQQQNQNKPLDTSTKPESIVIMHASNNDVQASRALRSHNLKETSNTFAPPKQAFDKVLSKNSTGCDSGLNVNKERGHKDQEEKRFSYQQLHTLSDMDLNNLNELSKRHVLLSQKGSQFVYHINTHGSTKNKKQLKQPYTETKYRNLEMLWKFHSSSDSQTVRASPDSWLTQIMEQHQQALVQLTDVQPSEGALSSVTLPPILSRVESESQLSSERSQRNQVKISRSNSEGYLFQLEKGKKHKKRSSSKNTKLKGYQKRDVKLGGLGPDFESIRDKTQKLIQQKEYAKQVKEYNMKTLSILSKPQTEKTQKKSAIPRQKALEYAKTIPKPKPSNLTHQASKEQKNPTYAGKEESLPEISLLEILQNRHEREKQAVAAFKVLHIV

SEQ ID NO: 680 - protein, 646 aa, Homo sapiens
MSKGPAVGIDLGTTYSCVGVFQHGKVEIIANDQGNRTTPSYVAFTDTERLIGDAAKNQVAMNPTNTVFDAKRLIGRRFDDAVVQSDMKHWPFMVVNDAGRPKVQVEYKGETKSFYPEEVSSMVLTKMKEIAEAYLGKTVTNAVVTVPAYFNDSQRQATKDAGTIAGLNVLRIINEPTAAAIAYGLDKKVGAERNVLIFDLGGGTFDVSILTIEDGIFEVKSTAGDTHLGGEDFDNRMVNHFIAEFKRKHKKDISENKRAVRRLRTACERAKRTLSSSTQASIEIDSLYEGIDFYTSITRARFEELNADLFRGTLDPVEKALRDAKLDKSQIHDIVLVGGSTRIPKIQKLLQDFFNGKELNKSINPDEAVAYGAAVQAAILSGDKSENVQDLLLLDVTPLSLGIETAGGVMTVLIKRNTTIPTKQTQTFTTYSDNQPGVLIQVYEGERAMTKDNNLLGKFELTGIPPAPRGVPQIEVTFDIDANGILNVSAVDKSTGKENKITITNDKGRLSKEDIERMVQEAEKYKAEDEKQRDKVSSKNSLESYAFNMKATVEDEKLQGKINDEDKQKILDKCNEIINWLDKNQTAEKEEFEHQQKELEKVCNPIITKLYQSAGGMPGGMPGGFPGGGAPPSGGASSGPTIEEVD

SEQ ID NO: 681 - protein, 329 aa, Homo sapiens
MVSKSRWKLLAMLALVLVVMVWYSISREDSFYFPIPEKKEPCLQGEAESKASKLFGNYSRDQPIFLRLEDYFWVKTPSAYELPYGTKGSEDLLLRVLAITSSSIPKNIQSLRCRRCVVVGNGHRLRNSSLGDAINKYDVVIRLNNAPVAGYEGDVGSKTTMRLFYPESAHFDPKVENNPDTLLVLVAFKAMDFHWIETILSDKKRVRKGFWKQPPLIWDVNPKQIRILNPFFMEIAADKLLSLPMQQPRKIKQKPTTGLLAITLALHLCDLVHIAGFGYPDAYNKKQTIHYYEQITLKSMAGSGHNVSQEALAIKRMLEMGAIKNLTSF

SEQ ID NO: 682 - protein, 548 aa, Homo sapiens
MATGANATPLDFPSKKRKRSRWNQDTMEQKTVIPGMPTVIPPGLTREQERAYIVQLQIEDLTRKLRTGDLGIPPNPEDRSPSPEPIYNSEGKRLNTREFRTRKKLEEERHNLITEMVALNPDFKPPADYKPPATRVSDKVMIPQDEYPEINFVGLLIGPRGNTLKNIEKECNAKIMIRGKGSVKEGKVGRKDGQMLPGEDEPLHALVTANTMENVKKAVEQIRNILKQGIETPEDQNDLRKMQLRELARLNGTLREDDNRILRPWQSSETRSITNTTVCTKCGGAGHIASDCKFQRPGDPQSAQDKARMDKEYLSLMAELGEAPVPASVGSTSGPATTPLASAPRPAAPANNPPPPSLMSTTQSRPPWMNSGPSESRPYHGMHGGGPGGPGGGPHSFPHPLPSLTGGHGGHPMQHNPNGPPPPWMQPPPPPMNQGPHPPGHHGPPPMDQYLGSTPVGSGVYRLHQGKGMMPPPPMGMMPPPPPPPSGQPPPPPSGPLPPWQQQQQQPPPPPPPSSSMASSTPLPWQQRSLPAAAMARAMRVRTFRAHW

SEQ ID NO: 683 - protein, 295 aa, Homo sapiens
MEHQLLCCEVETIRRAYPDANLLNDRVLRAMLKAEETCAPSVSYFKCVQKEVLPSMRKIVATWMLEVCEEQKCEEEVFPLAMNYLDRFLSLEPVKKSRLQLLGATCMFVASKMKETIPLTAEKLCIYTDNSIRPEELLQMELLLVNKLKWNLAAMTPHDFIEHFLSKMPEAEENKQIIRKHAQTFVALCATDVKFISNPPSMVAAGSVVAAVQGLNLRSPNNFLSYYRLTRFLSRVIKCDPDCLRACQEQIEALLESSLRQAQQNMDPKAAEEEEEEEEEVDLACTPTDVRDVDI

SEQ ID NO: 684 - protein, 360 aa, Homo sapiens
MDTPLRRSRRLGGLRPESPESLTSVSRTRRALVEFESNPEETREPGSPPSVQRAGLGSPERPPKTSPGSPRLQQGAGLESPQGQPEPGAASPQRQQDLHLESPQRQPEYSPESPRCQPKPSEEAPKCSQDQGVLASELAQNKEELTPGAPQHQLPPVPGSPEPYPGQQAPGPEPSQPLLELTPRAPGSPRGQHEPSKPPPAGETVTGGFGAKKRKGSSSQAPASKKLNKEELPVIPKGKPKSGRVWKDRSKKRFSQMLQDKPLRTSWQRKMKERQERKLAKDFARHLEEEKERRRQEKKQRRAENLKRRLENERKAEVVQVIRNPAKLKRAKKKQLRSIEKRDTLALLQKQPPQQPAAKI

SEQ ID NO: 685 - protein, 504 aa, Homo sapiens
MSLICSISNEVPEHPCVSPVSNHVYERRLIEKYIAENGTDPINNQPLSEEQLIDIKVAHPIRPKPPSATSIPAILKALQDEWDAVMLHSFTLRQQLQTTRQELSHALYQHDAACRVIARLTKEVTAAREALATLKPQAGLIVPQAVPSSQPSVVGAGEPMDLGELVGMTPEIIQKLQDKATVLTTERKKRGKTVPEELVKPEELSKYRQVASHVGLHSASIPGILALDLCPSDTNKILTGGADKNVVVFDKSSEQILATLKGHTKKVTSVVFHPSQDLVFSASPDATIRIWSVPNASCVQVVRAHESAVTGLSLHATGDYLLSSSDDQYWAFSDIQTGRVLTKVTDETSGCSLTCAQFHPDGLIFGTGTMDSQIKIWDLKERTNVANFPGHSGPITSIAFSENGYYLATAADDSSVKLWDLRKLKNFKTLQLDNNFEVKSLIFDQSGTYLALGGTDVQIYICKQWTEILHFTEHSGLTTGVAFGHHAKFIASTGMDRSLKFYSL

SEQ ID NO: 686 - protein, 243 aa, Homo sapiens
MAASSISSPWGKHVFKAILMVLVALILLHSALAQSRRDFAPPGQQKREAPVDVLTQIGRSVRGTLDAWIGPETMHLVSESSSQVLWAISSAISVAFFALSGIAAQLLNALGLAGDYLAQGLKLSPGQVQTFLLWGAGALVVYWLLSLLLGLVLALLGRILWGLKLVIFLAGFVALMRSVPDPSTRALLLLALLILYALLSRLTGSRASGAQLEAKVRGLERQVEELRWRQRRAAKGARSVEEE

SEQ ID NO: 687 - protein, 426 aa, Homo sapiens
MAIAQLATEYVFSDFLLKEPTEPKFKGLRLELAVDKMVTCIAVGLPLLLISLAFAQEISIGTQISCFSPSSFSWRQAAFVDSYCWAAVQQKNSLQSESGNLPLWLHKFFPYILLLFAILLYLPPLFWRFAAAPHICSDLKFIMEELDKVYNRAIKAAKSARDLDMRDGACSVPGVTENLGQSLWEVSESHFKYPIVEQYLKTKKNSNNLIIKYISCRLLTLIIILLACIYLGYYFSLSSLSDEFVCSIKSGILRNDSTVPDQFQCKLIAVGIFQLLSVINLVVYVLLAPVVVYTLFVPFRQKTDVLKVYEILPTFDVLHFKSEGYNDLSLYNLFLEENISEVKSYKCLKVLENIKSSGQGIDPMLLLTNLGMIKMDVVDGKTPMSAEMREEQGNQTAELQGMNIDSETKANNGEKNARQRLLDSSC

SEQ ID NO: 688 - protein, 366 aa, Homo sapiens
MASMAAVLTWALALLSAFSATQARKGFWDYFSQTSGDKGRVEQIHQQKMAREPATLKDSLEQDLNNMNKFLEKLRPLSGSEAPRLPQDPVGMRRQLQEELEEVKARLQPYMAEAHELVGWNLEGLRQQLKPYTMDLMEQVALRVQELQEQLRVVGEDTKAQLLGGVDEAWALLQGLQSRVVHHTGRFKELFHPYAESLVSGIGRHVQELHRSVAPHAPASPARLSRCVQVLSRKLTLKAKALHARIQQNLDQLREELSRAFAGTGTEEGAGPDPQMLSEEVRQRLQAFRQDTYLQIAAFTRAIDQETEEVQQQLAPPPPGHSAFAPEFQQTDSGKVLSKLQARLDDLWEDITHSLHDQGHSHLGDP

SEQ ID NO: 689 - protein, 99 aa, Homo sapiens
MQPRVLLVVALLALLASARASEAEDASLLSFMQGYMKHATKTAKDALSSVQESQVAQQARGWVTDGFSSLKDYWSTVKDKFSEFWDLDPEVRPTSAVAA

SEQ ID NO: 690 - protein, 578 aa, Homo sapiens
MLPCLVVLLAALLSLRLGSDAHGTELPSPPSVWFEAEFFHHILHWTPIPNQSESTCYEVALLRYGIESWNSISNCSQTLSYDLTAVTLDLYHSNGYRARVRAVDGSRHSNWTVTNTRFSVDEVTLTVGSVNLEIHNGFILGKIQLPRPKMAPANDTYESIFSHFREYEIAIRKVPGNFTFTHKKVKHENFSLLTSGEVGEFCVQVKPSVASRSNKGMWSKEECISLTRQYFTVTNVIIFFAFVLLLSGALAYCLALQLYVRRRKKLPSVLLFKKPSPFIFISQRPSPETQDTIHPLDEEAFLKVSPELKNLDLHGSTDSGFGSTKPSLQTEEPQFLLPDPHPQADRTLGNREPPVLGDSCSSGSSNSTDSGICLQEPSLSPSTGPTWEQQVGSNSRGQDDSGIDLVQNSEGRAGDTQGGSALGHHSPPEPEVPGEEDPAAVAFQGYLRQTRCAEEKATKTGCLEEESPLTDGLGPKFGRCLVDEAGLHPPALAKGYLKQDPLEMTLASSGAPTGQWNQPTEEWSLLALSSCSDLGISDWSFAHDLAPLGCVAAPGGLLGSFNSDLVTLPLISSLQSSE

SEQ ID NO: 691 - protein, 618 aa, Homo sapiens
MHKTASQRLFPGPSYQNIKSIMEDSTILSDWTNSNKQKMKYDFSCELYRMSTYSTFPAGVPVSERSLARAGFYYTGVNDKVKCFCCGLMLDNWKLGDSPIQKHKQLYPSCSFIQNLVSASLGSTSKNTSPMRNSFAHSLSPTLEHSSLFSGSYSSLSPNPLNSRAVEDISSSRTNPYSYAMSTEEARFLTYHMWPLTFLSPSELARAGFYYIGPGDRVACFACGGKLSNWEPKDDAMSEHRRHFPNCPFLENSLETLRFSISNLSMQTHAARMRTFMYWPSSVPVQPEQLASAGFYYVGRNDDVKCFCCDGGLRCWESGDDPWVEHAKWFPRCEFLIRMKGQEFVDEIQGRYPHLLEQLLSTSDTTGEENADPPIIHFGPGESSSEDAVMMNTPVVKSALEMGFNRDLVKQTVQSKILTTGENYKTVNDIVSALLNAEDEKREEEKEKQAEEMASDDLSLIRKNRMALFQQLTCVLPILDNLLKANVINKQEHDIIKQKTQIPLQARELIDTILVKGNAAANIFKNCLKEIDSTLYKNLFVDKNMKYIPTEDVSGLSLEEQLRRLQEERTCKVCMDKEVSVVFIPCGHLVVCQECAPSLRKCPICRGIIKGTVRTFLS

SEQ ID NO: 692 - protein, 501 aa, Homo sapiens
MAASWRLGCDPRLLRYLVGFPGRRSVGLVKGALGWSVSRGANWRWFHSTQWLRGDPIKILMPSLSPTMEEGNIVKWLKKEGEAVSAGDALCEIETDKAVVTLDASDDGILAKIVVEEGSKNIRLGSLIGLIVEEGEDWKHVEIPKDVGPPPPVSKPSEPRPSPEPQISIPVKKEHIPGTLRFRLSPAARNILEKHSLDASQGTATGPRGIFTKEDALKLVQLKQTGKITESRPTPAPTATPTAPSPLQATAGPSYPRPVIPPVSTPGQPNAVGTFTEIPASNIRRVIAKRLTESKSTVPHAYATADCDLGAVLKVRQDLVKDDIKVSVNDFIIKAAAVTLKQMPDVNVSWDGEGPKQLPFIDISVAVATDKGLLTPIIKDAAAKGIQEIADSVKALSKKARDGKLLPEEYQGGSFSISNLGMFGIDEFTAVINPPQACILAVGRFRPVLKLTEDEEGNAKLQQRQLITVTMSSDSRVVDDELATRFLKSFKANLENPIRLA

SEQ ID NO: 693 - protein, 581 aa, Homo sapiens
MPAPRAREQPRVPGERQPLLPRGARGPRRWRRAAGAAVLLVEMLERAAFFGVTANLVLYLNSTNFNWTGEQATRAALVFLGASYLLAPVGGWLADVYLGRYRAVALSLLLYLAASGLLPATAFPDGRSSFCGEMPASPLGPACPSAGCPRSSPSPYCAPVLYAGLLLLGLAASSVRSNLTSFGADQVMDLGRDATRRFFNWFYWSINLGAVLSLLVVAFIQQNISFLLGYSIPVGCVGLAFFIFLFATPVFITKPPMGSQVSSMLKLALQNCCPQLWQRHSARDRQCARVLADERSPQPGASPQEDIANFQVLVKILPVMVTLVPYWMVYFQMQSTYVLQGLHLHIPNIFPANPANISVALRAQGSSYTIPEAWLLLANVVVVLILVPLKDRLIDPLLLRCKLLPSALQKMALGMFFGFTSVIVAGVLEMERLHYIHHNETVSQQIGEVLYNAAPLSIWWQIPQYLLIGISEIFASIPGLEFAYSEAPRSMQGAIMGIFFCLSGVGSLLGSSLVALLSLPGGWLHCPKDFGNINNCRMDLYFFLLAGIQAVTALLFVWIAGRYERASQGPASHSRFSRDRG

SEQ ID NO: 694 - protein, 93 aa, Homo sapiens
MKLLMVLMLAALSQHCYAGSGCPLLENVISKTINPQVSKTEYKELLQEFIDDNATTNAIDELKECFLNQTDETLSNVEVFMQLIYDSSLCDLF

SEQ ID NO: 695 - protein, 388 aa, Homo sapiens
MKTLIAAYSGVLRGERQAEADRSQRSHGGPALSREGSGRWGTGSSILSALQDLFSVTWLNRSKVEKQLQVISVLQWVLSFLVLGVACSAILMYIFCTDCWLIAVLYFTWLVFDWNTPKKGGRRSQWVRNWAVWRYFRDYFPIQLVKTHNLLTTRNYIFGYHPHGIMGLGAFCNFSTEATEVSKKFPGIRPYLATLAGNFRMPVLREYLMSGGICPVSRDTIDYLLSKNGSGNAIIIVVGGAAESLSSMPGKNAVTLRNRKGFVKLALRHGADLVPIYSFGENEVYKQVIFEEGSWGRWVQKKFQKYIGFAPCIFHGRGLFSSDTWGLVPYSKPITTVVGEPITIPKLEHPTQQDIDLYHTMYMEALVKLFDKHKTKFGLPETEVLEVN

SEQ ID NO: 696 - protein, 183 aa, Homo sapiens
MSAARESHPHGVKRSASPDDDLGSSNWEAADLGNEERKQKFLRLMGAGKKEHTGRLVIGDHKSTSHFRTGEEDKKINEELESQYQQSMDSKLSGRYRRHCGLGFSEVEDHDGEGDVAGDDDDDDDDSPDPESPDDSESDSESEKEESAEELQAAEHPDEVEDPKNKKDAKSNYKMMFVKSSGS

SEQ ID NO: 697 - protein, 372 aa, Homo sapiens
MSEAGEATTTTTTTLPQAPTEAAAAAPQDPAPKSPVGSGAPQAAAPAPAAHVAGNPGGDAAPAATGTAAAASLATAAGSEDAEKKVLATKVLGTVKWFNVRNGYGFINRNDTKEDVFVHQTAIKKNNPRKYLRSVGDGETVEFDVVEGEKGAEAANVTGPDGVPVEGSRYAADRRRYRRGYYGRRRGPPRNYAGEEEEEGSGSSEGFDPPATDRQFSGARNQLRRPQYRPQYRQRRFPPYHVGQTFDRRSRVLPHPNRIQAGEIGEMKDGVPEGAQLQGPVHRNPTYRPRYRSRGPPRPRPAPAVGEAEDKENQQATSGPNQPSVRRGYRRPYNYRRRPRPPNAPSQDGKEAKAGEAPTENPAPPTQQSSAE

SEQ ID NO: 698 - protein, 981 aa, Homo sapiens
MATAAETSASEPEAESKAGPKADGEEDEVKAARTRRKVLSRAVAAATYKTMGPAWDQQEEGVSESDGDEYAMASSAESSPGEYEWEYDEEEEKNQLEIERLEEQLSINVYDYNCHVDLIRLLRLEGELTKVRMARQKMSEIFPLTEELWLEWLHDEISMAQDGLDREHVYDLFEKAVKDYICPNIWLEYGQYSVGGIGQKGGLEKVRSVFERALSSVGLHMTKGLALWEAYREFESAIVEAARPVAGFLSPFDREQTFDSQLEKVHSLFRRQLAIPLYDMEATFAEYEEWSEDPIPESVIQNYNKALQQLEKYKPYEEALLQAEAPRLAEYQAYIDFEMKIGDPARIQLIFERALVENCLVPDLWIRYSQYLDRQLKVKDLVLSVHNRAIRNCPWTVALWSRYLLAMERHGVDHQVISVTFEKALNAGFIQATDYVEIWQAYLDYLRRRVDFKQDSSKELEELRAAFTRALEYLKQEVEERFNESGDPSCVIMQNWARIEARLCNNMQKARELWDSIMTRGNAKYANMWLEYYNLERAHGDTQHCRKALHRAVQCTSDYPEHVCEVLLTMERTEGSLEDWDIAVQKTETRLARVNEQRMKAAEKEAALVQQEEEKAEQRKRARAEKKALKKKKKIRGPEKRGADEDDEKEWGDDEEEQPSKRRRVENSIPAAGETQNVEVAAGPAGKCAAVDVEPPSKQKEKAASLKRDMPKVLHDSSKDSITVFVSNLPYSMQEPDTKLRPLFEACGEVVQIRPIFSNRGDFRGYCYVEFKEEKSALQALEMDRKSVEGRPMFVSPCVDKSKNPDFKVFRYSTSLEKHKLFISGLPFSCTKEELEEICKAHGTVKDLRLVTNRAGKPKGLAYVEYENESQASQAVMKMDGMTIKENIIKVAISNPPQRKVPEKPETRKAPGGPMLLPQTYGARGKGRTQLSLLPRALQRPSAAAPQAENGPAAAPAVAAPAATEAPKMSNADFAKLFLRK

SEQ ID NO: 699 - protein, 947 aa, Homo sapiens
MATRVRTASIWVPPLQERNSSWDRIRKLQGQESILGQGTPGLQPLPGTPRQKQKSRRIEKVLEWLFISQEQPKITKSWGPLSFMDVFVDFTWEEWQLLDPAQKCLYRSVMLENYSNLVSLGYQHTKPDIIFKLEQGEELCMVQAQVPNQTCPNTVWKIDDLMDWHQENKDKLGSTAKSFECTTFGKLCLLSTKYLSRQKPHKCGTHGKSLKYIDFTSDYARNNPNGFQVHGKSFFHSKHEQTVIGIKYCESIESGKTVNKKSQLMCQQMYMGEKPFGCSCCEKAFSSKSYLLVHQQTHAEEKPYGCNECGKDFSSKSYLIVHQRIHTGEKLHECSECRKTFSFHSQLVIHQRIHTGENPYECCECGKVFSRKDQLVSHQKTHSGQKPYVCNECGKAFGLKSQLIIHERIHTGEKPYECNECQKAFNTKSNLMVHQRTHTGEKPYVCSDCGKAFTFKSQLIVHQGIHTGVKPYGCIQCGKGFSLKSQLIVHQRSHTGMKPYVCNECGKAFRSKSYLIIHTRTHTGEKLHECNNCGKAFSFKSQLIIHQRIHTGENPYECHECGKAFSRKYQLISHQRTHAGEKPYECTDCGKAFGLKSQLIIHQRTHTGEKPFECSECQKAFNTKSNLIVHQRTHTGEKPYSCNECGKAFTFKSQLIVHKGVHTGVKPYGCSQCAKTFSLKSQLIVHQRSHTGVKPYGCSECGKAFRSKSYLIIHMRTHTGEKPHECRECGKSFSFNSQLIVHQRIHTGENPYECSECGKAFNRKDQLISHQRTHAGEKPYGCSECGKAFSSKSYLIIHMRTHSGEKPYECNECGKAFIWKSLLIVHERTHAGVNPYKCSQCEKSFSGKLRLLVHQRMHTREKPYECSECGKAFIRNSQLIVHQRTHSGEKPYGCNECGKTFSQKSILSAHQRTHTGEKPCKCTECGKAFCWKSQLIMHQRTHVDDKH

SEQ ID NO: 700 - protein, 591 aa, Homo sapiens
MDDLDALLADLESTTSHISKRPVFLSEETPYSYPTGNHTYQEIAVPPPVPPPPSSEALNGTILDPLDQWQPSSSRFIHQQPQSSSPVYGSSAKTSSVSNPQDSVGSPCSRVGEEEHVYSFPNKQKSAEPSPTVMSTSLGSNLSELDRLLLELNAVQHNPPGFPADEANSSPPLPGALSPLYGVPETNSPLGGKAGPLTKEKPKRNGGRGLEDVRPSVESLLDELESSVPSPVPAITVNQGEMSSPQRVTSTQQQTRISASSATRELDELMASLSDFKIQGLEQRADGERCWAAGWPRDGGRSSPGGQDEGGFMAQGKTGSSSPPGGPPKPGSQLDSMLGSLQSDLNKLGVATVAKGVCGACKKPIAGQVVTAMGKTWHPEHFVCTHCQEEIGSRNFFERDGQPYCEKDYHNLFSPRCYYCNGPILDKVVTALDRTWHPEHFFCAQCGAFFGPEGFHEKDGKAYCRKDYFDMFAPKCGGCARAILENYISALNTLWHPECFVCRECFTPFVNGSFFEHDGQPYCEVHYHERRGSLCSGCQKPITGRCITAMAKKFHPEHFVCAFCLKQLNKGTFKEQNDKPYCQNCFLKLFC

SEQ ID NO: 701 - protein, 1133 aa, Homo sapiens
MDVLAEEFGNLTPEQLAAPIPTVEEKWRLLPAFLKVKGLVKQHIDSFNYFINVEIKKIMKANEKVTSDADPMWYLKYLNIYVGLPDVEESFNVTRPVSPHECRLRDMTYSAPITVDIEYTRGSQRIIRNALPIGRMPIMLRSSNCVLTGKTPAEFAKLNECPLDPGGYFIVKGVEKVILIQEQLSKNRIIVEADRKGAVGASVTSSTHEKKSRTNMAVKQGRFYLRHNTLSEDIPIVIIFKAMGVESDQEIVQMIGTEEHVMAAFGPSLEECQKAQIFTQMQALKYIGNKVRRQRMWGGGPKKTKIEEARELLASTILTHVPVKEFNFRAKCIYTAVMVRRVILAQGDNKVDDRDYYGNKRLELAGQLLSLLFEDLFKKFNSEMKKIADQVIPKQRAAQFDVVKHMRQDQITNGMVNAISTGNWSLKRFKMDRQGVTQVLSRLSYISALGMMTRISSQFEKTRKVSGPRSLQPSQWGMLCPSDTPEGEACGLVKNLALMTHITTDMEDGPIVKLASNLGVEDVNLLCGEELSYPNVFLVFLNGNILGVIRDHKKLVNTFRLMRRAGYINEFVSISTNLTDRCVYISSDGGRLCRPYIIVKKQKPAVTNKHMEELAQGYRNFEDFLHESLVEYLDVNEENDCNIALYEHTINKDTTHLEIEPFTLLGVCAGLIPYPHHNQSPRNTYQCAMGKQAMGTIGYNQRNRIDTLMYLLAYPQKPMVKTKTIELIEFEKLPAGQNATVAVMSYSGYDIEDALVLNKASLDRGFGRCLVYKNAKCTLKRYTNQTFDKVMGPMLDAATRKPIWRHEILDADGICSPGEKVENKQVLVNKSMPTVTQIPLEGSNVPQQPQYKDVPITYKGATDSYIEKVMISSNAEDAFLIKMLLRQTRRPEIGDKFSSRHGQKGVCGLIVPQEDMPFCDSGICPDIIMNPHGFPSRMTVGKLIELLAGKAGVLDGRFHYGTAFGGSKVKDVCEDLVRHGYNYLGKDYVTSGITGEPLEAYIYFGPVYYQKLKHMVLDKMHARARGPRAVLTRQPTEGRSRDGGLRLGEMERDCLIGYGASMLLLERLMISSDAFEVDVCGQCGLLGYSGWCHYCKSSCHVSSLRIPYACKLLFQELQSMNIIPRLKLSKYNE

SEQ ID NO: 702 - protein, 1005 aa, Homo sapiens
MMSDASDMLAAALEQMDGIIAGSKALEYSNGIFDCQSPTSPFMGSLRALHLVEDLRGLLEMMETDEKEGLRCQIPDSTAETLVEWLQSQMTNGHLPGNGDVYQERLARLENDKESLVLQVSVLTDQVEAQGEKIRDLEFCLEEHREKVNATEEMLQQELLSRTSLETQKLDLMAEISNLKLKLTAVEKDRLDYEDKFRDTEGLIQEINDLRLKVSEMDSERLQYEKKLKSTKDELASLKEQLEEKESEVKRLQEKLVCKMKGEGVEIVDRDENFKKKLKEKNIEVQKMKKAVESLMAANEEKDRKIEDLRQCLNRYKKMQDTVVLAQGKKGKDGEYEELLNSSSISSLLDAQGFSDLEKSPSPTPVMGSPSCDPFNTSVPEEFHTTILQVSIPSLLPATVSMETSEKSKLTPKPETSFEENDGNIILGATVDTQLCDKLLTSSLQKSSSLGNLKKETSDGEKETIQKTSEDRAPAESRPFGTLPPRPPGQDTSMDDNPFGTRKVRSSFGRGFFKIKSNKRTASAPNLDRKRSASAPTLAETEKETAEHLDLAGASSRPKDSQRNSPFQIPPPSPDSKKKSRGIMKLFGKLRRSQSTTFNPDDMSEPEFKRGGTRATAGPRLGWSRDLGQSNSDLDMPFAKWTKEQVCNWLMEQGLGSYLNSGKHWIASGQTLLQASQQDLEKELGIKHSLHRKKLQLALQALGSEEETNHGKLDFNWVTRWLDDIGLPQYKTQFDEGRVDGRMLHYMTVDDLLSLKVVSVLHHLSIKRAIQVLRINNFEPNCLRRRPSDENTIAPSEVQKWTNHRVMEWLRSVDLAEYAPNLRGSGVHGGLMVLEPRFNVETMAQLLNIPPNKTLLRRHLATHFNLLIGAEAQHQKRDAMELPDYVLLTATAKVKPKKLAFSNFGNLRKKKQEDGEEYVCPMELGQASGSASKKGFKPGLDMRLYEEDDLDRLEQMEDSEGTVRQIGAFSEGINNLTHMLKEDDMFKDFAARSPSASITDEDSNV

SEQ ID NO: 703 - protein, 149 aa, Homo sapiens
MMTKHKKCFIIVGVLITTNIITLIVKLTRDSQSLCPYDWIGFQNKCYYFSKEEGDWNSSKYNCSTQHADLTIIDNIEEMNFLRRYKCSSDHWIGLKMAKNRTGQWVDGATFTKSFGMRGSEGCAYLSDDGAATARCYTERKWICRKRIH

SEQ ID NO: 704 - protein, 347 aa, Homo sapiens
MRVVVIGAGVIGLSTALCIHERYHSVLQPLDIKVYADRFTPLTTTDVAAGLWQPYLSDPNNPQEADWSQQTFDYLLSHVHSPNAENLGLFLISGYNLFHEAIPDPSWKDTVLGFRKLTPRELDMFPDYGYGWFHTSLILEGKNYLQWLTERLTERGVKFFQRKVESFEEVAREGADVIVNCTGVWAGALQRDPLLQPGRGQIMKVDAPWMKHFILTHDPERGIYNSPYIIPGTQTVTLGGIFQLGNWSELNNIQDHNTIWEGCCRLEPTLKNARIIGERTGFRPVRPQIRLEREQLRTGPSNTEVIHNYGHGGYGLTIHWGCALEAAKLFGRILEEKKLSRMPPSHL

SEQ ID NO: 705 - protein, 313 aa, Homo sapiens
MEEMSGESVVSSAVPAAATRTTSFKGTSPSSKYVKLNVGGALYYTTMQTLTKQDTMLKAMFSGRMEVLTDSEGWILIDRCGKHFGTILNYLRDGAVPLPESRREIEELLAEAKYYLVQGLVEECQAALQNKDTYEPFCKVPVITSSKEEQKLIATSNKPAVKLLYNRSNNKYSYTSNSDDNMLKNIELFDKLSLRFNGRVLFIKDVIGDEICCWSFYGQGRKIAEVCCTSIVYATEKKQTKVEFPEARIYEETLNILLYEAQDGRGPDNALLEATGGAAGRSHHLDEDEERERIERVRRIHIKRPDDRAHLHQ

SEQ ID NO: 706 - protein, 292 aa, Homo sapiens
MLGAWAVEGTAVALLRLLLLLLPPAIRGPGLGVAGVAGAAGAGLPESVIWAVNAGGEAHVDVHGIHFRKDPLEGRVGRASDYGMKLPILRSNPEDQILYQTERYNEETFGYEVPIKEEGDYVLVLKFAEVYFAQSQQKVFDVRLNGHVVVKDLDIFDRVGHSTAHDEIIPMSIRKGKLSVQGEVSTFTGKLYIEFVKGYYDNPKVCALYIMAGTVDDVPKLQPHPGLEKKEEEEEEEEYDEGSNLKKQTNKNRVQSGPRTPNPYASDNSSLMFPILVAFGVFIPTLFCLCRL

SEQ ID NO: 707 - protein, 396 aa, Homo sapiens
MLSEVLLVSAPGKVILHGEHAVVHGKVALAVSLNLRTFLRLQPHSNGKVDLSLPNIGIKRAWDVARLQSLDTSFLEQGDVTTPTSEQVEKLKEVAGLPDDCAVTERLAVLAFLYLYLSICRKQRALPSLDIVVWSELPPGAGLGSSAAYSVCLAAALLTVCEEIPNPLKDGDCVNRWTKEDLELINKWAFQGERMIHGNPSGVDNAVSTWGGALRYHQGKISSLKRSPALQILLTNTKVPRNTRALVAGVRNRLLKFPEIVAPLLTSIDAISLECERVLGEMGEAPAPEQYLVLEELIDMNQHHLNALGVGHASLDQLCQVTRARGLHSKLTGAGGGGCGITLLKPGLEQPEVEATKQALTSCGFDCLETSIGAPGVSIHSATSLDSRVQQALDGL

SEQ ID NO: 708 - protein, 189 aa, Homo sapiens
MLGSRAVMLLLLLPWTAQGRAVPGGSSPAWTQCQQLSQKLCTLAWSAHPLVGHMDLREEGDEETTNDVPHIQCGDGCDPQGLRDNSQFCLQRIHQGLIFYEKLLGSDIFTGEPSLLPDSPVGQLHASLLGLSQLLQPEGHHWETQQIPSLSPSQPWQRLLLRFKILRSLQAFVAVAARVFAHGAATLSP

SEQ ID NO: 709 - protein, 611 aa, Homo sapiens
MPEIVDTCSLASPASVCRTKHLHLRCSVDFTRRTLTGTAALTVQSQEDNLRSLVLDTKDLTIEKVVINGQEVKYALGERQSYKGSPMEISLPIALSKNQEIVIEISFETSPKSSALQWLTPEQTSGKEHPYLFSQCQAIHCRAILPCQDTPSVKLTYTAEVSVPKELVALMSAIRDGETPDPEDPSRKIYKFIQKVPIPCYLIALVVGALESRQIGPRTLVWSEKEQVEKSAYEFSETESMLKIAEDLGGPYVWGQYDLLVLPPSFPYGGMENPCLTFVTPTLLAGDKSLSNVIAHEISHSWTGNLVTNKTWDHFWLNEGHTVYLERHICGRLFGEKFRHFNALGGWGELQNSVKTFGETHPFTKLVVDLTDIDPDVAYSSVPYEKGFALLFYLEQLLGGPEIFLGFLKAYVEKFSYKSITTDDWKDFLYSYFKDKVDVLNQVDWNAWLYSPGLPPIKPNYDMTLTNACIALSQRWITAKEDDLNSFNATDLKDLSSHQLNEFLAQTLQRAPLPLGHIKRMQEVYNFNAINNSEIRFRWLRLCIQSKWEDAIPLALKMATEQGRMKFTRPLFKDLAAFDKSHDQAVRTYQEHKASMHPVTAMLVGKDLKVD

SEQ ID NO: 710 - protein, 407 aa, Homo sapiens
MESAITLWQFLLQLLLDQKHEHLICWTSNDGEFKLLKAEEVAKLWGLRKNKTNMNYDKLSRALRYYYDKNIIKKVIGQKFVYKFVSFPEILKMDPHAVEISRESLLLQDSDCKASPEGREAHKHGLAALRSTSRNEYIHSGLYSSFTINSLQNPPDAFKAIKTEKLEEPPEDSPPVEEVRTVIRFVTNKTDKHVTRPVVSLPSTSEAAAASAFLASSVSAKISSLMLPNAASISSASPFSSRSPSLSPNSPLPSEHRSLFLEAACHDSDSLEPLNLSSGSKTKSPSLPPKAKKPKGLEISAPPLVLSGTDIGSIALNSPALPSGSLTPAFFTAQTPNGLLLTPSPLLSSIHFWSSLSPVAPLSPARLQGPSTLFQFPTLLNGHMPVPIPSLDRAASPVLLSSNSQKS

SEQ ID NO: 711 - protein, 447 aa, Homo sapiens
MRSVSYVQRVALEFSGSLFPHAICLGDVDNDTLNELVVGDTSGKVSVYKNDDSRPWLTCSCQGMLTCVGVGDVCNKGKNLLVAVSAEGWFHLFDLTPAKVLDASGHHETLIGEEQRPVFKQHIPANTKVMLISDIDGDGCRELVVGYTDRVVRAFRWEELGEGPEHLTGQLVSLKKWMLEGQVDSLSVTLGPLGLPELMVSQPGCAYAILLCTWKKDTGSPPASEGPTDGSRETPAARDVVLHQTSGRIHNKNVSTHLIGNIKQGHGTESSGSGLFALCTLDGTLKLMEEMEEADKLLWSVQVDHQLFALEKLDVTGNGHEEVVACAWDGQTYIIDHNRTVVRFQVDENIRAFCAGLYACKEGRNSPCLVYVTFNQKIYVYWEVQLERMESTNLVKLLETKPEYHSLLQELGVDPDDLPVTRALLHQTLYHPDQPPQCAPSSLQDPT

SEQ ID NO: 712 - protein, 134 aa, Homo sapiens
MLLVLLSVVLLALSSAQSTDNDVNYEDFTFTIPDVEDSSQRPDQGPQRPPPEGLLPRPPGDSGNQDDGPQQRPPKPGGHHRHPPPPPFQNQQRPPRRGHRQLSLPRFPSVSLQEASSFFQRDRPARHPQEQPLW

SEQ ID NO: 713 - protein, 178 aa, Homo sapiens [sequence omitted]

SEQ ID NO: 714 - protein, 284 aa, Homo sapiens
MPRYAQLVMGPAGSGKSTYCATMVQHCEALNRSVQVVNLDPAAEHFNYSVMADIRELIEVDDVMEDDSLRFGPNGGLVFCMEYFANNFDWLENCLGHVEDDYILFDCPGQIELYTHLPVMKQLVQQLEQWEFRVCGVFLVDSQFMVESFKFISGILAALSAMISLEIPQVNIMTKMDLLSKKAKKEIEKFLDPDMYSLLEDSTSDLRSKKFKKLTKAICGLIDDYSMVRFLPYDQSDEESMNIVLQHIDFAIQYGEDLEFKEPKEREDESSSMFDEYFQECQDE

SEQ ID NO: 715 - protein, 198 aa, Homo sapiens
MSNVRVSNGSPSLERMDARQAEHPKPSACRNLFGPVDHEELTRDLEKHCRDMEEASQRKWNFDFQNHKPLEGKYEWQEVEKGSLPEFYYRPPRPPKGACKVPAQESQDVSGSRPAAPLIGAPANSEDTHLVDPKTDPSDSQTGLAEQCAGIRKRPATDDSSTQNKRANRTEENVSDGSPNAGSVEQTPKKPGLRRRQT

SEQ ID NO: 716 - protein, 435 aa, Homo sapiens
MLLPWATSAPGLAWGPLVLGLFGLLAASQPQAVPPYASENQTCRDQEKEYYEPQHRICCSRCPPGTYVSAKCSRIRDTVCATCAENSYNEHWNYLTICQLCRPCDPVMGLEEIAPCTSKRKTQCRCQPGMFCAAWALECTHCELLSDCPPGTEAELKDEVGKGNNHCVPCKAGHFQNTSSPSARCQPHTRCENQGLVEAAPGTAQSDTTCKNPLEPLPPEMSGTMLMLAVLLPLAFFLLLATVFSCIWKSHPSLCRKLGSLLKRRPQGEGPNPVAGSWEPPKAHPYFPDLVQPLLPISGDVSPVSTGLPAAPVLEAGVPQQQSPLDLTREPQLEPGEQSQVAHGTNGIHVTGGSMTITGNIYIYNGPVLGGPPGPGDLPATPEPPYPIPEEGDPGPPGLSTPHQEDGKAWHLAETEHCGATPSNRGPRNQFITHD

SEQ ID NO: 717 - protein, 128 aa, Homo sapiens
MKSLILLAILAALAVVTLCYGEWQKEENFGFDIVSVLSLNWHRAQESHESMESYELNPFINRRNANTFISPQQRWRAKVQERIRERSKPVHELNREACDDYRLCERYAMVYGYNAAYNRYFRKRRGTK

SEQ ID NO: 718 - protein, 201 aa, Homo sapiens
MTEKAPEPHVEEDDDDELDSKLNYKPPPQKSLKELQEMDKDDESLIKYKKTLLGDGPVVTDPKAPNVVVTRLTLVCESAPGPITMDLTGDLEALKKETIVLKEGSEYRVKIHFKVNRDIVSGLKYVQHTYRTGVKVDKATFMVGSYGPRPEEYEFLTPVEEAPKGMLARGTYHNKSFFTDDDKQDHLSWEWNLSIKKEWTE

SEQ ID NO: 719 - protein, 369 aa, Homo sapiens
MRACISLVLAVLCGLAWAEDHKESEPLPQLEEETEEALASNLYSAPTSCQGRCYEAFDKHHQCHCNARCQEFGNCCKDFESLCSDHEVSHSSDAITKEEIQSISEKIYRADTNKAQKEDIVLNSQNCISPSETRNQVDRCPKPLFTYVNEKLFSKPTYAAFINLLNNYQRATGHGEHFSAQELAEQDAFLREIMKTAVMKELYSFLHHQNRYGSEQEFVDDLKNMWFGLYSRGNEEGDSSGFEHVFSGEVKKGKVTGFHNWIRFYLEEKEGLVDYYSHIYDGPWDSYPDVLAMQFNWDGYYKEVGSAFIGSSPEFEFALYSLCFIARPGKVCQLSLGGYPLAVRTYTWDKSTYGNGKKYIATAYIVSST

SEQ ID NO: 720 - protein, 581 aa, Homo sapiens
MQRPGPRLWLVLQVMGSCAAISSMDMERPGDGKCQPIEIPMCKDIGYNMTRMPNLMGHENQREAAIQLHEFAPLVEYGCHGHLRFFLCSLYAPMCTEQVSTPIPACRVMCEQARLKCSPIMEQFNFKWPDSLDCRKLPNKNDPNYLCMEAPNNGSDEPTRGSGLFPPLFRPQRPHSAQEHPLKDGGPGRGGCDNPGKFHHVEKSASCAPLCTPGVDVYWSREDKRFAVVWLAIWAVLCFFSSAFTVLTFLIDPARFRYPERPIIFLSMCYCVYSVGYLIRLFAGAESIACDRDSGQLYVIQEGLESTGCTLVFLVLYYFGMASSLWWVVLTLTWFLAAGKKWGHEAIEANSSYFHLAAWAIPAVKTILILVMRRVAGDELTGVCYVGSMDVNALTGFVLIPLACYLVIGTSFILSGFVALFHIRRVMKTGGENTDKLEKLMVRIGLFSVLYTVPATCVIACYFYERLNMDYWKILAAQHKCKMNNQTKTLDCLMAASIPAVEIFMVKIFMLLVVGITSGMWIWTSKTLQSWQQVCSRRLKKKSRRKPASVITSGGIYKKAQHPQKTHHGKYEIPAQSPTCV

SEQ ID NO: 721 - protein, 171 aa, Homo sapiens
MLVNFILRCGLLLVTLSLAIAKHKQSSFTKSCYPRGTLSQAVDALYIKAAWLKATIPEDRIKNIRLLKKKTKKQFMKNCQFQEQLLSFFMEDVFGQLQLQGCKKIRFVEDFHSLRQKLSHCISCASSAREMKSITRMKRIFYRIGNKGIYKAISELDILLSWIKKLLESSQ

SEQ ID NO: 722 - protein, 166 aa, Homo sapiens
MKYTSYILAFQLCIVLGSLGCYCQDPYVKEAENLKKYFNAGHSDVADNGTLFLGILKNWKEESDRKIMQSQIVSFYFKLFKNFKDDQSIQKSVETIKEDMNVKFFNSNKKKRDDFEKLTNYSVTDLNVQRKAIHELIQVMAELSPAAKTGKRKRSQMLFRGRRASQ

SEQ ID NO: 723 - protein, 925 aa, Homo sapiens
MDRSGFGEISSPVIREAEVTRTARKQSAQKRVLLQASQDENFGNTTPRNQVIPRTPSSFRQPFTPTSRSLLRQPDISCILGTGGKSPRLTQSSGFFGNLSMVTNLDDSNWAAAFSSQRSGLFTNTEPHSITEDVTISAVMLREDDPGEAASMSMFSDFLQSFLKHSSSTVFDLVEEYENICGSQVNILSKIVSRATPGLQKFSKTASMLWLLQQEMVTWRLLASLYRDRIQSALEEESVFAVTAVNASEKTVVEALFQRDSLVRQSQLVVDWLESIAKDEIGEFSDNIEFYAKSVYWENTLHTLKQRQLTSYVGSVRPLVTELDPDAPIRQKMPLDDLDREDEVRLLKYLFTLIRAGMTEEAQRLCKRCGQAWRAATLEGWKLYHDPNVNGGTELEPVEGNPYRRIWKISCWRMAEDELFNRYERAIYAALSGNLKQLLPVCDTWEDTVWAYFRVMVDSLVEQEIQTSVATLDETEELPREYLGANWTLEKVFEELQATDKKRVLEENQEHYHIVQKFLILGDIDGLMDEFSKWLSKSRNNLPGHLLRFMTHLILFFRTLGLQTKEEVSIEVLKTYIQLLIREKHTNLIAFYTCHLPQDLAVAQYALFLESVTEFEQRHHCLELAKEADLDVATITKTVVENIRKKDNGEFSHHDLAPALDTGTTEEDRLKIDVIDWLVFDPAQRAEALKQGNAIMRKFLASKKHEAAKEVFVKIPQDSIAEIYNQCEEQGMESPLPAEDDNAIREHLCIRAYLEAHETFNEWFKHMNSVPQKPALIPQPTFTEKVAHEHKEKKYEMDFGIWKGHLDALTADVKEKMYNVLLFVDGGWMVDVREDAKEDHERTHQMVLLRKLCLPMLCFLLHTILHSTGQYQECLQLADMVSSERHKLYLVFSKEELRKLLQKLRESSLMLLDQGLDPLGYEIQL

SEQ ID NO: 724 - protein, 540 aa, Homo sapiens
MVRTDGHTLSEKRNYQVTNSMFGASRKKFVEGVDSDYHDENMYYSQSSMFPHRSEKDMLASPSTSGQLSQFGASLYGQQSALGLPMRGMSNNTPQLNRSLSQGTQLPSHVTPTTGVPTMSLHTPPSPSRGILPMNPRNMMNHSQVGQGIGIPSRTNSMSSSGLGSPNRSSPSIICMPKQQPSRQPFTVNSMSGFGMNRNQAFGMNNSLSSNIFNGTDGSENVTGLDLSDFPALADRNRREGSGNPTPLINPLAGRAPYVGMVTKPANEQSQDFSIHNEDFPALPGSSYKDPTSSNDDSKSNLNTSGKTTSSTDGPKFPGDKSSTTQNNNQQKKGIQVLPDGRVTNIPQGMVTDQFGMIGLLTFIRAAETDPGMVHLALGSDLTTLGLNLNSPENLYPKFASPWASSPCRPQDIDFHVPSEYLTNIHIRDKLAAIKLGRYGEDLLFYLYYMNGGDVLQLLAAVELFNRDWRYHKEERVWITRAPGMEPTMKTNTYERGTYYFFDCLNWRKVAKEFHLEYDKLEERPHLPSTFNYNPAQQAF

SEQ ID NO: 725 - protein, 381 aa, Homo sapiens
MASPSLERPEKGAGKSEFRNQKPKPENQDESELLTVPDGWKEPAFSKEDNPRGLLEESSFATLFPKYREAYLKECWPLVQKALNEHHVNATLDLIEGSMTVCTTKKTFDPYIIIRARDLIKLLARSVSFEQAVRILQDDVACDIIKIGSLVRNKERFVKRRQRLIGPKGSTLKALELLTNCYIMVQGNTVSAIGPFSGLKEVRKVVLDTMKNIHPIYNIKSLMIKRELAKDSELRSQSWERFLPQFKHKNVNKRKEPKKKTVKKEYTPFPPPQPESQIDKELASGEYFLKANQKKRQKMEAIKAKQAEAISKRQEERNKAFIPPKEKPIVKPKEASTETKIDVASIKEKVKKAKNKKLGALTAEEIALKMEADEKKKKKKK

SEQ ID NO: 726 - protein, 128 aa, Homo sapiens
MAGNLLSGAGRRLWDWVPLACRSFSLGVPRLIGIRLTLPPPKVVDRWNEKRAMFGVYDNIGILGNFEKHPKELIRGPIWLRGWKGNELQRCIRKRKMVGSRMFADDLHNLNKRIRYLYKHFNRHGKFR

SEQ ID NO: 727 - protein, 335 aa, Homo sapiens
MGKVKVGVNGFGRIGRLVTRAAFNSGKVDIVAINDPFIDLNYMVYMFQYDSTHGKFHGTVKAENGKLVINGNPITIFQERDPSKIKWGDAGAEYVVESTGVFTTMEKAGAHLQGGAKRVIISAPSADAPMFVMGVNHEKYDNSLKIISNASCTTNCLAPLAKVIHDNFGIVEGLMTTVHAITATQKTVDGPSGKLWRDGRGALQNIIPASTGAAKAVGKVIPELNGKLTGMAFRVPTANVSVVDLTCRLEKPAKYDDIKKVVKQASEGPLKGILGYTEHQVVSSDFNSDTHSSTFDAGAGIALNDHFVKLISWYDNEFGYSNRVVDLMAHMASKE

SEQ ID NO: 728 - protein, 543 aa, Homo sapiens
MRKPAAGFLPSLLKVLLLPLAPAAAQDSTQASTPGSPLSPTEYERFFALLTPTWKAETTCRLRATHGCRNPTLVQLDQYENHGLVPDGAVCSNLPYASWFESFCQFTHYRCSNHVYYAKRVLCSQPVSILSPNTLKEIEASAEVSPTTMTSPISPHFTVTERQTFQPWPERLSNNVEELLQSSLSLGGQEQAPEHKQEQGVEHRQEPTQEHKQEEGQKQEEQEEEQEEEGKQEEGQGTKEGREAVSQLQTDSEPKFHSESLSSNPSSFAPRVREVESTPMIMENIQELIRSAQEIDEMNEIYDENSYWRNQNPGSLLQLPHTEALLVLCYSIVENTCIITPTAKAWKYMEEEILGFGKSVCDSLGRRHMSTCALCDFCSLKLEQCHSEASLQRQQCDTSHKTPFVSPLLASQSLSIGNQVGSPESGRFYGLDLYGGLHMDFWCARLATKGCEDVRVSGWLQTEFLSFQDGDFPTKICDTDYIQYPNYCSFKSQQCLMRNRNRKVSRMRCLQNETYSALSPGKSEDVVLRWSQEFSTLTLGQFG

SEQ ID NO: 729 - protein, 275 aa, Homo sapiens
MSAEVKVTGQNQEQFLLLAKSAKGAALATLIHQVLEAPGVYVFGELLDMPNVRELAESDFASTFRLLTVFAYGTYADYLAEARNLPPLTEAQKNKLRHLSVVTLAAKVKCIPYAVLLEALALRNVRQLEDLVIEAVYADVLRGSLDQRNQRLEVDYSIGRDIQRQDLSAIARTLQEWCVGCEVVLSGIEEQVSRANQHKEQQLGLKQQIESEVANLKKTIKVTTAAAAAATSQDPEQHLTELREPAPGTNQRQPSKKASKGKGLRGSAKIWSKSN

SEQ ID NO: 730 - protein, 406 aa, Homo sapiens
MAAGAGAGSAPRWLRALSEPLSAAQLRRLEEHRYSAAGVSLLEPPLQLYWTWLLQWIPLWMAPNSITLLGLAVNVVTTLVLISYCPTATEEAPYWTYLLCALGLFIYQSLDAIDGKQARRTNSCSPLGELFDHGCDSLSTVFMAVGASIAARLGTYPDWFFFCSFIGMFVFYCAHWQTYVSGMLRFGKVDVTEIQIALVIVFVLSAFGGATMWDYTIPILEIKLKILPVLGFLGGVIFSCSNYFHVILHGGVGKNGSTIAGTSVLSPGLHIGLIIILAIMIYKKSATDVFEKHPCLYILMFGCVFAKVSQKLVVAHMTKSELYLQDTVFLGPGLLFLDQYFNNFIDEYVVLWMAMVISSFDMVIYFSALCLQISRHLHLNIFKTACHQAPEQVQVLSSKSHQNNMD

SEQ ID NO: 731 - protein, 858 aa, Homo sapiens
MAELSEEALLSVLPTIRVPKAGDRVHKDECAFSFDTPESEGGLYICMNTFLGFGKQYVERHFNKTGQRVYLHLRRTRRPKEEDPATGTGDPPRKKPTRLAIGVEGGFDLSEEKFELDEDVKIVILPDYLEIARDGLGGLPDIVRDRVTSAVEALLSADSASRKQEVQAWDGEVRQVSKHAFSLKQLDNPARIPPCGWKCSKCDMRENLWLNLTDGSILCGRRYFDGSGGNNHAVEHYRETGYPLAVKLGTITPDGADVYSYDEDDMVLDPSLAEHLSHFGIDMLKMQKTDKTMTELEIDMNQRIGEWELIQESGVPLKPLFGPGYTGIRNLGNSCYLNSVVQVLFSIPDFQRKYVDKLEKIFQNAPTDPTQDFSTQVAKLGHGLLSGEYSKPVPESGDGERVPEQKEVQDGIAPRMFKALIGKGHPEFSTNRQQDAQEFFLHLINMVERNCRSSENPNEVFRFLVEEKIKCLATEKVKYTQRVDYIMQLPVPMDAALNKEELLEYEEKKRQAEEEKMALPELVRAQVPFSSCLEAYGAPEQVDDFWSTALQAKSVAVKTTRFASFPDYLVIQIKKFTFGLDWVPKKLDVSIEMPEELDISQLRGTGLQPGEEELPDIAPPLVTPDEPKGSLGFYGNEDEDSFCSPHFSSPTSPMLDESVIIQLVEMGFPMDACRKAVYYTGNSGAEAAMNWVMSHMDDPDFANPLILPGSSGPGSTSAAADPPPEDCVTTIVSMGFSRDQALKALRATNNSLERAVDWIFSHIDDLDAEAAMDISEGRSAADSISESVPVGPKVRDGPGKYQLFAFISHMGTSTMCGHYVCHIKKEGRWVIYNDQKVCASEKPPKDLGYIYFYQRVAS

SEQ ID NO: 732 - protein, 286 aa, Homo sapiens
MAEDGEEAEFHFAALYISGQWPRLRADTDLQRLGSSAMAPSRKFFVGGNWKMNGRKQSLGELIGTLNAAKVPADTEVVCAPPTAYIDFARQKLDPKIAVAAQNCYKVTNGAFTGEISPGMIKDCGATWVVLGHSERRHVFGESDELIGQKVAHALAEGLGVIACIGEKLDEREAGITEKVVFEQTKVIADNVKDWSKVVLAYEPVWAIGTGKTATPQQAQEVHEKLRGWLKSNVSDAVAQSTRIIYGGSVTGATCKELASQPDVDGFLVGGASLKPEFVDIINAKQ

SEQ ID NO: 733 - protein, 126 aa, Homo sapiens
MASASTQPAALSAEQAKVVLAEVIQAFSAPENAVRMDEARDNACNDMGKMLQFVLPVATQIQQEVIKAYGFSCDGEGVLKFARLVKSYEAQDPEIASLSGKLKALFLPPMTLPPHGPAAGGSVAAS

SEQ ID NO: 734 - protein, 138 aa, Homo sapiens
MISLTDTQKIGMGLTGFGVFFLFFGMILFFDKALLAIGNVLFVAGLAFVIGLERTFRFFFQKHKMKATGFFLGGVFVVLIGWPLIGMIFEIYGFFLLFRGFFPVVVGFIRRVPVLGSLLNLPGIRSFVDKVGESNNMV

SEQ ID NO: 735 - protein, 334 aa, Homo sapiens
MATLKEKLIAPVAEEEATVPNNKITVVGVGQVGMACAISILGKSLADELALVDVLEDKLKGEMMDLQHGSLFLQTPKIVADKDYSVTANSKIVVVTAGVRQQEGESRLNLVQRNVNVFKFIIPQIVKYSPDCIIIVVSNPVDILTYVTWKLSGLPKHRVIGSGCNLDSARFRYLMAEKLGIHPSSCHGWILGEHGDSSVAVWSGVNVAGVSLQELNPEMGTDNDSENWKEVHKMVVESAYEVIKLKGYTNWAIGLSVADLIESMLKNLSRIHPVSTMVKGMYGIENEVFLSLPCILNARGLTSVINQKLKDDEVAQLKKSADTLWDIQKDLKDL

SEQ ID NO: 736 - protein, 270 aa, Homo sapiens
MGNTSSERAALERHGGHKTPRRDSSGGTKDGDRPKILMDSPEDADLFHSEEIKAPEKEEFLAWQHDLEVNDKAPAQARPTVFRWTGGGKEVYLSGSFNNWSKLPLTRSHNNFVAILDLPEGEHQYKFFVDGQWTHDPSEPIVTSQLGTVNNIIQVKKTDFEVFDALMVDSQKCSDVSELSSSPPGPYHQEPYVCKPEERFRAPPILPPHLLQVILNKDTGISCDPALLPEPNHVMLNHLYALSIKDGVMVLSATHRYKKKYVTTLLYKPI

SEQ ID NO: 737 - protein, 792 aa, Homo sapiens
MAAPSLLNWRRVSSFTGPVPRARHGHRAVAIRELMIIFGGGNEGIADELHVYNTATNQWFLPAVRGDIPPGCAAHGFVCDGTRILVFGGMVEYGRYSNELYELQASRWLWKKVKPHPPPSGLPPCPRLGHSFSLYGNKCYLFGGLANESEDSNNNVPRYLNDFYELELQHGSGVVGWSIPVTKGVVPSPRESHTAVIYCKKDSGSPKMYVFGGMCGARLDDLWQLDLETMSWSKPETKGTVPLPRSLHTASVIGNKMYIFGGWVPHKGENTETSPHDCEWRCTSSFSYLNLDTTEWTTLVSDSQEDKKNSRPRPRAGHCAVAIGTRLYFWSGRDGYKKALNSQVCCKDLWYLDTEKPPAPSQVQLIKATTNSFHVKWDEVSTVEGYLLQLSTDLPYQAASSDSSAAPNMQGVRMDPHRQGSNNIVPNSINDTINSTKTEQPATKETSMKNKPDFKALTDSNAILYPSLASNASNHNSHVVDMLRKNEGPHTSANVGVLSSCLDVRTVIPETSVSSTVSSTQTMVTQQTIKTESSSTNGAVVKDETSLTTFSTKSEVDETYALPATKISRVETHATATPFSKETPSNPVATVKAGERQWCDVGIFKNNTALVSQFYLLPKGKQSISKVGNADVPDYSLLKKQDLVPGTGYRFRVAAINGCGIGPFSKISEFKTCIPGFPGAPSAVRISKNVEGIHLSWEPPTSPSGNILEYSAYLAIRTAQIQDNPSQLVFMRIYCGLKTSCIVTAGQLANAHIDYTSRPAIVFRISAKNEKGYGPATQVRWLQGNNKKAPLN

SEQ ID NO: 738 - protein, 201 aa, Homo sapiens
MARDYDHLFKLLIIGDSGVGKSSLLLRFADNTFSGSYITTIGVDFKIRTVEINGEKVKLQIWDTAGQERFRTITSTYYRGTHGVIVVYDVTSAESFVNVKRWLHEINQNCDDVCRILVGNKNDDPERKVVETEDAYKFAGQMGIQLFETSAKENVNVEEMFNCITELVLRAKKDNLAKQQQQQQNDVVKLTKNSKRKKRCC

SEQ ID NO: 739 - protein, 109 aa, Homo sapiens
MAVVGVSSVSRLLGRSRPQLGRPMSSGAHGEEGSARMWKTLTFFVALPGVAVSMLNVYLKSHHGEHERPEFIAYPHLRIRTKPFPWGDGNHTLFHNPHVNPLPTGYEDE

SEQ ID NO: 740 - protein, 221 aa, Homo sapiens
MSGWADERGGEGDGRIYVGNLPTDVREKDLEDLFYKYGRIREIELKNRHGLVPFAFVRFEDPRDAEDAIYGRNGYDYGQCRLRVEFPRTYGGRGGWPRGGRNGPPTRRSDFRVLVSGLPPSGSWQDLKDHMREAGDVCYADVQKDGVGMVEYLRKEDMEYALRKLDDTKFRSHEGETSYIRVYPERSTSYGYSRSRSGSRGRDSPYQSRGSPHYFSPFRPY

SEQ ID NO: 741 - protein, 253 aa, Homo sapiens
MSCTIEKALADAKALVERLRDHDDAAESLIEQTTALNKRVEAMKQYQEEIQELNEVARHRPRSTLVMGIQQENRQIRELQQENKELRTSLEEHQSALELIMSKYREQMFRLLMASKKDDPGIIMKLKEQHSKIDMVHRNKSEGFFLDASRHILEAPQHGLERRHLEANQNELQAHVDQITEMAAVMRKAIEIDEQQGCKEQERIFQLEQENKGLREILQITRESFLNLRKDDASESTSLSALVTNSDLSLRKS

SEQ ID NO: 742 - protein, 112 aa, Homo sapiens
MQDTGSVVPLHWFGFGYAALVASGGIIGYVKAGSVPSLAAGLLFGSLAGLGAYQLSQDPRNVWVFLATSGTLAGIMGMRFYHSGKFMPAGLIAGASLLMVAKVGVSMFNRPH

SEQ ID NO: 743 - protein, 97 aa, Homo sapiens
MSSAPEPPTFKKEPPKEKEFQSPGLRGVRTTTLFRAVNPELFIKPNKPVMAFGLVTLSLCVAYIGYLHAIQENKKDLYEAIDSEGHSYMRRKTSKWD

SEQ ID NO: 744 - protein, 204 aa, Homo sapiens
MAKVQVNNVVVLDNPSPFYNPFQFEITFECIEDLSEDLEWKIIYVGSAESEEYDQVLDSVLVGPVPAGRHMFVFQADAPNPGLIPDADAVGVTVVLITCTYRGQEFIRVGYYVNNEYTETELRENPPVKPDFSKLQRNILASNPRVTRFHINWEDNTEKLEDAESSNPNLQSLLSTDALPSASKGWSTSENSLNVMLESHMDCM

SEQ ID NO: 745 - protein, 182 aa, Homo sapiens
MAEEQVNRSAGLAPDCEASATAETTVSSVGTCEAAGKSPEPKDYDSTCVFCRIAGRQDPGTELLHCENEDLICFKDIKPAATHHYLVVPKKHIGNCRTLRKDQVELVENMVTVGKTILERNNFTDFTNVRMGFHMPPFCSISHLHLHVLAPVDQLGFLSKLVYRVNSYWFITADHLIEKLRT

SEQ ID NO: 746 - protein, 827 aa, Homo sapiens
MVVQKPHGTMEYTAGNQDTLNSIALKFNITPNKLVELNKLFTHTIVPGQVLFVPDANSPSSTLRLSSSSPGATVSPSSSDAEYDKLPDADLARKALKPIERVLSSTSEEDEPGVVKFLKMNCRYFTDGKGVVGGVMIVTPNNIMFDPHKSDPLVIENGCEEYGLICPMEEVVSIALYNDISHMKIKDALPSPGEWEDLASEKDINPFSKFKSINKEKRQQNGEKIMTSDSRPIVPLEKSTGHTPTKPSGSSVSEKLKKLDSSRETSHGSPTVTKLSKEPSDTSSAFESTAKENFLGEDDDFVDLEELSSQTGGGMHKKDTLKECLSLDPEERKKAESQINNSAVEMQVQSALAFLGTENDVELKGALDLETCEKQDIMPEVDKQSGSPESRVENTLNIHEDLDKVKLIEYYLTKNKEGPQVSENLQKTELSDGKSIEPGGIDITLSSSLSQAGDPITEGNKEPDKTWVKKGEPLPVKLNSSTEANVIKEALDSSLESTLDNSCQGAQMDNKSEVQLWLLKRIQVPIEDILPSKEEKSKTPPMFLCIKVGKPMRKSFATHTAAMVQQYGKRRKQPEYWFAVPRERVDHLYTFFVQWSPDVYGKDAKEQGFVVVEKEELNMIDNFFSEPTTKSWEIITVEEAKRRKSTCSYYEDEDEEVLPVLRPHSALLENMHIEQLARRLPARVQGYPWRLAYSTLEHGTSLKTLYRKSASLDSPVLLVIKDMDNQIFGAYATHPFKFSDHYYGTGETFLYTFSPHFKVFKWSGENSYFINGDISSLELGGGGGRFGLWLDADLYHGRSNSCSTFNNDILSKKEDFIVQDLEVWAFD

SEQ ID NO: 747 - protein, 244 aa, Homo sapiens
MAAAASPAFLLCLPLLHLLSGWSRAGWVDTHCLCYDFIITPKSRPEPQWCEVQGLVDERPFLHYDCVNHKAKAFASLGKKVNVTKTWEEQTETLRDVVDFLKGQLLDIQVENLIPIEPLTLQARMSCEHEAHGHGRGSWQFLFNGQKFLLFDSNNRKWTALHPGAKKMTEKWEKNRDVTMFFQKISLGDCKMWLEEFLMYWEQMLDPTKPPSLAPGTTQPKAMATTLSPWSLLIIFLCFILAGR

SEQ ID NO: 748 - protein, 536 aa, Homo sapiens
MATPDAGLPGAEGVEPAPWAQLEAPARLLLQALQAGPEGARRGLGVLRALGSRGWEPFDWGRLLEALCREEPVVQGPDGRLELKPLLLRLPRICQRNLMSLLMAVRPSLPESGLLSVLQIAQQDLAPDPDAWLRALGELLRRDLGVGTSMEGASPLSERCQRQLQSLCRGLGLGGRRLKSPQAPDPEEEENRDSQQPGKRRKDSEEEAASPEGKRVPKRLRCWEEEEDHEKERPEHKSLESLADGGSASPIKDQPVMAVKTGEDGSNLDDAKGLAESLELPKAIQDQLPRLQQLLKTLEEGLEGLEDAPPVELQLLHECSPSQMDLLCAQLQLPQLSDLGLLRLCTWLLALSPDLSLSNATVLTRSLFLGRILSLTSSASRLLTTALTSFCAKYTYPVCSALLDPVLQAPGTGPAQTELLCCLVKMESLEPDAQVLMLGQILELPWKEETFLVLQSLLERQVEMTPEKFSVLMEKLCKKGLAATTSMAYAKLMLTVMTKYQANITETQRLGLAMALEPNTTFLRKSLKAALKHLGP

SEQ ID NO: 749 - protein, 360 aa, Homo sapiens
MSQERPTFYRQELNKTIWEVPERYQNLSPVGSGAYGSVCAAFDTKTGLRVAVKKLSRPFQSIIHAKRTYRELRLLKHMKHENVIGLLDVFTPARSLEEFNDVYLVTHLMGADLNNIVKCQKLTDDHVQFLIYQILRGLKYIHSADIIHRDLKPSNLAVNEDCELKILDFGLARHTDDEMTGYVATRWYRAPEIMLNWMHYNQTVDIWSVGCIMAELLTGRTLFPGTDHIDQLKLILRLVGTPGAELLKKISSESARNYIQSLTQMPKMNFANVFIGANPLAVDLLEKMLVLDSDKRITAAQALAHAYFAQYHDPDDEPVADPYDQSFESRDLLIDEWKSLTYDEVISFVPPPLDQEEMES

SEQ ID NO: 750 - protein, 360 aa, Homo sapiens
MSQERPTFYRQELNKTIWEVPERYQNLSPVGSGAYGSVCAAFDTKTGLRVAVKKLSRPFQSIIHAKRTYRELRLLKHMKHENVIGLLDVFTPARSLEEFNDVYLVTHLMGADLNNIVKCQKLTDDHVQFLIYQILRGLKYIHSADIIHRDLKPSNLAVNEDCELKILDFGLARHTDDEMTGYVATRWYRAPEIMLNWMHYNQTVDIWSVGCIMAELLTGRTLFPGTDHINQLQQIMRLTGTPPAYLINRMPSHEARNYIQSLTQMPKMNFANVFIGANPLAVDLLEKMLVLDSDKRITAAQALAHAYFAQYHDPDDEPVADPYDQSFESRDLLIDEWKSLTYDEVISFVPPPLDQEEMES

SEQ ID NO: 751 - protein, 465 aa, Homo sapiens
MAMTGSTPCSSMSNHTKERVTMTKVTLENFYSNLIAQHEEREMRQKKLEKVMEEEGLKDEEKRLRRSAHARKETEFLRLKRTRLGLEDFESLKVIGRGAFGEVRLVQKKDTGHVYAMKILRKADMLEKEQVGHIRAERDILVEADSLWVVKMFYSFQDKLNLYLIMEFLPGGDMMTLLMKKDTLTEEETQFYIAETVLAIDSIHQLGFIHRDIKPDNLLLDSKGHVKLSDFGLCTGLKKAHRTEFYRNLNHSLPSDFTFQNMNSKRKAETWKRNRRQLAFSTVGTPDYIAPEVFMQTGYNKLCDWWSLGVIMYEMLIGYPPFCSETPQETYKKVMNWKETLTFPPEVPISEKAKDLILRFCCEWEHRIGAPGVEEIKSNSFFEGVDWEHIRERPAAISIEIKSIDDTSNFDEFPESDILKPTVATSNHPETDYKNKDWVFINYTYKRFEGLTARGAIPSYMKAAK

SEQ ID NO: 752 - protein, 250 aa, Homo sapiens
MALRAGLVLGFHTLMTLLSPQEAGATKADHMGSYGPAFYQSYGASGQFTHEFDEEQLFSVDLKKSEAVWRLPEFGDFARFDPQGGLAGIAAIKAHLDILVERSNRSRAINVPPRVTVLPKSRVELGQPNILICIVDNIFPPVINITWLRNGQTVTEGVAQTSFYSQPDHLFRKFHYLPFVPSAEDVYDCQVEHWGLDAPLLRHWELQVPIPPPDAMETLVCALGLAIGLVGFLVGTVLIIMGTYVSSVPR

SEQ ID NO: 753 - protein, 183 aa, Homo sapiens
MEQRLAEFRAARKRAGLAAQPPAASQGAQTPGEKAEAAATLKAAPGWLKRFLVWKPRPASARAQPGLVQEAAQPQGSTSETPWNTAIPLPSCWDQSFLTNITFLKVLLWLVLLGLFVELEFGLAYFVLSLFYWMYVGTRGPEEKKEGEKSAYSVFNPGCEAIQGTLTAEQLERELQLRPLAGR

SEQ ID NO: 754 - protein, 477 aa, Homo sapiens
MANMQGLVERLERAVSRLESLSAESHRPPGNCGEVNGVIAGVAPSVEAFDKLMDSMVAEFLKNSRILAGDVETHAEMVHSAFQAQRAFLLMASQYQQPHENDVAALLKPISEKIQEIQTFRERNRGSNMFNHLSAVSESIPALGWIAVSPKPGPYVKEMNDAATFYTNRVLKDYKHSDLRHVDWVKSYLNIWSELQAYIKEHHTTGLTWSKTGPVASTVSAFSVLSSGPGLPPPPPPLPPPGPPPLFENEGKKEESSPSRSALFAQLNQGEAITKGLRHVTDDQKTYKNPSLRAQGGQTQSPTKSHTPSPTSPKSYPSQKHAPVLELEGKKWRVEYQEDRNDLVISETELKQVAYIFKCEKSTIQIKGKVNSIIIDNCKKLGLVFDNVVGIVEVINSQDIQIQVMGRVPTISINKTEGCHIYLSEDALDCEIVSAKSSEMNILIPQDGDYREFPIPEQFKTAWDGSKLITEPAEIMA

SEQ ID NO: 755 - protein, 840 aa, Homo sapiens
MSAFRLWPGLLIMLGSLCHRGSPCGLSTHVEIGHRALEFLQLHNGRVNYRELLLEHQDAYQAGIVFPDCFYPSICKGGKFHDVSESTHWTPFLNASVHYIRENYPLPWEKDTEKLVAFLFGITSHMAADVSWHSLGLEQGFLRTMGAIDFHGSYSEAHSAGDFGGDVLSQFEFNFNYLARRWYVPVKDLLGIYEKLYGRKVITENVIVDCSHIQFLEMYGEMLAVSKLYPTYSTKSPFLVEQFQEYFLGGLDDMAFWSTNIYHLTSFMLENGTSDCNLPENPLFIACGGQQNHTQGSKMQKNDFHRNLTTSLTESVDRNINYTERGVFFSVNSWTPDSMSFIYKALERNIRTMFIGGSQLSQKHVSSPLASYFLSFPYARLGWAMTSADLNQDGHGDLVVGAPGYSRPGHIHIGRVYLIYGNDLGLPPVDLDLDKEAHRILEGFQPSGRFGSALAVLDFNVDGVPDLAVGAPSVGSEQLTYKGAVYVYFGSKQGGMSSSPNITISCQDIYCNLGWTLLAADVNGDSEPDLVIGSPFAPGGGKQKGIVAAFYSGPSLSDKEKLNVEAANWTVRGEEDFSWFGYSLHGVTVDNRTLLLVGSPTWKNASRLGHLLHIRDEKKSLGRVYGYFPPNGQSWFTISGDKAMGKLGTSLSSGHVLMNGTLKQVLLVGAPTYDDVSKVAFLTVTLHQGGATRMYALTSDAQPLLLSTFSGDRRFSRFGGVLHLSDLDDDGLDEIIMAAPLRIADVTSGLIGGEDGRVYVYNGKETTLGDMTGKCKSWITPCPEEKAQYVLISPEASSRFGSSLITVRSKAKNQVVIAAGRSSLGARLSGALHVYSLGSD

SEQ ID NO: 756 - protein, 140 aa, Homo sapiens
MTSMTQSLREVIKAMTKARNFERVLGKITLVSAAPGKVICEMKVEEEHTNAIGTLHGGLTATLVDNISTMALLCTERGAPGVSVDMNITYMSPAKLGEDIVITAHVLKQGKTLAFTSVDLTNKATGKLIAQGRHTKHLGN

SEQ ID NO: 757 - protein, 132 aa, Homo sapiens [sequence omitted]

SEQ ID NO: 758 - protein, 209 aa, Homo sapiens
MNPSMKQKQEEIKENIKNSSVPRRTLKMIQPSASGSLVGRENELSAGLSKRKHRNDHLTSTTSSPGVIVPESSENKNLGGVTQESFDLMIKENPSSQYWKEVAEKRRKALYEALKENEKLHKEIEQKDNEIARLKKENKELAEVAEHVQYMAELIERLNGEPLDNFESLDNQEFDSEEETVEDSLVEDSEIGTCAEGTVSSSTDAKPCI

SEQ ID NO: 759 - protein, 162 aa, Homo sapiens
MAETVADTRRLITKPQNLNDAYGPPSNFLEIDVSNPQTVGVGRGRFTTYEIRVKTNLPIFKLKESTVRRRYSDFEWLRSELERESKVVVPPLPGKAFLRQLPFRGDDGIFDDNFIEERKQGLEQFINKVAGHPLAQNERCLHMFLQDEIIDKSYTPSKIRHA

SEQ ID NO: 760 - protein, 697 aa, Homo sapiens
MAETSPEPSGQLVVHSDAHSDTVLASFEDQRKKGFLCDITLIVENVHFRAHKALLAASSEYFSMMFAEEGEIGQSIYMLEGMVADTFGILLEFIYTGYLHASEKSTEQILATAQFLKVYDLVKAYTDFQNNHSSPKPTTLNTAGAPVVVISNKKNDPPKRKRGRPKKVNTLQEEKSELAAEEEIQLRVNNSVQNRQNFVVKGDSGVLNEQIAAKEKEESEPTCEPSREEEMPVEKDENYDPKTEDGQASQSRYSKRRIWRSVKLKDYKLVGDQEDHGSAKRICGRRKRPGGPEARCKDCGKVFKYNHFLAIHQRSHTGERPFKCNECGKGFAQKHSLQVHTRMHTGERPYTCTVCSKALTTKHSLLEHMSLHSGQKSFTCDQCGKYFSQNRQLKSHYRVHTGHSLPECKDCHRKFMDVSQLKKHLRTHTGEKPFTCEICGKSFTAKSSLQTHIRIHRGEKPYSCGICGKSFSDSSAKRRHCILHTGKKPFSCPECNLQFARLDNLKAHLKIHSKEKHASDASSISGSSNTEEVRNILQLQPYQLSTSGEQEIQLLVTDSVHNINFMPGPSQGISIVTAESSQNMTADQAANLTLLTQQPEQLQNLILSAQQEQTEHIQSLNMIESQMGPSQTEPVHVITLSKETLEHLHAHQEQTEELHLATSTSDPAQHLQLTQEPGPPPPTHHVPQPTPLGQEQS

SEQ ID NO: 761 - protein, 907 aa, Homo sapiens
MPTAAAPIISSVQKLVLYETRARYFLVGSNNAETKYRVLKIDRTEPKDLVIIDDRHVYTQQEVRELLGRLDLGNRTKMGQKGSSGLFRAVSAFGVVGFVRFLEGYYIVLITKRRKMADIGGHAIYKVEDTNMIYIPNDSVRVTHPDEARYLRIFQNVDLSSNFYFSYSYDLSHSLQYNLTVLRMPLEMLKSEMTQNRQESFDIFEDEGLITQGGSGVFGICSEPYMKYVWNGELLDIIKSTVHRDWLLYIIHGFCGQSKLLIYGRPVYVTLIARRSSKFAGTRFLKRGANCEGDVANEVETEQILCDASVMSFTAGSYSSYVQVRGSVPLYWSQDISTMMPKPPITLDQADPFAHVAALHFDQMFQRFGSPIIILNLVKEREKRKHERILSEELVAAVTYLNQFLPPEHTIVYIPWDMAKYTKSKLCNVLDRLNVIAESVVKKTGFFVNRPDSYCSILRPDEKWNELGGCVIPTGRLQTGILRTNCVDCLDRTNTAQFMVGKCALAYQLYSLGLIDKPNLQFDTDAVRLFEELYEDHGDTLSLQYGGSQLVHRVKTYRKIAPWTQHSKDIMQTLSRYYSNAFSDADRQDSINLFLGVFHPTEGKPHLWELPTDFYLHHKNTMRLLPTRRSYTYWWTPEVIKHLPLPYDEVICAVNLKKLIVKKFHKYEEEIDIHNEFFRPYELSSFDDTFCLAMTSSARDFMPKTVGIDPSPFTVRKPDETGKSVLGNKSNREEAVLQRKTAASAPPPPSEEAVSSSSEDDSGTDREEEGSVSQRSTPVKMTDAGDSAKVTENVVQPMKELYGINLSDGLSEEDFSIYSRFVQLGQSQHKQDKNSQQPCSRCSDGVIKLTPISAFSQDNIYEVQPPRVDRKSTEIFQAHIQASQGIMQPLGKEDSSMYREYIRNRYL

SEQ ID NO: 762 - protein, 1221 aa, Homo sapiens
MMFRSDRMWSCHWKWKPSPLLFLFALYIMCVPHSVWGCANCRVVLSNPSGTFTSPCYPNDYPNSQACMWTLRAPTGYIIQITFNDFDIEEAPNCIYDSLSLDNGESQTKFCGATAKGLSFNSSANEMHVSFSSDFSIQKKGFNASYIRVAVSLRNQKVILPQTSDAYQVSVAKSISIPELSAFTLCFEATKVGHEDSDWTAFSYSNASFTQLLSFGKAKSGYFLSISDSKCLLNNALPVKEKEDIFAESFEQLCLVWNNSLGSIGVNFKRNYETVPCDSTISKVIPGNGKLLLGSNQNEIVSLKGDIYNFRLWNFTMNAKILSNLSCNVKGNVVDWQNDFWNIPNLALKAESNLSCGSYLIPLPAAELASCADLGTLCQATVNSPSTTPPTVTTNMPVTNRIDKQRNDGIIYRISVVIQNILRHPEVKVQSKVAEWLNSTFQNWNYTVYVVNISFHLSAGEDKIKVKRSLEDEPRLVLWALLVYNATNNTNLEGKIIQQKLLKNNESLDEGLRLHTVNVRQLGHCLAMEEPKGYYWPSIQPSEYVLPCPDKPGFSASRICFYNATNPLVTYWGPVDISNCLKEANEVANQILNLTADGQNLTSANITNIVEQVKRIVNKEENIDITLGSTLMNIFSNILSSSDSDLLESSSEALKTIDELAFKIDLNSTSHVNITTRNLALSVSSLLPGTNAISNFSIGLPSNNESYFQMDFESGQVDPLASVILPPNLLENLSPEDSVLVRRAQFTFFNKTGLFQDVGPQRKTLVSYVMACSIGNITIQNLKDPVQIKIKHTRTQEVHHPICAFWDLNKNKSFGGWNTSGCVAHRDSDASETVCLCNHFTHFGVLMDLPRSASQLDARNTKVLTFISYIGCGISAIFSAATLLTYVAFEKLRRDYPSKILMNLSTALLFLNLLFLLDGWITSFNVDGLCIAVAVLLHFFLLATFTWMGLEAIHMYIALVKVFNTYIRRYILKFCIIGWGLPALVVSVVLASRNNNEVYGKESYGKEKGDEFCWIQDPVIFYVTCAGYFGVMFFLNIAMFIVVMVQICGRNGKRSNRTLREEVLRNLRSVVSLTFLLGMTWGFAFFAWGPLNIPFMYLFSIFNSLQGLFIFIFHCAMKENVQKQWRQHLCCGRFRLADNSDWSKTATNIIKKSSDNLGKSLSSSSIGSNSTYLTSKSKSSSTTYFKRNSHTDNVSYEHSFNKSGSLRQCFHGQVLVKTGPC

SEQ ID NO: 763 - protein, 379 aa, Homo sapiens
MAATAAAVVAEEDTELRDLLVQTLENSGVLNRIKAELRAAVFLALEEQEKVENKTPLVNESLKKFLNTKDGRLVASLVAEFLQFFNLDFTLAVFQPETSTLQGLEGRENLARDLGIIEAEGTVGGPLLLEVIRRCQQKEKGPTTGEGALDLSDVHSPPKSPEGKTSAQTTPSKKANDEANQSDTSVSLSEPKSKSSLHLLSHETKIGSFLSNRTLDGKDKAGLCPDEDDMEGDSFFDDPIPKPEKTYGLRKEPRKQAGSLASLSDAPPLKSGLSSLAGAPSLKDSESKRGNTVLKDLKLISDKIGSLGLGTGEDDDYVDDFNSTSHRSEKSEISIGEEIEEDLSVEIDDINTSDKLDDLTQDLTVSQLSDVADYLEDVA

SEQ ID NO: 764 - protein, 437 aa, Homo sapiens
MPKFKAARGVGGQEKHAPLADQILAGNAVRAGVREKRRGRGTGEAEEEYVGPRLSRRILQQARQQQEELEAEHGTGDKPAAPRERTTRLGPRMPQDGSDDEDEEWPTLEKAATMTAAGHHAEVVVDPEDERAIEMFMNKNPPARRTLADIIMEKLTEKQTEVETVMSEVSGFPMPQLDPRVLEVYRGVREVLSKYRSGKLPKAFKIIPALSNWEQILYVTEPEAWTAAAMYQATRIFASNLKERMAQRFYNLVLLPRVRDDVAEYKRLNFHLYMALKKALFKPGAWFKGILIPLCESGTCTLREAIIVGSIITKCSIPVLHSSAAMLKIAEMEYSGANSIFLRLLLDKKYALPYRVLDALVFHFLGFRTEKRELPVLWHQCLLTLVQRYKADLATDQKEALLELLRLQPHPQLSPEIRRELQSAVPRDVEDVPITVE

SEQ ID NO: 765 - protein, 339 aa, Homo sapiens
MDQNNSLPPYAQGLASPQGAMTPGIPIFSPMMPYGTGLTPQPIQNTNSLSILEEQQRQQQQQQQQQQQQQQQQQQQQQQQQQQQQQQQQQQQQQQAVAAAAVQQSTSQQATQGTSGQAPQLFHSQTLTTAPLPGTTPLYPSPMTPMTPITPATPASESSGIVPQLQNIVSTVNLGCKLDLKTIALRARNAEYNPKRFAAVIMRIREPRTTALIFSSGKMVCTGAKSEEQSRLAARKYARVVQKLGFPAKFLDFKIQNMVGSCDVKFPIRLEGLVLTHQQFSSYEPELFPGLIYRMIKPRIVLLIFVSGKVVLTGAKVRAEIYEAFENIYPILKGFRKTT

SEQ ID NO: 766 - protein, 816 aa, Homo sapiens
MGAARGSPARPRRLPLLSVLLLPLLGGTQTAIVFIKQPSSQDALQGRRALLRCEVEAPGPVHVYWLLDGAPVQDTERRFAQGSSLSFAAVDRLQDSGTFQCVARDDVTGEEARSANASFNIKWIEAGPVVLKHPASEAEIQPQTQVTLRCHIDGHPRPTYQWFRDGTPLSDGQSNHTVSSKERNLTLRPAGPEHSGLYSCCAHSAFGQACSSQNFTLSIADESFARVVLAPQDVVVARYEEAMFHCQFSAQPPPSLQWLFEDETPITNRSRPPHLRRATVFANGSLLLTQVRPRNAGIYRCIGQGQRGPPIILEATLHLAEIEDMPLFEPRVFTAGSEERVTCLPPKGLPEPSVWWEHAGVRLPTHGRVYQKGHELVLANIAESDAGVYTCHAANLAGQRRQDVNITVATVPSWLKKPQDSQLEEGKPGYLDCLTQATPKPTVVWYRNQMLISEDSRFEVFKNGTLRINSVEVYDGTWYRCMSSTPAGSIEAQARVQVLEKLKFTPPPQPQQCMEFDKEATVPCSATGREKPTIKWERADGSSLPEWVTDNAGTLHFARVTRDDAGNYTCIASNGPQGQIRAHVQLTVAVFITFKVEPERTTVYQGHTALLQCEAQGDPKPLIQWKGKDRILDPTKLGPRMHIFQNGSLVIHDVAPEDSGRYTCIAGNSCNIKHTEAPLYVVDKPVPEESEGPGSPPPYKMIQTIGLSVGAAVAYIIAVLGLMFYCKKRCKAKRLQKQPEGEEPEMECLNGGPLQNGQPSAEIQEEVALTSLGSGPAATNKRHSTSDKMHFPRSSLQPITTLGRPQAVPEDFQEQG

SEQ ID NO: 767 - protein, 1070 aa, Homo sapiens
MGAARGSPARPRRLPLLSVLLLPLLGGTQTAIVFIKQPSSQDALQGRRALLRCEVEAPGPVHVYWLLDGAPVQDTERRFAQGSSLSFAAVDRLQDSGTFQCVARDDVTGEEARSANASFNIKWIEAGPVVLKHPASEAEIQPQTQVTLRCHIDGHPRPTYQWFRDGTPLSDGQSNHTVSSKERNLTLRPAGPEHSGLYSCCAHSAFGQACSSQNFTLSIADESFARVVLAPQDVVVARYEEAMFHCQFSAQPPPSLQWLFEDETPITNRSRPPHLRRATVFANGSLLLTQVRPRNAGIYRCIGQGQRGPPIILEATLHLAEIEDMPLFEPRVFTAGSEERVTCLPPKGLPEPSVWWEHAGVRLPTHGRVYQKGHELVLANIAESDAGVYTCHAANLAGQRRQDVNITVATVPSWLKKPQDSQLEEGKPGYLDCLTQATPKPTVVWYRNQMLISEDSRFEVFKNGTLRINSVEVYDGTWYRCMSSTPAGSIEAQARVQVLEKLKFTPPPQPQQCMEFDKEATVPCSATGREKPTIKWERADGSSLPEWVTDNAGTLHFARVTRDDAGNYTCIASNGPQGQIRAHVQLTVAVFITFKVEPERTTVYQGHTALLQCEAQGDPKPLIQWKGKDRILDPTKLGPRMHIFQNGSLVIHDVAPEDSGRYTCIAGNSCNIKHTEAPLYVVDKPVPEESEGPGSPPPYKMIQTIGLSVGAAVAYIIAVLGLMFYCKKRCKAKRLQKQPEGEEPEMECLNGGPLQNGQPSAEIQEEVALTSLGSGPAATNKRHSTSDKMHFPRSSLQPITTLGKSEFGEVFLAKAQGLEEGVAETLVLVKSLQSKDEQQQLDFRRELEMFGKLNHANVVRLLGLCREAEPHYMVLEYVDLGDLKQFLRISKSKDEKLKSQPLSTKQKVALCTQVALGMEHLSNNRFVHKDLAARNCLVSAQRQVKVSALGLSKDVYNSEYYHFRQAWVPLRWMSPEAILEGDFSTKSDVWAFGVLMWEVFTHGEMPHGGQADDEVLADLQAGKARLPQPEGCPSKLYRLMQRCWALSPKDRPSFSEIASALGDSTVDSKP

SEQ ID NO: 768 - protein, 174 aa, Homo sapiens
MAAAMVPGRSESWERGEPGRPALYFCGSIRGGREDRTLYERIVSRLRRFGTVLTEHVAAAELGARGEEAAGGDRLIHEQDLEWLQQADVVVAEVTQPSLGVGYELGRAVAFNKRILCLFRPQSGRVLSAMIRGAADGSRFQVWDYEEGEVEALLDRYFEADPPGQVAASPDPTT

SEQ ID NO: 769 - protein, 924 aa, Homo sapiens
MSRSRQPPLVTGISPNEGIPWTKVTIRGENLGTGPTDLIGLTICGHNCLLTAEWMSASKIVCRVGQAKNDKGDIIVTTKSGGRGTSTVSFKLLKPEKIGILDQSAVWVDEMNYYDMRTDRNKGIPPLSLRPANPLGIEIEKSKFSQKDLEMLFHGMSADFTSENFSAAWYLIENHSNTSFEQLKMAVTNLKRQANKKSEGSLAYVKGGLSTFFEAQDALSAIHQKLEADGTEKVEGSMTQKLENVLNRASNTADTLFQEVLGRKDKADSTRNALNVLQRFKFLFNLPLNIERNIQKGDYDVVINDYEKAKSLFGKTEVQVFKKYYAEVETRIEALRELLLDKLLETPSTLHDQKRYIRYLSDLHASGDPAWQCIGAQHKWILQLMHSCKEGYVKDLKGNPGLHSPMLDLDNDTRPSVLGHLSQTASLKRGSSFQSGRDDTWRYKTPHRVAFVEKLTKLVLSQLPNFWKLWISYVNGSLFSETAEKSGQIERSKNVRQRQNDFKKMIQEVMHSLVKLTRGALLPLSIRDGEAKQYGGWEVKCELSGQWLAHAIQTVRLTHESLTALEIPNDLLQTIQDLILDLRVRCVMATLQHTAEEIKRLAEKEDWIVDNEGLTSLPCQFEQCIVCSLQSLKGVLECKPGEASVFQQPKTQEEVCQLSINIMQVFIYCLEQLSTKPDADIDTTHLSVDVSSPDLFGSIHEDFSLTSEQRLLIVLSNCCYLERHTFLNIAEHFEKHNFQGIEKITQVSMASLKELDQRLFENYIELKADPIVGSLEPGIYAGYFDWKDCLPPTGVRNYLKEALVNIIAVHAEVFTISKELVPRVLSKVIEAVSEELSRLMQCVSSFSKNGALQARLEICALRDTVAVYLTPESKSSFKQALEALPQLSSGADKKLLEELLNKFKSSMHLQLTCFQAASSTMMKT

SEQ ID NO: 770 - protein, 361 aa, Homo sapiens
MAMNYNAKDEVDGGPPCAPGGTAKTRRPDNTAFKQQRLPAWQPILTAGTVLPIFFIIGLIFIPIGIGIFVTSNNIREIEIDYTGTEPSSPCNKCLSPDVTPCFCTINFTLEKSFEGNVFMYYGLSNFYQNHRRYVKSRDDSQLNGDSSALLNPSKECEPYRRNEDKPIAPCGAIANSMFNDTLELFLIGNDSYPIPIALKKKGIAWWTDKNVKFRNPPGGDNLEERFKGTTKPVNWLKPVYMLDSDPDNNGFINEDFIVWMRTAALPTFRKLYRLIERKSDLHPTLPAGRYSLNVTYNYPVHYFDGRKRMILSTISWMGGKNPFLGIAYIAVGSISFLLGVVLLVINHKYRNSSNTADITI

SEQ ID NO: 771 - protein, 856 aa, Homo sapiens
MESEDLSGRELTIDSIMNKVRDIKNKFKNEDLTDELSLNKISADTTDNSGTVNQIMMMANNPEDWLSLLLKLEKNSVPLSDALLNKLIGRYSQAIEALPPDKYGQNESFARIQVRFAELKAIQEPDDARDYFQMARANCKKFAFVHISFAQFELSQGNVKKSKQLLQKAVERGAVPLEMLEIALRNLNLQKKQLLSEEEKKNLSASTVLTAQESFSGSLGHLQNRNNSCDSRGQTTKARFLYGENMPPQDAEIGYRNSLRQTNKTKQSCPFGRVPVNLLNSPDCDVKTDDSVVPCFMKRQTSRSECRDLVVPGSKPSGNDSCELRNLKSVQNSHFKEPLVSDEKSSELIITDSITLKNKTESSLLAKLEETKEYQEPEVPESNQKQWQSKRKSECINQNPAASSNHWQIPELARKVNTEKHTTFEQPVFSVSKQSPPISTSKWFDPKSICKTPSSNTLDDYMSCFRTPVVKNDFPPACQLSTPYGQPACFQQQQHQILATPLQNLQVLASSSANECISVKGRIYSILKQIGSGGSSKVFQVLNEKKQIYAIKYVNLEEADNQTLDSYRNEIAYLNKLQQHSDKIIRLYDYEITDQYIYMVMECGNIDLNSWLKKKKSIDPWERKSYWKNMLEAVHTIHQHGIVHSDLKPANFLIVDGMLKLIDFGIANQMQPDTTSVVKDSQVGTVNYMPPEAIKDMSSSRENGKSKSKISPKSDVWSLGCILYYMTYGKTPFQQIINQISKLHAIIDPNHEIEFPDIPEKDLQDVLKCCLKRDPKQRISIPELLAHPYVQIQTHPVNQMAKGTTEEMKYVLGQLVGLNSPNSILKAAKTLYEHYSGGESHNSSSSKTFEKKRGKK

SEQ ID NO: 772 - protein, 354 aa, Homo sapiens
MQGLLFSTLLLAGLAQFCCRVQGTGPLDTTPEGRPGEVSDAPQRKQFCHWPCKCPQQKPRCPPGVSLVRDGCGCCKICAKQPGEICNEADLCDPHKGLYCDYSVDRPRYETGVCAYLVAVGCEFNQVHYHNGQVFQPNPLFSCLCVSGAIGCTPLFIPKLAGSHCSGAKGGKKSDQSNCSLEPLLQQLSTSYKTMPAYRNLPLIWKKKCLVQATKWTPCSRTCGMGISNRVTNENSNCEMRKEKRLCYIQPCDSNILKTIKIPKGKTCQPTFQLSKAEKFVFSGCSSTQSYKPTFCGICLDKRCCIPNKSKMITIQFDCPNEGSFKWKMLWITSCVCQRNCREPGDIFSELKIL

SEQ ID NO: 773 - protein, 1823 aa, Homo sapiens
MALSSAWRSVLPLWLLWSAACSRAASGDDNAFPFDIEGSSAVGRQDPPETSEPRVALGRLPPAAEKCNAGFFHTLSGECVPCDCNGNSNECLDGSGYCVHCQRNTTGEHCEKCLDGYIGDSIRGAPQFCQPCPCPLPHLANFAESCYRKNGAVRCICNENYAGPNCERCAPGYYGNPLLIGSTCKKCDCSGNSDPNLIFEDCDEVTGQCRNCLRNTTGFKCERCAPGYYGDARIAKNCAVCNCGGGPCDSVTGECLEEGFEPPTGMDCPTISCDKCVWDLTDDLRLAALSIEEGKSGVLSVSSGAAAHRHVNEINATIYLLKTKLSERENQYALRKIQINNAENTMKSLLSDVEELVEKENQASRKGQLVQKESMDTINHASQLVEQAHDMRDKIQEINNKMLYYGEEHELSPKEISEKLVLAQKMLEEIRSRQPFFTQRELVDEEADEAYELLSQAESWQRLHNETRTLFPVVLEQLDDYNAKLSDLQEALDQALNYVRDAEDMNRATAARQRDHEKQQERVREQMEVVNMSLSTSADSLTTPRLTLSELDDIIKNASGIYAEIDGAKSELQVKLSNLSNLSHDLVQEAIDHAQDLQQEANELSRKLHSSDMNGLVQKALDASNVYENIVNYVSEANETAEFALNTTDRIYDAVSGIDTQIIYHKDESENLLNQARELQAKAESSSDEAVADTSRRVGGALARKSALKTRLSDAVKQLQAAERGDAQQRLGQSRLITEEANRTTMEVQQATAPMANNLTNWSQNLQHFDSSAYNTAVNSARDAVRNLTEVVPQLLDQLRTVEQKRPASNVSASIQRIRELIAQTRSVASKIQVSMMFDGQSAVEVHSRTSMDDLKAFTSLSLYMKPPVKRPELTETADQFILYLGSKNAKKEYMGLAIKNDNLVYVYNLGTKDVEIPLDSKPVSSWPAYFSIVKIERVGKHGKVFLTVPSLSSTAEEKFIKKGEFSGDDSLLDLDPEDTVFYVGGVPSNFKLPTSLNLPGFVGCLELATLNNDVISLYNFKHIYNMDPSTSVPCARDKLAFTQSRAASYFFDGSGYAVVRDITRRGKFGQVTRFDIEVRTPADNGLILLMVNGSMFFRLEMRNGYLHVFYDFGFSGGPVHLEDTLKKAQINDAKYHEISIIYHNDKKMILVVDRRHVKSMDNEKMKIPFTDIYIGGAPPEILQSRALRAHLPLDINFRGCMKGFQFQKKDFNLLEQTETLGVGYGCPEDSLISRRAYFNGQSFIASIQKISFFDGFEGGFNFRTLQPNGLLFYYASGSDVFSISLDNGTVIMDVKGIKVQSVDKQYNDGLSHFVISSVSPTRYELIVDKSRVGSKNPTKGKIEQTQASEKKFYFGGSPISAQYANFTGCISNAYFTRVDRDVEVEDFQRYTEKVHTSLYECPIESSPLFLLHKKGKNLSKPKASQNKKGGKSKDAPSWDPVALKLPERNTPRNSHCHLSNSPRAIEHAYQYGGTANSRQEFEHLKGDFGAKSQFSIRLRTRSSHGMIFYVSDQEENDFMTLFLAHGRLVYMFNVGHKKLKIRSQEKYNDGLWHDVIFIRERSSGRLVIDGLRVLEESLPPTEATWKIKGPIYLGGVAPGKAVKNVQINSIYSFSGCLSNLQLNGASITSASQTFSVTPCFEGPMETGTYFSTEGGYVVLDESFNIGLKFEIAFEVRPRSSSGTLVHGHSVNGEYLNVHMKNGQVIVKVNNGIRDFSTSVTPKQSLCDGRWHRITVIRDSNVVQLDVDSEVNHVVGPLNPKPIDHREPVFVGGVPESLLTPRLAPSKPFTGCIRHFVIDGHPVSFSKAALVSGAVSINSCPAA

SEQ ID NO: 774 - protein, 477 aa, Homo sapiens
MTSKFLLVSFILAALSLSTTFSLQPDQQKVLLVSFDGFRWDYLYKVPTPHFHYIMKYGVHVKQVTNVFITKTYPNHYTLVTGLFAENHGIVANDMFDPIRNKSFSLDHMNIYDSKFWEEATPIWITNQRAGHTSGAAMWPGTDVKIHKRFPTHYMPYNESVSFEDRVAKIIEWFTSKEPINLGLLYWEDPDDMGHHLGPDSPLMGPVISDIDKKLGYLIQMLKKAKLWNTLNLIITSDHGMTQCSEERLIELDQYLDKDHYTLIDQSPVAAILPKEGKFDEVYEALTHAHPNLTVYKKEDVPERWHYKYNSRIQPIIAVADEGWHILQNKSDDFLLGNHGYDNALADMHPIFLAHGPAFRKNFSKEAMNSTDLYPLLCHLLNITAMPHNGSFWNVQDLLNSAMPRVVPYTQSTILLPGSVKPAEYDQEGSYPYFIGVSLGSIIVIVFFVIFIKHLIHSQIPALQDMHAEIAQPLLQA

SEQ ID NO: 775 - protein, 162 aa, Homo sapiens
MKGFTATLFLWTLIFPSCSGGGGGKAWPTHVVCSDSGLEVLYQSCDPLQDFGFSVEKCSKQLKSNINIRFGIILREDIKELFLDLALMSQGSSVLNFSYPICEAALPKFSFCGRRKGEQIYYAGPVNNPEFTIPQGEYQVLLELYTEKRSTVACANATIMCS

SEQ ID NO: 776 - protein, 514 aa, Homo sapiens
MAVWLAQWLGPLLLVSLWGLLAPASLLRRLGEHIQQFQESSAQGLGLSLGPGAAALPKVGWLEQLLDPFNVSDRRSFLQRYWVNDQHWVGQDGPIFLHLGGEGSLGPGSVMRGHPAALAPAWGALVISLEHRFYGLSIPAGGLEMAQLRFLSSRLALADVVSARLALSRLFNISSSSPWICFGGSYAGSLAAWARLKFPHLIFASVASSAPVRAVLDFSEYNDVVSRSLMSTAIGGSLECRAAVSVAFAEVERRLRSGGAAQAALRTELSACGPLGRAENQAELLGALQALVGGVVQYDGQTGAPLSVRQLCGLLLGGGGNRSHSTPYCGLRRAVQIVLHSLGQKCLSFSRAETVAQLRSTEPQLSGVGDRQWLYQTCTEFGFYVTCENPRCPFSQLPALPSQLDLCEQVFGLSALSVAQAVAQTNSYYGGQTPGANKVLFVNGDTDPWHVLSVTQALGSSESTLLIRTGSHCLDMAPERPSDSPSLRLGRQNIFQQLQTWLKLAKESQIKGEV

SEQ ID NO: 777 - protein, 746 aa, Homo sapiens
MAWIRSTCILFFTLLFAHIAAVPIKYLPEENVHDADFGEQKDISEINLAAGLDLFQGDILLQKSRNGLRDPNTRWTFPIPYILADNLGLNAKGAILYAFEMFRLKSCVDFKPYEGESSYIIFQQFDGCWSEVGDQHVGQNISIGQGCAYKAIIEHEILHALGFYHEQSRTDRDDYVNIWWDQILSGYQHNFDTYDDSLITDLNTPYDYESLMHYQPFSFNKNASVPTITAKIPEFNSIIGQRLDFSAIDLERLNRMYNCTTTHTLLDHCTFEKANICGMIQGTRDDTDWAHQDSAQAGEVDHTLLGQCTGAGYFMQFSTSSGSAEEAALLESRILYPKRKQQCLQFFYKMTGSPSDRLVVWVRRDDSTGNVRKLVKVQTFQGDDDHNWKIAHVVLKEEQKFRYLFQGTKGDPQNSTGGIYLDDITLTETPCPTGVWTVRNFSQVLENTSKGDKLQSPRFYNSEGYGFGVTLYPNSRESSGYLRLAFHVCSGENDAILEWPVENRQVIITILDQEPDVRNRMSSSMVFTTSKSHTSPAINDTVIWDRPSRVGTYHTDCNCFRSIDLGWSGFISHQMLKRRSFLKNDDLIIFVDFEDITHLSQTEVPTKGKRLSPQGLILQGQEQQVSEEGSGKAMLEEALPVSLSQGQPSRQKRSVENTGPLEDHNWPQYFRDPCDPNPCQNDGICVNVKGMASCRCISGHAFFYTGERCQAVQVHGSVLGMVIGGTAGVIFLTFSIIAILSQRPRK

SEQ ID NO: 778 - protein, 1042 aa, Homo sapiens
MADAFGDELFSVFEGDSTTAAGTKKDKEKDKGKWKGPPGSADKAGKRFDGKLQSESTNNGKNKRDVDFEGTDEPIFGKKPRIEESITEDLSLADLMPRVKVQSVETVEGCTHEVALPAEEDYLPLKPRVGKAAKEYPFILDAFQREAIQCVDNNQSVLVSAHTSAGKTVCAEYAIALALREKQRVIFTSPIKALSNQKYREMYEEFQDVGLMTGDVTINPTASCLVMTTEILRSMLYRGSEVMREVAWVIFDEIHYMRDSERGVVWEETIILLPDNVHYVFLSATIPNARQFAEWICHLHKQPCHVIYTDYRPTPLQHYIFPAGGDGLHLVVDENGDFREDNFNTAMQVLRDAGDLAKGDQKGRKGGTKGPSNVFKIVKMIMERNFQPVIIFSFSKKDCEAYALQMTKLDFNTDEEKKMVEEVFSNAIDCLSDEDKKLPQVEHVLPLLKRGIGIHHGGLLPILKETIEILFSEGLIKALFATETFAMGINMPARTVLFTNARKFDGKDFRWISSGEYIQMSGRAGRRGMDDRGIVILMVDEKMSPTIGKQLLKGSADPLNSAFHLTYNMVLNLLRVEEINPEYMLEKSFYQFQHYRAIPGVVEKVKNSEEQYNKIVIPNEESVVIYYKIRQQLAKLGKEIEEYIHKPKYCLPFLQPGRLVKVKNEGDDFGWGVVVNFSKKSNVKPNSGELDPLYVVEVLLRCSKESLKNSATEAAKPAKPDEKGEMQVVPVLVHLLSAISSVRLYIPKDLRPVDNRQSVLKSIQEVQKRFPDGIPLLDPIDDMGIQDQGLKKVIQKVEAFEHRMYSHPLHNDPNLETVYTLCEKKAQIAIDIKSAKRELKKARTVLQMDELKCRKRVLRRLGFATSSDVIEMKGRVACEISSADELLLTEMMFNGLFNDLSAEQATALLSCFVFQENSSEMPKLTEQLAGPLRQMQECAKRIAKVSAEAKLEIDEETYLSSFKPHLMDVVYTWATGATFAHICKMTDVFEGSIIRCMRRLEELLRQMCQAAKAIGNTELENKFAEGITKIKRDIVFAASLYL

SEQ ID NO: 779 - protein, 506 aa, Homo sapiens
MPLLGLLPRRAWASLLSQLLRPPCASCTGAVRCQSQVAEAVLTSQLKAHQEKPNFIIKTPKGTRDLSPQHMVVREKILDLVISCFKRHGAKGMDTPAFELKETLTEKYGEDSGLMYDLKDQGGELLSLRYDLTVPFARYLAMNKVKKMKRYHVGKVWRRESPTIVQGRYREFCQCDFDIAGQFDPMIPDAECLKIMCEILSGLQLGDFLIKVNDRRIVDGMFAVCGVPESKFRAICSSIDKLDKMAWKDVRHEMVVKKGLAPEVADRIGDYVQCHGGVSLVEQMFQDPRLSQNKQALEGLGDLKLLFEYLTLFGIADKISFDLSLARGLDYYTGVIYEAVLLQTPTQAGEEPLNVGSVAAGGRYDGLVGMFDPKGHKVPCVGLSIGVERIFYIVEQRMKTKGEKVRTTETQVFVATPQKNFLQERLKLIAELWDSGIKAEMLYKNNPKLLTQLHYCESTGIPLVVIIGEQELKEGVIKIRSVASREEVAIKRENFVAEIQKRLSES

SEQ ID NO: 780 - protein, 462 aa, Homo sapiens
MSSVKRSLKQEIVTQFHCSAAEGDIAKLTGILSHSPSLLNETSENGWTALMYAARNGHPEIVQFLLEKGCDRSIVNKSRQTALDIAVFWGYKHIANLLATAKGGKKPWFLTNEVEECENYFSKTLLDRKSEKRNNSDWLLAKESHPATVFILFSDLNPLVTLGGNKESFQQPEVRLCQLNYTDIKDYLAQPEKITLIFLGVELEIKDKLLNYAGEVPREEEDGLVAWFALGIDPIAAEEFKQRHENCYFLHPPMPALLQLKEKEAGVVAQARSVLAWHSRYKFCPTCGNATKIEEGGYKRLCLKEDCPSLNGVHNTSYPRVDPVVIMQVIHPDGTKCLLGRQKRFPPGMFTCLAGFIEPGETIEDAVRREVEEESGVKVGHVQYVACQPWPMPSSLMIGCLALAVSTEIKVDKNEIEDARWFTREQVLDVLTKGKQQAFFVPPSRAIAHQLIKHWIRINPNL

SEQ ID NO: 781 - protein, 792 aa, Homo sapiens
MDPRVAWIQPEQKGPANALWMQIWETSQGVGRGGSGFASYFCLNSPALDTAAAAGAAGRGSGGLGPALPAASPPPPGPTAPAALPPALLTALGPAAEGARRLHKSPSLSSSSSSSSSNAESGTESPGCSSSSSSSASLGRPGGGRGGAFFNFADGAPSAPGTANGHPGPRGPAPAGSPSQHQFHPGRRKRENKASTYGLNYLLSGSRAAALSGGGGPGAQAPRPGTPWKSRAYSPGIQGLHEEIIDFYNFMSPCPEEAAMRREVVKRIETVVKDLWPTADVQIFGSFSTGLYLPTSDIDLVVFGKWERPPLQLLEQALRKHNVAEPCSIKVLDKATVPIIKLTDQETEVKVDISFNMETGVRAAEFIKNYMKKYSLLPYLILVLKQFLLQRDLNEVFTGGISSYSLILMAISFLQLHPRIDARRADENLGMLLVEFFELYGRNFNYLKTGIRIKEGGAYIAKEEIMKAMTSGYRPSMLCIEDPLLPGNDVGRSSYGAMQVKQVFDYAYIVLSHAVSPLARSYPNRDAESTLGRIIKVTQEVIDYRRWIKEKWGSKAHPSPGMDSRIKIKERIATCNGEQTQNREPESPYGQRLTLSLSSPQLLSSGSSASSVSSLSGSDVDSDTPPCTTPSVYQFSLQAPAPLMAGLPTALPMPSGKPQPTTSRTLIMTTNNQTRFTIPPPTLGVAPVPCRQAGVEGTASLKAVHHMSSPAIPSASPNPLSSPHLYHKQHNGMKLSMKGSHGHTQGGGYSSVGSGGVRPPVGNRGHHQYNRTGWRRKKHTHTRDSLPVSLSR

SEQ ID NO: 782 - protein, 638 aa, Homo sapiens
MDLWQLLLTLALAGSSDAFSGSEATAAILSRAPWSLQSVNPGLKTNSSKEPKFTKCRSPERETFSCHWTDEVHHGTKNLGPIQLFYTRRNTQEWTQEWKECPDYVSAGENSCYFNSSFTSIWIPYCIKLTSNGGTVDEKCFSVDEIVQPDPPIALNWTLLNVSLTGIHADIQVRWEAPRNADIQKGWMVLEYELQYKEVNETKWKMMDPILTTSVPVYSLKVDKEYEVRVRSKQRNSGNYGEFSEVLYVTLPQMSQFTCEEDFYFPWLLIIIFGIFGLTVMLFVFLFSKQQRIKMLILPPVPVPKIKGIDPDLLKEGKLEEVNTILAIHDSYKPEFHSDDSWVEFIELDIDEPDEKTEESDTDRLLSSDHEKSHSNLGVKDGDSGRTSCCEPDILETDFNANDIHEGTSEVAQPQRLKGEADLLCLDQKNQNNSPYHDACPATQQPSVIQAEKNKPQPLPTEGAESTHQAAHIQLSNPSSLSNIDFYAQVSDITPAGSVVLSPGQKNKAGMSQCDMHPEMVSLCQENFLMDNAYFCEADAKKCIPVAPHIKVESHIQPSLNQEDIYITTESLTTAAGRPGTGEHVPGSEMPVPDYTSIHIVQSPQGLILNATALPLPDKEFLSSCGYVSTDQLNKIMP

SEQ ID NO: 783 - protein, 102 aa, Homo sapiens
MSSPPEGKLETKAGHPPAVKAGGMRIVQKHPHTGDTKEEKDKDDQEWESPSPPKPTVFISGVIARGDKDFPPAAAQVAHQKPHASMDKHPSPRTQHIQQPRK

SEQ ID NO: 784 - protein, 951 aa, Homo sapiens
MATGTGKHKLLSTGPTEPWSIREKLCLASSVMRSGDQNWVSVSRAIKPFAEPGRPPDWFSQKHCASQYSELLETTETPKRKRGEKGEVVETVEDVIVRKLTAERVEELKKVIKETQERYRRLKRDAELIQAGHMDSRLDELCNDIATKKKLEEEEAEVKRKATDAAYQARQAVKTPPRRLPTVMVRSPIDSASPGGDYPLGDLTPTTMEEATSGVTPGTLPSTPVTSFPGIPDTLPPGSAPLEAPMTPVTDDSPQKKMLGQKATPPPSPLLSELLKKGSLLPTSPRLVNESEMAVASGHLNSTGVLLEVGGVLPMIHGGEIQQTPNTVAASPAASGAPTLSRLLEAGPTQFTTPLASFTTVASEPPVKLVPPPVESVSQATIVMMPALPAPSSAPAVSTTESVAPVSQPDNCVPMEAVGDPHTVTVSMDSSEISMIINSIKEECFRSGVAEAPVGSKAPSIDGKEELDLAEKMDIAVSYTGEELDFETVGDIIAIIEDKVDDHPEVLDVAAVEAALSFCEENDDPQSLPGPWEHPIQQERDKPVPLPAPEMTVKQERLDFEETENKGIHELVDIREPSAEIKVEPAEPEPVISGAEIVAGVVPATSMEPPELRSQDLDEELGSTAAGEIVEADVAIGKGDETPLTNVKTEASPESMLSPSHGSNPIEDPLEAETQHKFEMSDSLKEESGTIFGSQIKDAPGEDEEEDGVSEAASLEEPKEEDQGEGYLSEMDNEPPVSESDDGFSIHNATLQSHTLADSIPSSPASSQFSVCSEDQEAIQAQKIWKKAIMLVWRAAANHRYANVFLQPVTDDIAPGYHSIVQRPMDLSTIKKNIENGLIRSTAEFQRDIMLMFQNAVMYNSSDHDVYHMAVEMQRDVLEQIQQFLATQLIMQTSESGISAKSLRGRDSTRKQDASEKDSVPMGSPAFLLSLFDGGTRGRRCAIEADMKMKK

SEQ ID NO: 785 - protein, 208 aa, Homo sapiens
MKLLPSVVLKLFLAAVLSALVTGESLERLRRGLAAGTSNPDPPTVSTDQLLPLGGGRDRKVRDLQEADLDLLRVTLSSKPQALATPNKEEHGKRKKKGKGLGKKRDPCLRKYKDFCIHGECKYVKELRAPSCICHPGYHGERCHGLSLPVENRLYTYDHTTILAVVAVVLSSVCLLVIVGLLMFRYHRRGGYDVENEEKVKLGMTNSH

SEQ ID NO: 786 - protein, 417 aa, Homo sapiens
MRFAWTVLLLGPLQLCALVHCAPPAAGQQQPPREPPAAPGAWRQQIQWENNGQVFSLLSLGSQYQPQRRRDPGAAVPGAANASAQQPRTPILLIRDNRTAAARTRTAGSSGVTAGRPRPTARHWFQAGYSTSRAREAGASRAENQTAPGEVPALSNLRPPSRVDGMVGDDPYNPYKYSDDNPYYNYYDTYERPRPGGRYRPGYGTGYFQYGLPDLVADPYYIQASTYVQKMSMYNLRCAAEENCLASTAYRADVRDYDHRVLLRFPQRVKNQGTSDFLPSRPRYSWEWHSCHQHYHSMDEFSHYDLLDANTQRRVAEGHKASFCLEDTSCDYGYHRRFACTAHTQGLSPGCYDTYGADIDCQWIDITDVKPGNYILKVSVNPSYLVPESDYTNNVVRCDIRYTGHHAYASGCTISPY

SEQ ID NO: 787 - protein, 264 aa, Homo sapiens
MTKFSSFSLFFLIVGAYMTHVCFNMEIIGGKEVSPHSRPFMASIQYGGHHVCGGVLIDPQWVLTAAHCQYRFTKGQSPTVVLGAHSLSKNEASKQTLEIKKFIPFSRVTSDPQSNDIMLVKLQTAAKLNKHVKMLHIRSKTSLRSGTKCKVTGWGATDPDSLRPSDTLREVTVTVLSRKLCNSQSYYNGDPFITKDMVCAGDAKGQKDSCKGDSGGPLICKGVFHAIVSGGHECGVATKPGIYTLLTKKYQTWIKSNLVPPHTN

SEQ ID NO: 788 - protein, 789 aa, Homo sapiens
MRTYHYIPLFIWTYMFHTVDTILLQEKPNSYLSSKKIAGLTKDDGKMLRRTKRGWMWNQFFLLEEYTGTDTQYVGKLHTDQDKGDGNLKYILTGDGAGSLFVIDENTGDIHAAKKLDREEKSLYILRAKAIDRKTGRQVEPESEFIIKIHDINDNEPKFTKDLYTASVPEMSGVGTSVIQVTATDADDANYGNSAKVVYSILQGQPYFSVDPESGIIKTALPDMSRENREQYQVVIQAKDMGGQMGGLSGTTTVNITLTDVNNNPPRFPQSTYQFNSPESVPLGTHLGRIKANDPDVGENAEMEYSIAEGDGADMFDVITDKDTQEGIITVKQNLDFENQMLYTLRVDASNTHPDPRFLHLGPFKDTAVVKISVEDIDEPPVFTKVSYLIEVDEDVKEGSIIGQVTAYDPDARNNLIKYSVDRHTDMDRIFGIHSENGSIFTLKALDRESSPWHNITVTATEINNPKQSSHIPVFIRILDINDHAPEFAMYYETFVCENAKPGQLIQTVSVMDKDDPPRGHKFFFEPVPEFTLNPNFTIVDNKDNTAGIMTRKDGYSRNKMSTYLLPILIFDNDYPIQSSTGTLTIRVCACDNQGNMQSCTAEALILSAGLSTGALVAILLCVLILLILVVLFAALKRQRKKEPLIISKDDVRDNIVTYNDEGGGEEDTQAFDIGTLRNPEAREDSKLRRDVMPETIFQIRRTVPLWENIDVQDFIHRRLKENDADPSAPPYDSLATYAYEGNDSIADSLSSLESLTADCNQDYDYLSDWGPRFKKLADMYGGDDSDRD

SEQ ID NO: 789 - protein, 303 aa, Homo sapiens
MRAWIFFLLCLAGRALAAPQQEALPDETEVVEETVAEVTEVSVGANPVQVEVGEFDDGAEETEEEVVAENPCQNHHCKHGKVCELDENNTPMCVCQDPTSCPAPIGEFEKVCSNDNKTFDSSCHFFATKCTLEGTKKGHKLHLDYIGPCKYIPPCLDSELTEFPLRMRDWLKNVLVTLYERDEDNNLLTEKQKLRVKKIHENEKRLEAGDHPVELLARDFEKNYNMYIFPVHWQFGQLDQHPIDGYLSHTELAPLRAPLIPMEHCTTRFFETCDLDNDKYIALDEWAGCFGIKQKDIDKDLVI

SEQ ID NO: 790 - protein, 796 aa, Homo sapiens
MEAGGERFLRQRQVLLLFVFLGGSLAGSESRRYSVAEEKEKGFLIANLAKDLGLRVEELAARGAQVVSKGNKQHFQLSHQTGDLLLNEKLDREELCGPTEPCILHFQILLQNPLQFVTNELRIIDVNDHSPVFFENEMHLKILESTLPGTVIPLGNAEDLDVGRNSLQNYTITPNSHFHVLTRSRRDGRKYPELVLDKALDPEEQPELSLTLTALDGGSPPRSGTAQINIQVLDINDNAPEFAQPLYEVAVLENTPVNSVIVTVSASDLDTGSFGTISYAFFHASEEIRKTFQLNPITGDMQLVKYLNFEAINSYEVDIEAKDGGGLSGKSTVIVQVVDVNDNPPELTLSSVNSPIPENSGETVLAVFSVSDLDSGDNGRVMCSIENNLPFFLKPSVENFYTLVSEGALDRETRSEYNITITITDLGTPRLKTKYNITVLVSDVNDNAPAFTQISYTLFVRENNSPALHIGSVSATDRDSGTNAQVTYSLLPPQDPHLPLSSLVSINADNGHLFALRSLDYEALQAFEFRVGATDRGSPALSSEALVRVLVLDANDNSPFVLYPLQNGSAPCTELVPRAAEPGYLVTKVVAVDGDSGQNAWLSYQLLKATEPGLFGVWAHNGEVRTARLLSERDAAKHRLVVLVKDNGEPPRSATATLHVLLVDGFSQPYLPLPEAAPAQAQADLLTVYLVVALASVSSLFLFSVLLFVAVRLCRRSRAASVGRCSVPEGPFPGQMVDVSGTGTLSQSYQYEVCLTGGSGTNEFKFLKPIIPNFVAQGAERVSEANPSFRKSFEFS

SEQ ID NO: 791 - protein, 795 aa, Homo sapiens
METALAKTPQKRQVMFLAILLLLWEAGSEAVRYSIPEETESGYSVANLAKDLGLGVGELATRGARMHYKGNKELLQLDIKTGNLLLYEKLDREVMCGATEPCILHFQLLLENPVQFFQTDLQLTDINDHAPEFPEKEMLLKIPESTQPGTVFPLKIAQDFDIGSNTVQNYTISPNSHFHVATHNRGDGRKYPELVLDKALDREERPELSLTLTALDGGAPPRSGTTTIRIVVLDNNDNAPEFLQSFYEVQVPENSPLNSLVVVVSARDLDAGAYGSVAYALFQGDEVTQPFVIDEKTAEIRLKRALDFEATPYYNVEIVATDGGGLSGKCTVAIEVVDVNDNAPELTMSTLSSPTPENAPETVVAVFSVSDPDSGDNGRMICSIQNDLPFLLKPTLKNFYTLVTQRTLDRESQAEYNITITVTDMGTPRLKTEHNITVLVSDVNDNAPAFTQTSYTLFVRENNSPALHIGSVSATDRDSGTNAQVTYSLLPPQNPHLRLASLVSINADNGHLFALRSLDYEALQAFEFRVGATDRGSPALSSEALVRVLVLDANDNSPFVLYPLQNGSAPCTELVPRAAEPGYLVTKVVAVDGDSGQNAWLSYQLLKATEPGLFSMWAHNGEVRTARLLSERDAAKHRLVVLVKDNGEPPRSATATLHVLLVDGFSQPYLPLPEAAPAQAQADSLTVYLVVALASVSSLFLFSVLLFVAVRLCRRSRAAPVGRCSVPEGPFPGHLVDVSGTGTLSQSYHYEVCLTGDSGAGEFKFLKPIIPNLLPQGAGEEIGKTAAFRNSFGLN

SEQ ID NO: 792 - protein, 794 aa, Homo sapiens
MMQTKVQNKKRQVAFFILLMLWGEVGSESIQYSVLEETESGTFVANLTKDLGLRVGELASRGARVVFKGNRQHLQFDPQTHDLLLNEKLDREELCGSTEPCVLPFQVLLENPLQFFQASLRVRDINDHAPEFPAREMLLKISEITMPGKIFPLKMAHDLDTGSNGLQRYTISSNPHFHVLTRNRSEGRKFPELVLDKPLDREEQPQLRLTLIALDGGSPPRSGTSEIQIQVLDINDNVPEFAQELYEAQVPENNPLGSLVITVSARDLDAGSFGKVSYALFQVDDVNQPFEINAITGEIRLRKALDFEEIQSYDVDVEATDGGGLSGKCSLVVRVLDVNDNAPELTMSFFISLIPENLPEITVAVFSVSDADSGHNQQVICSIENNLPFLLRPSVENFYTLVTEGALDRESRAEYNITITVTDLGTPRLKTQQSITVQVSDVNDNAPAFTQTSYTLFVRENNSPALHIGSVSATDRDSGINAQVTYSLLPPQDPHLPLSSLVSINADNGHLFALRSLDYEALQSFEFRVGATDRGSPALSSEALVRLLVLDANDNSPFVLYPLQNGSAPCTELVPRAAEPGYLVTKVVAVDGDSGQNAWLSYQLLKATELGLFGVWAHNGEVRTARLLSERDAAKHRLVVLVKDNGEPPRSATATLHVLLVDGFSQPYLPLPEAAPAQAQADSLTVYLVVALASVSSLFLFSVLLFVAVRLCRRSRAASVGRYSVPEGPFPGHLVDVSGTGTLSQSYQYKVCLTGGSETNEFKFLKPIMPNFPPQGTEREMEETPTSRNSFPFS

SEQ ID NO: 793 - protein, 793 aa, Homo sapiens
MEARVERAVQKRQVLFLCVFLGMSWAGAEPLRYFVAEETERGTFLTNLAKDLGLGVGELRARGTRIVSDQNMQILLLSSLTGDLLLNEKLDREELCGPREPCVLPFQLLLEKPFQIFRAELWVRDINDHAPVFLDREISLKILESTTPGAAFLLESAQDSDVGTNSLSNYTISPNAYFHINVHDSGEGNIYPELVLNQVLDREEIPEFSLTLTALDGGSPPRSGTALVRILVLDVNDNAPDFVRSLYKVQVPENSPVGSMVVSVSARDLDTGSNGEIAYAFSYATERILKTFQINPTSGSLHLKAQLDYEAIQTYTLTIQAKDGGGLSGKCTVVVDVTDINDNRPELLLSSLTSPIAENSPETVVAVFRIRDRDSGNNGKTVCSIQDDVPFILKPSVENFYTLVTEKPLDRERNTEYNITITVTDLGTPRLKTEHNITVLVSDVNDNAPAFTQTSYTLFVRENNSPALPIGSVSATDRDSGTNAQVIYSLLPSQDPHLPLASLVSINADNGHLFALRSLDYEALQAFEFRVGATDRGSPALSSEALVRVLVLDANDNSPFVLYPLQNSSAPCTEPLPRAAEPGYLVTKVVAVDGDSGQNAWLSYQLLKATEPGLFGVWAHNGEVRTARLLSERDAAKQRLVVLVKDNGEPPRSATATLHVLLVDGFSQPYLRLPEAAPDQANSLTVYLVVALASVSSLFLLSVLLFVAVRLCRRSRAAPVGRCSVPEGPFPRHLVDLSGTGTLSQSYQYEVCLTGGSGTNEFKFLKPIIPNLLPQSTGREVEENRPFQNNLGF

SEQ ID NO: 794 - protein, 787 aa, Homo sapiens
MEPAGERFPEQRQVLILLLLLEVTLAGWEPRRYSVMEETERGSFVANLANDLGLGVGELAERGARVVSEDNEQGLQLDLQTGQLILNEKLDREKLCGPTEPCIMHFQVLLKKPLEVFRAELLVTDINDHSPEFPEREMTLKIPETSSLGTVFPLKKARDLDVGSNNVQNYNISPNSHFHVSTRTRGDGRKYPELVLDTELDREEQAELRLTLTAVDGGSPPRSGTVQILILVLDANDNAPEFVQALYEVQVPENSPVGSLVVKVSARDLDTGTNGEISYSLYYSSQEIDKPFELSSLSGEIRLIKKLDFETMSSYDLDIEASDGGGLSGKCSVSVKVLDVNDNFPELSISSLTSPIPENSPETEVALFRIRDRDSGENGKMICSIQDDVPFKLKPSVENFYRLVTEGALDRETRAEYNITITITDLGTPRLKTEQSITVLVSDVNDNAPAFTQTSYTLFVRENNSPALHIGSVSATDRDSGTNAQVTYSLLPPRDPHLPLTSLVSINTDNGHLFALQSLDYEALQAFEFRVGATDRGFPALSSEALVRVLVLDANDNSPFVLYPLQNGSAPCTELVPRAAEPGYLVTKVVAVDGDSGQNAWLSYQLLKATEPGLFGVWAHNGEVRTARLLSERDVAKHRLVVLVKDNGEPPRSATATLQVLLVDGFSQPYLPLPEAAPAQAQADSLTVYLVVALASVSSLFLFSVFLFVAVRLCRRSRAASVGRCSVPEGPFPGHLVDVSGTGTLSQSYQYEVCLTGGSESNDFKFLKPIFPNIVSQDSRRKSEFLE

SEQ ID NO: 795 - protein, 877 aa, Homo sapiens
MARPRRAREPLLVALLPLAWLAQAGLARAAGSVRLAGGLTLGGLFPVHARGAAGRACGQLKKEQGVHRLEAMLYALDRVNADPELLPGVRLGARLLDTCSRDTYALEQALSFVQALIRGRGDGDEVGVRCPGGVPPLRPAPPERVVAVVGASASSVSIMVANVLRLFAIPQISYASTAPELSDSTRYDFFSRVVPPDSYQAQAMVDIVRALGWNYVSTLASEGNYGESGVEAFVQISREAGGVCIAQSIKIPREPKPGEFSKVIRRLMETPNARGIIIFANEDDIRRVLEAARQANLTGHFLWVGSDSWGAKTSPILSLEDVAVGAITILPKRASIDGFDQYFMTRSLENNRRNIWFAEFWEENFNCKLTSSGTQSDDSTRKCTGEERIGRDSTYEQEGKVQFVIDAVYAIAHALHSMHQALCPGHTGLCPAMEPTDGRMLLQYIRAVRFNGSAGTPVMFNENGDAPGRYDIFQYQATNGSASSGGYQAVGQWAETLRLDVEALQWSGDPHEVPSSLCSLPCGPGERKKMVKGVPCCWHCEACDGYRFQVDEFTCEACPGDMRPTPNHTGCRPTPVVRLSWSSPWAAPPLLLAVLGIVATTTVVATFVRYNNTPIVRASGRELSYVLLTGIFLIYAITFLMVAEPGAAVCAARRLFLGLGTTLSYSALLTKTNRIYRIFEQGKRSVTPPPFISPTSQLVITFSLTSLQVVGMIAWLGARPPHSVIDYEEQRTVDPEQARGVLKCDMSDLSLIGCLGYSLLLMVTCTVYAIKARGVPETFNEAKPIGFTMYTTCIIWLAFVPIFFGTAQSAEKIYIQTTTLTVSLSLSASVSLGMLYVPKTYVILFHPEQNVQKRKRSLKATSTVAAPPKGEDAEAHK

SEQ ID NO: 796 - protein, 298 aa, Homo sapiens
MWGACKVKVHDSLATISITLRRYLRLGATMAKSKFEYVRDFEADDTCLAHCWVVVRLDGRNFHRFAEKHNFAKPNDSRALQLMTKCAQTVMEELEDIVIAYGQSDEYSFVFKRKTNWFKRRASKFMTHVASQFASSYVFYWRDYFEDQPLLYPPGFDGRVVVYPSNQTLKDYLSWRQADCHINNLYNTVFWALIQQSGLTPVQAQGRLQGTLAADKNEILFSEFNINYNNELPMYRKGTVLIWQKVDEVMTKEIKLPTEMEGKKMAVTRTRTKPVPLHCDIIGDAFWKEHPEILDEDS

SEQ ID NO: 797 - protein, 328 aa, Homo sapiens
MCHQQLVISWFSLVFLASPLVAIWELKKDVYVVELDWYPDAPGEMVVLTCDTPEEDGITWTLDQSSEVLGSGKTLTIQVKEFGDAGQYTCHKGGEVLSHSLLLLHKKEDGIWSTDILKDQKEPKNKTFLRCEAKNYSGRFTCWWLTTISTDLTFSVKSSRGSSDPQGVTCGAATLSAERVRGDNKEYEYSVECQEDSACPAAEESLPIEVMVDAVHKLKYENYTSSFFIRDIIKPDPPKNLQLKPLKNSRQVEVSWEYPDTWSTPHSYFSLTFCVQVQGKSKREKKDRVFTDKTSATVICRKNASISVRAQDRYYSSSWSEWASVPCS

SEQ ID NO: 798 - protein, 347 aa, Homo sapiens
MALMLSLVLSLLKLGSGQWQVFGPDKPVQALVGEDAAFSCFLSPKTNAEAMEVRFFRGQFSSVVHLYRDGKDQPFMQMPQYQGRTKLVKDSIAEGRISLRLENITVLDAGLYGCRISSQSYYQKAIWELQVSALGSVPLISITGYVDRDIQLLCQSSGWFPRPTAKWKGPQGQDLSTDSRTNRDMHGLFDVEISLTVQENAGSISCSMRHAHLSREVESRVQIGDTFFEPISWHLATKVLGILCCGLFFGIVGLKIFFSKFQCKREREAWAGALFMVPAGTGSEMLPHPAASLLLVLASRGPGPKKENPGGTGLEKKARTGRIERRPETRSGGDSGSRDGSPEALRF

SEQ ID NO: 799 - protein, 292 aa, Homo sapiens
MGEKSENCGVPEDLLNGLKVTDTQEAECAGPPVPDPKNQHSQSKLLRDDEAHLQEDQGEEECFHDCSASFEEEPGADKVENKSNEDVNSSELDEEYLIELEKNMSDEEKQKRREESTRLKEEGNEQFKKGDYIEAESSYSRALEMCPSCFQKERSILFSNRAAARMKQDKKEMAINDCSKAIQLNPSYIRAILRRAELYEKTDKLDEALEDYKSILEKDPSIHQAREACMRLPKQIEERNERLKEEMLGKLKDLGNLVLRPFGLSTENFQIKQDSSTGSYSINFVQNPNNNR

SEQ ID NO: 800 - protein, 246 aa, Homo sapiens
MLWRQLIYWQLLALFFLPFCLCQDEYMESPQTGGLPPDCSKCCHGDYSFRGYQGPPGPPGPPGIPGNHGNNGNNGATGHEGAKGEKGDKGDLGPRGERGQHGPKGEKGYPGIPPELQIAFMASLATHFSNQNSGIIFSSVETNIGNFFDVMTGRFGAPVSGVYFFTFSMMKHEDVEEVYVYLMHNGNTVFSMYSYEMKGKSDTSSNHAVLKLAKGDEVWLRMGNGALHGDHQRFSTFAGFLLFETK

SEQ ID NO: 801 - protein, 1025 aa, Homo sapiens
MEPFTNDRLQLPRNMIENSMFEEEPDVVDLAKEPCLHPLEPDEVEYEPRGSRLLVRGLGEHEMEEDEEDYESSAKLLGMSFMNRSSGLRNSATGYRQSPDGACSVPSARTMVVCAFVIVVAVSVIMVIYLLPRCTFTKEGCHKKNQSIGLIQPFATNGKLFPWAQIRLPTAVVPLRYELSLHPNLTSMTFRGSVTISVQALQVTWNIILHSTGHNISRVTFMSAVSSQEKQAEILEYAYHGQIAIVAPEALLAGHNYTLKIEYSANISSSYYGFYGFSYTDESNEKKYFAATQFEPLAARSAFPCFDEPAFKATFIIKIIRDEQYTALSNMPKKSSVVLDDGLVQDEFSESVKMSTYLVAFIVGEMKNLSQDVNGTLVSIYAVPEKIGQVHYALETTVKLLEFFQNYFEIQYPLKKLDLVAIPDFEAGAMENWGLLTFREETLLYDSNTSSMADRKLVTKIIAHELAHQWFGNLVTMKWWNDLWLNEGFATFMEYFSLEKIFKELSSYEDFLDARFKTMKKDSLNSSHPISSSVQSSEQIEEMFDSLSYFKGSSLLLMLKTYLSEDVFQHAVVLYLHNHSYASIQSDDLWDSFNEVTNQTLDVKRMMKTWTLQKGFPLVTVQKKGKELFIQQERFFLNMKPEIQPSDTSYLWHIPLSYVTEGRNYSKYQSVSLLDKKSGVINLTEEVLWVKVNINMNGYYIVHYADDDWEALIHQLKINPYVLSDKDRANLINNIFELAGLGKVPLKRAFDLINYLGNENHTAPITEALFQTDLIYNLLEKLGYMDLASRLVTRVFKLLQNQIQQQTWTDEGTPSMRELRSALLEFACTHNLGNCSTTAMKLFDDWMASNGTQSLPTDVMTTVFKVGAKTDKGWSFLLGKYISIGSEAEKNKILEALASSEDVRKLYWLMKSSLNGDNFRTQKLSFIIRTVGRHFPGHLLAWDFVKENWNKLVQKFPLGSYTIQNIVAGSTYLFSTKTHLSEVQAFFENQSEATFRLRCVQEALEVIQLNIQWMEKNLKSLTWWL

SEQ ID NO: 802 - protein, 514 aa, Homo sapiens
MTLIWRHLLRPLCLVTSAPRILEMHPFLSLGTSRTSVTKLSLHTKPRMPPCDFMPERYQSLGYNRVLEIHKEHLSPVVTAYFQKPLLLHQGHMEWLFDAEGSRYLDFFSGIVTVSVGHCHPKVNAVAQKQLGRLWHTSTVFFHPPMHEYAEKLAALLPEPLKVIFLVNSGSEANELAMLMARAHSNNIDIISFRGAYHGCSPYTLGLTNVGTYKMELPGGTGCQPTMCPDVFRGPWGGSHCRDSPVQTIRKCSCAPDCCQAKDQYIEQFKDTLSTSVAKSIAGFFAEPIQGVNGVVQYPKGFLKEAFELVRARGGVCIADEVQTGFGRLGSHFWGFQTHDVLPDIVTMAKGIGNGFPMAAVITTPEIAKSLAKCLQHFNTFGGNPMACAIGSAVLEVIKEENLQENSQEVGTYMLLKFAKLRDEFEIVGDVRGKGLMIGIEMVQDKISCRPLPREEVNQIHEDCKHMGLLVGRGSIFSQTFRIAPSMCITKPEVDFAVEVFRSALTQHMERRAK

SEQ ID NO: 803 - protein, 376 aa, Homo sapiens
MKENVASATVFTLLLFLNTCLLNGQLPPGKPEIFKCRSPNKETFTCWWRPGTDGGLPTNYSLTYHREGETLMHECPDYITGGPNSCHFGKQYTSMWRTYIMMVNATNQMGSSFSDELYVDVTYIVQPDPPLELAVEVKQPEDRKPYLWIKWSPPTLIDLKTGWFTLLYEIRLKPEKAAEWEIHFAGQQTEFKILSLHPGQKYLVQVRCKPDHGYWSAWSPATFIQIPSDFTMNDTTVWISVAVLSAVICLIIVWAVALKGYSMVTCIFPPVPGPKIKGFDAHLLEKGKSEELLSALGCQDFPPTSDYEDLLVEYLEVDDSEDQHLMSVHSKEHPSQGDPLMLGASHYKNLKSYRPRKISSQGRLAVFTKATLTTVQ

SEQ ID NO: 804 - protein, 153 aa, Homo sapiens [sequence omitted]

SEQ ID NO: 805 - protein, 134 aa, Homo sapiens
MRMLLHLSLLALGAAYVYAIPTEIPTSALVKETLALLSTHRTLLIANETLRIPVPVHKNHQLCTEEIFQGIGTLESQTVQGGTVERLFKNLSLIKKYIDGQKKKCGEERRRVNQFLDYLQEFLGVMNTEWIIES

SEQ ID NO: 806 - protein, 359 aa, Homo sapiens
MRSIRKRWTICTISLLLIFYKTKEIARTEEHQETQLIGDGELSLSRSLVNSSDKIIRKAGSSIFQHNVEGWKINSSLVLEIRKNILRFLDAERDVSVVKSSFKPGDVIHYVLDRRRTLNISHDLHSLLPEVSPMKNRRFKTCAVVGNSGILLDSECGKEIDSHNFVIRCNLAPVVEFAADVGTKSDFITMNPSVVQRAFGGFRNESDREKFVHRLSMLNDSVLWIPAFMVKGGEKHVEWVNALILKNKLKVRTAYPSLRLIHAVRGYWLTNKVPIKRPSTGLLMYTLATRFCDEIHLYGFWPFPKDLNGKAVKYHYYDDLKYRYFSNASPHRMPLEFKTLNVLHNRGALKLTTGKCVKQ

SEQ ID NO: 807 - protein, 1184 aa, Homo sapiens
MMQLLQLLLGLLGPGGYLFLLGDCQEVTTLTVKYQVSEEVPSGTVIGKLSQELGREERRRQAGAAFQVLQLPQALPIQVDSEEGLLSTGRRLDREQLCRQWDPCLVSFDVLATGDLALIHVEIQVLDINDHQPRFPKGEQELEISESASLRTRIPLDRALDPDTGPNTLHTYTLSPSEHFALDVIVGPDETKHAELIVVKELDREIHSFFDLVLTAYDNGNPPKSGTSLVKVNVLDSNDNSPAFAESSLALEIQEDAAPGTLLIKLTATDPDQGPNGEVEFFLSKHMPPEVLDTFSIDAKTGQVILRRPLDYEKNPAYEVDVQARDLGPNPIPAHCKVLIKVLDVNDNIPSIHVTWASQPSLVSEALPKDSFIALVMADDLDSGHNGLVHCWLSQELGHFRLKRTNGNTYMLLTNATLDREQWPKYTLTLLAQDQGLQPLSAKKQLSIQISDINDNAPVFEKSRYEVSTRENNLPSLHLITIKAHDADLGINGKVSYRIQDSPVAHLVAIDSNTGEVTAQRSLNYEEMAGFEFQVIAEDSGQPMLASSVSVWVSLLDANDNAPEVVQPVLSDGKASLSVLVNASTGHLLVPIETPNGLGPAGTDTPPLATHSSRPFLLTTIVARDADSGANGEPLYSIRSGNEAHLFILNPHTGQLFVNVTNASSLIGSEWELEIVVEDQGSPPLQTRALLRVMFVTSVDHLRDSARKPGALSMSMLTVICLAVLLGIFGLILALFMSICRTEKKDNRAYNCREAESTYRQQPKRPQKHIQKADIHLVPVLRGQAGEPCEVGQSHKDVDKEAMMEAGWDPCLQAPFHLTPTLYRTLRNQGNQGAPAESREVLQDTVNLLFNHPRQRNASRENLNLPEPQPATGQPRSRPLKVAGSPTGRLAGDQGSEEAPQRPPASSATLRRQRHLNGKVSPEKESGPRQILRSLVRLSVAAFAERNPVEELTVDSPPVQQISQLLSLLHQGQFQPKPNHRGNKYLAKPGGSRSAIPDTDGPSARAGGQTDPEQEEGPLDPEEDLSVKQLLEEELSSLLDPSTGLALDRLSAPDPAWMARLSLPLTTNYRDNVISPDAAATEEPRTFQTFGKAEAPELSPTGTRLASTFVSEMSSLLEMLLEQRSSMPVEAASEALRRLSVCGRTLSLDLATSAASGMKVQGDPGGKTGTEGKSRGSSSSSRCL

SEQ ID NO: 808 - protein, 163 aa, Homo sapiens
MPSIKLQSSDGEIFEVDVEIAKQSVTIKTMLEDLGMDDEGDDDPVPLPNVNAAILKKVIQWCTHHKDDPPPPEDDENKEKRTDDIPVWDQEFLKVDQGTLFELILAANYLDIKGLLDVTCKTVANMIKGKTPEEIRKTFNIKNDFTEEEEAQVRKENQWCEEK

SEQ ID NO: 809 - protein, 1391 aa, Homo sapiens
MPSSLLGAAMPASTSAAALQEALENAGRLIDRQLQEDRMYPDLSELLMVSAPNNPTVSGMSDMDYPLQGPGLLSVPNLPEISSIRRVPLPPELVEQFGHMQCNCMMGVFPPISRAWLTIDSDIFMWNYEDGGDLAYFDGLSETILAVGLVKPKAGIFQPHVRHLLVLATPVDIVILGLSYANLQTGSGVLNDSLSGGMQLLPDPLYSLPTDNTYLLTITSTDNGRIFLAGKDGCLYEVAYQAEAGWFSQRCRKINHSKSSLSFLVPSLLQFTFSEDDPILQIAIDNSRNILYTRSEKGVIQVYDLGQDGQGMSRVASVSQNAIVSAAGNIARTIDRSVFKPIVQIAVIENSESLDCQLLAVTHAGVRLYFSTCPFRQPLARPNTLTLVHVRLPPGFSASSTVEKPSKVHRALYSKGILLMAASENEDNDILWCVNHDTFPFQKPMMETQMTAGVDGHSWALSAIDELKVDKIITPLNKDHIPITDSPVVVQQHMLPPKKFVLLSAQGSLMFHKLRPVDQLRHLLVSNVGGDGEEIERFFKLHQEDQACATCLILACSTAACDREVSAWATRAFFRYGGEAQMRFPTTLPPPSNVGPILGSPVYSSSPVPSGSPYPNPSFLGTPSHGIQPPAMSTPVCALGNPATQATNMSCVTGPEIVYSGKHNGICIYFSRIMGNIWDASLVVERIFKSGNREITAIESSVPCQLLESVLQELKGLQEFLDRNSQFAGGPLGNPNTTAKVQQRLIGFMRPENGNPQQMQQELQRKFHEAQLSEKISLQAIQQLVRKSYQALALWKLLCEHQFTIIVAELQKELQEQLKITTFKDLVIRDKELTGALIASLINCYIRDNAAVDGISLHLQDICPLLYSTDDAICSKANELLQRSRQVQNKTEKERMLRESLKEYQKISNQVDLSNVCAQYRQVRFYEGVVELSLTAAEKKDPQGLGLHFYKHGEPEEDIVGLQAFQERLNSYKCITDTLQELVNQSKAAPQSPSVPKKPGPPVLSSDPNMLSNEEAGHHFEQMLKLSQRSKDELFSIALYNWLIQVDLADKLLQVASPFLEPHLVRMAKVDQNRVRYMDLLWRYYEKNRSFSNAARVLSRLADMHSTEISLQQRLEYIARAILSAKSSTAISSIAADGEFLHELEEKMEVARIQLQIQETLQRQYSHHSSVQDAVSQLDSELMDITKLYGEFADPFKLAECKLAIIHCAGYSDPILVQTLWQDIIEKELSDSVTLSSSDRMHALSLKIVLLGKIYAGTPRFFPLDFIVQFLEQQVCTLNWDVGFVIQTMNEIGVPLPRLLEVYDQLFKSRDPFWNRMKKPLHLLDCIHVLLIRYVENPSQVLNCERRRFTNLCLDAVCGYLVELQSMSSSVAVQAITGNFKSLQAKLERLH

SEQ ID NO: 810 - protein, 778 aa, Homo sapiens
MDSKESLTPGREENPSSVLAQERGDVMDFYKTLRGGATVKVSASSPSLAVASQSDSKQRRLLVDFPKGSVSNAQQPDLSKAVSLSMGLYMGETETKVMGNDLGFPQQGQISLSSGETDLKLLEESIANLNRSTSVPENPKSSASTAVSAAPTEKEFPKTHSDVSSEQQHLKGQTGTNGGNVKLYTTDQSTFDILQDLEFSSGSPGKETNESPWRSDLLIDENCLLSPLAGEDDSFLLEGNSNEDCKPLILPDTKPKIKDNGDLVLSSPSNVTLPQVKTEKEDFIELCTPGVIKQEKLGTVYCQASFPGANIIGNKMSAISVHGVSTSGGQMYHYDMNTASLSQQQDQKPIFNVIPPIPVGSENWNRCQGSGDDNLTSLGTLNFPGRTVFSNGYSSPSMRPDVSSPPSSSSTATTGPPPKLCLVCSDEASGCHYGVLTCGSCKVFFKRAVEGRQHNYLCAGRNDCIIDKIRRKNCPACRYRKCLQAGMNLEARKTKKKIKGIQQATTGVSQETSENPGNKTIVPATLPQLTPTLVSLLEVIEPEVLYAGYDSSVPDSTWRIMTTLNMLGGRQVIAAVKWAKAIPGFRNLHLDDQMTLLQYSWMFLMAFALGWRSYRQSSANLLCFAPDLIINEQRMTLPCMYDQCKHMLYVSSELHRLQVSYEEYLCMKTLLLLSSVPKDGLKSQELFDEIRMTYIKELGKAIVKREGNSSQNWQRFYQLTKLLDSMHEVVENLLNYCFQTFLDKTMSIEFPEMLAEIITNQIPKYSNGNIKKLLFHQK

SEQ ID NO: 811 - protein, 265 aa, Homo sapiens
MAAAVPKRMRGPAQAKLLPGSAIQALVGLARPLVLALLLVSAALSSVVSRTDSPSPTVLNSHISTPNVNALTHENQTKPSISQISTTLPPTTSTKKSGGASVVPHPSPTPLSQEEADNNEDPSIEEEDLLMLNSSPSTAKDTLDNGDYGEPDYDWTTGPRDDDESDDTLEENRGYMEIEQSVKSFKMPSSNIEEEDSHFFFHLIIFAFCIAVVYITYHNKRKIFLLVQSRKWRDGLCSKTVEYHRLDQNVNEAMPSLKITNDYIF

SEQ ID NO: 812 - protein, 574 aa, Homo sapiens
MATLVVNKLGAGVDSGRQGSRGTAVVKVLECGVCEDVFSLQGDKVPRLLLCGHTVCHDCLTRLPLHGRAIRCPFDRQVTDLGDSGVWGLKKNFALLELLERLQNGPIGQYGAAEESIGISGESIIRCDEDEAHLASVYCTVCATHLCSECSQVTHSTKTLAKHRRVPLADKPHEKTMCSQHQVHAIEFVCLEEGCQTSPLMCCVCKEYGKHQGHKHSVLEPEANQIRASILDMAHCIRTFTEEISDYSRKLVGIVQHIEGGEQIVEDGIGMAHTEHVPGTAENARSCIRAYFYDLHETLCRQEEMALSVVDAHVREKLIWLRQQQEDMTILLSEVSAACLHCEKTLQQDDCRVVLAKQEITRLLETLQKQQQQFTEVADHIQLDASIPVTFTKDNRVHIGPKMEIRVVTLGLDGAGKTTILFKLKQDEFMQPIPTIGFNVETVEYKNLKFTIWDVGGKHKLRPLWKHYYLNTQAVVFVVDSSHRDRISEAHSELAKLLTEKELRDALLLIFANKQDVAGALSVEEITELLSLHKLCCGRSWYIQGCDARSGMGLYEGLDWLSRQLVAAGVLDVA

SEQ ID NO: 813 - protein, 411 aa, Homo sapiens
MEVNPPKQEHLLALKVMRLTKPTLFTNIPVTCEEKDLPGDLFNQLMRDDPSTVNGAEVLMLGEMLTLPQNFGNIFLGETFSSYISVHNDSNQVVKDILVKADLQTSSQRLNLSASNAAVAELKPDCCIDDVIHHEVKEIGTHILVCAVSYTTQAGEKMYFRKFFKFQVLKPLDVKTKFYNAETDEVFLEAQIQNMTTSPMFMEKVSLEPSIMYNVTELNSVSQAGECVSTFGSRAYLQPMDTRQYLYCLKPKNEFAEKAGIIKGVTVIGKLDIVWKTNLGERGRLQTSQLQRMAPGYGDVRLSLEAIPDTVNLEEPFHITCKITNCSERTMDLVLEMCNTNSIHWCGISGRQLGKLHPSSSLCLALTLLSSVQGLQSISGLRLTDTFLKRTYEYDDIAQVCVVSSAIKVES

SEQ ID NO: 814 - protein, 660 aa, Homo sapiens
MDVLVSECSARLLQQEEEIKSLTAEIDRLKNCGCLGASPNLEQLQEENLKLKYRLNILRKSLQAERNKPTKNMINIISRLQEVFGHAIKAAYPDLENPPLLVTPSQQAKFGDYQCNSAMGISQMLKTKEQKVNPREIAENITKHLPDNECIEKVEIAGPGFINVHLRKDFVSEQLTSLLVNGVQLPALGENKKVIVDFSSPNIAKEMHVGHLRSTIIGESISRLFEFAGYDVLRLNHVGDWGTQFGMLIAHLQDKFPDYLTVSPPIGDLQVFYKESKKRFDTEEEFKKRAYQCVVLLQGKNPDITKAWKLICDVSRQELNKIYDALDVSLIERGESFYQDRMNDIVKEFEDRGFVQVDDGRKIVFVPGCSIPLTIVKSDGGYTYDTSDLAAIKQRLFEEKADMIIYVVDNGQSVHFQTIFAAAQMIGWYDPKVTRVFHAGFGVVLGEDKKKFKTRSGETVRLMDLLGEGLKRSMDKLKEKERDKVLTAEELNAAQTSVAYGCIKYADLSHNRLNDYIFSFDKMLDDRGNTAAYLLYAFTRIRSIARLANIDEEMLQKAARETKILLDHEKEWKLGRCILRFPEILQKILDDLFLHTLCDYIYELATAFTEFYDSCYCVEKDRQTGKILKVNMWRMLLCEAVAAVMAKGFDILGIKPVQRM

SEQ ID NO: 815 - protein, 782 aa, Homo sapiens
MAPSAWAICWLLGGLLLHGGSSGPSPGPSVPRLRLSYRDLLSANRSAIFLGPQGSLNLQAMYLDEYRDRLFLGGLDALYSLRLDQAWPDPREVLWPPQPGQREECVRKGRDPLTECANFVRVLQPHNRTHLLACGTGAFQPTCALITVGHRGEHVLHLEPGSVESGRGRCPHEPSRPFASTFIDGELYTGLTADFLGREAMIFRSGGPRPALRSDSDQSLLHDPRFVMAARIPENSDQDNDKVYFFFSETVPSPDGGSNHVTVSRVGRVCVNDAGGQRVLVNKWSTFLKARLVCSVPGPGGAETHFDQLEDVFLLWPKAGKSLEVYALFSTVSAVFQGFAVCVYHMADIWEVFNGPFAHRDGPQHQWGPYGGKVPFPRPGVCPSKMTAQPGRPFGSTKDYPDEVLQFARAHPLMFWPVRPRHGRPVLVKTHLAQQLHQIVVDRVEAEDGTYDVIFLGTDSGSVLKVIALQAGGSAEPEEVVLEELQVFKVPTPITEMEISVKRQMLYVGSRLGVAQLRLHQCETYGTACAECCLARDPYCAWDGASCTHYRPSLGKRRFRRQDIRHGNPALQCLGQSQEEEAVGLVAATMVYGTEHNSTFLECLPKSPQAAVRWLLQRPGDEGPDQVKTDERVLHTERGLLFRRLSRFDAGTYTCTTLEHGFSQTVVRLALVVIVASQLDNLFPPEPKPEEPPARGGLASTPPKAWYKDILQLIGFANLPRVDEYCERVWCRGTTECSGCFRSRSRGKQARGKSWAGLELGKKMKSRVHAEHNRTPREVEAT

SEQ ID NO: 816 - protein, 710 aa, Homo sapiens
MKLVFLVLLFLGALGLCLAGRRRSVQWCAVSQPEATKCFQWQRNMRKVRGPPVSCIKRDSPIQCIQAIAENRADAVTLDGGFIYEAGLAPYKLRPVAAEVYGTERQPRTHYYAVAVVKKGGSFQLNELQGLKSCHTGLRRTAGWNVPIGTLRPFLNWTGPPEPIEAAVARFFSASCVPGADKGQFPNLCRLCAGTGENKCAFSSQEPYFSYSGAFKCLRDGAGDVAFIRESTVFEDLSDEAERDEYELLCPDNTRKPVDKFKDCHLARVPSHAVVARSVNGKEDAIWNLLRQAQEKFGKDKSPKFQLFGSPSGQKDLLFKDSAIGFSRVPPRIDSGLYLGSGYFTAIQNLRKSEEEVAARRARVVWCAVGEQELRKCNQWSGLSEGSVTCSSASTTEDCIALVLKGEADAMSLDGGYVYTAGKCGLVPVLAENYKSQQSSDPDPNCVDRPVEGYLAVAVVRRSDTSLTWNSVKGKKSCHTAVDRTAGWNIPMGLLFNQTGSCKFDEYFSQSCAPGSDPRSNLCALCIGDEQGENKCVPNSNERYYGYTGAFRCLAENAGDVAFVKDVTVLQNTDGNNNEAWAKDLKLADFALLCLDGKRKPVTEARSCHLAMAPNHAVVSRMDKVERLKQVLLHQQAKFGRNGSDCPDKFCLFQSETKNLLFNDNTECLARLHGKTTYEKYLGPQYVAGITNLKKCSTSPLLEACEFLRK

SEQ ID NO: 817 - protein, 756 aa, Homo sapiens
MSFVAGVIRRLDETVVNRIAAGEVIQRPANAIKEMIENCLDAKSTSIQVIVKEGGLKLIQIQDNGTGIRKEDLDIVCERFTTSKLQSFEDLASISTYGFRGEALASISHVAHVTITTKTADGKCAYRASYSDGKLKAPPKPCAGNQGTQITVEDLFYNIATRRKALKNPSEEYGKILEVVGRYSVHNAGISFSVKKQGETVADVRTLPNASTVDNIRSIFGNAVSRELIEIGCEDKTLAFKMNGYISNANYSVKKCIFLLFINHRLVESTSLRKAIETVYAAYLPKNTHPFLYLSLEISPQNVDVNVHPTKHEVHFLHEESILERVQQHIESKLLGSNSSRMYFTQTLLPGLAGPSGEMVKSTTSLTSSSTSGSSDKVYAHQMVRTDSREQKLDAFLQPLSKPLSSQPQAIVTEDKTDISSGRARQQDEEMLELPAPAEVAAKNQSLEGDTTKGTSEMSEKRGPTSSNPRKRHREDSDVEMVEDDSRKEMTAACTPRRRIINLTSVLSLQEEINEQGHEVLREMLHNHSFVGCVNPQWALAQHQTKLYLLNTTKLSEELFYQILIYDFANFGVLRLSEPAPLFDLAMLALDSPESGWTEEDGPKEGLAEYIVEFLKKKAEMLADYFSLEIDEEGNLIGLPLLIDNYVPPLEGLPIFILRLATEVNWDEEKECFESLSKECAMFYSIRKQYISEESTLSGQQSEVPGSIPNSWKWTVEHIVYKALRSHILPPKHFTEDGNILQLANLPDLYKVFERC

SEQ ID NO: 818 - protein, 694 aa, Homo sapiens
MGAPACALALCVAVAIVAGASSESLGTEQRVVGRAAEVPGPEPGQQEQLVFGSGDAVELSCPPPGGGPMGPTVWVKDGTGLVPSERVLVGPQRLQVLNASHEDSGAYSCRQRLTQRVLCHFSVRVTDAPSSGDDEDGEDEAEDTGVDTGAPYWTRPERMDKKLLAVPAANTVRFRCPAAGNPTPSISWLKNGREFRGEHRIGGIKLRHQQWSLVMESVVPSDRGNYTCVVENKFGSIRQTYTLDVLERSPHRPILQAGLPANQTAVLGSDVEFHCKVYSDAQPHIQWLKHVEVNGSKVGPDGTPYVTVLKVSLESNASMSSNTPLVRIARLSSGEGPTLANVSELELPADPKWELSRARLTLGKPLGEGCFGQVVMAEAIGIDKDRAAKPVTVAVKMLKDDATDKDLSDLVSEMEMMKMIGKHKNIINLLGACTQGGPLYVLVEYAAKGNLREFLRARRPPGLDYSFDTCKPPEEQLTFKDLVSCAYQVARGMEYLASQKCIHRDLAARNVLVTEDNVMKIADFGLARDVHNLDYYKKTTNGRLPVKWMAPEALFDRVYTHQSDVWSFGVLLWEIFTLGGSPYPGIPVEELFKLLKEGHRMDKPANCTHDLYMIMRECWHAAPSQRPTFKQLVEDLDRVLTVTSTDEYLDLSAPFEQYSPGGQDTPSSSSSGDDSVFAHDLLPPAPPSSGGSRT

SEQ ID NO: 819 - protein, 723 aa, Homo sapiens
MAEYTRLHNALALIRLRNPPVNAISTTLLRDIKEGLQKAVIDHTIKAIVICGAEGKFSAGADIRGFSAPRTFGLTLGHVVDEIQRNEKPVVAAIQGMAFGGGLELALGCHYRIAHAEAQVGLPEVTLGLLPGARGTQLLPRLTGVPAALDLITSGRRILADEALKLGILDKVVNSDPVEEAIRFAQRVSDQPLESRRLCNKPIQSLPNMDSIFSEALLKMRRQHPGCLAQEACVRAVQAAVQYPYEVGIKKEEELFLYLLQSGQARALQYAFFAERKANKWSTPSGASWKTASARPVSSVGVVGLGTMGRGIVISFARARIPVIAVDSDKNQLATANKMITSVLEKEASKMQQSGHPWSGPKPRLTSSVKELGGVDLVIEAVFEEMSLKKQVFAELSAVCKPEAFLCTNTSALDVDEIASSTDRPHLVIGTHFFSPAHVMKLLEVIPSQYSSPTTIATVMNLSKKIKKIGVVVGNCFGFVGNRMLNPYYNQAYFLLEEGSKPEEVDQVLEEFGFKMGPFRVSDLAGLDVGWKSRKGQGLTGPTLLPGTPARKRGNRRYCPIPDVLCELGRFGQKTGKGWYQYDKPLGRIHKPDPWLSKFLSRYRKTHHIEPRTISQDEILERCLYSLINEAFRILGEGIAASPEHIDVVYLHGYGWPRHKGGPMFYASTVGLPTVLEKLQKYYRQNPDIPQLEPSDYLKKLASQGNPPLKEWQSLAGSPSSKL

SEQ ID NO: 820 - protein, 442 aa, Homo sapiens [sequence omitted]

SEQ ID NO: 821 - protein, 525 aa, Homo sapiens
MKALIAALLLITLQYSCAVSPTDCSAVEPEAEKALDLINKRRRDGYLFQLLRIADAHLDRVENTTVYYLVLDVQESDCSVLSRKYWNDCEPPDSRRPSEIVIGQCKVIATRHSHESQDLRVIDFNCTTSSVSSALANTKDSPVLIDFFEDTERYRKQANKALEKYKEENDDFASFRVDRIERVARVRGGEGTGYFVDFSVRNCPRHHFPRHPNVFGFCRADLFYDVEALDLESPKNLVINCEVFDPQEHENINGVPPHLGHPFHWGGHERSSTTKPPFKPHGSRDHHHPHKPHEHGPPPPPDERDHSHGPPLPQGPPPLLPMSCSSCQHATFGTNGAQRHSHNNNSSDLHPHKHHSHEQHPHGHHPHAHHPHEHDTHRQHPHGHHPHGHHPHGHHPHGHHPHGHHPHCHDFQDYGPCDPPPHNQGHCCHGHGPPPGHLRRRGPGKGPRPFHCRQIGSVYRLPPLRKGEVLPLPEANFPSFPLPHHKHPLKPDNQPFPQSVSESCPGKFKSGFPQVSMFFTHTFPK

SEQ ID NO: 822 - protein, 706 aa, Homo sapiens
MASPADSCIQFTRHASDVLLNLNRLRSRDILTDVVIVVSREQFRAHKTVLMACSGLFYSIFTDQLKCNLSVINLDPEINPEGFCILLDFMYTSRLNLREGNIMAVMATAMYLQMEHVVDTCRKFIKASEAEMVSAIKPPREEFLNSRMLMPQDIMAYRGREVVENNLPLRSAPGCESRAFAPSLYSGLSTPPASYSMYSHLPVSSLLFSDEEFRDVRMPVANPFPKERALPCDSARPVPGEYSRPTLEVSPNVCHSNIYSPKETIPEEARSDMHYSVAEGLKPAAPSARNAPYFPCDKASKEEERPSSEDEIALHFEPPNAPLNRKGLVSPQSPQKSDCQPNSPTESCSSKNACILQASGSPPAKSPTDPKACNWKKYKFIVLNSLNQNAKPEGPEQAELGRLSPRAYTAPPACQPPMEPENLDLQSPTKLSASGEDSTIPQASRLNNIVNRSMTGSPRSSSESHSPLYMHPPKCTSCGSQSPQHAEMCLHTAGPTFPEEMGETQSEYSDSSCENGAFFCNECDCRFSEEASLKRHTLQTHSDKPYKCDRCQASFRYKGNLASHKTVHTGEKPYRCNICGAQFNRPANLKTHTRIHSGEKPYKCETCGARFVQVAHLRAHVLIHTGEKPYPCEICGTRFRHLQTLKSHLRIHTGEKPYHCEKCNLHFRHKSQLRLHLRQKHGAITNTKVQYRVSATDLPPELPKAC

SEQ ID NO: 823 - protein, 280 aa, Homo sapiens
MPADIMEKNSSSPVAATPASVNTTPDKPKTASEHRKSSKPIMEKRRRARINESLSQLKTLILDALKKDSSRHSKLEKADILEMTVKHLRNLQRAQMTAALSTDPSVLGKYRAGFSECMNEVTRFLSTCEGVNTEVRTRLLGHLANCMTQINAMTYPGQPHPALQAPPPPPPGPGGPQHAPFAPPPPLVPIPGGAAPPPGGAPCKLGSQAGEAAKVFGGFQVVPAPDGQFAFLIPNGAFAHSGPVIPVYTSNSGTSVGPNAVSPSSGPSLTADSMWRPWRN

SEQ ID NO: 824 - protein, 883 aa, Homo sapiens
MAENSVLTSTTGRTSLADSSIFDSKVTEISKENLLIGSTSYVEEEMPQIETRVILVQEAGKQEELIKALKDIKVGFVKMESVEEFEGLDSPEFENVFVVTDFQDSVFNDLYKADCRVIGPPVVLNCSQKGEPLPFSCRPLYCTSMMNLVLCFTGFRKKEELVRLVTLVHHMGGVIRKDFNSKVTHLVANCTQGEKFRVAVSLGTPIMKPEWIYKAWERRNEQDFYAAVDDFRNEFKVPPFQDCILSFLGFSDEEKTNMEEMTEMQGGKYLPLGDERCTHLVVEENIVKDLPFEPSKKLYVVKQEWFWGSIQMDARAGETMYLYEKANTPELKKSVSMLSLNTPNSNRKRRRLKETLAQLSRETDVSPFPPRKRPSAEHSLSIGSLLDISNTPESSINYGDTPKSCTKSSKSSTPVPSKQSARWQVAKELYQTESNYVNILATIIQLFQVPLEEEGQRGGPILAPEEIKTIFGSIPDIFDVHTKIKDDLEDLIVNWDESKSIGDIFLKYSKDLVKTYPPFVNFFEMSKETIIKCEKQKPRFHAFLKINQAKPECGRQSLVELLIRPVQRLPSVALLLNDLKKHTADENPDKSTLEKAIGSLKEVMTHINEDKRKTEAQKQIFDVVYEVDGCPANLLSSHRSLVQRVETISLGEHPCDRGEQVTLFLFNDCLEIARKRHKVIGTFRSPHGQTRPPASLKHIHLMPLSQIKKVLDIRETEDCHNAFALLVRPPTEQANVLLSFQMTSDELPKENWLKMLCRHVANTICKADAENLIYTADPESFEVNTKDMDSTLSRASRAIKKTSKKVTRAFSFSKTPKRALRRALMTSHGSVEGRSPSSNDKHVMSRLSSTSSLAGIPSPSLVSLPSFFERRSHTLSRSTTHLI

SEQ ID NO: 825 - protein, 380 aa, Homo sapiens
MGSGCRIECIFFSEFHPTLGPKITYQVPEDFISRELFDTVQVYIITKPELQNKLITVTAMEKKLIGCPVCIEHKKYSRNALLFNLGFVCDAQAKTCALEPIVKKLAGYLTTLELESSFVSMEESKQKLVPIMTILLEELNASGRCTLPIDESNTIHLKVIEQRPDPPVAQEYDVPVFTKDKEDFFNSQWDLTTQQILPYIDGFRHIQKISAEADVELNLVRIAIQNLLYYGVVTLVSILQYSNVYCPTPKVQDLVDDKSLQEACLSYVTKQGHKRASLRDVFQLYCSLSPGTTVRDLIGRHPQQLQHVDERKLIQFGLMKNLIRRLQKYPVRVTREEQSHPARLYTGCHSYDEICCKTGMSYHELDERLENDPNIIICWK

SEQ ID NO: 826 - protein, 222 aa, Homo sapiens
MALSAETESHIYRALRTASGAAAHLVALGFTIFVAVLARPGSSLFSWHPVLMSLAFSFLMTEALLVFSPESSLLHSLSRKGRARCHWVLQLLALLCALLGLGLVILHKEQLGKAHLVTRHGQAGLLAVLWAGLQCSGGVGLLYPKLLPRWPLAKLKLYHATSGLVGYLLGSASLLLGMCSLWFTASVTGAAWYLAVLCPVLTSLVIMNQVSNAYLYRKRIQP

SEQ ID NO: 827 - protein, 128 aa, Homo sapiens
MTSLFAQEIRLSKRHEEIVSQRLMLLQQMENKLGDQHTEKASQLQTVETAFKRNLSLLKDIEAAEKSLQTRIHPLPRPEVVSLETRYWASVEEYIPKWEQFLLGRAPYPFAVENQNEAENTIQNEAQR

SEQ ID NO: 828 - protein, 340 aa, Homo sapiens
MSELEQLRQEAEQLRNQIQDARKACNDATLVQITSNMDSVGRIQMRTRRTLRGHLAKIYAMHWGYDSRLLVSASQDGKLIIWDSYTTNKMHAIPLRSSWVMTCAYAPSGNYVACGGLDNICSIYNLKTREGNVRVSRELPGHTGYLSCCRFLDDSQIVTSSGDTTCALWDIETAQQTTTFTGHSGDVMSLSLSPDMRTFVSGACDASSKLWDIRDGMCRQSFTGHVSDINAVSFFPNGYAFATGSDDATCRLFDLRADQELLLYSHDNIICGITSVAFSKSGRLLLAGYDDFNCNVWDTLKGDRAGVLAGHDNRVSCLGVTDDGMAVATGSWDSFLRIWN

SEQ ID NO: 829 - protein, 480 aa, Homo sapiens
MAVARAALGPLVTGLYDVQAFKFGDFVLKSGLSSPIYIDLRGIVSRPRLLSQVADILFQTAQNAGISFDTVCGVPYTALPLATVICSTNQIPMLIRRKETKDYGTKRLVEGTINPGETCLIIEDVVTSGSSVLETVEVLQKEGLKVTDAIVLLDREQGGKDKLQAHGIRLHSVCTLSKMLEILEQQKKVDAETVGRVKRFIQENVFVAANHNGSPLSIKEAPKELSFGARAELPRIHPVASKLLRLMQKKETNLCLSADVSLARELLQLADALGPSICMLKTHVDILNDFTLDVMKELITLAKCHEFLIFEDRKFADIGNTVKKQYEGGIFKIASWADLVNAHVVPGSGVVKGLQEVGLPLHRGCLLIAEMSSTGSLATGDYTRAAVRMAEEHSEFVVGFISGSRVSMKPEFLHLTPGVQLEAGGDNLGQQYNSPQEVIGKRGSDIIIVGRGIISAADRLEAAEMYRKAAWEAYLSRLGV

SEQ ID NO: 830 - protein, 478 aa, Homo sapiens
MDTSDLFASCRKGDVGRVRYLLEQRDVEVNVRDKWDSTPLYYACLCGHEELVLYLLANGARCEANTFDGERCLYGALSDPIRRALRDYKQVTASCRRRDYYDDFLQRLLEQGIHSDVVFVVHGKPFRVHRCVLGARSAYFANMLDTKWKGKSVVVLRHPLINPVAFGALLQYLYTGRLDIGVEHVSDCERLAKQCQLWDLLSDLEAKCEKVSEFVASKPGTCVKVLTIEPPPADPRLREDMALLADCALPPELRGDLWELPFPCPDGFNSCPDICFRVAGCSFLCHKAFFCGRSDYFRALLDDHFRESEEPATSGGPPAVTLHGISPDVFTHVLYYMYSDHTELSPEAAYDVLSVADMYLLPGLKRLCGRSLAQMLDEDTVVGVWRVAKLFRLARLEDQCTEYMAKVIEKLVEREDFVEAVKEEAAAVAARQETDSIPLVDDIRFHVASTVQTYSAIEEAQQRLRALEDLLVSIGLDC

SEQ ID NO: 831 - protein, 574 aa, Homo sapiens
MVEDGAEELEDLVHFSVSELPSRGYGVMEEIRRQGKLCDVTLKIGDHKFSAHRIVLAASIPYFHAMFTNDMMECKQDEIVMQGMDPSALEALINFAYNGNLAIDQQNVQSLLMGASFLQLQSIKDACCTFLRERLHPKNCLGVRQFAETMMCAVLYDAANSFIHQHFVEVSMSEEFLALPLEDVLELVSRDELNVKSEEQVFEAALAWVRYDREQRGPYLPELLSNIRLPLCRPQFLSDRVQQDDLVRCCHKCRDLVDEAKDYHLMPERRPHLPAFRTRPRCCTSIAGLIYAVGGLNSAGDSLNVVEVFDPIANCWERCRPMTTARSRVGVAVVNGLLYAIGGYDGQLRLSTVEAYNPETDTWTRVGSMNSKRSAMGTVVLDGQIYVCGGYDGNSSLSSVETYSPETDKWTVVTSMSSNRSAAGVTVFEGRIYVSGGHDGLQIFSSVEHYNHHTATWHPAAGMLNKRCRHGAASLGSKMFVCGGYDGSGFLSIAEMYSSVADQWCLIVPMHTRRSRVSLVASCGRLYAVGGYDGQSNLSSVEMYDPETDCWTFMAPMACHEGGVGVGCIPLLTI

SEQ ID NO: 832 - protein, 475 aa, Homo sapiens
MSATAAARKRGKPASGAGAGAGAGKRRRKADSAGDRGKSKGGGKMNEEISSDSESESLAPRKPEEEEEEELEETAQEKKLRLAKLYLEQLRQQEEEKAEARAFEEDQVAGRLKEDVLEQRGRLQKLVAKEIQAPASADIRVLRGHQLSITCLVVTPDDSAIFSAAKDCSIIKWSVESGRKLHVIPRAKKGAEGKPPGHSSHVLCMAISSDGKYLASGDRSKLILIWEAQSCQHLYTFTGHRDAVSGLAFRRGTHQLYSTSHDRSVKVWNVAENSYVETLFGHQDAVAALDALSRECCVTAGGRDGTVRVWKIPEESQLVFYGHQGSIDCIHLINEEHMVSGADDGSVALWGLSKKRPLALQREAHGLRGEPGLEQPFWISSVAALLNTDLVATGSHSSCVRLWQCGEGFRQLDLLCDIPLVGFINSLKFSSSGDFLVAGVGQEHRLGRWWRIKEARNSVCIIPLRRVPVPPAAGS

SEQ ID NO: 833 - protein, 399 aa, Homo sapiens
MGRKSLYLLIVGILIAYYIYTPLPDNVEEPWRMMWINAHLKTIQNLATFVELLGLHHFMDSFKVVGSFDEVPPTSDENVTVTETKFNNILVRVYVPKRKSEALRRGLFYIHGGGWCVGSAALSGYDLLSRWTADRLDAVVVSTNYRLAPKYHFPIQFEDVYNALRWFLRKKVLAKYGVNPERIGISGDSAGGNLAAAVTQQLLDDPDVKIKLKIQSLIYPALQPLDVDLPSYQENSNFLFLSKSLMVRFWSEYFTTDRSLEKAMLSRQHVPVESSHLFKFVNWSSLLPERFIKGHVYNNPNYGSSELAKKYPGFLDVRAAPLLADDNKLRGLPLTYVITCQYDLLRDDGLMYVTRLRNTGVQVTHNHVEDGFHGAFSFLGLKISHRLINQYIEWLKENL

SEQ ID NO: 834 - protein, 747 aa, Homo sapiens
MGRLNEQRLFQPDLCDVDLVLVPQRSVFPAHKGVLAAYSQFFHSLFTQNKQLQRVELSLEALAPGGLQQILNFIYTSKLLVNAANVHEVLSAASLLQMADIAASCQELLDARSLGPPGPGTVALAQPAASCTPAAPPYYCDIKQEADTPGLPKIYAREGPDPYSVRVEDGAGTAGGTVPATIGPAQPFFKEEKEGGVEEAGGPPASLCKLEGGEELEEELGGSGTYSRREQSQIIVEVNLNNQTLHVSTGPEGKPGAGPSPATVVLGREDGLQRHSDEEEEDDEEEEEEEEEEEGGGSGREEEEEEEGGSQGEEEEEEEDGHSEQEEEEEEEEEEGPSEQDQESSEEEEGEEGEAGGKQGPRGSRSSRADPPPHSHMATRSRENARRRGTPEPEEAGRRGGKRPKPPPGVASASARGPPATDGLGAKVKLEEKQHHPCQKCPRVFNNRWYLEKHMNVTHSRMQICDQCGKRFLLESELLLHRQTDCERNIQCVTCGKAFKKLWSLHEHNKIVHGYAEKKFSCEICEKKFYTMAHVRKHMVAHTKDMPFTCETCGKSFKRSMSLKVHSLQHSGEKPFRCENCNERFQYKYQLRSHMSIHIGHKQFMCQWCGKDFNMKQYFDEHMKTHTGEKPYICEICGKSFTSRPNMKRHRRTHTGEKPYPCDVCGQRFRFSNMLKAHKEKCFRVSHTLAGDGVPAAPGLPPTQPQAHALPLLPGLPQTLPPPPHLPPPPPLFPTTASPGGRMNANN

SEQ ID NO: 835 - protein, 1462 aa, Homo sapiens
MGAQDRPQCHFDIEINREPVGRIMFQLFSDICPKTCKNFLCLCSGEKGLGKTTGKKLCYKGSTFHRVVKNFMIQGGDFSEGNGKGGESIYGGYFKDENFILKHDRAFLLSMANRGKHTNGSQFFITTKPAPHLDGVHVVFGLVISGFEVIEQIENLKTDAASRPYADVRVIDCGVLATKSIKDVFEKKRKKPTHSEGSDSSSNSSSSSESSSESELEHERSRRRKHKRRPKVKRSKKRRKEASSSEEPRNKHAMNPKGHSERSDTNEKRSVDSSAKREKPVVRPEEIPPVPENRFLLRRDMPVVTAEPEPKIPDVAPIVSDQKPSVSKSGRKIKGRGTIRYHTPPRSRSCSESDDDDSSETPPHWKEEMQRLRAYRPPSGEKWSKGDKLSDPCSSRWDERSLSQRSRSWSYNGYYSDLSTARHSGHHKKRRKEKKVKHKKKGKKQKHCRRHKQTKKRRILIPSDIESSKSSTRRMKSSCDRERSSRSSSLSSHHSSKRDWSKSDKDVQSSLTHSSRDSYRSKSHSQSYSRGSSRSRTASKSSSHSRSRSKSRSSSKSGHRKRASKSPRKTASQLSENKPVKTEPLRATMAQNENVVVQPVVAENIPVIPLSDSPPPSRWKPGQKPWKPSYERIQEMKAKTTHLLPIQSTYSLANIKETGSSSSYHKREKNSESDQSTYSKYSDRSSESSPRSRSRSSRSRSYSRSYTRSRSLASSHSRSRSPSSRSHSRNKYSDHSQCSRSSSYTSISSDDGRRAKRRLRSSGKKNSVSHKKHSSSSEKTLHSKYVKGRDRSSCVRKYSESRSSLDYSSDSEQSSVQATQSAQEKEKQGQMERTHNKQEKNRGEEKSKSERECPHSKKRTLKENLSDHLRNGSKPKRKNYAGSKWDSESNSERDVTKNSKNDSHPSSDKEEGEATSDSESEVSEIHIKVKPTTKSSTNTSLPDDNGAWKSSKQRTSTSDSEGSCSNSENNRGKPQKHKHGSKENLKREHTKKVKEKLKGKKDKKHKAPKRKQAFHWQPPLEFGEEEEEEIDDKQVTQESKEKKVSENNETIKDNILKTEKSSEEDLSGKHDTVTVSSDLDQFTKDDSKLSISPTALNTEENVACLQNIQHVEESVPNGVEDVLQTDDNMEICTPDRSSPAKVEETSPLGNARLDTPDINIVLKQDMATEHPQAEVVKQESSMSESKVLGEVGKQDSSSASLASAGESTGKKEVAEKSQINLIDKKWKPLQGVGNLAAPNAATSSAVEVKVLTTVPEMKPQGLRIEIKSKNKVRPGSLFDEVRKTARLNRRPRNQESSSDEQTPSRDDDSQSRSPSRSRSKSETKSRHRTRSVSYSHSRSRSRSSTSSYRSRSYSRSRSRGWYSRGRTRSRSSSYRSYKSHRTSSRSRSRSSSYDPHSRSRSYTYDSYYSRSRSRSRSQRSDSYHRGRSYNRRSRSCRSYGSDSESDRSYSHHRSPSESSRYS

SEQ ID NO: 836 - protein, 841 aa, Homo sapiens
MPLAAYCYLRVVGKGSYGEVTLVKHRRDGKQYVIKKLNLRNASSRERRAAEQEAQLLSQLKHPNIVTYKESWEGGDGLLYIVMGFCEGGDLYRKLKEQKGQLLPENQVVEWFVQIAMALQYLHEKHILHRDLKTQNVFLTRTNIIKVGDLGIARVLENHCDMASTLIGTPYYMSPELFSNKPYNYKSDVWALGCCVYEMATLKHAFNAKDMNSLVYRIIEGKLPPMPRDYSPELAELIRTMLSKRPEERPSVRSILRQPYIKRQISFFLEATKIKTSKNNIKNGDSQSKPFATVVSGEAESNHEVIHPQPLSSEGSQTYIMGEGKCLSQEKPRASGLLKSPASLKAHTCKQDLSNTTELATISSVNIDILPAKGRDSVSDGFVQENQPRYLDASNELGGICSISQVEEEMLQDNTKSSAQPENLIPMWSSDIVTGEKNEPVKPLQPLIKEQKPKDQSLALSPKLECSGTILAHSNLRLLGSSDSPASASRVAGITGVCHHAQDQVAGECIIEKQGRIHPDLQPHNSGSEPSLSRQRRQKRREQTEHRGEKRQVRRDLFAFQESPPRFLPSHPIVGKVDVTSTQKEAENQRRVVTGSVSSSRSSEMSSSKDRPLSARERRRLKQSQEEMSSSGPSVRKASLSVAGPGKPQEEDQPLPARRLSSDCSVTQERKQIHCLSEDELSSSTSSTDKSDGDYGEGKGQTNEINALVQLMTQTLKLDSKESCEDVPVANPVSEFKLHRKYRDTLILHGKVAEEAEEIHFKELPSAIMPGSEKIRRLVEVLRTDVIRGLGVQLLEQVYDLLEEEDEFDREVRLREHMGEKYTTYSVKARQLKFFEENMNF

SEQ ID NO: 837 - protein, 161 aa, Homo sapiens
MAKEEPQSISRDLQELQKKLSLLIDSFQNNSKVVAFMKSPVGQYLDSHPFLAFTLLVFIVMSAVPVGFFLLIVVLTTLAALLGVIILEGLVISVGGFSLLCILCGLGFVSLAMSGMMIASYVVVSSLISCWFSPRPLTQQNTSCDFLPAMKSAEFEGLYQE

SEQ ID NO: 838 - protein, 410 aa, Homo sapiens
MAAEIHSRPQSSRPVLLSKIEGHQDAVTAALLIPKEDGVITASEDRTIRVWLKRDSGQYWPSIYHTMASPCSAMAYHHDSRRIFVGQDNGAVMEFHVSEDFNKMNFIKTYPAHQNRVSAIIFSLATEWVISTGHDKCVSWMCTRSGNMLGRHFFTSWASCLQYDFDTQYAFVGDYSGQITLLKLEQNTCSVITTLKGHEGSVACLWWDPIQRLLFSGASDNSIIMWDIGGRKGRTLLLQGHHDKVQSLCYLQLTRQLVSCSSDGGIAVWNMDVSREEAPQWLESDSCQKCEQPFFWNIKQMWDTKTLGLRQHHCRKCGQAVCGKCSSKRSSYPVMGFEFQVRVCDSCYDSIKDEDRTSLATFHEGKHNISHMSMDIARGLMVTCGTDRIVKIWDMTPVVGCSLATGFSPH

SEQ ID NO: 839 - protein, 1500 aa, Homo sapiens
MTRILTAFKVVRTLKTGFGFTNVTAHQKWKFSRPGIRLLSVKAQTAHIVLEDGTKMKGYSFGHPSSVAGEVVFNTGLGGYPEAITDPAYKGQILTMANPIIGNGGAPDTTALDELGLSKYLESNGIKVSGLLVLDYSKDYNHWLATKSLGQWLQEEKVPAIYGVDTRMLTKIIRDKGTMLGKIEFEGQPVDFVDPNKQNLIAEVSTKDVKVYGKGNPTKVVAVDCGIKNNVIRLLVKRGAEVHLVPWNHDFTKMEYDGILIAGGPGNPALAEPLIQNVRKILESDRKEPLFGISTGNLITGLAAGAKTYKMSMANRGQNQPVLNITNKQAFITAQNHGYALDNTLPAGWKPLFVNVNDQTNEGIMHESKPFFAVQFHPEVTPGPIDTEYLFDSFFSLIKKGKATTITSVLPKPALVASRVEVSKVLILGSGGLSIGQAGEFDYSGSQAVKAMKEENVKTVLMNPNIASVQTNEVGLKQADTVYFLPITPQFVTEVIKAEQPDGLILGMGGQTALNCGVELFKRGVLKEYGVKVLGTSVESIMATEDRQLFSDKLNEINEKIAPSFAVESIEDALKAADTIGYPVMIRSAYALGGLGSGICPNRETLMDLSTKAFAMTNQILVEKSVTGWKEIEYEVVRDADDNCVTVCNMENVDAMGVHTGDSVVVAPAQTLSNAEFQMLRRTSINVVRHLGIVGECNIQFALHPTSMEYCIIEVNARLSRSSALASKATGYPLAFIAAKIALGIPLPEIKNVVSGKTSACFEPSLDYMVTKIPRWDLDRFHGTSSRIGSSMKSVGEVMAIGRTFEESFQKALRMCHPSIEGFTPRLPMNKEWPSNLDLRKELSEPSSTRIYAIAKAIDDNMSLDEIEKLTYIDKWFLYKMRDILNMEKTLKGLNSESMTEETLKRAKEIGFSDKQISKCLGLTEAQTRELRLKKNIHPWVKQIDTLAAEYPSVTNYLYVTYNGQEHDVNFDDHGMMVLGCGPYHIGSSVEFDWCAVSSIRTLRQLGKKTVVVNCNPETVSTDFDECDKLYFEELSLERILDIYHQEACGGCIISVGGQIPNNLAVPLYKNGVKIMGTSPLQIDRAEDRSIFSAVLDELKVAQAPWKAVNTLNEALEFAKSVDYPCLLRPSYVLSGSAMNVVFSEDEMKKFLEEATRVSQEHPVVLTKFVEGAREVEMDAVGKDGRVISHAISEHVEDAGVHSGDATLMLPTQTISQGAIEKVKDATRKIAKAFAISGPFNVQFLVKGNDVLVIECNLRASRSFPFVSKTLGVDFIDVATKVMIGENVDEKHLPTLDHPIIPADYVAIKAPMFSWPRLRDADPILRCEMASTGEVACFGEGIHTAFLKAMLSTGFKIPQKGILIGIQQSFRPRFLGVAEQLHNEGFKLFATEATSDWLNANNVPATPVAWPSQEGQNPSLSSIRKLIRDGSIDLVINLPNNNTKFVHDNYVIRRTAVDSGIPLLTNFQVTKLFAEAVQKSRKVDSKSLFHYRQYSAGKAA

SEQ ID NO: 840 - protein, 407 aa, Homo sapiens
MNNSGADEIGKLFVGGLDWSTTQETLRSYFSQYGEVVDCVIMKDKTTNQSRGFGFVKFKDPNCVGTVLASRPHTLDGRNIDPKPCTPRGMQPERTRPKEGWQKGPRSDNSKSNKIFVGGIPHNCGETELREYFKKFGVVTEVVMIYDAEKQRPRGFGFITFEDEQSVDQAVNMHFHDIMGKKVEVKRAEPRDSKSQAPGQPGASQWGSRVVPNAANGWAGQPPPTWQQGYGPQGMWVPAGQAIGGYGPPPAGRGAPPPPPPFTSYIVSTPPGGFPPPQGFPQGYGAPPQFSFGYGPPPPPPDQFAPPGVPPPPATPGAAPLAFPPPPSQAAPDMSKPPTAQPDFPYGQYAGYGQDLSGFGQGFSDPSQQPPSYGGPSVPGSGGPPAGGSGFGRGQNHNVQGFHPYRR

SEQ ID NO: 841 - protein, 740 aa, Homo sapiens
MAAFSEMGVMPEIAQAVEEMDWLLPTDIQAESIPLILGGGDVLMAAETGSGKTGAFSIPVIQIVYETLKDQQEGKKGKTTIKTGASVLNKWQMNPYDRGSAFAIGSDGLCCQSREVKEWHGCRATKGLMKGKHYYEVSCHDQGLCRVGWSTMQASLDLGTDKFGFGFGGTGKKSHNKQFDNYGEEFTMHDTIGCYLDIDKGHVKFSKNGKDLGLAFEIPPHMKNQALFPACVLKNAELKFNFGEEEFKFPPKDGFVALSKAPDGYIVKSQHSGNAQVTQTKFLPNAPKALIVEPSRELAEQTLNNIKQFKKYIDNPKLRELLIIGGVAARDQLSVLENGVDIVVGTPGRLDDLVSTGKLNLSQVRFLVLDEADGLLSQGYSDFINRMHNQIPQVTSDGKRLQVIVCSATLHSFDVKKLSEKIMHFPTWVDLKGEDSVPDTVHHVVVPVNPKTDRLWERLGKSHIRTDDVHAKDNTRPGANSPEMWSEAIKILKGEYAVRAIKEHKMDQAIIFCRTKIDCDNLEQYFIQQGGGPDKKGHQFSCVCLHGDRKPHERKQNLERFKKGDVRFLICTDVAARGIDIHGVPYVINVTLPDEKQNYVHRIGRVGRAERMGLAISLVATEKEKVWYHVCSSRGKGCYNTRLKEDGGCTIWYNEMQLLSEIEEHLNCTISQVEPDIKVPVDEFDGKVTYGQKRAAGGGSYKGHVDILAPTVQELAALEKEAQTSFLHLGYLPNQLFRTF

SEQ ID NO: 842 - protein, 127 aa, Homo sapiens
MPKTMHFLFRFIVFFYLWGLFTAQRQKKEESTEEVKIEVLHRPENCSKTSKKGDLLNAHYDGYLAKDGSKFYCSRTQNEGHPKWFVLGVGQVIKGLDIAMTDMCPGEKRKVVIPPSFAYGKEGYGST

SEQ ID NO: 843 - protein, 2071 aa, Homo sapiens
MELAHSLLLNEEALAQITEAKRPVFIFEWLRFLDKVLVAANKTDVKEKQKKLVEQLTGLISSSPGPPTRKLLAKNLAALYSIGDTFTVFQTLDKCNDIIRNKDDTAAYLPTKLAAVACVGAFYEKMGRMLGSAFPETVNNLLKSLKSAESQGRSEILMSLQKVLSGLGGAAASSHRDIYKNARSLLTDRSMAVRCAVAKCLLELQNEAVFMWTAELENIATLCFKALENSNYGVRVAVSKLLGTVMATALMPKQATVMRQNVKRATFDEVLELMATGFLRGGSGFLKSGGEMLKVGGSVNREVRVGVTQAYVVFVTTLGGQWLERSFATFLSHVLDLVSHPRATQTHVEAVYSRRCVSFILRATVGSLLGEKAQIAAAKEICQAIGKQMKAVEAVVNDTSGENKSGAADIAASQHVMVCALQELGSLVQSLNATASPLIQEASIGLLEIVTSVLLHPSMAARLAAAWCLRCVAVALPFQLTPFLDRCAERLNNLKTSPEAVSGYSFAMAALLGGVHQCPLGIPHAKGKMVVSIAEDLLRTAAQNSRLSLQRTQAGWLLLGALMTLGPSVVRYHLPKMLLLWRNVFPRSLKELEAEKARGDSFTWQVTLEGRAGALCAMRSFVAHCPELLTEDVIRKLMTPIECAMTMMSHIPSVMKAHGAHLKASAAMVRLRLYDILALLPPKTYEGSFNALLRELVAEFTLTDNSANTTTSLLRSLCHYDDSVLLGSWLQETDHKSIEDQLQPNSASGSGALEHDPSSIYLRIPAGEAVPGPLPLGVSVIDASVALFGVVFPHVSYKHRLQMLDHFAECVKQAKGVRQQAVQLNIFTAVLSALKGLAENKSTLGPEEVRKSALTLVMGPLDNPNPILRCAAGEALGRMAQVVGEATFIARMAQYSFDKLKSARDVVSRTGHSLALGCLHRYVGGIGSGQHLKTSVSILLALAQDGTSPEVQTWSLHSLALIVDSSGPMYRGYVEPTLSLVLTLLLTVPPSHTEVHQCLGRCLGAIITTVGPELQGNGATTSTIRSSCLVGCAITQDHSDSLVQAAAISCLQQLHMFAPRHVNLSSLVPSLCVHLCSSHLLLRRAAVACLRQLAQREAAEVCEYAMSLAKNTGDKESSSANVSPFAPGVSSRTDIHCRHQGVNITETGLEGLLFGMLDRETDRKLCSDIHDTLGHMLSSLAVEKLSHWLMLCKDVLAASSDMSTATLLSSGKDEEAEKKDEMDDDTMFTTLGEEDKSKPFVAPRWATRVFAADCLCRIINLCENADQAHFDLALARSAKLRNPTNDLLVLHLSDLIRMAFMAATDHSNQLRMAGLQALEDIIKKFASVPEPEFPGHVILEQYQANVGAALRPAFSQDTPSDIIAKACQVCSTWIGSGVVSDLNDLRRVHNLLVSSLDKVQAGKGSSSQLYRESATTMEKLAVLKAWAEVYVVAMNIKKEAESKPKRAIKNTDDDDDDCGTIDELPPDSLITLVQPELPTLSRLWLAALKDYALLTLPAEFSSQLPPDGGAFYTPETIDTARLHYRNSWAPILHAVALWLNSTGFTCSESTEAAAISGLQKRSTSVNLNQASGAVGSAKSLPEINKDRMHLILGVSIQFLCSPRPEEPIEHVTACLQALHTLLDSPYARVHIAEDQLIGVELLSVLHRLLLTWNPSSVQLLVTGVVQQIVRAAQDYLQEKRNTLNEDDMEKEACTVLGEGGDSGGLIPGKSLVFATMELLMFILVRHMPHLSTKVSDSPSHIATKTRLSEESARLVAATVTILSDLPSLCSPAGCMTILPTILFLIARILKDTAIKSADNQVPPPVSAALQGIKSIVTLSMAKTEAGVQKQWTALIRSTLACILEYSQPEDSVPTPDEVSMLTAIALFLWSASNEIIGVQSLQNGCMNRFKNALNSCDPWVQAKCYQLLLSVFQHSNRALSTPYIHSLAPIVVEKLKAVERNRPASNIELLAVQEGIKVLETLVALGEEQNRVQLLALLVPTLISYLLDENSFASASSASKDLHEFALQNLMHIGPLYPHAFKTVMGAAPELKVRLETAVRASQASKAKAAARQPAPAIHSAPTIKLKTSFF

SEQ ID NO: 844 - protein, 334 aa, Homo sapiens
MSEPIRVLVTGAAGQIAYSLLYSIGNGSVFGKDQPIILVLLDITPMMGVLDGVLMELQDCALPLLKDVIATDKEDVAFKDLDVAILVGSMPRREGMERKDLLKANVKIFKSQGAALDKYAKKSVKVIVVGNPANTNCLTASKSAPSIPKENFSCLTRLDHNRAKAQIALKLGVTANDVKNVIIWGNHSSTQYPDVNHAKVKLQGKEVGVYEALKDDSWLKGEFVTTVQQRGAAVIKARKLSSAMSAAKAICDHVRDIWFGTPEGEFVSMGVISDGNSYGVPDDLLYSFPVVIKNKTWKFVEGLPINDFSREKMDLTAKELTEEKESAFEFLSSA

SEQ ID NO: 845 - protein, 44 aa, Homo sapiens
MADKPDMGEIASFDKAKLKKTETQEKNTLPTKETIEQEKRSEIS

SEQ ID NO: 846 - protein, 934 aa, Homo sapiens [sequence omitted]

SEQ ID NO: 847 - protein, 380 aa, Homo sapiens
MTEEVIVIAKWDYTAQQDQELDIKKNERLWLLDDSKTWWRVRNAANRTGYVPSNYVERKNSLKKGSLVKNLKDTLGLGKTRRKTSARDASPTPSTDAEYPANGSGADRIYDLNIPAFVKFAYVAEREDELSLVKGSRVTVMEKCSDGWWRGSYNGQIGWFPSNYVLEEVDEAAAESPSFLSLRKGASLSNGQGSRVLHVVQTLYPFSSVTEEELNFEKGETMEVIEKPENDPEWWKCKNARGQVGLVPKNYVVVLSDGPALHPAHAPQISYTGPSSSGRFAGREWYYGNVTRHQAECALNERGVEGDFLIRDSESSPSDFSVSLKASGKNKHFKVQLVDNVYCIGQRRFHTMDELVEHYKKAPIFTSEHGEKLYLVRALQ

SEQ ID NO: 848 - protein, 304 aa, Homo sapiens
MIYTMKKVHALWASVCLLLNLAPAPLNADSEEDEEHTIITDTELPPLKLMHSFCAFKADDGPCKAIMKRFFFNIFTRQCEEFIYGGCEGNQNRFESLEECKKMCTRDNANRIIKTTLQQEKPDFCFLEEDPGICRGYITRYFYNNQTKQCERFKYGGCLGNMNNFETLEECKNICEDGPNGFQVDNYGTQLNAVNNSLTPQSTKVPSLFEFHGPSWCLTPADRGLCRANENRFYYNSVIGKCRPFKYSGCGGNENNFTSKQECLRACKKGFIQRISKGGLIKTKRKRKKQRVKIAYEEIFVKNM

SEQ ID NO: 849 - protein, 727 aa, Homo sapiens
MLRIPVRKALVGLSKSPKGCVRTTATAASNLIEVFVDGQSVMVEPGTTVLQACEKVGMQIPRFCYHERLSVAGNCRMCLVEIEKAPKVVAACAMPVMKGWNILTNSEKSKKAREGVMEFLLANHPLDCPICDQGGECDLQDQSMMFGNDRSRFLEGKRAVEDKNIGPLVKTIMTRCIQCTRCIRFASEIAGVDDLGTTGRGNDMQVGTYIEKMFMSELSGNIIDICPVGALTSKPYAFTARPWETRKTESIDVMDAVGSNIVVSTRTGEVMRILPRMHEDINEEWISDKTRFAYDGLKRQRLTEPMVRNEKGLLTYTSWEDALSRVAGMLQSFQGKDVAAIAGGLVDAEALVALKDLLNRVDSDTLCTEEVFPTAGAGTDLRSNYLLNTTIAGVEEADVVLLVGTNPRFEAPLFNARIRKSWLHNDLKVALIGSPVDLTYTYDHLGDSPKILQDIASGSHPFSQVLKEAKKPMVVLGSSALQRNDGAAILAAVSSIAQKIRMTSGVTGDWKVMNILHRIASQVAALDLGYKPGVEAIRKNPPKVLFLLGADGGCITRQDLPKDCFIIYQGHHGDVGAPIADVILPGAAYTEKSATYVNTEGRAQQTKVAVTPPGLAREDWKIIRALSEIAGMTLPYDTLDQVRNRLEEVSPNLVRYDDIEGANYFQQANELSKLVNQQLLADPLVPPQLTIKDFYMTDSISRASQTMAKCVKAVTEGAQAVEEPSIC

SEQ ID NO: 850 - protein, 4563 aa, Homo sapiens
MDPPRPALLALLALPALLLLLLAGARAEEEMLENVSLVCPKDATRFKHLRKYTYNYEAESSSGVPGTADSRSATRINCKVELEVPQLCSFILKTSQCTLKEVYGFNPEGKALLKKTKNSEEFAAAMSRYELKLAIPEGKQVFLYPEKDEPTYILNIKRGIISALLVPPETEEAKQVLFLDTVYGNCSTHFTVKTRKGNVATEISTERDLGQCDRFKPIRTGISPLALIKGMTRPLSTLISSSQSCQYTLDAKRKHVAEAICKEQHLFLPFSYKNKYGMVAQVTQTLKLEDTPKINSRFFGEGTKKMGLAFESTKSTSPPKQAEAVLKTLQELKKLTISEQNIQRANLFNKLVTELRGLSDEAVTSLLPQLIEVSSPITLQALVQCGQPQCSTHILQWLKRVHANPLLIDVVTYLVALIPEPSAQQLREIFNMARDQRSRATLYALSHAVNNYHKTNPTGTQELLDIANYLMEQIQDDCTGDEDYTYLILRVIGNMGQTMEQLTPELKSSILKCVQSTKPSLMIQKAAIQALRKMEPKDKDQEVLLQTFLDDASPGDKRLAAYLMLMRSPSQADINKIVQILPWEQNEQVKNFVASHIANILNSEELDIQDLKKLVKEALKESQLPTVMDFRKFSRNYQLYKSVSLPSLDPASAKIEGNLIFDPNNYLPKESMLKTTLTAFGFASADLIEIGLEGKGFEPTLEALFGKQGFFPDSVNKALYWVNGQVPDGVSKVLVDHFGYTKDDKHEQDMVNGIMLSVEKLIKDLKSKEVPEARAYLRILGEELGFASLHDLQLLGKLLLMGARTLQGIPQMIGEVIRKGSKNDFFLHYIFMENAFELPTGAGLQLQISSSGVIAPGAKAGVKLEVANMQAELVAKPSVSVEFVTNMGIIIPDFARSGVQMNTNFFHESGLEAHVALKAGKLKFIIPSPKRPVKLLSGGNTLHLVSTTKTEVIPPLIENRQSWSVCKQVFPGLNYCTSGAYSNASSTDSASYYPLTGDTRLELELRPTGEIEQYSVSATYELQREDRALVDTLKFVTQAEGAKQTEATMTFKYNRQSMTLSSEVQIPDFDVDLGTILRVNDESTEGKTSYRLTLDIQNKKITEVALMGHLSCDTKEERKIKGVISIPRLQAEARSEILAHWSPAKLLLQMDSSATAYGSTVSKRVAWHYDEEKIEFEWNTGTNVDTKKMTSNFPVDLSDYPKSLHMYANRLLDHRVPQTDMTFRHVGSKLIVAMSSWLQKASGSLPYTQTLQDHLNSLKEFNLQNMGLPDFHIPENLFLKSDGRVKYTLNKNSLKIEIPLPFGGKSSRDLKMLETVRTPALHFKSVGFHLPSREFQVPTFTIPKLYQLQVPLLGVLDLSTNVYSNLYNWSASYSGGNTSTDHFSLRARYHMKADSVVDLLSYNVQGSGETTYDHKNTFTLSCDGSLRHKFLDSNIKFSHVEKLGNNPVSKGLLIFDASSSWGPQMSASVHLDSKKKQHLFVKEVKIDGQFRVSSFYAKGTYGLSCQRDPNTGRLNGESNLRFNSSYLQGTNQITGRYEDGTLSLTSTSDLQSGIIKNTASLKYENYELTLKSDTNGKYKNFATSNKMDMTFSKQNALLRSEYQADYESLRFFSLLSGSLNSHGLELNADILGTDKINSGAHKATLRIGQDGISTSATTNLKCSLLVLENELNAELGLSGASMKLTTNGRFREHNAKFSLDGKAALTELSLGSAYQAMILGVDSKNIFNFKVSQEGLKLSNDMMGSYAEMKFDHTNSLNIAGLSLDFSSKLDNIYSSDKFYKQTVNLQLQPYSLVTTLNSDLKYNALDLTNNGKLRLEPLKLHVAGNLKGAYQNNEIKHIYAISSAALSASYKADTVAKVQGVEFSHRLNTDIAGLASAIDMSTNYNSDSLHFSNVFRSVMAPFTMTIDAHTNGNGKLALWGEHTGQLYSKFLLKAEPLAFTFSHDYKGSTSHHLVSRKSISAALEHKVSALLTPAEQTGTWKLKTQFNNNEYSQDLDAYNTKDKIGVELTGRTLADLTLLDSPIKVPLLLSEPINIIDALEMRDAVEKPQEFTIVAFVKYDKNQDVHSINLPFFETLQEYFERNRQTIIVVLENVQRNLKHINIDQFVRKYRAALGKLPQQANDYLNSFNWERQVSHAKEKLTALTKKYRITENDIQIALDDAKINFNEKLSQLQTYMIQFDQYIKDSYDLHDLKIAIANIIDEIIEKLKSLDEHYHIRVNLVKTIHDLHLFIENIDFNKSGSSTASWIQNVDTKYQIRIQIQEKLQQLKRHIQNIDIQHLAGKLKQHIEAIDVRVLLDQLGTTISFERINDILEHVKHFVINLIGDFEVAEKINAFRAKVHELIERYEVDQQIQVLMDKLVELAHQYKLKETIQKLSNVLQQVKIKDYFEKLVGFIDDAVKKLNELSFKTFIEDVNKFLDMLIKKLKSFDYHQFVDETNDKIREVTQRLNGEIQALELPQKAEALKLFLEETKATVAVYLESLQDTKITLIINWLQEALSSASLAHMKAKFRETLEDTRDRMYQMDIQQELQRYLSLVGQVYSTLVTYISDWWTLAAKNLTDFAEQYSIQDWAKRMKALVEQGFTVPEIKTILGTMPAFEVSLQALQKATFQTPDFIVPLTDLRIPSVQINFKDLKNIKIPSRFSTPEFTILNTFHIPSFTIDFVEMKVKIIRTIDQMLNSELQWPVPDIYLRDLKVEDIPLARITLPDFRLPEIAIPEFIIPTLNLNDFQVPDLHIPEFQLPHISHTIEVPTFGKLYSILKIQSPLFTLDANADIGNGTTSANEAGIAASITAKGESKLEVLNFDFQANAQLSNPKINPLALKESVKFSSKYLRTEHGSEMLFFGNAIEGKSNTVASLHTEKNTLELSNGVIVKINNQLTLDSNTKYFHKLNIPKLDFSSQADLRNEIKTLLKAGHIAWTSSGKGSWKWACPRFSDEGTHESQISFTIEGPLTSFGLSNKINSKHLRVNQNLVYESGSLNFSKLEIQSQVDSQHVGHSVLTAKGMALFGEGKAEFTGRHDAHLNGKVIGTLKNSLFFSAQPFEITASTNNEGNLKVRFPLRLTGKIDFLNNYALFLSPSAQQASWQVSARFNQYKYNQNFSAGNNENIMEAHVGINGEANLDFLNIPLTIPEMRLPYTIITTPPLKDFSLWEKTGLKEFLKTTKQSFDLSVKAQYKKNKHRHSITNPLAVLCEFISQSIKSFDRHFEKNRNNALDFVTKSYNETKIKFDKYKAEKSHDELPRTFQIPGYTVPVVNVEVSPFTIEMSAFGYVFPKAVSMPSFSILGSDVRVPSYTLILPSLELPVLHVPRNLKLSLPDFKELCTISHIFIPAMGNITYDFSFKSSVITLNTNAELFNQSDIVAHLLSSSSSVIDALQYKLEGTTRLTRKRGLKLATALSLSNKFVEGSHNSTVSLTTKNMEVSVATTTKAQIPILRMNFKQELNGNTKSKPTVSSSMEFKYDFNSSMLYSTAKGAVDHKLSLESLTSYFSIESSTKGDVKGSVLSREYSGTIASEANTYLNSKSTRSSVKLQGTSKIDDIWNLEVKENFAGEATLQRIYSLWEHSTKNHLQLEGLFFTNGEHTSKATLELSPWQMSALVQVHASQPSSFHDFPDLGQEVALNANTKNQKIRWKNEVRIHSGSFQSQVELSNDQEKAHLDIAGSLEGHLRFLKNIILPVYDKSLWDFLKLDVTTSIGRRQHLRVSTAFVYTKNPNGYSFSIPVKVLADKFIIPGLKLNDLNSVLVMPTFHVPFTDLQVPSCKLDFREIQIYKKLRTSSFALNLPTLPEVKFPEVDVLTKYSQPEDSLIPFFEITVPESQLTVSQFTLPKSVSDGIAALDLNAVANKIADFELPTIIVPEQTIEIPSIKFSVPAGIVIPSFQALTARFEVDSPVYNATWSASLKNKADYVETVLDSTCSSTVQFLEYELNVLGTHKIEDGTLASKTKGTFAHRDFSAEYEEDGKYEGLQEWEGKAHLNIKSPAFTDLHLRYQKDKKGISTSAASPAVGTVGMDMDEDDDFSKWNFYYSPQSSPDKKLTIFKTELRVRESDEETQIKVNWEEEAASGLLTSLKDNVPKATGVLYDYVNKYHWEHTGLTLREVSSKLRRNLQNNAEWVYQGAIRQIDDIDVRFQKAASGTTGTYQEWKDKAQNLYQELLTQEGQASFQGLKDNVFDGLVRVTQEFHMKVKHLIDSLIDFLNFPRFQFPGKPGIYTREELCTMFIREVGTVLSQVYSKVHNGSEILFSYFQDLVITLPFELRKHKLIDVISMYRELLKDLSKEAQEVFKAIQSLKTTEVLRNLQDLLQFIFQLIEDNIKQLKEMKFTYLINYIQDEINTIFSDYIPYVFKLLKENLCLNLHKFNEFIQNELQEASQELQQIHQYIMALREEYFDPSIVGWTVKYYELEEKIVSLIKNLLVALKDFHSEYIVSASNFTSQLSSQVEQFLHRNIQEYLSILTDPDGKGKEKIAELSATAQEIIKSQAIATKKIISDYHQQFRYKLQDFSDQLSDYYEKFIAESKRLIDLSIQNYHTFLIYITELLKKLQSTTVMNPYMKLAPGELTIIL

SEQ ID NO: 851 - protein, 356 aa, Homo sapiens
MSKLWRRGSTSGAMEAPEPGEALELSLAGAHGHGVHKKKHKKHKKKHKKKHHQEEDAGPTQPSPAKPQLKLKIKLGGQVLGTKSVPTFTVIPEGPRSPSPLMVVDNEEEPMEGVPLEQYRAWLDEDSNLSPSPLRDLSGGLGGQEEEEEQRWLDALEKGELDDNGDLKKEINERLLTARQRALLQKARSQPSPMLPLPVAEGCPPPALTEEMLLKREERARKRRLQAARRAEEHKNQTIERLTKTAATSGRGGRGGARGERRGGRAAAPAPMVRYCSGAQGSTLSFPPGVPAPTAVSQRPSPSGPPPRCSVPGCPHPRRYACSRTGQALCSLQCYRINLQMRLGGPEGPGSPLLAT

SEQ ID NO: 852 - protein, 314 aa, Homo sapiens
MLVSGRRRLLTVLLQAQKWPFQPSRDMRLVQFRAPHLVGPHLGLETGNGGGVINLNAFDPTLPKTMTQFLEQGEATLSVARRALAAQLPVLPRSEVTFLAPVTRPDKVVCVGMNYVDHCKEQNVPVPKEPIIFSKFASSIVGPYDEVVLPPQSQEVDWEVELAVVIGKKGKHIKATDAMAHVAGFTVAHDVSARDWQMRRNGKQWLLGKTFDTFCPLGPALVTKDSVADPHNLKICCRVNGEVVQSGNTNQMVFKTEDLIAWVSQFVTFYPGDVILTGTPPGVGVFRKPPVFLKKGDEVQCEIEELGVIINKVV

SEQ ID NO: 853 - protein, 125 aa, Homo sapiens
MAMQAAKRANIRLPPEVNRILYIRNLPYKITAEEMYDIFGKYGPIRQIRVGNTPETRGTAYVVYEDIFDAKNACDHLSGFNVCNRYLVVLYYNANRAFQKMDTKKKEEQLKLLKEKYGINTDPPK

SEQ ID NO: 854 - protein, 176 aa, Homo sapiens
MALWRAYQRALAAHPWKVQVLTAGSLMGLGDIISQQLVERRGLQEHQRGRTLTMVSLGCGFVGPVVGGWYKVLDRFIPGTTKVDALKKMLLDQGGFAPCFLGCFLPLVGALNGLSAQDNWAKLQRDYPDALITNYYLWPAVQLANFYLVPLHYRLAVVQCVAVIWNSYLSWKAHRL

SEQ ID NO: 855 - protein, 523 aa, Homo sapiens
MAAVAVAVREDSGSGMKAELPPGPGAVGREMTKEEKLQLRKEKKQQKKKRKEEKGAEPETGSAVSAAQCQVGPTRELPESGIQLGTPREKVPAGRSKAELRAERRAKQEAERALKQARKGEQGGPPPKASPSTAGETPSGVKRLPEYPQVDDLLLRRLVKKPERQQVPTRKDYGSKVSLFSHLPQYSRQNSLTQFMSIPSSVIHPAMVRLGLQYSQGLVSGSNARCIALLRALQQVIQDYTTPPNEELSRDLVNKLKPYMSFLTQCRPLSASMHNAIKFLNKEITSVGSSKREEEAKSELRAAIDRYVQEKIVLAAQAISRFAYQKISNGDVILVYGCSSLVSRILQEAWTEGRRFRVVVVDSRPWLEGRHTLRSLVHAGVPASYLLIPAASYVLPEVSKVLLGAHALLANGSVMSRVGTAQLALVARAHNVPVLVCCETYKFCERVQTDAFVSNELDDPDDLQCKRGEHVALANWQNHASLRLLNLVYDVTPPELVDLVITELGMIPCSSVPVVLRVKSSDQ

SEQ ID NO: 856 - protein, 535 aa, Homo sapiens
MSEGESQTVLSSGSDPKVESSSSAPGLTSVSPPVTSTTSAASPEEEEESEDESEILEESPCGRWQKRREEVNQRNVPGIDSAYLAMDTEEGVEVVWNEVQFSERKNYKLQEEKVRAVFDNLIQLEHLNIVKFHKYWADIKENKARVIFITEYMSSGSLKQFLKKTKKNHKTMNEKAWKRWCTQILSALSYLHSCDPPIIHGNLTCDTIFIQHNGLIKIGSVAPDTINNHVKTCREEQKNLHFFAPEYGEVTNVTTAVDIYSFGMCALEMAVLEIQGNGESSYVPQEAISSAIQLLEDPLQREFIQKCLQSEPARRPTARELLFHPALFEVPSLKLLAAHCIVGHQHMIPENALEEITKNMDTSAVLAEIPAGPGREPVQTLYSQSPALELDKFLEDVRNGIYPLTAFGLPRPQQPQQEEVTSPVVPPSVKTPTPEPAEVETRKVVLMQCNIESVEEGVKHHLTLLLKLEDKLNRHLSCDLMPNENIPELAAELVQLGFISEADQSRLTSLLEETLNKFNFARNSTLNSAAVTVSS

SEQ ID NO: 857 - protein, 614 aa, Homo sapiens
MAWEARREPGPRRAAVRETVMLLLCLGVPTGRPYNVDTESALLYQGPHNTLFGYSVVLHSHGANRWLLVGAPTANWLANASVINPGAIYRCRIGKNPGQTCEQLQLGSPNGEPCGKTCLEERDNQWLGVTLSRQPGENGSIVTCGHRWKNIFYIKNENKLPTGGCYGVPPDLRTELSKRIAPCYQDYVKKFGENFASCQAGISSFYTKDLIVMGAPGSSYWTGSLFVYNITTNKYKAFLDKQNQVKFGSYLGYSVGAGHFRSQHTTEVVGGAPQHEQIGKAYIFSIDEKELNILHEMKGKKLGSYFGASVCAVDLNADGFSDLLVGAPMQSTIREEGRVFVYINSGSGAVMNAMETNLVGSDKYAARFGESIVNLGDIDNDGFEDVAIGAPQEDDLQGAIYIYNGRADGISSTFSQRIEGLQISKSLSMFGQSISGQIDADNNGYVDVAVGAFRSDSAVLLRTRPVVIVDASLSHPESVNRTKFDCVENGWPSVCIDLTLCFSYKGKEVPGYIVLFYNMSLDVNRKAESPPRFYFSSNGTSDVITGSIQVSSREANCRTHQAFMRKDVRDILTPIQIEAAYHLGPHVISKRSTEEFPPLQPILQQKKEKDIMKK

SEQ ID NO: 858 - protein, 470 aa, Homo sapiens
MHFSIPETESRSGDSGGSAYVAYNIHVNGVLHCRVRYSQLLGLHEQLRKEYGANVLPAFPPKKLFSLTPAEVEQRREQLEKYMQAVRQDPLLGSSETFNSFLRRAQQETQQVPTEEVSLEVLLSNGQKVLVNVLTSDQTEDVLEAVAAKLDLPDDLIGYFSLFLVREKEDGAFSFVRKLQEFELPYVSVTSLRSQEYKIVLRKSYWDSAYDDDVMENRVGLNLLYAQTVSDIERGWILVTKEQHRQLKSLQEKVSKKEFLRLAQTLRHYGYLRFDACVADFPEKDCPVVVSAGNSELSLQLRLPGQQLREGSFRVTRMRCWRVTSSVPLPSGSTSSPGRGRGEVRLELAFEYLMSKDRLQWVTITSPQAIMMSICLQSMVDELMVKKSGGSIRKMLRRRVGGTLRRSDSQQAVKSPPLLESPDATRESMVKLSSKLSAVSLRGIGSPSTDASASDVHGNFAFEGIGDEDL

SEQ ID NO: 859 - protein, 519 aa, Homo sapiens
MAPIPKTVGRIKLDCSLRPSCPLEVAAAPKLCKEFGPEDYGEEDIVDFLRRLVESDPQGLHRIHVDGSSGRLQLWHHDYLLGHLDDEGKSTGQSDRGKGAEGLGTYCGLRKSFLYPPQESEPCPQSPSASATFPSVSDSLLQVAMPQKLLVTEEEANRLAEELVAEEERMKQKAEKKRLKKKRQKERKRQERLEQYCGEPKASTTSDGDESPPSSPGNPVQGQCGEEEDSLDLSSTFVSLALRKVGDWPLSARREKGLNQEPQGRGLALQKMGQEEESPPREERPQQSPKVQASPGLLAAALQQSQELAKLGTSFAQNGFYHEAVVLFTQALKLNPQDHRLFGNRSFCHERLGQPAWALADAQVALTLRPGWPRGLFRLGKALMGLQRFREAAAVFQETLRGGSQPDAARELRSCLLHLTLQGQRGGICAPPLSPGALQPLPHAELAPSGLPSLRCPRSTALRSPGLSPLLHYPSCHRSHPNQPLSQTQSRRPHPLKPQDPSKGWDILGLGLQHLSQAR

SEQ ID NO: 860 - protein, 213 aa, Homo sapiens
MAVLSAPGLRGFRILGLRSSVGPAVQARGVHQSVATDGPSSTQPALPKARAVAPKPSSRGEYVVAKLDDLVNWARRSSLWPMTFGLACCAVEMMHMAAPRYDMDRFGVVFRASPRQSDVMIVAGTLTNKMAPALRKVYDQMPEPRYVVSMGSCANGGGYYHYSYSVVRGCDRIVPVDIYIPGCPPTAEALLYGILQLQRKIKRERRLQIWYRR

SEQ ID NO: 861 - protein, 152 aa, Homo sapiens
MRLPLSHSPEHVEMALLSNILAAYSFVSENPERAALYFVSGVCIGLVLTLAALVIRISCHTDCRRRPGKKFLQDRESSSDSSDSEDGSEDTVSDLSVRRHRRFERTLNKNVFTSAEELERAQRLEERERIIREIWMNGQPEVPGTRSLNRYY

SEQ ID NO: 862 - protein, 399 aa, Homo sapiens
MAQRAFPNPYADYNKSLAEGYFDAAGRLTPEFSQRLTNKIRELLQQMERGLKSADPRDGTGYTGWAGIAVLYLHLYDVFGDPAYLQLAHGYVKQSLNCLTKRSITFLCGDAGPLAVAAVLYHKMNNEKQAEDCITRLIHLNKIDPHAPNEMLYGRIGYIYALLFVNKNFGVEKIPQSHIQQICETILTSGENLARKRNFTAKSPLMYEWYQEYYVGAAHGLAGIYYYLMQPSLQVSQGKLHSLVKPSVDYVCQLKFPSGNYPPCIGDNRDLLVHWCHGAPGVIYMLIQAYKVFREEKYLCDAYQCADVIWQYGLLKKGYGLCHGSAGNAYAFLTLYNLTQDMKYLYRACKFAEWCLEYGEHGCRTPDTPFSLFEGMAGTIYFLADLLVPTKARFPAFEL

SEQ ID NO: 863 - protein, 166 aa, Homo sapiens
MAQTSSYFMLISCLMFLSQSQGQEAQTELPQARISCPEGTNAYRSYCYYFNEDRETWVDADLYCQNMNSGNLVSVLTQAEGAFVASLIKESGTDDFNVWIGLHDPKKNRRWHWSSGSLVSYKSWGIGAPSSVNPGYCVSLTSSTGFQKWKDVPCEDKFSFVCKFKN

SEQ ID NO: 864 - protein, 375 aa, Homo sapiens
MAVTEASLLRQCPLLLPQNRSKTVYEGFISAQGRDFHLRIVLPEDLQLKNARLLCSWQLRTILSGYHRIVQQRMQHSPDLMSFMMELKMLLEVALKNRQELYALPPPPQFYSSLIEEIGTLGWDKLVYADTCFSTIKLKAEDASGREHLITLKLKAKYPAESPDYFVDFPVPFCASWTPQSSLISIYSQFLAAIESLKAFWDVMDEIDEKTWVLEPEKPPRSATARRIALGNNVSINIEVDPRHPTMLPECFFLGADHVVKPLGIKLSRNIHLWDPENSVLQNLKDVLEIDFPARAILEKSDFTMDCGICYAYQLDGTIPDQVCDNSQCGQPFHQICLYEWLRGLLTSRQSFNIIFGECPYCSKPITLKMSGRKH

SEQ ID NO: 865 - protein, 325 aa, Homo sapiens
MLPRVGCPALPLPPPPLLPLLLLLLGASGGGGGARAEVLFRCPPCTPERLAACGPPPVAPPAAVAAVAGGARMPCAELVREPGCGCCSVCARLEGEACGVYTPRCGQGLRCYPHPGSELPLQALVMGEGTCEKRRDAEYGASPEQVADNGDDHSEGGLVENHVDSTMNMLGGGGSAGRKPLKSGMKELAVFREKVTEQHRQMGKGGKHHLGLEEPKKLRPPPARTPCQQELDQVLERISTMRLPDERGPLEHLYSLHIPNCDKHGLYNLKQCKMSLNGQRGECWCVNPNTGKLIQGAPTIRGDPECHLFYNEQQEARGVHTQRMQ

SEQ ID NO: 866 - protein, 272 aa, Homo sapiens
MVLLTAVLLLLAAYAGPAQSLGSFVHCEPCDEKALSMCPPSPLGCELVKEPGCGCCMTCALAEGQSCGVYTERCAQGLRCLPRQDEEKPLHALLHGRGVCLNEKSYREQVKIERDSREHEEPTTSEMAEETYSPKIFRPKHTRISELKAEAVKKDRRKKLTQSKFVGGAENTAHPRIISAPEMRQESEQGPCRRHMEASLQELKASPRMVPRAVYLPNCDRKGFYKRKQCKPSRGRKRGICWCVDKYGMKLPGMEYVDGDFQCHTFDSSNVE

SEQ ID NO: 867 - protein, 758 aa, Homo sapiens
MAVSAGSARTSPSSDKVQKDKAELISGPRQDSRIGKLLGFEWTDLSSWRRLVTLLNRPTDPASLAVFRFLFGFLMVLDIPQERGLSSLDRKYLDGLDVCRFPLLDALRPLPLDWMYLVYTIMFLGALGMMLGLCYRISCVLFLLPYWYVFLLDKTSWNNHSYLYGLLAFQLTFMDANHYWSVDGLLNAHRRNAHVPLWNYAVLRGQIFIVYFIAGVKKLDADWVEGYSMEYLSRHWLFSPFKLLLSEELTSLLVVHWGGLLLDLSAGFLLFFDVSRSIGLFFVSYFHCMNSQLFSIGMFSYVMLASSPLFCSPEWPRKLVSYCPRRLQQLLPLKAAPQPSVSCVYKRSRGKSGQKPGLRHQLGAAFTLLYLLEQLFLPYSHFLTQGYNNWTNGLYGYSWDMMVHSRSHQHVKITYRDGRTGELGYLNPGVFTQSRRWKDHADMLKQYATCLSRLLPKYNVTEPQIYFDIWVSINDRFQQRIFDPRVDIVQAAWSPFQRTSWVQPLLMDLSPWRAKLQEIKSSLDNHTEVVFIADFPGLHLENFVSEDLGNTSIQLLQGEVTVELVAEQKNQTLREGEKMQLPAGEYHKVYTTSPSPSCYMYVYVNTTELALEQDLAYLQELKEKVENGSETGPLPPELQPLLEGEVKGGPEPTPLVQTFLRRQQRLQEIERRRNTPFHERFFRFLLRKLYVFRRSFLMTCISLRNLILGRPSLEQLAQEVTYANLRPFEAVGELNPSNTDSSHSNPPESNPDPVHSEF

SEQ ID NO: 868 - protein, 193 aa, Homo sapiens
MDSTLAVQQYIQQNIRADCSNIDKILEPPEGQDEGVWKYEHLRQFCLELNGLAVKLQSECHPDTCTQMTATEQWIFLCAAHKTPKECPAIDYTRHTLDGAACLLNSNKYFPSRVSIKESSVAKLGSVCRRIYRIFSHAYFHHRQIFDEYENETFLCHRFTKFVMKYNLMSKDNLIVPILEEEVQNSVSGESEA

SEQ ID NO: 869 - protein, 102 aa, Homo sapiens
MAGQAFRKFLPLFDRVLVERSAAETVTKGGIMLPEKSQGKVLQATVVAVGSGSKGKGGEIQPVSVKVGDKVLLPEYGGTKVVLDDKDYFLFRDGDILGKYVD

SEQ ID NO: 870 - protein, 365 aa, Homo sapiens
MLPPLPSRLGLLLLLLLCPAHVGGLWWAVGSPLVMDPTSICRKARRLAGRQAELCQAEPEVVAELARGARLGVRECQFQFRFRRWNCSSHSKAFGRILQQDIRETAFVFAITAAGASHAVTQACSMGELLQCGCQAPRGRAPPRPSGLPGTPGPPGPAGSPEGSAAWEWGGCGDDVDFGDEKSRLFMDARHKRGRGDIRALVQLHNNEAGRLAVRSHTRTECKCHGLSGSCALRTCWQKLPPFREVGARLLERFHGASRVMGTNDGKALLPAVRTLKPPGRADLLYAADSPDFCAPNRRTGSPGTRGRACNSSAPDLSGCDLLCCGRGHRQESVQLEENCLCRFHWCCVVQCHRCRVRKELSLCL

SEQ ID NO: 871 - protein, 556 aa, Homo sapiens
MGFWILAILTILMYSTAAKFSKQSWGLENEALIVRCPRQGKPSYTVDWYYSQTNKSIPTQERNRVFASGQLLKFLPAAVADSGIYTCIVRSPTFNRTGYANVTIYKKQSDCNVPDYLMYSTVSGSEKNSKIYCPTIDLYNWTAPLEWFKNCQALQGSRYRAHKSFLVIDNVMTEDAGDYTCKFIHNENGANYSVTATRSFTVKDEQGFSLFPVIGAPAQNEIKEVEIGKNANLTCSACFGKGTQFLAAVLWQLNGTKITDFGEPRIQQEEGQNQSFSNGLACLDMVLRIADVKEEDLLLQYDCLALNLHGLRRHTVRLSRKNPIDHHSIYCIIAVCSVFLMLINVLVIILKMFWIEATLLWRDIAKPYKTRNDGKLYDAYVVYPRNYKSSTDGASRVEHFVHQILPDVLENKCGYTLCIYGRDMLPGEDVVTAVETNIRKSRRHIFILTPQITHNKEFAYEQEVALHCALIQNDAKVILIEMEALSELDMLQAEALQDSLQHLMKVQGTIKWREDHIANKRSLNSKFWKHVRYQMPVPSKIPRKASSLTPLAAQKQ

SEQ ID NO: 872 - protein, 541 aa, Homo sapiens
MNCRELPLTLWVLISVSTAESCTSRPHITVVEGEPFYLKHCSCSLAHEIETTTKSWYKSSGSQEHVELNPRSSSRIALHDCVLEFWPVELNDTGSYFFQMKNYTQKWKLNVIRRNKHSCFTERQVTSKIVEVKKFFQITCENSYYQTLVNSTSLYKNCKKLLLENNKNPTIKKNAEFEDQGYYSCVHFLHHNGKLFNITKTFNITIVEDRSNIVPVLLGPKLNHVAVELGKNVRLNCSALLNEEDVIYWMFGEENGSDPNIHEEKEMRIMTPEGKWHASKVLRIENIGESNLNVLYNCTVASTGGTDTKSFILVRKADMADIPGHVFTRGMIIAVLILVAVVCLVTVCVIYRVDLVLFYRHLTRRDETLTDGKTYDAFVSYLKECRPENGEEHTFAVEILPRVLEKHFGYKLCIFERDVVPGGAVVDEIHSLIEKSRRLIIVLSKSYMSNEVRYELESGLHEALVERKIKIILIEFTPVTDFTFLPQSLKLLKSHRVLKWKADKSLSYNSRFWKNLLYLMPAKTVKPGRDEPEVLPVLSES

SEQ ID NO: 873 - protein, 251 aa, Homo sapiens
MTRLTVLALLAGLLASSRAGSSPLLDIVGGRKARPRQFPFLASIQNQGRHFCGGALIHARFVMTAASCFQSQNPGVSTVVLGAYDLRRRERQSRQTFSISSMSENGYDPQQNLNDLMLLQLDREANLTSSVTILPLPLQNATVEAGTRCQVAGWGSQRSGGRLSRFPRFVNVTVTPEDQCRPNNVCTGVLTRRGGICNGDGGTPLVCEGLAHGVASFSLGPCGRGPDFFTRVALFRDWIDGVLNNPGPGPA

SEQ ID NO: 874 - protein, 360 aa, Homo sapiens
MAAERGAGQQQSQEMMEVDRRVESEESGDEEGKKHSSGIVADLSEQSLKDGEERGEEDPEEEHELPVDMETINLDRDAEDVDLNHYRIGKIEGFEVLKKVKTLCLRQNLIKCIENLEELQSLRELDLYDNQIKKIENLEALTELEILDISFNLLRNIEGVDKLTRLKKLFLVNNKISKIENLSNLHQLQMLELGSNRIRAIENIDTLTNLESLFLGKNKITKLQNLDALTNLTVLSMQSNRLTKIEGLQNLVNLRELYLSHNGIEVIEGLENNNKLTMLDIASNRIKKIENISHLTELQEFWMNDNLLESWSDLDELKGARSLETVYLERNPLQKDPQYRRKVMLALPSVRQIDATFVRF

SEQ ID NO: 875 - protein, 461 aa, Homo sapiens
MWQLTSLLLFVATWGISGTPAPLDSVFSSSERAHQVLRIRKRANSFLEELRHSSLERECIEEICDFEEAKEIFQNVDDTLAFWSKHVDGDQCLVLPLEHPCASLCCGHGTCIDGIGSFSCDCRSGWEGRFCQREVSFLNCSLDNGGCTHYCLEEVGWRRCSCAPGYKLGDDLLQCHPAVKFPCGRPWKRMEKKRSHLKRDTEDQEDQVDPRLIDGKMTRRGDSPWQVVLLDSKKKLACGAVLIHPSWVLTAAHCMDESKKLLVRLGEYDLRRWEKWELDLDIKEVFVHPNYSKSTTDNDIALLHLAQPATLSQTIVPICLPDSGLAERELNQAGQETLVTGWGYHSSREKEAKRNRTFVLNFIKIPVVPHNECSEVMSNMVSENMLCAGILGDRQDACEGDSGGPMVASFHGTWFLVGLVSWGEGCGLLHNYGVYTKVSRYLDWIHGHIRDKEAPQKSWAP

SEQ ID NO: 876 - protein, 134 aa, Homo sapiens
MKAFSPVRSVRKNSLSDHSLGISRSKTPVDDPMSLLYNMNDCYSKLKELVPSIPQNKKVSKMEILQHVIDYILDLQIALDSHPTIVSLHHQRPGQNQASRTPLTTLNTDISILSLQASEFPSELMSNDSKALCG

SEQ ID NO: 877 - protein, 461 aa, Homo sapiens
MNNFGNEEFDCHFLDEGFTAKDILDQKINEVSSSDDKDAFYVADLGDILKKHLRWLKALPRVTPFYAVKCNDSKAIVKTLAATGTGFDCASKTEIQLVQSLGVPPERIIYANPCKQVSQIKYAANNGVQMMTFDSEVELMKVARAHPKAKLVLRIATDDSKAVCRLSVKFGATLRTSRLLLERAKELNIDVVGVSFHVGSGCTDPETFVQAISDARCVFDMGAEVGFSMYLLDIGGGFPGSEDVKLKFEEITGVINPALDKYFPSDSGVRIIAEPGRYYVASAFTLAVNIIAKKIVLKEQTGSDDEDESSEQTFMYYVNDGVYGSFNCILYDHAHVKPLLQKRPKPDEKYYSSSIWGPTCDGLDRIVERCDLPEMHVGDWMLFENMGAYTVAAASTFNGFQRPTIYYVMSGPAWQLMQQFQNPDFPPEVEEQDASTLPVSCAWESGMKRHRAACASASINV

SEQ ID NO: 878 - protein, 452 aa, Homo sapiens
MGSSQSVEIPGGGTEGYHVLRVQENSPGHRAGLEPFFDFIVSINGSRLNKDNDTLKDLLKANVEKPVKMLIYSSKTLELRETSVTPSNLWGGQGLLGVSIRFCSFDGANENVWHVLEVESNSPAALAGLRPHSDYIIGADTVMNESEDLFSLIETHEAKPLKLYVYNTDTDNCREVIITPNSAWGGEGSLGCGIGYGYLHRIPTRPFEEGKKISLPGQMAGTPITPLKDGFTEVQLSSVNPPSLSPPGTTGIEQSLTGLSISSTPPAVSSVLSTGVPTVPLLPPQVNQSLTSVPPMNPATTLPGLMPLPAGLPNLPNLNLNLPAPHIMPGVGLPELVNPGLPPLPSMPPRNLPGIAPLPLPSEFLPSFPLVPESSSAASSGELLSSLPPTSNAPSDPATTTAKADAASSLTVDVTPPTAKAPTTVEDRVGDSTPVSEKPVSAAVDANASESP

SEQ ID NO: 879 - protein, 1054 aa, Homo sapiens
MAAVKEPLEFHAKRPWRPEEAVEDPDEEDEDNTSEAENGFSLEEVLRLGGTKQDYLMLATLDENEEVIDGGKKGAIDDLQQGELEAFIQNLNLAKYTKASLVEEDEPAEKENSSKKEVKIPKINNKNTAESQRTSVNKVKNKNRPEPHSDENGSTTPKVKKDKQNIFEFFERQTLLLRPGGKWYDLEYSNEYSLKPQPQDVVSKYKTLAQKLYQHEINLFKSKTNSQKGASSTWMKAIVSSGTLGDRMAAMILLIQDDAVHTLQFVETLVNLVKKKGSKQQCLMALDTFKELLITDLLPDNRKLRIFSQRPFDKLEQLSSGNKDSRDRRLILWYFEHQLKHLVAEFVQVLETLSHDTLVTTKTRALTVAHELLCNKPEEEKALLVQVVNKLGDPQNRIATKASHLLETLLCKHPNMKGVVSGEVERLLFRSNISSKAQYYAICFLNQMALSHEESELANKLITVYFCFFRTCVKKKDVESKMLSALLTGVNRAYPYSQTGDDKVREQIDTLFKVLHIVNFNTSVQALMLLFQVMNSQQTISDRYYTALYRKMLDPGLMTCSKQAMFLNLVYKSLKADIVLRRVKAFVKRLLQVTCQQMPPFICGALYLVSEILKAKPGLRSQLDDHPESDDEENFIDANDDEDMEKFTDADKETEIVKKLETEETVPETDVETKKPEVASWVHFDNLKGGKQLNKYDPFSRNPLFCGAENTSLWELKKLSVHFHPSVALFAKTILQGNYIQYSGDPLQDFTLMRFLDRFVYRNPKPHKGKENTDSVVMQPKRKHFIKDIRHLPVNSKEFLAKEESQIPVDEVFFHRYYKKVAVKEKQKRDADEESIEDVDDEEFEELIDTFEDDNCFSSGKDDMDFAGNVKKRTKGAKDNTLDEDSEGSDDELGNLDDDEVSLGSMDDEEFAEVDEDGGTFMDVLDDESESVPELEVHSKVSTKKSKRKGTDDFDFAGSFQGPRKKKRNLNDSSLFVSAEEFGHLLDENMGSKFDNIGMNAMANKDNASLKQLRWEAERDDWLHNRDAKSIIKKKKHFKKKRIKTTQKTKKQRK

SEQ ID NO: 880 - protein, 890 aa, Homo sapiens
MSANNSPPSAQKSVLPTAIPAVLPAASPCSSPKTGLSARLSNGSFSAPSLTNSRGSVHTVSFLLQIGLTRESVTIEAQELSLSAVKDLVCSIVYQKFPECGFFGMYDKILLFRHDMNSENILQLITSADEIHEGDLVEVVLSALATVEDFQIRPHTLYVHSYKAPTFCDYCGEMLWGLVRQGLKCEGCGLNYHKRCAFKIPNNCSGVRKRRLSNVSLPGPGLSVPRPLQPEYVALPSEESHVHQEPSKRIPSWSGRPIWMEKMVMCRVKVPHTFAVHSYTRPTICQYCKRLLKGLFRQGMQCKDCKFNCHKRCASKVPRDCLGEVTFNGEPSSLGTDTDIPMDIDNNDINSDSSRGLDDTEEPSPPEDKMFFLDPSDLDVERDEEAVKTISPSTSNNIPLMRVVQSIKHTKRKSSTMVKEGWMVHYTSRDNLRKRHYWRLDSKCLTLFQNESGSKYYKEIPLSEILRISSPRDFTNISQGSNPHCFEIITDTMVYFVGENNGDSSHNPVLAATGVGLDVAQSWEKAIRQALMPVTPQASVCTSPGQGKDHKDLSTSISVSNCQIQENVDISTVYQIFADEVLGSGQFGIVYGGKHRKTGRDVAIKVIDKMRFPTKQESQLRNEVAILQNLHHPGIVNLECMFETPERVFVVMEKLHGDMLEMILSSEKSRLPERITKFMVTQILVALRNLHFKNIVHCDLKPENVLLASAEPFPQVKLCDFGFARIIGEKSFRRSVVGTPAYLAPEVLRSKGYNRSLDMWSVGVIIYVSLSGTFPFNEDEDINDQIQNAAFMYPPNPWREISGEAIDLINNLLQVKMRKRYSVDKSLSHPWLQDYQTWLDLREFETRIGERYITHESDDARWEIHAYTHNLVYPKHFIMAPNPDDMEEDP

SEQ ID NO: 881 - protein, 532 aa, Homo sapiens
MEKSNETNGYLDSAQAGPAAGPGAPGTAAGRARRCAGFLRRQALVLLTVSGVLAGAGLGAALRGLSLSRTQVTYLAFPGEMLLRMLRMIILPLVVCSLVSGAASLDASCLGRLGGIAVAYFGLTTLSASALAVALAFIIKPGSGAQTLQSSDLGLEDSGPPPVPKETVDSFLDLARNLFPSNLVVAAFRTYATDYKVVTQNSSSGNVTHEKIPIGTEIEGMNILGLVLFALVLGVALKKLGSEGEDLIRFFNSLNEATMVLVSWIMWYVPVGIMFLVGSKIVEMKDIIVLVTSLGKYIFASILGHVIHGGIVLPLIYFVFTRKNPFRFLLGLLAPFATAFATCSSSATLPSMMKCIEENNGVDKRISRFILPIGATVNMDGAAIFQCVAAVFIAQLNNVELNAGQIFTILVTATASSVGAAGVPAGGVLTIAIILEAIGLPTHDLPLILAVDWIVDRTTTVVNVEGDALGAGILHHLNQKATKKGEQELAEVKVEAIPNCKSEEETSPLVTHQNPAGPVASAPELESKESVL

SEQ ID NO: 882 - protein, 577 aa, Homo sapiens
MSKPELKEDKMLEVHFVGDDDVLNHILDREGGAKLKKERAQLLVNPKKIIKKPEYDLEEDDQEVLKDQNYVEIMGRDVQESLKNGSATGGGNKVYSFQNRKHSEKMAKLASELAKTPQKSVSFSLKNDPEITINVPQSSKGHSASDKVQPKNNDKSEFLSTAPRSLRKRLIVPRSHSDSESEYSASNSEDDEGVAQEHEEDTNAVIFSQKIQAQNRVVSAPVGKETPSKRMKRDKTSDLVEEYFEAHSSSKVLTSDRTLQKLKRAKLDQQTLRNLLSKVSPSFSAELKQLNQQYEKLFHKWMLQLHLGFNIVLYGLGSKRDLLERFRTTMLQDSIHVVINGFFPGISVKSVLNSITEEVLDHMGTFRSILDQLDWIVNKFKEDSSLELFLLIHNLDSQMLRGEKSQQIIGQLSSLHNIYLIASIDHLNAPLMWDHAKQSLFNWLWYETTTYSPYTEETSYENSLLVKQSGSLPLSSLTHVLRSLTPNARGIFRLLIKYQLDNQDNPSYIGLSFQDFYQQCREAFLVNSDLTLRAQLTEFRDHKLIRTKKGTDGVEYLLIPVDNGTLTDFLEKEEEEA

SEQ ID NO: 883 - protein, 114 aa, Homo sapiens
MYYKFSGFTQKLAGAWASEAYSPQGLKPVVSTEAPPIIFATPTKLTSDSTVYDYAGKNKVPELQKFFQKADGVPVYLKRGLPDQMLYRTTMALTVGGTIYCLIALYMASQPKNK

SEQ ID NO: 884 - protein, 170 aa, Homo sapiens
MGNEASYPLEMCSHFDADEIKRLGKRFKKLDLDNSGSLSVEEFMSLPELQQNPLVQRVIDIFDTDGNGEVDFKEFIEGVSQFSVKGDKEQKLRFAFRIYDMDKDGYISNGELFQVLKMMVGNNLKDTQLQQIVDKTIINADKDGDGRISFEEFCAVVGGLDIHKKMVVDV

SEQ ID NO: 885 - protein, 256 aa, Homo sapiens
MAHRPPSPALASVLLALLLSGAARAAEIVGGHEAQPHSRPYMASLQMRGNPGSHFCGGTLIHPSFVLTAAHCLRDIPQRLVNVVLGAHNVRTQEPTQQHFSVAQVFLNNYDAENKLNDVLLIQLSSPANLSASVATVQLPQQDQPVPHGTQCLAMGWGRVGAHDPPAQVLQELNVTVVTFFCRPHNICTFVPRRKAGICFGDSGGPLICDGIIQGIDSFVIWGCATRLFPDFFTRVALYVDWIRSTLRRVEAKGRP

SEQ ID NO: 886 - protein, 1043 aa, Homo sapiens
MEFVRALWLGLALALGPGSAGGHPQPCGVLARLGGSVRLGALLPRAPLARARARAALARAALAPRLPHNLSLELVVAAPPARDPASLTRGLCQALVPPGVAALLAFPEARPELLQLHFLAAATETPVLSLLRREARAPLGAPNPFHLQLHWASPLETLLDVLVAVLQAHAWEDVGLALCRTQDPGGLVALWTSRAGRPPQLVLDLSRRDTGDAGLRARLAPMAAPVGGEAPVPAAVLLGCDIARARRVLEAVPPGPHWLLGTPLPPKALPTAGLPPGLLALGEVARPPLEAAIHDIVQLVARALGSAAQVQPKRALLPAPVNCGDLQPAGPESPGRFLARFLANTSFQGRTGPVWVTGSSQVHMSRHFKVWSLRRDPRGAPAWATVGSWRDGQLDLEPGGASARPPPPQGAQVWPKLRVVTLLEHPFVFARDPDEDGQCPAGQLCLDPGTNDSATLDALFAALANGSAPRALRKCCYGYCIDLLERLAEDTPFDFELYLVGDGKYGALRDGRWTGLVGDLLAGRAHMAVTSFSINSARSQVVDFTSPFFSTSLGIMVRARDTASPIGAFMWPLHWSTWLGVFAALHLTALFLTVYEWRSPYGLTPRGRNRSTVFSYSSALNLCYAILFRRTVSSKTPKCPTGRLLMNLWAIFCLLVLSSYTANLAAVMVGDKTFEELSGIHDPKLHHPAQGFRFGTVWESSAEAYIKKSFPDMHAHMRRHSAPTTPRGVAMLTSDPPKLNAFIMDKSLLDYEVSIDADCKLLTVGKPFAIEGYGIGLPQNSPLTSNLSEFISRYKSSGFIDLLHDKWYKMVPCGKRVFAVTETLQMSIYHFAGLFVLLCLGLGSALLSSLGEHAFFRLALPRIRKGSRLQYWLHTSQKIHRALNTEPPEGSKEETAEAEPSGPEVEQQQQQQDQPTAPEGWKRARRAVDKERRVRFLLEPAVVVAPEADAEAEAAPREGPVWLCSYGRPPAARPTGAPQPGELQELERRIEVARERLRQALVRRGQLLAQLGDSARHRPRRLLQARAAPAEAPPHSGRPGSQE

SEQ ID NO: 887 - protein, 1360 aa, Homo sapiens
MSRQSTLYSFFPKSPALSDANKASARASREGGRAAAAPGASPSPGGDAAWSEAGPGPRPLARSASPPKAKNLNGGLRRSVAPAAPTSCDFSPGDLVWAKMEGYPWWPCLVYNHPFDGTFIREKGKSVRVHVQFFDDSPTRGWVSKRLLKPYTGSKSKEAQKGGHFYSAKPEILRAMQRADEALNKDKIKRLELAVCDEPSEPEEEEEMEVGTTYVTDKSEEDNEIESEEEVQPKTQGSRRSSRQIKKRRVISDSESDIGGSDVEFKPDTKEEGSSDEISSGVGDSESEGLNSPVKVARKRKRMVTGNGSLKRKSSRKETPSATKQATSISSETKNTLRAFSAPQNSESQAHVSGGGDDSSRPTVWYHETLEWLKEEKRRDEHRRRPDHPDFDASTLYVPEDFLNSCTPGMRKWWQIKSQNFDLVICYKVGKFYELYHMDALIGVSELGLVFMKGNWAHSGFPEIAFGRYSDSLVQKGYKVARVEQTETPEMMEARCRKMAHISKYDRVVRREICRIITKGTQTYSVLEGDPSENYSKYLLSLKEKEEDSSGHTRAYGVCFVDTSLGKFFIGQFSDDRHCSRFRTLVAHYPPVQVLFEKGNLSKETKTILKSSLSCSLQEGLIPGSQFWDASKTLRTLLEEEYFREKLSDGIGVMLPQVLKGMTSESDSIGLTPGEKSELALSALGGCVFYLKKCLIDQELLSMANFEEYIPLDSDTVSTTRSGAIFTKAYQRMVLDAVTLNNLEIFLNGTNGSTEGTLLERVDTCHTPFGKRLLKQWLCAPLCNHYAINDRLDAIEDLMVVPDKISEVVELLKKLPDLERLLSKIHNVGSPLKSQNHPDSRAIMYEETTYSKKKIIDFLSALEGFKVMCKIIGIMEEVADGFKSKILKQVISLQTKNPEGRFPDLTVELNRWDTAFDHEKARKTGLITPKAGFDSDYDQALADIRENEQSLLEYLEKQRNRIGCRTIVYWGIGRNRYQLEIPENFTTRNLPEEYELKSTKKGCKRYWTKTIEKKLANLINAEERRDVSLKDCMRRLFYNFDKNYKDWQSAVECIAVLDVLLCLANYSRGGDGPMCRPVILLPEDTPPFLELKGSRHPCITKTFFGDDFIPNDILIGCEEEEQENGKAYCVLVTGPNMGGKSTLMRQAGLLAVMAQMGCYVPAEVCRLTPIDRVFTRLGASDRIMSGESTFFVELSETASILMHATAHSLVLVDELGRGTATFDGTAIANAVVKELAETIKCRTLFSTHYHSLVEDYSQNVAVRLGHMACMVENECEDPSQETITFLYKFIKGACPKSYGFNAARLANLPEEVIQKGHRKAREFEKMNQSLRLFREVCLASERSTVDAEAVHKLLTLIKEL

SEQ ID NO: 888 - protein, 300 aa, Homo sapiens
MEGVLYKWTNYLTGWQPRWFVLDNGILSYYDSQDDVCKGSKGSIKMAVCEIKVHSADNTRMELIIPGEQHFYMKAVNAAERQRWLVALGSSKACLTDTRTKKEKEISETSESLKTKMSELRLYCDLLMQQVHTIQEFVHHDENHSSPSAENMNEASSLLSATCNTFITTLEECVKIANAKFKPEMFQLHHPDPLVSPVSPSPVQMMKRSVSHPGSCSSERSSHSIKEPVSTLHRLSQRRRRTYSDTDSCSDIPLEDPDRPVHCSKNTLNGDLASATIPEESRLMAKKQSESEDTLPSFSS

SEQ ID NO: 889 - protein, 261 aa, Homo sapiens
MEGGLGRAVCLLTGASRGFGRTLAPLLASLLSPGSVLVLSARNDEALRQLEAELGAERSGLRVVRVPADLGAEAGLQQLLGALRELPRPKGLQRLLLINNAGSLGDVSKGFVDLSDSTQVNNYWALNLTSMLCLTSSVLKAFPDSPGLNRTVVNISSLCALQPFKGWALYCAGKAARDMLFQVLALEEPNVRVLNYAPGPLDTDMQQLARETSVDPDMRKGLQELKAKGKLVDCKVSAQKLLSLLEKDEFKSGAHVDFYDK

SEQ ID NO: 890 - protein, 869 aa, Homo sapiens
MAGCRGSLCCCCRWCCCCGERETRTPEELTILGETQEEEDEILPRKDYESLDYDRCINDPYLEVLETMDNKKGRRYEAVKWMVVFAIGVCTGLVGLFVDFFVRLFTQLKFGVVQTSVEECSQKGCLALSLLELLGFNLTFVFLASLLVLIEPVAAGSGIPEVKCYLNGVKVPGIVRLRTLLCKVLGVLFSVAGGLFVEKEGPMIHSGSVVGAGLPQFQSISLRKIQFNFPYFRSDRDKRDFVSAGAAAGVAAAFGAPIGGTLFSLEEGSSFWNQGLTWKVLFCSMSATFTLNFFRSGIQFGSWGSFQLPGLLNFGEFKCSDSDKKCHLWTAMDLGFFVVMGVIGGLLGATFNCLNKRLAKYRMRNVHPKPKLVRVLESLLVSLVTTVVVFVASMVLGECRQMSSSSQIGNDSFQLQVTEDVNSSIKTFFCPNDTYNDMATLFFNPQESAILQLFHQDGTFSPVTLALFFVLYFLLACWTYGISVPSGLFVPSLLCGAAFGRLVANVLKSYIGLGHIYSGTFALIGAAAFLGGVVRMTISLTVILIESTNEITYGLPIMVTLMVAKWTGDFFNKGIYDIHVGLRGVPLLEWETEVEMDKLRASDIMEPNLTYVYPHTRIQSLVSILRTTVHHAFPVVTENRGNEKEFMKGNQLISNNIKFKKSSILTRAGEQRKRSQSMKSYPSSELRNMCDEHIASEEPAEKEDLLQQMLERRYTPYPNLYPDQSPSEDWTMEERFRPLTFHGLILRSQLVTLLVRGVCYSESQSSASQPRLSYAEMAEDYPRYPDIHDLDLTLLNPRMIVDVTPYMNPSPFTVSPNTHVSQVFNLFRTMGLRHLPVVNAVGEIVGIITRHNLTYEFLQARLRQHYQTI

SEQ ID NO: 891 - protein, 434 aa, Homo sapiens
MSILKIHAREIFDSRGNPTVEVDLFTSKGLFRAAVPSGASTGIYEALELRDNDKTRYMGKGVSKAVEHINKTIAPALVSKKLNVTEQEKIDKLMIEMDGTENKSKFGANAILGVSLAVCKAGAVEKGVPLYRHIADLAGNSEVILPVPAFNVINGGSHAGNKLAMQEFMILPVGAANFREAMRIGAEVYHNLKNVIKEKYGKDATNVGDEGGFAPNILENKEGLELLKTAIGKAGYTDKVVIGMDVAASEFFRSGKYDLDFKSPDDPSRYISPDQLADLYKSFIKDYPVVSIEDPFDQDDWGAWQKFTASAGIQVVGDDLTVTNPKRIAKAVNEKSCNCLLLKVNQIGSVTESLQACKLAQANGWGVMVSHRSGETEDTFIADLVVGLCTGQIKTGAPCRSERLAKYNQLLRIEEELGSKAKFAGRNFRNPLAK

SEQ ID NO: 892 - protein, 574 aa, Homo sapiens
MEASLGIQMDEPMAFSPQRDRFQAEGSLKKNEQNFKLAGVKKDIEKLYEAVPQLSNVFKIEDKIGEGTFSSVYLATAQLQVGPEEKIALKHLIPTSHPIRIAAELQCLTVAGGQDNVMGVKYCFRKNDHVVIAMPYLEHESFLDILNSLSFQEVREYMLNLFKALKRIHQFGIVHRDVKPSNFLYNRRLKKYALVDFGLAQGTHDTKIELLKFVQSEAQQERCSQNKSHIITGNKIPLSGPVPKELDQQSTTKASVKRPYTNAQIQIKQGKDGKEGSVGLSVQRSVFGERNFNIHSSISHESPAVKLMKQSKTVDVLSRKLATKKKAISTKVMNSAVMRKTASSCPASLTCDCYATDKVCSICLSRRQQVAPRAGTPGFRAPEVLTKCPNQTTAIDMWSAGVIFLSLLSGRYPFYKASDDLTALAQIMTIRGSRETIQAAKTFGKSILCSKEVPAQDLRKLCERLRGMDSSTPKLTSDIQGHASHQPAISEKTDHKASCLVQTPPGQYSGNSFKKGDSNSCEHCFDEYNTNLEGWNEVPDEAYDLLDKLLDLNPASRITAEEALLHPFFKDMSL

SEQ ID NO: 893 - protein, 514 aa, Homo sapiens
MVLDLDLFRVDKGGDPALIRETQEKRFKDPGLVDQLVKADSEWRRCRFRADNLNKLKNLCSKTIGEKMKKKEPVGDDESVPENVLSFDDLTADALANLKVSQIKKVRLLIDEAILKCDAERIKLEAERFENLREIGNLLHPSVPISNDEDVDNKVERIWGDCTVRKKYSHVDLVVMVDGFEGEKGAVVAGSRGYFLKGVLVFLEQALIQYALRTLGSRGYIPIYTPFFMRKEVMQEVAQLSQFDEELYKVIGKGSEKSDDNSYDEKYLIATSEQPIAALHRDEWLRPEDLPIKYAGLSTCFRQEVGSHGRDTRGIFRVHQFEKIEQFVYSSPHDNKSWEMFEEMITTAEEFYQSLGIPYHIVNIVSGSLNHAASKKLDLEAWFPGSGAFRELVSCSNCTDYQARRLRIRYGQTKKMMDKVEFVHMLNATMCATTRTICAILENYQTEKGITVPEKLKEFMPPGLQELIPFVKPAPIEQEPSKKQKKQHEGSKKKAAARDVTLENRLQNMEVTDA

SEQ ID NO: 894 - protein, 914 aa, Homo sapiens
MGPFKSSVFILILHLLEGALSNSLIQLNNNGYEGIVVAIDPNVPEDETLIQQIKDMVTQASLYLLEATGKRFYFKNVAILIPETWKTKADYVRPKLETYKNADVLVAESTPPGNDEPYTEQMGNCGEKGERIHLTPDFIAGKKLAEYGPQGRAFVHEWAHLRWGVFDEYNNDEKFYLSNGRIQAVRCSAGITGTNVVKKCQGGSCYTKRCTFNKVTGLYEKGCEFVLQSRQTEKASIMFAQHVDSIVEFCTEQNHNKEAPNKQNQKCNLRSTWEVIRDSEDFKKTTPMTTQPPNPTFSLLQIGQRIVCLVLDKSGSMATGNRLNRLNQAGQLFLLQTVELGSWVGMVTFDSAAHVQNELIQINSGSDRDTLAKRLPAAASGGTSICSGLRSAFTVIRKKYPTDGSEIVLLTDGEDNTISGCFNEVKQSGAIIHTVALGPSAAQELEELSKMTGGLQTYASDQVQNNGLIDAFGALSSGNGAVSQRSIQLESKGLTLQNSQWMNGTVIVDSTVGKDTLFLITWTMQPPQILLWDPSGQKQGGFVVDKNTKMAYLQIPGIAKVGTWKYSLQASSQTLTLTVTSRASNATLPPITVTSKTNKDTSKFPSPLVVYANIRQGASPILRASVTALIESVNGKTVTLELLDNGAGADATKDDGVYSRYFTTYDTNGRYSVKVRALGGVNAARRRVIPQQSGALYIPGWIENDEIQWNPPRPEINKDDVQHKQVCFSRTSSGGSFVASDVPNAPIPDLFPPGQITDLKAEIHGGSLINLTWTAPGDDYDHGTAHKYIIRISTSILDLRDKFNESLQVNTTALIPKEANSEEVFLFKPENITFENGTDLFIAIQAVDKVDLKSEISNIARVSLFIPPQTPPETPSPDETSAPCPNIHINSTIPGIHILKIMWKWIGELQLSIA

SEQ ID NO: 895 - protein, 1426 aa, Homo sapiens
MHSSNPKVRSSPSGNTQSSPKSKQEVMVRPPTVMSPSGNPQLDSKFSNQGKQGGSASQSQPSPCDSKSGGHTPKALPGPGGSMGLKNGAGNGAKGKGKRERSISADSFDQRDPGTPNDDSDIKECNSADHIKSQDSQHTPHSMTPSNATAPRSSTPSHGQTTATEPTPAQKTPAKVVYVFSTEMANKAAEAVLKGQVETIVSFHIQNISNNKTERSTAPLNTQISALRNDPKPLPQQPPAPANQDQNSSQNTRLQPTPPIPAPAPKPAAPPRPLDRESPGVENKLIPSVGSPASSTPLPPDGTGPNSTPNNRAVTPVSQGSNSSSADPKAPPPPPVSSGEPPTLGENPDGLSQEQLEHRERSLQTLRDIQRMLFPDEKEFTGAQSGGPQQNPGVLDGPQKKPEGPIQAMMAQSQSLGKGPGPRTDVGAPFGPQGHRDVPFSPDEMVPPSMNSQSGTIGPDHLDHMTPEQIAWLKLQQEFYEEKRRKQEQVVVQQCSLQDMMVHQHGPRGVVRGPPPPYQMTPSEGWAPGGTEPFSDGINMPHSLPPRGMAPHPNMPGSQMRLPGFAGMINSEMEGPNVPNPASRPGLSGVSWPDDVPKIPDGRNFPPGQGIFSGPGRGERFPNPQGLSEEMFQQQLAEKQLGLPPGMAMEGIRPSMEMNRMIPGSQRHMEPGNNPIFPRIPVEGPLSPSRGDFPKGIPPQMGPGRELEFGMVPSGMKGDVNLNVNMGSNSQMIPQKMREAGAGPEEMLKLRPGGSDMLPAQQKMVPLPFGEHPQQEYGMGPRPFLPMSQGPGSNSGLRNLREPIGPDQRTNSRLSHMPPLPLNPSSNPTSLNTAPPVQRGLGRKPLDISVAGSQVHSPGINPLKSPTMHQVQSPMLGSPSGNLKSPQTPSQLAGMLAGPAAAASIKSPPVLGSAAASPVHLKSPSLPAPSPGWTSSPKPPLQSPGIPPNHKAPLTMASPAMLGNVESGGPPPPTASQPASVNIPGSLPSSTPYTMPPEPTLSQNPLSIMMSRMSKFAMPSSTPLYHDAIKTVASSDDDSPPARSPNLPSMNNMPGMGINTQNPRISGPNPVVPMPTLSPMGMTQPLSHSNQMPSPNAVGPNIPPHGVPMGPGLMSHNPIMGHGSQEPPMVPQGRMGFPQGFPPVQSPPQQVPFPHNGPSGGQGSFPGGMGFPGEGPLGRPSNLPQSSADAALCKPGGPGGPDSFTVLGNSMPSVFTDPDLQEVIRPGATGIPEFDLSRIIPSEKPSQTLQYFPRGEVPGRKQPQGPGPGFSHMQGMMGEQAPRMGLALPGMGGPGPVGTPDIPLGTAPSMPGHNPMRPPAFLQQGMMGPHHRMMSPAQSTMPGQPTLMSNPAAAVGMIPGKDRGPAGLYTHPGPVGSPGMMMSMQGMMGPQQNIMIPPQMRPRGMAADVGMGGFSQGPGNPGNMMF

SEQ ID NO: 896 - protein, 321 aa, Homo sapiens
MALGACGLLLLLAVPGVSLRTLQPGCGRPQVSDAGGRIVGGHAAPAGAWPWQASLRLRRVHVCGGSLLSPQWVLTAAHCFSGSLNSSDYQVHLGELEITLSPHFSTVRQIILHSSPSGQPGTSGDIALVELSVPVTLSSRILPVCLPEASDDFCPGIRCWVTGWGYTREGEPLPPPYSLREVKVSVVDTETCRRDYPGPGGSILQPDMLCARGPGDACQDDSGGPLVCQVNGAWVQAGTVSWGEGCGRPNRPGVYTRVPAYVNWIRRHITASGGSESGYPRLPLLAGFFLPGLFLLLVSCVLLAKCLLHPSADGTPFPAPD

SEQ ID NO: 897 - protein, 491 aa, Homo sapiens
MKTFTWTLGVLFFLLVDTGHCRGGQFKIKKINQRRYPRATDGKEEAKKCAYTFLVPEQRITGPICVNTKGQDASTIKDMITRMDLENLKDVLSRQKREIDVLQLVVDVDGNIVNEVKLLRKESRNMNSRVTQLYMQLLHEIIRKRDNSLELSQLENKILNVTTEMLKMATRYRELEVKYASLTDLVNNQSVMITLLEEQCLRIFSRQDTHVSPPLVQVVPQHIPNSQQYTPGLLGGNEIQRDPGYPRDLMPPPDLATSPTKSPFKIPPVTFINEGPFKDCQQAKEAGHSVSGIYMIKPENSNGPMQLWCENSLDPGGWTVIQKRTDGSVNFFRNWENYKKGFGNIDGEYWLGLENIYMLSNQDNYKLLIELEDWSDKKVYAEYSSFRLEPESEFYRLRLGTYQGNAGDSMMWHNGKQFTTLDRDKDMYAGNCAHFHKGGWWYNACAHSNLNGVWYRGGHYRSKHQDGIFWAEYRGGSYSLRAVQMMIKPID

SEQ ID NO: 898 - protein, 208 aa, Homo sapiens
MDKFVIRTPRIQNSPQKKDSGGKVYKQATIESLKRVVVVEDIKRWKTMLELPDQTKENLVEALQELKKKIPSREVLKSTRIGHTVNKMRKHSDSEVASLAREVYTEWKTFTEKHSNRPSIEVRSDPKTESLRKNAQKLLSEALELKMDHLLVENIERETFHLCSRLINGPYRRTVRALVFTLKHRAEIRAQVKSGSLPVGTFVQTHKK

SEQ ID NO: 899 - protein, 323 aa, Homo sapiens
MAAPKGSLWVRTQLGLPPLLLLTMALAGGSGTASAEAFDSVLGDTASCHRACQLTYPLHTYPKEEELYACQRGCRLFSICQFVDDGIDLNRTKLECESACTEAYSQSDEQYACHLGCQNQLPFAELRQEQLMSLMPKMHLLFPLTLVRSFWSDMMDSAQSFITSSWTFYLQADDGKIVIFQSKPEIQYAPHLEQEPTNLRESSLSKMSYLQMRNSQAHRNFLEDGESDGFLRCLSLNSGWILTTTLVLSVMVLLWICCATVATAVEQYVPSEKLSIYGDLEFMNEQKLNRYPASSLVVVRSKTEDHEEAGPLPTKVNLAHSEI

SEQ ID NO: 900 - protein, 181 aa, Homo sapiens
MPMILGYWDIRGLAHAIRLLLEYTDSSYEEKKYTMGDAPDYDRSQWLNEKFKLGLDFPNLPYLIDGAHKITQSNAILCYIARKHNLCGETEEEKIRVDILENQTMDNHMQLGMICYNPEFEKLKPKYLEELPEKLKLYSEFLGKRPWFAGNKGLEKISAYMKSSRFLPRPVFSKMAVWGNK

SEQ ID NO: 901 - protein, 342 aa, Homo sapiens
MRKETPPPLVPPAAREWNLPPNAPACMERQLEAARYRSDGALLLGASSLSGRCWAGSLWLFKDPCAAPNEGFCSAGVQTEAGVADLTWVGERGILVASDSGAVELWELDENETLIVSKFCKYEHDDIVSTVSVLSSGTQAVSGSKDICIKVWDLAQQVVLSSYRAHAAQVTCVAASPHKDSVFLSCSEDNRILLWDTRCPKPASQIGCSAPGYLPTSLAWHPQQSEVFVFGDENGTVSLVDTKSTSCVLSSAVHSQCVTGLVFSPHSVPFLASLSEDCSLAVLDSSLSELFRSQAHRDFVRDATWSPLNHSLLTTVGWDHQVVHHVVPTEPLPAPGPASVTE

SEQ ID NO: 902 - protein, 731 aa, Homo sapiens
MGSEKDSESPRSTSLHAAAPDPKCRSGGRRRRLTLHSVFSASARGRRARAKPQAEPPPPAAQPPPAPAPAAAQGPPPEALPAEPAAEAEAEAAAAAAEPGFDDEEAAEGGGPGAEEVECPLCLVRLPPERAPRLLSCPHRSCRDCLRHYLRLEISESRVPISCPECSERLNPHDIRLLLADPPLMHKYEEFMLRRYLASDPDCRWCPAPDCGYAVIAYGCASCPKLTCEREGCQTEFCYHCKQIWHPNQTCDMARQQRAQTLRVRTKHTSGLSYGQESGPDDIKPCPRCSAYIIKMNDGSCNHMTCAVCGCEFCWLCMKEISDLHYLSPSGCTFWGKKPWSRKKKILWQLGTLIGAPVGISLIAGIAIPAMVIGIPVYVGRKIHSRYEGRKTSKHKRNLAITGGVTLSVIASPVIAAVSVGIGVPIMLAYVYGVVPISLCRGGGCGVSTANGKGVKIEFDEDDGPITVADAWRALKNPSIGESSIEGLTSVLSTSGSPTDGLSVMQGPYSETASFAALSGGTLSGGILSSGKGKYSRLEVQADVQKEIFPKDTASLGAISDNASTRAMAGSIISSYNPQDRECNNMEIQVDIEAKPSHYQLVSGSSTEDSLHVHAQMAENEEEGSGGGGSEEDPPCRHQSCEQKDCLASKPWDISLAQPESIRSDLESSDAQSDDVPDITSDECGSPRSHTAACPSTPRAQGAPSPSAHMNLSALAEGQTVLKPEGGEARV

SEQ ID NO: 903 - protein, 121 aa, Homo sapiens
MGCASAKHVATVQNEEEAQKGKNYQNGDVFGDEYRIKPVEEVKYMKNGAEEEQKIAARNQENLEKSASSNVRLKTNKEVPGLVHQPRANMHISESQQEFFRMLDEKIEKGRDYCSEEEDIT

SEQ ID NO: 904 - protein, 211 aa, Homo sapiens
MTTLTRQDLNFGQVVADVLCEFLEVAVHLILYVREVYPVGIFQKRKKYNVPVQMSCHPELNQYIQDTLHCVKPLLEKNDVEKVVVVILDKEHRPVEKFVFEITQPPLLSISSDSLLSHVEQLLRAFILKISVCDAVLDHNPPGCTFTVLVHTREAATRNMEKIQVIKDFPWILADEQDVHMHDPRLIPLKTMTSDILKMQLYVEERAHKGS

SEQ ID NO: 905 - protein, 757 aa, Homo sapiens
MSLLFSRCNSIVTVKKNKRHMAEVNASPLKHFVTAKKKINGIFEQLGAYIQESATFLEDTYRNAELDPVTTEEQVLDVKGYLSKVRGISEVLARRHMKVAFFGRTSNGKSTVINAMLWDKVLPSGIGHTTNCFLRVEGTDGHEAFLLTEGSEEKRSAKTVNQLAHALHQDKQLHAGSLVSVMWPNSKCPLLKDDLVLMDSPGIDVTTELDSWIDKFCLDADVFVLVANSESTLMQTEKHFFHKVSERLSRPNIFILNNRWDASASEPEYMEEVRRQHMERCTSFLVDELGVVDRSQAGDRIFFVSAKEVLNARIQKAQGMPEGGGALAEGFQVRMFEFQNFERRFEECISQSAVKTKFEQHTVRAKQIAEAVRLIMDSLHMAAREQQVYCEEMREERQDRLKFIDKQLELLAQDYKLRIKQITEEVERQVSTAMAEEIRRLSVLVDDYQMDFHPSPVVLKVYKNELHRHIEEGLGRNMSDRCSTAITNSLQTMQQDMIDGLKPLLPVSVRSQIDMLVPRQCFSLNYDLNCDKLCADFQEDIEFHFSLGWTMLVNRFLGPKNSRRALMGYNDQVQRPIPLTPANPSMPPLPQGSLTQEEFMVSMVTGLASLTSRTSMGILVVGGVVWKAVGWRLIALSFGLYGLLYVYERLTWTTKAKERAFKRQFVEHASEKLQLVISYTGSNCSHQVQQELSGTFAHLCQQVDVTRENLEQEIAAMNKKIEVLDSLQSKAKLLRNKAGWLDSELNMFTHQYLQPSR

SEQ ID NO: 906 - protein, 388 aa, Homo sapiens
MVEAEELAQLRLLNLELLRQLWVGQDAVRRSVARAASESSLESSSSYNSETPSTPETSSTSLSTSCPRGRSSVWGPPDACRGDLRDVARSGVASLPPAKCQHQESLGRPRPHSAPSLGTSSLRDPEPSGRLGDPGPQEAQTPRSILAQQSKLSKPRVTFSEESAVPKRSWRLRPYLGYDWIAGSLDTSSSITSQPEAFFSKLQEFRETNKEECICSHPEPQLPGLRESSGSGVEEDHECVYCYRVNRRLFPVPVDPGTPCRLCRTPRDQQGPGTLAQPAHVRVSIPLSILEPPHRYHIHRRKSFDASDTLALPRHCLLGWDIFPPKSEKSSAPRNLDLWSSVSAEAQHQKLSGTSSPFHPASPMQMLPPTPTWSVPQVPRPHVPRQKP

SEQ ID NO: 907 - protein, 355 aa, Homo sapiens
MAEVHRRQHARVKGEAPAKSSTLRDEEELGMASAETLTVFLKLLAAGFYGVSSFLIVVVNKSVLTNYRFPSSLCVGLGQMVATVAVLWVGKALRVVKFPDLDRNVPRKTFPLPLLYFGNQITGLFSTKKLNLPMFTVLRRFSILFTMFAEGVLLKKTFSWGIKMTVFAMIIGAFVAASSDLAFDLEGYAFILINDVLTAANGAYVKQKLDSKELGKYGLLYYNALFMILPTLAIAYFTGDAQKAVEFEGWADTLFLLQFTLSCVMGFILMYATVLCTQYNSALTTTIVGCIKNILITYIGMVFGGDYIFTWTNFIGLNISIAGSLVYSYITFTEEQLSKQSEANNKLDIKGKGAV

SEQ ID NO: 908 - protein, 1718 aa, Homo sapiens
MNQNTTEPVAATETLAEVPEHVLRGLPEEVRLFPSAVDKTRIGVWATKPILKGKKFGPFVGDKKKRSQVKNNVYMWEVYYPNLGWMCIDATDPEKGNWLRYVNWACSGEEQNLFPLEINRAIYYKTLKPIAPGEELLVWYNGEDNPEIAAAIEEERASARSKRSSPKSRKGKKKSQENKNKGNKIQDIQLKTSEPDFTSANMRDSAEGPKEDEEKPSASALEQPATLQEVASQEVPPELATPAPAWEPQPEPDERLEAAACEVNDLGEEEEEEEEEDEEEEEDDDDDELEDEGEEEASMPNENSVKEPEIRCDEKPEDLLEEPKTTSEETLEDCSEVTPAMQIPRTKEEANGDVFETFMFPCQHCERKFTTKQGLERHMHIHISTVNHAFKCKYCGKAFGTQINRRRHERRHEAGLKRKPSQTLQPSEDLADGKASGENVASKDDSSPPSLGPDCLIMNSEKASQDTINSSVVEENGEVKELHPCKYCKKVFGTHTNMRRHQRRVHERHLIPKGVRRKGGLEEPQPPAEQAQATQNVYVPSTEPEEEGEADDVYIMDISSNISENLNYYIDGKIQTNNNTSNCDVIEMESASADLYGINCLLTPVTVEITQNIKTTQVPVTEDLPKEPLGSTNSEAKKRRTASPPALPKIKAETDSDPMVPSCSLSLPLSISTTEAVSFHKEKSVYLSSKLKQLLQTQDKLTPAGISATEIAKLGPVCVSAPASMLPVTSSRFKRRTSSPPSSPQHSPALRDFGKPSDGKAAWTDAGLTSKKSKLESHSDSPAWSLSGRDERETVSPPCFDEYKMSKEWTASSAFSSVCNQQPLDLSSGVKQKAEGTGKTPVQWESVLDLSVHKKHCSDSEGKEFKESHSVQPTCSAVKKRKPTTCMLQKVLLNEYNGIDLPVENPADGTRSPSPCKSLEAQPDPDLGPGSGFPAPTVESTPDVCPSSPALQTPSLSSGQLPPLLIPTDPSSPPPCPPVLTVATPPPPLLPTVPLPAPSSSASPHPCPSPLSNATAQSPLPILSPTVSPSPSPIPPVEPLMSAASPGPPTLSSSSSSSSSSSSFSSSSSSSSPSPPPLSAISSVVSSGDNLEASLPMISFKQEELENEGLKPREEPQSAAEQDVVVQETFNKNFVCNVCESPFLSIKDLTKHLSIHAEEWPFKCEFCVQLFKDKTDLSEHRFLLHGVGNIFVCSVCKKEFAFLCNLQQHQRDLHPDKVCTHHEFESGTLRPQNFTDPSKAHVEHMQSLPEDPLETSKEEEELNDSSEELYTTIKIMASGIKTKDPDVRLGLNQHYPSFKPPPFQYHHRNPMGIGVTATNFTTHNIPQTFTTAIRCTKCGKGVDNMPELHKHILACASASDKKRYTPKKNPVPLKQTVQPKNGVVVLDNSGKNAFRRMGQPKRLNFSVELSKMSSNKLKLNALKKKNQLVQKAILQKNKSAKQKADLKNACESSSHICPYCNREFTYIGSLNKHAAFSCPKKPLSPPKKKVSHSSKKGGHSSPASSDKNSNSNHRRRTADAEIKMQSMQTPLGKTRARSSGPTQVPLPSSSFRSKQNVKFAASVKSKKPSSSSLRNSSPIRMAKITHVEGKKPKAVAKNHSAQLSSKTSRSLHVRVQKSKAVLQSKSTLASKKRTDRFNIKSRERSGGPVTRSLQLAAAADLSENKREDGSAKQELKDFSYSLRLASRCSPPAAPYITRQYRKVKAPAAAQFQGPFFKE

SEQ ID NO: 909 - protein, 211 aa, Homo sapiens
MQSAMFLAVQHDCRPMDKSAGSGHKSEEKREKMKRTLLKDWKTRLSYFLQNSSTPGKPKTGKKSKQQAFIKPSPEEAQLWSEAFDELLASKYGLAAFRAFLKSEFCEENIEFWLACEDFKKTKSPQKLSSKARKIYTDFIEKEAPKEINIDFQTKTLIAQNIQEATSGCFTTAQKRVYSLMENNSYPRFLESEFYQDLCKKPQITTEPHAT

SEQ ID NO: 910 - protein, 360 aa, Homo sapiens
MALHSMRKARERWSFIRALHKGSAAAPALQKDSKKRVFSGIQPTGILHLGNYLGAIESWVRLQDEYDSVLYSIVDLHSITVPQDPAVLRQSILDMTAVLLACGINPEKSILFQQSQVSEHTQLSWILSCMVRLPRLQHLHQWKAKTTKQKHDGTVGLLTYPVLQAADILLYKSTHVPVGEDQVQHMELVQDLAQGFNKKYGEFFPVPESILTSMKKVKSLRDPSAKMSKSDPDKLATVRITDSPEEIVQKFRKAVTDFTSEVTYDPAGRAGVSNIVAVHAAVTGLSVEEVVRRSAGMNTARYKLAVADAVIEKFAPIKREIEKLKLDKDHLEKVLQIGSAKAKELAYTVCQEVKKLVGFL

SEQ ID NO: 911 - protein, 379 aa, Homo sapiens
MSVRTLPLLFLNLGGEMLYILDQRLRAQNIPGDKARKVLNDIISTMFNRKFMEELFKPQELYSKKALRTVYERLAHASIMKLNQASMDKLYDLMTMAFKYQVLLCPRPKDVLLVTFNHLDTIKGFIRDSPTILQQVDETLRQLTEIYGGLSAGEFQLIRQTLLIFFQDLHIRVSMFLKDKVQNNNGRFVLPVSGPVPWGTEVPGLIRMFNNKGEEVKRIEFKHGGNYVPAPKEGSFELYGDRVLKLGTNMYSVNQPVETHVSGSSKNLASWTQESIAPNPLAKEELNFLARLMGGMEIKKPSGPEPGFRLNLFTTDEEEEQAALTRPEELSYEVINIQATQDQQRSEELARIMGEFEITEQPRLSTSKGDDLLAMMDEL

SEQ ID NO: 912 - protein, 144 aa, Homo sapiens
MDPKGLLSLTFVLFLSLAFGASYGTGGRMMNCPKILRQLGSKVLLPLTYERINKSMNKSIHIVVTMAKSLENSVENKIVSLDPSEAGPPRYLGDRYKFYLENLTLGIRESRKEDEGWYLMTLEKSLHFGYLYFVLGADHDNLQT

SEQ ID NO: 913 - protein, 203 aa, Homo sapiens
MGSRDHLFKVLVVGDAAVGKTSLVQRYSQDSFSKHYKSTVGVDFALKVLQWSDYEIVRLQLWDIAGQERFTSMTRLYYRDASACVIMFDVTNATTFSNSQRWKQDLDSKLTLPNGEPVPCLLLANKCDLSPWAVSRDQIDRFSKENGFTGWTETSVKENKNINEAMRVLIEKMMRNSTEDIMSLSTQGDYINLQTKSSSWSCC

SEQ ID NO: 914 - protein, 804 aa, Homo sapiens
MAVRALKLLTTLLAVVAAASQAEVESEAGWGMVTPDLLFAEGTAAYARGDWPGVVLSMERALRSRAALRALRLRCRTQCAADFPWELDPDWSPSPAQASGAAALRDLSFFGGLLRRAACLRRCLGPPAAHSLSEEMELEFRKRSPYNYLQVAYFKINKLEKAVAAAHTFFVGNPEHMEMQQNLDYYQTMSGVKEADFKDLETQPHMQEFRLGVRLYSEEQPQEAVPHLEAALQEYFVAYEECRALCEGPYDYDGYNYLEYNADLFQAITDHYIQVLNCKQNCVTELASHPSREKPFEDFLPSHYNYLQFAYYNIGNYTQAVECAKTYLLFFPNDEVMNQNLAYYAAMLGEEHTRSIGPRESAKEYRQRSLLEKELLFFAYDVFGIPFVDPDSWTPEEVIPKRLQEKQKSERETAVRISQEIGNLMKEIETLVEEKTKESLDVSRLTREGGPLLYEGISLTMNSKLLNGSQRVVMDGVISDHECQELQRLTNVAATSGDGYRGQTSPHTPNEKFYGVTVFKALKLGQEGKVPLQSAHLYYNVTEKVRRIMESYFRLDTPLYFSYSHLVCRTAIEEVQAERKDDSHPVHVDNCILNAETLVCVKEPPAYTFRDYSAILYLNGDFDGGNFYFTELDAKTVTAEVQPQCGRAVGFSSGTENPHGVKAVTRGQRCAIALWFTLDPRHSERVRAARAGESSWCCGDPFPERPWFAFLFPKSHCQWLRHERSTWDTSSNALSLWSHCLVLPGPAVNGIQVGKEVKTGSDAEFLVPSLGPTSAVLFQRVGPAGKEMSLGPLRNLPCPLGSSS

SEQ ID NO: 915 - protein, 306 aa, Homo sapiens
MDTPPLSDSESESDESLVTDRELQDAFSRGLLKPGLNVVLEGPKKAVNDVNGLKQCLAEFKRDLEWVERLDVTLGPVPEIGGSEAPAPQNKDQKAVDPEDDFQREMSFYRQAQAAVLAVLPRLHQLKVPTKRPTDYFAEMAKSDLQMQKIRQKLQTKQAAMERSEKAKQLRALRKYGKKVQTEVLQKRQQEKAHMMNAIKKYQKGFSDKLDFLEGDQKPLAQRKKAGAKGQQMRKGPSAKRRYKNQKFGFGGKKKGSKWNTRESYDDVSSFRAKTAHGRGLKRPGKKGSNKRPGKRTREKMKNRTH

SEQ ID NO: 916 - protein, 158 aa, Homo sapiens
MWSNLGIGLAISLSVVGAAWGIYITGSSIIGGGVKAPRIKTKNLVSIIFCEAVAIYGIIMAIVISNMAEPFSATDPKAIGHRNYHAGYSMFGAGLTVGLSNLFCGVCVGIVGSGAALADAQNPSLFVKILIVEIFGSAIGLFGVIVAILQTSRVKMGD

SEQ ID NO: 917 - protein, 372 aa, Homo sapiens [sequence omitted]

SEQ ID NO: 918 - protein, 141 aa, Homo sapiens
MPPKFKRHLNDDDVTGSVKSERRNLLEDDSDEEEDFFLRGPSGPRFGPRNDKIKHVQNQVDEVIDVMQENITKVIERGERLDELQDKSESLSDNATAFSNRSKQLRRQMWWRGCKIKAIMALVAAILLLVIIILIVMKYRT

SEQ ID NO: 919 - protein, 243 aa, Homo sapiens
MAAIAASEVLVDSAEEGSLAAAAELAAQKREQRLRKFRELHLMRNEARKLNHQEVVEEDKRLKLPANWEAKKARLEWELKEEEKKKECAARGEDYEKVKLLEISAEDAERWERKKKRKNPDLGFSDYAAAQLRQYHRLTKQIKPDMETYERLREKHGEEFFPTSNSLLHGTHVPSTEEIDRMVIDLEKQIEKRDKYSRRRPYNDDADIDYINERNAKFNKKAERFYGKYTAEIKQNLERGTAV

SEQ ID NO: 920 - protein, 333 aa, Homo sapiens
MSWIKEGELSLWERFCANIIKAGPMPKHIAFIMDGNRRYAKKCQVERQEGHSQGFNKLAETLRWCLNLGILEVTVYAFSIENFKRSKSEVDGLMDLARQKFSRLMEEKEKLQKHGVCIRVLGDLHLLPLDLQELIAQAVQATKNYNKCFLNVCFAYTSRHEISNAVREMAWGVEQGLLDPSDISESLLDKCLYTNRSPHPDILIRTSGEVRLSDFLLWQTSHSCLVFQPVLWPEYTFWNLFEAILQFQMNHSVLQKARDMYAEERKRQQLERDQATVTEQLLREGLQASGDAQLRRTRLHKLSARREERVQGFLQALELKRADWLARLGTASA

SEQ ID NO: 921 - protein, 412 aa, Homo sapiens
MQPSSLLPLALCLLAAPASALVRIPLHKFTSIRRTMSEVGGSVEDLIAKGPVSKYSQAVPAVTEGPIPEVLKNYMDAQYYGEIGIGTPPQCFTVVFDTGSSNLWVPSIHCKLLDIACWIHHKYNSDKSSTYVKNGTSFDIHYGSGSLSGYLSQDTVSVPCQSASSASALGGVKVERQVFGEATKQPGITFIAAKFDGILGMAYPRISVNNVLPVFDNLMQQKLVDQNIFSFYLSRDPDAQPGGELMLGGTDSKYYKGSLSYLNVTRKAYWQVHLDQVEVASGLTLCKEGCEAIVDTGTSLMVGPVDEVRELQKAIGAVPLIQGEYMIPCEKVSTLPAITLKLGGKGYKLSPEDYTLKVSQAGKTLCLSGFMGMDIPPPSGPLWILGDVFIGRYYTVFDRDNNRVGFAEAARL

SEQ ID NO: 922 - protein, 1221 aa, Homo sapiens
MITSELPVLQDSTNETTAHSDAGSELEETEVKGKRKRGRPGRPPSTNKKPRKSPGEKSRIEAGIRGAGRGRANGHPQQNGEGEPVTLFEVVKLGKSAMQSVVDDWIESYKQDRDIALLDLINFFIQCSGCRGTVRIEMFRNMQNAEIIRKMTEEFDEDSGDYPLTMPGPQWKKFRSNFCEFIGVLIRQCQYSIIYDEYMMDTVISLLTGLSDSQVRAFRHTSTLAAMKLMTALVNVALNLSIHQDNTQRQYEAERNKMIGKRANERLELLLQKRKELQENQDEIENMMNSIFKGIFVHRYRDAIAEIRAICIEEIGVWMKMYSDAFLNDSYLKYVGWTLHDRQGEVRLKCLKALQSLYTNRELFPKLELFTNRFKDRIVSMTLDKEYDVAVEAIRLVTLILHGSEEALSNEDCENVYHLVYSAHRPVAVAAGEFLHKKLFSRHDPQAEEALAKRRGRNSPNGNLIRMLVLFFLESELHEHAAYLVDSLWESSQELLKDWECMTELLLEEPVQGEEAMSDRQESALIELMVCTIRQAAEAHPPVGRGTGKRVLTAKERKTQIDDRNKLTEHFIITLPMLLSKYSADAEKVANLLQIPQYFDLEIYSTGRMEKHLDALLKQIKFVVEKHVESDVLEACSKTYSILCSEEYTIQNRVDIARSQLIDEFVDRFNHSVEDLLQEGEEADDDDIYNVLSTLKRLTSFHNAHDLTKWDLFGNCYRLLKTGIEHGAMPEQIVVQALQCSHYSILWQLVKITDGSPSKEDLLVLRKTVKSFLAVCQQCLSNVNTPVKEQAFMLLCDLLMIFSHQLMTGGREGLQPLVFNPDTGLQSELLSFVMDHVFIDQDEENQSMEGDEEDEANKIEALHKRRNLLAAFSKLIIYDIVDMHAAADIFKHYMKYYNDYGDIIKETLSKTRQIDKIQCAKTLILSLQQLFNELVQEQGPNLDRTSAHVSGIKELARRFALTFGLDQIKTREAVATLHKDGIEFAFKYQNQKGQEYPPPNLAFLEVLSEFSSKLLRQDKKTVHSYLEKFLTEQMMERREDVWLPLISYRNSLVTGGEDDRMSVNSGSSSSKTSSVRNKKGRPPLHKKRVEDESLDNTWLNRTDTMIQTPGPLPAPQLTSTVLRENSRPMGDQIQEPESEHGSEPDFLHNRGLMEEDAEPIFEDVMMSSRSQLEDMNEEFEDTMVIDLPPSRNRRERAELRPDFFDSAAIIEDDSGFGMPMF

SEQ ID NO: 923 - protein, 467 aa, Homo sapiens [sequence omitted]

SEQ ID NO: 924 - protein, 267 aa, Homo sapiens
MKAAVLTLAVLFLTGSQARHFWQQDEPPQSPWDRVKDLATVYVDVLKDSGRDYVSQFEGSALGKQLNLKLLDNWDSVTSTFSKLREQLGPVTQEFWDNLEKETEGLRQEMSKDLEEVKAKVQPYLDDFQKKWQEEMELYRQKVEPLRAELQEGARQKLHELQEKLSPLGEEMRDRARAHVDALRTHLAPYSDELRQRLAARLEALKENGGARLAEYHAKATEHLSTLSEKAKPALEDLRQGLLPVLESFKVSFLSALEEYTKKLNTQ

SEQ ID NO: 925 - protein, 921 aa, Homo sapiens
MAPLALVGVTLLLAAPPCSGAATPTPSLPPPPANDSDTSTGGCQGSYRCQPGVLLPVWEPDDPSLGDKAARAVVYFVAMVYMFLGVSIIADRFMAAIEVITSKEKEITITKANGETSVGTVRIWNETVSNLTLMALGSSAPEILLSVIEVCGHNFQAGELGPGTIVGSAAFNMFVVIAVCIYVIPAGESRKIKHLRVFFVTASWSIFAYVWLYLILAVFSPGVVQVWEALLTLVFFPVCVVFAWMADKRLLFYKYVYKRYRTDPRSGIIIGAEGDPPKSIELDGTFVGAEAPGELGGLGPGPAEARELDASRREVIQILKDLKQKHPDKDLEQLVGIANYYALLHQQKSRAFYRIQATRLMTGAGNVLRRHAADASRRAAPAEGAGEDEDDGASRIFFEPSLYHCLENCGSVLLSVTCQGGEGNSTFYVDYRTEDGSAKAGSDYEYSEGTLVFKPGETQKELRIGIIDDDIFEEDEHFFVRLLNLRVGDAQGMFEPDGGGRPKGRLVAPLLATVTILDDDHAGIFSFQDRLLHVSECMGTVDVRVVRSSGARGTVRLPYRTVDGTARGGGVHYEDACGELEFGDDETMKTLQVKIVDDEEYEKKDNFFIELGQPQWLKRGISALLLNQGDGDRKLTAEEEEARRIAEMGKPVLGENCRLEVIIEESYDFKNTVDKLIKKTNLALVIGTHSWREQFLEAITVSAGDEEEEEDGSREERLPSCFDYVMHFLTVFWKVLFACVPPTEYCHGWACFGVSILVIGLLTALIGDLASHFGCTVGLKDSVNAVVFVALGTSIPDTFASKVAALQDQCADASIGNVTGSNAVNVFLGLGVAWSVAAVYWAVQGRPFEVRTGTLAFSVTLFTVFAFVGIAVLLYRRRPHIGGELGGPRGPKLATTALFLGLWLLYILFASLEAYCHIRGF

SEQ ID NO: 926 - protein, 359 aa, Homo sapiens
MKLGCVLMAWALYLSLGVLWVAQMLLAASFETLQCEGPVCTEESSCHTEDDLTDAREAGFQVKAYTFSEPFHLIVSYDWLILQGPAKPVFEGDLLVLRCQAWQDWPLTQVTFYRDGSALGPPGPNREFSITVVQKADSGHYHCSGIFQSPGPGIPETASVVAITVQELFPAPILRAVPSAEPQAGSPMTLSCQTKLPLQRSAARLLFSFYKDGRIVQSRGLSSEFQIPTASEDHSGSYWCEAATEDNQVWKQSPQLEIRVQGASSSAAPPTLNPAPQKSAAPGTAPEEAPGPLPPPPTPSSEDPGFSSPLGMPDPHLYHQMGLLLKHMQDVRVLLGHLLMELRELSGHRKPGTTKATAE

SEQ ID NO: 927 - protein, 225 aa, Homo sapiens
MGFGDLKSPAGLQVLNDYLADKSYIEGYVPSQADVAVFEAVSSPPPADLCHALRWYNHIKSYEKEKASLPGVKKALGKYGPADVEDTTGSGATDSKDDDDIDLFGSDDEEESEEAKRLREERLAQYESKKAKKPALVAKSSILLDVKPWDDETDMAKLEECVRSIQADGLVWGSSKLVPVGYGIKKLQIQCVVEDDKVGTDMLEEQITAFEDYVQSMDVAAFNKI

SEQ ID NO: 928 - protein, 592 aa, Homo sapiens
MAPGQLALFSVSDKTGLVEFARNLTALGLNLVASGGTAKALRDAGLAVRDVSELTGFPEMLGGRVKTLHPAVHAGILARNIPEDNADMARLDFNLIRVVACNLYPFVKTVASPGVTVEEAVEQIDIGGVTLLRAAAKNHARVTVVCEPEDYVVVSTEMQSSESKDTSLETRRQLALKAFTHTAQYDEAISDYFRKQYSKGVSQMPLRYGMNPHQTPAQLYTLQPKLPITVLNGAPGFINLCDALNAWQLVKELKEALGIPAAASFKHVSPAGAAVGIPLSEDEAKVCMVYDLYKTLTPISAAYARARGADRMSSFGDFVALSDVCDVPTAKIISREVSDGIIAPGYEEEALTILSKKKNGNYCVLQMDQSYKPDENEVRTLFGLHLSQKRNNGVVDKSLFSNVVTKNKDLPESALRDLIVATIAVKYTQSNSVCYAKNGQVIGIGAGQQSRIHCTRLAGDKANYWWLRHHPQVLSMKFKTGVKRAEISNAIDQYVTGTIGEDEDLIKWKALFEEVPELLTEAEKKEWVEKLTEVSISSDAFFPFRDNVDRAKRSGVAYIAAPSGSAADKVVIEACDELGIILAHTNLRLFHH

SEQ ID NO: 929 - protein, 710 aa, Homo sapiens
MLTTLKPFGSVSVESKMNNKAGSFFWNLRQFSTLVSTSRTMRLCCLGLCKPKIVHSNWNILNNFHNRMQSTDIIRYLFQDAFIFKSDVGFQTKGISTLTALRIERLLYAKRLFFDSKQSLVPVDKSDDELKKVNLNHEVSNEDVLTKETKPNRISSRKLSEECNSLSDVLDAFSKAPTFPSSNYFTAMWTIAKRLSDDQKRFEKRLMFSHPAFNQLCEHMMREAKIMQYKYLLFSLHAIVKLGIPQNTILVQTLLRVTQERINECDEICLSVLSTVLEAMEPCKNVHVLRTGFRILVDQQVWKIEDVFTLQVVMKCIGKDAPIALKRKLEMKALRELDRFSVLNSQHMFEVLAAMNHRSLILLDECSKVVLDNIHGCPLRIMINILQSCKDLQYHNLDLFKGLADYVAATFDIWKFRKVLFILILFENLGFRPVGLMDLFMKRIVEDPESLNMKNILSILHTYSSLNHVYKCQNKEQFVEVMASALTGYLHTISSENLLDAVYSFCLMNYFPLAPFNQLLQKDIISELLTSDDMKNAYKLHTLDTCLKLDDTVYLRDIALSLPQLPRELPSSHTNAKVAEVLSSLLGGEGHFSKDVHLPHNYHIDFEIRMDTNRNQVLPLSDVDTTSATDIQRVAVLCVSRSAYCLGSSHPRGFLAMKMRHLNAMGFHVILVNNWEMDKLEMEDAVTFLKTKIYSVEALPVAAVNVQSTQ

SEQ ID NO: 930 - protein, 327 aa, Homo sapiens
MTMESGAENQQSGDAAVTEAENQQMTVQAQPQIATLAQVSMPAAHATSSAPTVTLVQLPNGQTVQVHGVIQAAQPSVIQSPQVQTVQISTIAESEDSQESVDSVTDSQKRREILSRRPSYRKILNDLSSDAPGVPRIEEEKSEEETSAPAITTVTVPTPIYQTSSGQYIAITQGGAIQLANNGTDGVQGLQTLTMTNAAATQPGTTILQYAQTTDGQQILVPSNQVVVQAASGDVQTYQIRTAPTSTIAPGVVMASSPALPTQPAEEAARKREVRLMKNREAARECRRKKKEYVKCLENRVAVLENQNKTLIEELKALKDLYCHKSD

SEQ ID NO: 931 - protein, 147 aa, Homo sapiens
MASHRLLLLCLAGLVFVSEAGPTGTGESKCPLMVKVLDAVRGSPAINVAVHVFRKAADDTWEPFASGKTSESGELHGLTTEEEFVEGIYKVEIDTKSYWKALGISPFHEHAEVVFTANDSGPRRYTIAALLSPYSYSTTAVVTNPKE

SEQ ID NO: 932 - protein, 2476 aa, Homo sapiens
MNTEELELLSDSKYRNYVAAIDKALKNFEYSSEWADLISALGKLNKVLQNNAKYQVVPKKLTIGKRLAQCLHPALPGGVHRKALETYEIIFKIIGPKRLAKDLFLYSSGLFPLLANAAMSVKPTLLSLYEIYYLPLGKTLKPGLQGLLTGILPGLEEGSEYYERTNMLLEKVAAAVDQSAFYSALWGSLLTSPAVRLPGITYVLAHLNRKLSMEDQLYIIGSDIELMVEAVSTSVQDSSVLVQRSTLDLILFCFPFHMSQATRPDMIRILSAALHVVLRRDMSLNRRLYAWLLGPRSTRHSNPEEHATYYFTTFSKELLVQAMVGILQVNGFGEENTLMQDLKPFRILISLLDKPELGPVILEDVLIEVFRTLYSQCKAELDLQTEPPFSKDHAQLSSKLRENKKTAELIKTANLLFNSFEPYYMWDYVARWFEECCRRTLHVRLQIGPGDSNDSSELQLTNFCLLVDFLLDIVSLPTRSMRVLCQETYIEIQTEHLPQLLLRMISALTSHLQTLHLSELTDSLRLCSKILSKVQPPLLSASTGGVLQFPSGQNNSVKEWEDKKVSSVSHENPTEVFEDGENPPSSRSSESGFTEFIQYQADRTDDIDRELSEGQGAAAIPIGSTSSETETASTVGSEETIIQTPSVVTQGTATRSRKTAQKTAMQCCLEYVQQFLTRLINLYIIQNNSFSQSLATEHQGDLGREQGETSKWDRNSQGDVKEKNISKQKTSKEYLSAFLAACQLFLECSSFPVYIAEGNHTSELRSEKLETDCEHVQPPQWLQTLMNACSQASDFSVQSVAISLVMDLVGLTQSVAMVTGENINSVEPAQPLSPNQGRVAVVIRPPLTQGNLRYIAEKTEFFKHVALTLWDQLGDGTPQHHQKSVELFYQLHNLVPSSSICEDVISQQLTHKDKKIRMEAHAKFAVLWHLTRDLHINKSSSFVRSFDRSLFIMLDSLNSLDGSTSSVGQAWLNQVLQRHDIARVLEPLLLLLLHPKTQRVSVQRVQAERYWNKSPCYPGEESDKHFMQNFACSNVSQVQLITSKGNGEKPLTMDEIENFSLTVNPLSDRLSLLSTSSETIPMVVSDFDLPDQQIEILQSSDSGCSQSSAGDNLSYEVDPETVNAQEDSQMPKESSPDDDVQQVVFDLICKVVSGLEVESASVTSQLEIEAMPPKCSDIDPDEETIKIEDDSIQQSQNALLSNESSQFLSVSAEGGHECVANGISRNSSSPCISGTTHTLHDSSVASIETKSRQRSHSSIQFSFKEKLSEKVSEKETIVKESGKQPGAKPKVKLARKKDDDKKKSSNEKLKQTSVFFSDGLDLENWYSCGEGDISEIESDMGSPGSRKSPNFNIHPLYQHVLLYLQLYDSSRTLYAFSAIKAILKTNPIAFVNAISTTSVNNAYTPQLSLLQNLLARHRISVMGKDFYSHIPVDSNHNFRSSMYIEILISLCLYYMRSHYPTHVKVTAQDLIGNRNMQMMSIEILTLLFTELAKVIESSAKGFPSFISDMLSKCKVQKVILHCLLSSIFSAQKWHSEKMAGKNLVAVEEGFSEDSLINFSEDEFDNGSTLQSQLLKVLQRLIVLEHRVMTIPEENETGFDFVVSDLEHISPHQPMTSLQYLHAQPITCQGMFLCAVIRALHQHCACKMHPQWIGLITSTLPYMGKVLQRVVVSVTLQLCRNLDNLIQQYKYETGLSDSRPLWMASIIPPDMILTLLEGITAIIHYCLLDPTTQYHQLLVSVDQKHLFEARSGILSILHMIMSSVTLLWSILHQADSSEKMTIAASASLTTINLGATKNLRQQILELLGPISMNHGVHFMAAIAFVWNERRQNKTTTRTKVIPAASEEQLLLVELVRSISVMRAETVIQTVKEVLKQPPAIAKDKKHLSLEVCMLQFFYAYIQRIPVPNLVDSWASLLILLKDSIQLSLPAPGQFLILGVLNEFIMKNPSLENKKDQRDLQDVTHKIVDAIGAIAGSSLEQTTWLRRNLEVKPSPKIMVDGTNLESDVEDMLSPAMETANITPSVYSVHALTLLSEVLAHLLDMVFYSDEKERVIPLLVNIMHYVVPYLRNHSAHNAPSYRACVQLLSSLSGYQYTRRAWKKEAFDLFMDPSFFQMDASCVNHWRAIMDNLMTHDKTTFRDLMTRVAVAQSSSLNLFANRDVELEQRAMLLKRLAFAIFSSEIDQYQKYLPDIQERLVESLRLPQVPTLHSQVFLFFRVLLLRMSPQHLTSLWPTMITELVQVFLLMEQELTADEDISRTSGPSVAGLETTYTGGNGFSTSYNSQRWLNLYLSACKFLDLALALPSENLPQFQMYRWAFIPEASDDSGLEVRRQGIHQREFKPYVVRLAKLLRKRAKDKEEDFKTVILEGLEMAKHQKNPEEDNSGRTLGWEPGHLLLTICTVRSMEQLLPFFNVLSQVFNSKVTSRCGGHSGSPILYSNAFPNKDMKLENHKPCSSKARQKIEEMVEKDFLEGMIKT

SEQ ID NO: 933 - protein, 294 aa, Homo sapiens
MSPRGTGCSAGLLMTVGWLLLAGLQSARGTNVTAAVQDAGLAHEGEGEEETENNDSETAENYAPPETEDVSNRNVVKEVEFGMCTVTCGIGVREVILTNGCPGGESKCVVRVEECRGPTDCGWGKPISESLESVRLACIHTSPLNRFKYMWKLLRQDQQSIILVNDSAILEVRKESHPLAFECDTLDNNEIVATIKFTVYTSSELQMRRSSLPATDAALIFVLTIGVIICVFIIFLLIFIIINWAAVKAFWGAKASTPEVQSEQSSVRYKDSTSLDQLPTEMPGEDDALSEWNE

SEQ ID NO: 934 - protein, 186 aa, Homo sapiens
MDADSDVALDILITNVVCVFRTRCHLNLRKIALEGANVIYKRDVGKVLMKLRKPRITATIWSSGKIICTGATSEEEAKFGARRLARSLQKLGFQVIFTDFKVVNVLAVCNMPFEIRLPEFTKNNRPHASYEPELHPAVCYRIKSLRATLQIFSTGSITVTGPNVKAVATAVEQIYPFVFESRKEIL

SEQ ID NO: 935 - protein, 745 aa, Homo sapiens
MEEELQHSHCVNCVSRRCMTRPEPGISCDLIGCPLVCGAVFHSCKADEHRLLCPFERVPCLNSDFGCPFTMARNKVAEHLEMCPASVVCCTMEWNRWPVSYADRKSYENLSRDVDEVAQLDMALALQDQRMLLESLKVATMMSKATDKVSKPREQISVKSSVPEIPHANGLVSVDEESYGALYQATVETTRSLAAALDILNTATRDIGMLNTSVPNDMDEQQNARESLEDQNLKDQDHLYEEEIGAVGGIDYNDTNQNAQSEQNGSSDLLCDLNTSSYDTSALCNGFPLENICTQVIDQNQNLHGDSKQSNLTNGDCVASSDGTSKPSSSLAVAAQLREIIPSSALPNGTVQHILMPDDEGEGELCWKKVDLGDVKNVDVLSFSHAPSFNFLSNSCWSKPKEDKAVDTSDLEVAEDPMGLQGIDLITAALLFCLGDSPGGRGISDSRMADIYHIDVGTQTFSLPSAILATSTMVGEIASASACDHANPQLSNPSPFQTLGLDLVLECVARYQPKQRSMFTFVCGQLFRRKEFSSHFKNVHGDIHAGLNGWMEQRCPLAYYGCTYSQRRFCPSIQGAKIIHDRHLRSFGVQPCVSTVLVEPARNCVLGLHNDHLSSLPFEVLQHIAGFLDGFSLCQLSCVSKLMRDVCGSLLQSRGMVILQWGKRKYPEGNSSWQIKEKVWRFSTAFCSVNEWKFADILSMADHLKKCSYNVVEKREEAIPLPCMCVTRELTKEGRSLRSVLKPVL

SEQ ID NO: 936 - protein, 790 aa, Homo sapiens
MAEQVLPQALYLSNMRKAVKIRERTPEDIFKPTNGIIHHFKTMHRYTLEMFRTCQFCPQFREIIHKALIDRNIQATLESQKKLNWCREVRKLVALKTNGDGNCLMHATSQYMWGVQDTDLVLRKALFSTLKETDTRNFKFRWQLESLKSQEFVETGLCYDTRNWNDEWDNLIKMASTDTPMARSGLQYNSLEEIHIFVLCNILRRPIIVISDKMLRSLESGSNFAPLKVGGIYLPLHWPAQECYRYPIVLGYDSHHFVPLVTLKDSGPEIRAVPLVNRDRGRFEDLKVHFLTDPENEMKEKLLKEYLMVIEIPVQGWDHGTTHLINAAKLDEANLPKEINLVDDYFELVQHEYKKWQENSEQGRREGHAQNPMEPSVPQLSLMDVKCETPNCPFFMSVNTQPLCHECSERRQKNQNKLPKLNSKPGPEGLPGMALGASRGEAYEPLAWNPEESTGGPHSAPPTAPSPFLFSETTAMKCRSPGCPFTLNVQHNGFCERCHNARQLHASHAPDHTRHLDPGKCQACLQDVTRTFNGICSTCFKRTTAEASSSLSTSLPPSCHQRSKSDPSRLVRSPSPHSCHRAGNDAPAGCLSQAARTPGDRTGTSKCRKAGCVYFGTPENKGFCTLCFIEYRENKHFAAASGKVSPTASRFQNTIPCLGRECGTLGSTMFEGYCQKCFIEAQNQRFHEAKRTEEQLRSSQRRDVPRTTQSTSRPKCARASCKNILACRSEELCMECQHPNQRMGPGAHRGEPAPEDPPKQRCRAPACDHFGNAKCNGYCNECFQFKQMYG

SEQ ID NO: 937 - protein, 431 aa, Homo sapiens
MTVKTEAAKGTLTYSRMRGMVAILIAFMKQRRMGLNDFIQKIANNSYACKHPEVQSILKISQPQEPELMNANPSPPPSPSQQINLGPSSNPHAKPSDFHFLKVIGKGSFGKVLLARHKAEEVFYAVKVLQKKAILKKKEEKHIMSERNVLLKNVKHPFLVGLHFSFQTADKLYFVLDYINGGELFYHLQRERCFLEPRARFYAAEIASALGYLHSLNIVYRDLKPENILLDSQGHIVLTDFGLCKENIEHNSTTSTFCGTPEYLAPEVLHKQPYDRTVDWWCLGAVLYEMLYGLPPFYSRNTAEMYDNILNKPLQLKPNITNSARHLLEGLLQKDRTKRLGAKDDFMEIKSHVFFSLINWDDLINKKITPPFNPNVSGPNDLRHFDPEFTEEPVPNSIGKSPDSVLVTASVKEAAEAFLGFSYAPPTDSFL

SEQ ID NO: 938 - protein, 178 aa, Homo sapiens
MAAPLGGMFSGQPPGPPQAPPGLPGQASLLQAAPGAPRPSSSTLVDELESSFEACFASLVSQDYVNGTDQEEIRTGVDQCIQKFLDIARQTECFFLQKRLQLSVQKPEQVIKEDVSELRNELQRKDALVQKHLTKLRHWQQVLEDINVQHKKPADIPQGSLAYLEQASANIPAPLKPT

SEQ ID NO: 939 - protein, 685 aa, Homo sapiens
MWLKLFFLLLYFLVLFVLARFFEAIVWYETGIFATQLVDPVALSFKKLKTILECRGLGYSGLPEKKDVRELVEKSGDLMEGELYSALKEEEASESVSSTNFSGEMHFYELVEDTKDGIWLVQVIANDRSPLVGKIHWEKMVKKVSRFGIRTGTFNCSSDPRYCRRRGWVRSTLIMSVPQTSTSKGKVMLKEYSGRKIEVEHIFKWITAHAASRIKTIYNAEHLKEEWNKSDQYWLKIYLFANLDQPPAFFSALSIKFTGRVEFIFVNVENWDNKSYMTDIGIYNMPSYILRTPEGIYRYGNHTGEFISLQAMDSFLRSLQPEVNDLFVLSLVLVNLMAWMDLFITQGATIKRFVVLISTLGTYNSLLIISWLPVLGFLQLPYLDSFYEYSLKLLRYSNTTTLASWVRADWMFYSSHPALFLSTYLGHGLLIDYFEKKRRRNNNNDEVNANNLEWLSSLWDWYTSYLFHPIASFQNFPVESDWDEDPDLFLERLAFPDLWLHPLIPTDYIKNLPMWRFKCLGVQSEEEMSEGSQDTENDSESENTDTLSSEKEVFEDKQSVLHNSPGTASHCDAEACSCANKYCQTSPCERKGRSYGSYNTNEDMEPDWLTWPADMLHCTECVVCLENFENGCLLMGLPCGHVFHQNCIVMWLAGGRHCCPVCRWPSYKKKQPYAQHQPLSNDVPS

SEQ ID NO: 940 - protein, 172 aa, Homo sapiens
MSSKKAKTKTTKKRPQRATSNVFAMFDQSQIQEFKEAFNMIDQNRDGFIDKEDLHDMLASLGKNPTDAYLDAMMNEAPGPINFTMFLTMFGEKLNGTDPEDVIRNAFACFDEEATGTIQEDYLRELLTTMGDRFTDEEVDELYREAPIDKKGNFNYIEFTRILKHGAKDKDD

SEQ ID NO: 941 - protein, 108 aa, Homo sapiens
MPLWVFFFVILTLSNSSHCSPPPPLTLRMRRYADAIFTNSYRKVLGQLSARKLLQDIMSRQQGESNQERGARARLGRQVDSMWAEQKQMELESILVALLQKHSRNSQG

SEQ ID NO: 942 - protein, 631 aa, Homo sapiens
MAPPGSSTVFLLALTIIASTWALTPTHYLTKHDVERLKASLDRPFTNLESAFYSIVGLSSLGAQVPDAKKACTYIRSNLDPSNVDSLFYAAQASQALSGCEISISNETKDLLLAAVSEDSSVTQIYHAVAALSGFGLPLASQEALSALTARLSKEETVLATVQALQTASHLSQQADLRSIVEEIEDLVARLDELGGVYLQFEEGLETTALFVAATYKLMDHVGTEPSIKEDQVIQLMNAIFSKKNFESLSEAFSVASAAAVLSHNRYHVPVVVVPEGSASDTHEQAILRLQVTNVLSQPLTQATVKLEHAKSVASRATVLQKTSFTPVGDVFELNFMNVKFSSGYYDFLVEVEGDNRYIANTVELRVKISTEVGITNVDLSTVDKDQSIAPKTTRVTYPAKAKGTFIADSHQNFALFFQLVDVNTGAELTPHQTFVRLHNQKTGQEVVFVAEPDNKNVYKFELDTSERKIEFDSASGTYTLYLIIGDATLKNPILWNVADVVIKFPEEEAPSTVLSQNLFTPKQEIQHLFREPEKRPPTVVSNTFTALILSPLLLLFALWIRIGANVSNFTFAPSTIIFHLGHAAMLGLMYVYWTQLNMFQTLKYLAILGSVTFLAGNRMLAQQAVKRTAH

SEQ ID NO: 943 - protein, 1661 aa, Homo sapiens
MEAPAAEPPVRGCGPQPAPAPAPAPERKKSHRAPSPARPKDVAGWSLAKGRRGPGPGSAVACSAAFSSRPDKKGRAVAPGARGAGVRVAGVRTGVRAKGRPRSGAGPRPPPPPPSLTDSSSEVSDCASEEARLLGLELALSSDAESAAGGPAGVRTGQPAQPAPSAQQPPRPPASPDEPSVAASSVGSSRLPLSASLAFSDLTEEMLDCGPSGLVRELEELRSENDYLKDEIEELRAEMLEMRDVYMEEDVYQLQELRQQLDQASKTCRILQYRLRKAERRSLRAAQTGQVDGELIRGLEQDVKVSKDISMRLHKELEVVEKKRARLEEENEELRQRLIETELAKQVLQTELERPREHSLKKRGTRSLGKADKKTLVQEDSADLKCQLHFAKEESALMCKKLTKLAKENDSMKEELLKYRSLYGDLDSALSAEELADAPHSRETELKVHLKLVEEEANLLSRRIVELEVENRGLRAEMDDMKDHGGGCGGPEARLAFSALGGGECGESLAELRRHLQFVEEEAELLRRSSAELEDQNKLLLNELAKFRSEHELDVALSEDSCSVLSEPSQEELAAAKLQIGELSGKVKKLQYENRVLLSNLQRCDLASCQSTRPMLETDAEAGDSAQCVPAPLGETHESHAVRLCRAREAEVLPGLREQAALVSKAIDVLVADANGFTAGLRLCLDNECADFRLHEAPDNSEGPRDTKLIHAILVRLSVLQQELNAFTRKADAVLGCSVKEQQESFSSLPPLGSQGLSKEILLAKDLGSDFQPPDFRDLPEWEPRIREAFRTGDLDSKPDPSRSFRPYRAEDNDSYASEIKELQLVLAEAHDSLRGLQEQLSQERQLRKEEADNFNQKMVQLKEDQQRALLRREFELQSLSLQRRLEQKFWSQEKNMLVQESQQFKHNFLLLFMKLRWFLKRWRQGKVLPSEGDDFLEVNSMKELYLLMEEEEINAQHSDNKACTGDSWTQNTPNEYIKTLADMKVTLKELCWLLRDERRGLTELQQQFAKAKATWETERAELKGHTSQMELKTGKGAGERAGPDWKAALQREREEQQHLLAESYSAVMELTRQLQISERNWSQEKLQLVERLQGEKQQVEQQVKELQNRLSQLQKAADPWVLKHSELEKQDNSWKETRSEKIHDKEAVSEVELGGNGLKRTKSVSSMSEFESLLDCSPYLAGGDARGKKLPNNPAFGFVSSEPGDPEKDTKEKPGLSSRDCNHLGALACQDPPGRQMQRSYTAPDKTGIRVYYSPPVARRLGVPVVHDKEGKIIIEPGFLFTTAKPKESAEADGLAESSYGRWLCNFSRQRLDGGSAGSPSAAGPGFPAALHDFEMSGNMSDDMKEITNCVRQAMRSGSLERKVKSTSSQTVGLASVGTQTIRTVSVGLQTDPPRSSLHGKAWSPRSSSLVSVRSKQISSSLDKVHSRIERPCCSPKYGSPKLQRRSVSKLDSSKDRSLWNLHQGKQNGSAWARSTTTRDSPVLRNINDGLSSLFSVVEHSGSTESVWKLGMSETRAKPEPPKYGIVQEFFRNVCGRAPSPTSSAGEEGTKKPEPLSPASYHQPEGVARILNKKAAKLGSSEEVRLTMLPQVGKDGVLRDGDGAVVLPNEDAVCDCSTQSLTSCFARSSRSAIRHSPSKCRLHPSESSWGGEERALPPSE

SEQ ID NO: 944 - protein, 968 aa, Homo sapiens
MVNSSRVQPQQPGDAKRPPAPRAPDPGRLMAGCAAVGASLAAPGGLCEQRGLEIEMQRIRQAAARDPPAGAAASPSPPLSSCSRQAWSRDNPGFEAEEEEEEVEGEEGGMVVEMDVEWRPGSRRSAASSAVSSVGARSRGLGGYHGAGHPSGRRRRREDQGPPCPSPVGGGDPLHRHLPLEGQPPRVAWAERLVRGLRGLWGTRLMEESSTNREKYLKSVLRELVTYLLFLIVLCILTYGMMSSNVYYYTRMMSQLFLDTPVSKTEKTNFKTLSSMEDFWKFTEGSLLDGLYWKMQPSNQTEADNRSFIFYENLLLGVPRIRQLRVRNGSCSIPQDLRDEIKECYDVYSVSSEDRAPFGPRNGTAWIYTSEKDLNGSSHWGIIATYSGAGYYLDLSRTREETAAQVASLKKNVWLDRGTRATFIDFSVYNANINLFCVVRLLVEFPATGGVIPSWQFQPLKLIRYVTTFDFFLAACEIIFCFFIFYYVVEEILEIRIHKLHYFRSFWNCLDVVIVVLSVVAIGINIYRTSNVEVLLQFLEDQNTFPNFEHLAYWQIQFNNIAAVTVFFVWIKLFKFINFNRTMSQLSTTMSRCAKDLFGFAIMFFIIFLAYAQLAYLVFGTQVDDFSTFQECIFTQFRIILGDINFAEIEEANRVLGPIYFTTFVFFMFFILLNMFLAIINDTYSEVKSDLAQQKAEMELSDLIRKGYHKALVKLKLKKNTVDDISESLRQGGGKLNFDELRQDLKGKGHTDAEIEAIFTKYDQDGDQELTEHEHQQMRDDLEKEREDLDLDHSSLPRPMSSRSFPRSLDDSEEDDDEDSGHSSRRRGSISSGVSYEEFQVLVRRVDRMEHSIGSIVSKIDAVIVKLEIMERAKLKRREVLGRLLDGVAEDERLGRDSEIHREQMERLVREELERWESDDAASQISHGLGTPVGLNGQPRPRSSRPSSSQSTEGMEGAGGNGSSNVHV

SEQ ID NO: 945 - protein, 300 aa, Homo sapiens
MRIAVICFCLLGITCAIPVKQADSGSSEEKQLYNKYPDAVATWLNPDPSQKQNLLAPQTLPSKSNESHDHMDDMDDEDDDDHVDSQDSIDSNDSDDVDDTDDSHQSDESHHSDESDELVTDFPTDLPATEVFTPVVPTVDTYDGRGDSVVYGLRSKSKKFRRPDIQYPDATDEDITSHMESEELNGAYKAIPVAQDLNAPSDWDSRGKDSYETSQLDDQSAETHSHKQSRLYKRKANDESNEHSDVIDSQELSKVSREFHSHEFHSHEDMLVVDPKSKEEDKHLKFRISHELDSASSEVN

SEQ ID NO: 946 - protein, 358 aa, Homo sapiens
MGAVWSALLVGGGLAGALFVWLLRGGPGDTGKDGDAEQEKDAPLGGAAIPGGHQSGSSGLSPGPSGQELVTKPEHLQESNGHLISKTKDLGKLQAASWRLQNPSREVCDNSREHVPSGQFPDTEAPATSETSNSRSYSEVSRNESLESPMGEWGFQKGQEISAKAATCFAEKLPSSNLLKNRAKEEMSLSDLNSQDRVDHEEWEMVPRHSSWGDVGVGGSLKAPVLNLNQGMDNGRSTLVEARGQQVHGKMERVAVMPAGSQQVSVRFQVHYVTSTDVQFIAVTGDHECLGRWNTYIPLHYNKDGFWSHSIFLPADTVVEWKFVLVENGGVTRWEECSNRFLETGHEDKVVHAWWGIH

SEQ ID NO: 947 - protein, 377 aa, Homo sapiens
MKFPGPLENQRLSFLLEKAITREAQMWKVNVRKMPSNQNVSPSQRDEVIQWLAKLKYQFNLYPETFALASSLLDRFLATVKAHPKYLSCIAISCFFLAAKTVEEDERIPVLKVLARDSFCGCSSSEILRMERIILDKLNWDLHTATPLDFLHIFHAIAVSTRPQLLFSLPKLSPSQHLAVLTKQLLHCMACNQLLQFRGSMLALAMVSLEMEKLIPDWLSLTIELLQKAQMDSSQLIHCRELVAHHLSTLQSSLPLNSVYVYRPLKHTLVTCDKGVFRLHPSSVPGPDFSKDNSKPEVPVRGTAAFYHHLPAASGCKQTSTKRKVEEMEVDDFYDGIKRLYNEDNVSENVGSVCGTDLSRQEGHASPCPPLQPVSVM

SEQ ID NO: 948 - protein, 294 aa, Homo sapiens
MQPRRQRLPAPWSGPRGPRPTAPLLALLLLLAPVAAPAGSGDPDDPGQPQDAGVPRRLLQQAARAALHFFNFRSGSPSALRVLAEVQEGRAWINPKEGCKVHVVFSTERYNPESLLQEGEGRLGKCSARVFFKNQKPRPTINVTCTRLIEKKKRQQEDYLLYKQMKQLKNPLEIVSIPDNHGHIDPSLRLIWDLAFLGSSYVMWEMTTQVSHYYLAQLTSVRQWKTNDDTIDFDYTVLLHELSTQEIIPCRIHLVWYPGKPLKVKYHCQELQTPEEASGTEEGSAVVPTELSNF

SEQ ID NO: 949 - protein, 325 aa, Homo sapiens
MDSELKEEIPVHEEFILCGGAETQVLKCGPWTDLFHDQSVKRPKLLIFIIPGNPGFSAFYVPFAKALYSLTNRRFPVWTISHAGHALAPKDKKILTTSEDSNAQEIKDIYGLNGQIEHKLAFLRTHVPKDMKLVLIGHSIGSYFTLQMLKRVPELPVIRAFLLFPTIERMSESPNGRIATPLLCWFRYVLYVTGYLLLKPCPETIKSLLIRRGLQVMNLENEFSPLNILEPFCLANAAYLGGQEMMEVVKRDDETIKEHLCKLTFYYGTIDPWCPKEYYEDIKKDFPEGDIRLCEKNIPHAFITHFNQEMADMIADSLKDDLSKM

SEQ ID NO: 950 - protein, 251 aa, Homo sapiens
MLGARLRLWVCALCSVCSMSVLRAYPNASPLLGSSWGGLIHLYTATARNSYHLQIHKNGHVDGAPHQTIYSALMIRSEDAGFVVITGVMSRRYLCMDFRGNIFGSHYFDPENCRFQHQTLENGYDVYHSPQYHFLVSLGRAKRAFLPGMNPPPYSQFLSRRNEIPLIHFNTPIPRRHTRSAEDDSERDPLNVLKPRARMTPAPASCSQELPSAEDNSPMASDPLGVVRGGRVNTHAGGTGPEGCRPFAKFI

SEQ ID NO: 951 - protein, 640 aa, Homo sapiens
MAAGGTGGLREEQRYGLSCGRLGQDNITVLHVKLTETAIRALETYQSHKNLIPFRPSIQFQGLHGLVKIPKNDPLNEVHNFNFYLSNVGKDNPQGSFDCIQQTFSSSGASQLNCLGFIQDKITVCATNDSYQMTRERMTQAEEESRNRSTKVIKPGGPYVGKRVQIRKAPQAVSDTVPERKRSTPMNPANTIRKTHSSSTISQRPYRDRVIHLLALKAYKKPELLARLQKDGVNQKDKNSLGAILQQVANLNSKDLSYTLKDYVFKELQRDWPGYSEIDRRSLESVLSRKLNPSQNAAGTSRSESPVCSSRDAVSSPQKRLLDSEFIDPLMNKKARISHLTNRVPPTLNGHLNPTSEKSAAGLPLPPAAAAIPTPPPLPSTYLPISHPPQIVNSNSNSPSTPEGRGTQDLPVDSFSQNDSIYEDQQDKYTSRTSLETLPPGSVLLKCPKPMEENHSMSHKKSKKKSKKHKEKDQIKKHDIETIEEKEEDLKREEEIAKLNNSSPNSSGGVKEDCTASMEPSAIELPDYLIKYIAIVSYEQRQNYKDDFNAEYDEYRALHARMETVARRFIKLDAQRKRLSPGSKEYQNVHEEVLQEYQKIKQSSPNYHEEKYRCEYLHNKLAHIKRLIGEFDQQQAESWS

SEQ ID NO: 952 - protein, 106 aa, Homo sapiens
MAQEFVNCKIQPGKVVVFIKPTCPYCRRAQEILSQLPIKQGLLEFVDITATNHTNEIQDYLQQLTGARTVPRVFIGKDCIGGCSDLVSLQQSGELLTRLKQIGALQ

SEQ ID NO: 953 - protein, 98 aa, Homo sapiens
MAHEHGHEHGHHKMELPDYRQWKIEGTPLETIQKKLAAKGLRDPWGRNEAWRYMGGFAKSVSFSDVFFKGFKWGFAAFVVAVGAEYYLESLNKDKKHH

SEQ ID NO: 954 - protein, 213 aa, Homo sapiens
MAQETNQTPGPMLCSTGCGFYGNPRTNGMCSVCYKEHLQRQQNSGRMSPMGTASGSNSPTSDSASVQRADTSLNNCEGAAGSTSEKSRNVPVAALPVTQQMTEMSISREDKITTPKTEVSEPVVTQPSPSVSQPSTSQSEEKAPELPKPKKNRCFMCRKKVGLTGFDCRCGNLFCGLHRYSDKHNCPYDYKAEAAAKIRKENPVVVAEKIQRI

SEQ ID NO: 955 - protein, 148 aa, Homo sapiens
MAASPARPAVLALTGLALLLLLCWGPGGISGNKLKLMLQKREAPVPTKTKVAVDENKAKEFLGSLKRQKRQLWDRTRPEVQQWYQQFLYMGFDEAKFEDDITYWLNRDRNGHEYYGDYYQRHYDEDSAIGPRSPYGFRHGASVNYDDY

SEQ ID NO: 956 - protein, 245 aa, Homo sapiens
MEKTELIQKAKLAEQAERYDDMATCMKAVTEQGAELSNEERNLLSVAYKNVVGGRRSAWRVISSIEQKTDTSDKKLQLIKDYREKVESELRSICTTVLELLDKYLIANATNPESKVFYLKMKGDYFRYLAEVACGDDRKQTIDNSQGAYQEAFDISKKEMQPTHPIRLGLALNFSVFYYEILNNPELACTLAKTAFDEAIAELDTLNEDSYKDSTLIMQLLRDNLTLWTSDSAGEECDAAEGAEN

SEQ ID NO: 957 - protein, 684 aa, Homo sapiens
MSAIPAEESDQLLIRPLGAGQEVGRSCIILEFKGRKIMLDCGIHPGLEGMDALPYIDLIDPAEIDLLLISHFHLDHCGALPWFLQKTSFKGRTFMTHATKAIYRWLLSDYVKVSNISADDMLYTETDLEESMDKIETINFHEVKEVAGIKFWCYHAGHVLGAAMFMIEIAGVKLLYTGDFSRQEDRHLMAAEIPNIKPDILIIESTYGTHIHEKREEREARFCNTVHDIVNRGGRGLIPVFALGRAQELLLILDEYWQNHPELHDIPIYYASSLAKKCMAVYQTYVNAMNDKIRKQININNPFVFKHISNLKSMDHFDDIGPSVVMASPGMMQSGLSRELFESWCTDKRNGVIIAGYCVEGTLAKHIMSEPEEITTMSGQKLPLKMSVDYISFSAHTDYQQTSEFIRALKPPHVILVHGEQNEMARLKAALIREYEDNDEVHIEVHNPRNTEAVTLNFRGEKLAKVMGFLADKKPEQGQRVSGILVKRNFNYHILSPCDLSNYTDLAMSTVKQTQAIPYTGPFNLLCYQLQKLTGDVEELEIQEKPALKVFKNITVIQEPGMVVLEWLANPSNDMYADTVTTVILEVQSNPKIRKGAVQKVSKKLEMHVYSKRLEIMLQDIFGEDCVSVKDDSILSVTVDGKTANLNLETRTVECEEGSEDDESLREMVELAAQRLYEALTPVH

SEQ ID NO: 958 - protein, 331 aa, Homo sapiens
MTSPHFSSYDEGPLDVSMAATNLENQLHSAQKNLLFLQREHASTLKGLHSEIRRLQQHCTDLTYELTVKSSEQTGDGTSKSSELKKRCEELEAQLKVKENENAELLKELEQKNAMITVLENTIKEREKKYLEELKAKSHKLTLLSSELEQRASTIAYLTSQLHAAKKKLMSSSGTSDASPSGSPVLASYKPAPPKDKLPETPRRRMKKSLSAPLHPEFEEVYRFGAESRKLLLREPVDAMPDPTPFLLARESAEVHLIKERPLVIPPIASDRSGEQHSPAREKPHKAHVGVAHRIHHATPPQAQPEVKTLAVDQVNGGKVVRKHSGTDRTV

SEQ ID NO: 959 - protein, 1219 aa, Homo sapiens
MFGAGDEDDTDFLSPSGGARLASLFGLDQAAAGHGNEFFQYTAPKQPKKGQGTAATGNQATPKTAPATMSTPTILVATAVHAYRYTNGQYVKQGKFGAAVLGNHTAREYRILLYISQQQPVTVARIHVNFELMVRPNNYSTFYDDQRQNWSIMFESEKAAVEFNKQVCIAKCNSTSSLDAVLSQDLIVADGPAVEVGDSLEVAYTGWLFQNHVLGQVFDSTANKDKLLRLKLGSGKVIKGWEDGMLGMKKGGKRLLIVPPACAVGSEGVIGWTQATDSILVFEVEVRRVKFARDSGSDGHSVSSRDSAAPSPIPGADNLSADPVVSPPTSIPFKSGEPALRTKSNSLSEQLAINTSPDAVKAKLISRMAKMGQPMLPILPPQLDSNDSEIEDVNTLQGGGQPVVTPSVQPSLHPAHPALPQMTSQAPQPSVTGLQAPSAALMQVSSLDSHSAVSGNAQSFQPYAGMQAYAYPQASAVTSQLQPVRPLYPAPLSQPPHFQGSGDMASFLMTEARQHNTEIRMAVSKVADKMDHLMTKVEELQKHSAGNSMLIPSMSVTMETSMIMSNIQRIIQENERLKQEILEKSNRIEEQNDKISELIERNQRYVEQSNLMMEKRNNSLQTATENTQARVLHAEQEKAKVTEELAAATAQVSHLQLKMTAHQKKETELQMQLTESLKETDLLRGQLTKVQAKLSELQETSEQAQSKFKSEKQNRKQLELKVTSLEEELTDLRVEKESLEKNLSERKKKSAQERSQAEEEIDEIRKSYQEELDKLRQLLKKTRVSTDQAAAEQLSLVQAELQTQWEAKCEHLLASAKDEHLQQYQEVCAQRDAYQQKLVQLQEKCLALQAQITALTKQNEQHIKELEKNKSQMSGVEAAASDPSEKVKKIMNQVFQSLRREFELEESYNGRTILGTIMNTIKMVTLQLLNQQEQEKEESSSEEEEEKAEERPRRPSQEQSASASSGQPQAPLNRERPESPMVPSEQVVEEAVPLPPQALTTSQDGHRRKGDSEAEALSEIKDGSLPPELSCIPSHRVLGPPTSIPPEPLGPVSMDSECEESLAASPMAAKPDNPSGKVCVREVAPDGPLQESSTRLSLTSDPEEGDPLALGPESPGEPQPPQLKKDDVTSSTGPHKELSSTEAGSTVAGAALRPSHHSQRSSLSGDEEDELFKGATLKALRPKAQPEEEDEDEVSMKGRPPPTPLFGDDDDDDDIDWLG

SEQ ID NO: 960 - protein, 251 aa, Homo sapiens
MAHRLQIRLLTWDVKDTLLRLRHPLGEAYATKARAHGLEVEPSALEQGFRQAYRAQSHSFPNYGLSHGLTSRQWWLDVVLQTFHLAGVQDAQAVAPIAEQLYKDFSHPCTWQVLDGAEDTLRECRTRGLRLAVISNFDRRLEGILGGLGLREHFDFVLTSEAAGWPKPDPRIFQEALRLAHMEPVVAAHVGDNYLCDYQGPRAVGMHSFLVVGPQALDPVVRDSVPKEHILPSLAHLLPALDCLEGSTPGL

SEQ ID NO: 961 - protein, 444 aa, Homo sapiens
MSSTSPNLQKAIDLASKAAQEDKAGNYEEALQLYQHAVQYFLHVVKYEAQGDKAKQSIRAKCTEYLDRAEKLKEYLKNKEKKAQKPVKEGQPSPADEKGNDSDGEGESDDPEKKKLQNQLQGAIVIERPNVKWSDVAGLEGAKEALKEAVILPIKFPHLFTGKRTPWRGILLFGPPGTGKSYLAKAVATEANNSTFFSISSSDLVSKWLGESEKLVKNLFQLARENKPSIIFIDEIDSLCGSRSENESEAARRIKTEFLVQMQGVGVDNDGILVLGATNIPWVLDSAIRRRFEKRIYIPLPEPHARAAMFKLHLGTTQNSLTEADFRELGRKTDGYSGADISIIVRDALMQPVRKVQSATHFKKVRGPSRADPNHLVDDLLTPCSPGDPGAIEMTWMDVPGDKLLEPVVSMSDMLRSLSNTKPTVNEHDLLKLKKFTEDFGQEG

SEQ ID NO: 962 - protein, 257 aa, Homo sapiens
MPASMFSIDNILAARPRCKDSVLPVAHSAAAPVVFPALHGDSLYGASGGASSDYGAFYPRPVAPGGAGLPAAVSGSRLGYNNYFYGQLHVQAAPVGPACCGAVPPLGAQQCSCVPTPPGYEGPGSVLVSPVPHQMLPYMNVGTLSRTELQLLNQLHCRRKRRHRTIFTDEQLEALENLFQETKYPDVGTREQLARKVHLREEKVEVWFKNRRAKWRRQKRSSSEESENAEKWNKTSSSKASPEKREEEGKSDLDSDS

SEQ ID NO: 963 - protein, 523 aa, Homo sapiens
MARKALKLASWTSMALAASGIYFYSNKYLDPNDFGAVRVGRAVATTAVISYDYLTSLKSVPYGSEEYLQLRSKVHLRSARRLCELCCANRGTFIKVGQHLGALDYLLPEEYTSTLKVLHSQAPQSSMQEIRQVIREDLGKEIHDLFQSFDDTPLGTASLAQVHKAVLHDGRTVAVKVQHPKVRAQSSKDILLMEVLVLAVKQLFPEFEFMWLVDEAKKNLPLELDFLNEGRNAEKVSQMLRHFDFLKVPRIHWDLSTERVLLMEFVDGGQVNDRDYMERNKIDVNEISRHLGKMYSEMIFVNGFVHCDPHPGNVLVRKHPGTGKAEIVLLDHGLYQMLTEEFRLNYCHLWQSLIWTDMKRVKEYSQRLGAGDLYPLFACMLTARSWDSVNRGISQAPVTATEDLEIRNNAANYLPQISHLLNHVPRQMLLILKTNDLLRGIEAALGTRASASSFLNMSRCCIRALAEHKKKNTCSFFRRTQISFSEAFNLWQINLHELILRVKGLKLADRVLALICWLFPAPL

SEQ ID NO: 964 - protein, 169 aa, Homo sapiens
MPVMRLFPCFLQLLAGLALPAVPPQWALSAGNGSSEVEVVPFQEVWGRSYCRALERLVDVVSEYPSEVEHMFSPSCVSLLRCTGCCGDENLHCVPVETANVTMQLLKIRSGDRPSYVELTFSQHVRCECRPLREKMKPERRRPKGRGKRRREKQRPTDCHLCGDAVPRR

SEQ ID NO: 965 - protein, 130 aa, Homo sapiens
MMKRAAAAAVGGALAVGAVPVVLSAMGFTGAGIAASSIAAKMMSAAAIANGGGVSAGSLVATLQSVGAAGLSTSSNILLASVGSVLGACLGNSPSSSLPAEPEAKEDEARENVPQGEPPKPPLKSEKHEE

SEQ ID NO: 966 - protein, 979 aa, Homo sapiens
MSVLGEYERHCDSINSDFGSESGGCGDSSPGPSASQGPRAGGGAAEQEELHYIPIRVLGRGAFGEATLYRRTEDDSLVVWKEVDLTRLSEKERRDALNEIVILALLQHDNIIAYYNHFMDNTTLLIELEYCNGGNLYDKILRQKDKLFEEEMVVWYLFQIVSAVSCIHKAGILHRDIKTLNIFLTKANLIKLGDYGLAKKLNSEYSMAETLVGTPYYMSPELCQGVKYNFKSDIWAVGCVIFELLTLKRTFDATNPLNLCVKIVQGIRAMEVDSSQYSLELIQMVHSCLDQDPEQRPTADELLDRPLLRKRRREMEEKVTLLNAPTKRPRSSTVTEAPIAVVTSRTSEVYVWGGGKSTPQKLDVIKSGCSARQVCAGNTHFAVVTVEKELYTWVNMQGGTKLHGQLGHGDKASYRQPKHVEKLQGKAIRQVSCGDDFTVCVTDEGQLYAFGSDYYGCMGVDKVAGPEVLEPMQLNFFLSNPVEQVSCGDNHVVVLTRNKEVYSWGCGEYGRLGLDSEEDYYTPQKVDVPKALIIVAVQCGCDGTFLLTQSGKVLACGLNEFNKLGLNQCMSGIINHEAYHEVPYTTSFTLAKQLSFYKIRTIAPGKTHTAAIDERGRLLTFGCNKCGQLGVGNYKKRLGINLLGGPLGGKQVIRVSCGDEFTIAATDDNHIFAWGNGGNGRLAMTPTERPHGSDICTSWPRPIFGSLHHVPDLSCRGWHTILIVEKVLNSKTIRSNSSGLSIGTVFQSSSPGGGGGGGGGEEEDSQQESETPDPSGGFRGTMEADRGMEGLISPTEAMGNSNGASSSCPGWLRKELENAEFIPMPDSPSPLSAAFSESEKDTLPYEELQGLKVASEAPLEHKPQVEASSPRLNPAVTCAGKGTPLTPPACACSSLQVEVERLQGLVLKCLAEQQKLQQENLQIFTQLQKLNKKLEGGQQVGMHSKGTQTAKEEMEMDPKPDLDSDSWCLLGTDSCRPSL

SEQ ID NO: 967 - protein, 99 aa, Homo sapiens
MAEGNTLISVDYEIFGKVQGVFFRKHTQAEGKKLGLVGWVQNTDRGTVQGQLQGPISKVRHMQEWLETRGSPKSHIDKANFNNEKVILKLDYSDFQIVK

SEQ ID NO: 968 - protein, 148 aa, Homo sapiens
MRFLAATFLLLALSTAAQAEPVQFKDCGSVDGVIKEVNVSPCPTQPCQLSKGQSYSVNVTFTSNIQSKSSKAVVHGILMGVPVPFPIPEPDGCKSGINCPIQKDKTYSYLNKLPVKSEYPSIKLVVEWQLQDDKNQSLFCWEIPVSHL

SEQ ID NO: 969 - protein, 796 aa, Homo sapiens
MSAAQVSSSRRQSCYLCDLPRMPWAMIWDFSEPVCRGCVNYEGADRIEFVIETARQLKRAHGCFQDGRSPGPPPPVGVKTVALSAKEAAAAAAAAAAAAAAAQQQQQQQQQQQQQQQQQQQQQQQQQLNHVDGSSKPAVLAAPSGLERYGLSAAAAAAAAAAAAVEQRSRFEYPPPPVSLGSSSHTARLPNGLGGPNGFPKPTPEEGPPELNRQSPNSSSAAASVASRRGTHGGLVTGLPNPGGGGGPQLTVPPNLLPQTLLNGPASAAVLPPPPPHALGSRGPPTPAPPGAPGGPACLGGTPGVSATSSSASSSTSSSVAEVGVGAGGKRPGSVSSTDQERELKEKQRNAEALAELSESLRNRAEEWASKPKMVRDTLLTLAGCTPYEVRFKKDHSLLGRVFAFDAVSKPGMDYELKLFIEYPTGSGNVYSSASGVAKQMYQDCMKDFGRGLSSGFKYLEYEKKHGSGDWRLLGDLLPEAVRFFKEGVPGADMLPQPYLDASCPMLPTALVSLSRAPSAPPGTGALPPAAPSGRGAAASLRKRKASPEPPDSAEGALKLGEEQQRQQWMANQSEALKLTMSAGGFAAPGHAAGGPPPPPPPLGPHSNRTTPPESAPQNGPSPMAALMSVADTLGTAHSPKDGSSVHSTTASARRNSSSPVSPASVPGQRRLASRNGDLNLQVAPPPPSAHPGMDQVHPQNIPDSPMANSGPLCCTICHERLEDTHFVQCPSVPSHKFCFPCSRESIKAQGATGEVYCPSGEKCPLVGSNVPWAFMQGEIATILAGDVKVKKERDP

SEQ ID NO: 970 - protein, 483 aa, Homo sapiens
MSNKLLSPHPHSVVLRSEFKMASSPAVLRASRLYQWSLKSSAQFLGSPQLRQVGQIIRVPARMAATLILEPAGRCCWDEPVRIAVRGLAPEQPVTLRASLRDEKGALFQAHARYRADTLGELDLERAPALGGSFAGLEPMGLLWALEPEKPLVRLVKRDVRTPLAVELEVLDGHDPDPGRLLCQTRHERYFLPPGVRREPVRVGRVRGTLFLPPEPGPFPGIVDMFGTGGGLLEYRASLLAGKGFAVMALAYYNYEDLPKTMETLHLEYFEEAMNYLLSHPEVKGPGVGLLGISKGGELCLSMASFLKGITAAVVINGSVANVGGTLHYKGETLPPVGVNRNRIKVTKDGYADIVDVLNSPLEGPDQKSFIPVERAESTFLFLVGQDDHNWKSEFYANEACKRLQAHGRRKPQIICYPETGHYIEPPYFPLCRASLHALVGSPIIWGGEPRAHAMAQVDAWKQLQTFFHKHLGGHEGTIPSKV

SEQ ID NO: 971 - protein, 526 aa, Homo sapiens
MVNEGPNQEESDDTPVPESALQADPSVSVHPSVSVHPSVSINPSVSVHPSSSAHPSALAQPSGLAHPSSSGPEDLSVIKVSRRRWAVVLVFSCYSMCNSFQWIQYGSINNIFMHFYGVSAFAIDWLSMCYMLTYIPLLLPVAWLLEKFGLRTIALTGSALNCLGAWVKLGSLKPHLFPVTVVGQLICSVAQVFILGMPSRIASVWFGANEVSTACSVAVFGNQLGIAIGFLVPPVLVPNIEDRDELAYHISIMFYIIGGVATLLLILVIIVFKEKPKYPPSRAQSLSYALTSPDASYLGSIARLFKNLNFVLLVITYGLNAGAFYALSTLLNRMVIWHYPGEEVNAGRIGLTIVIAGMLGAVISGIWLDRSKTYKETTLVVYIMTLVGMVVYTFTLNLGHLWVVFITAGTMGFFMTGYLPLGFEFAVELTYPESEGISSGLLNISAQVFGIIFTISQGQIIDNYGTKPGNIFLCVFLTLGAALTAFIKADLRRQKANKETLENKLQEEEEESNTSKVPTAVSEDHL

SEQ ID NO: 972 - protein, 412 aa, Homo sapiens
MKMHLQRALVVLALLNFATVSLSLSTCTTLDFGHIKKKRVEAIRGQILSKLRLTSPPEPTVMTHVPYQVLALYNSTRELLEEMHGEREEGCTQENTESEYYAKEIHKFDMIQGLAEHNELAVCPKGITSKVFRFNVSSVEKNRTNLFRAEFRVLRVPNPSSKRNEQRIELFQILRPDEHIAKQRYIGGKNLPTRGTAEWLSFDVTDTVREWLLRRESNLGLEISIHCPCHTFQPNGDILENIHEVMEIKFKGVDNEDDHGRGDLGRLKKQKDHHNPHLILMMIPPHRLDNPGQGGQRKKRALDTNYCFRNLEENCCVRPLYIDFRQDLGWKWVHEPKGYYANFCSGPCPYLRSADTTHSTVLGLYNTLNPEASASPCCVPQDLEPLTILYYVGRTPKVEQLSNMVVKSCKCS

SEQ ID NO: 973 - protein, 107 aa, Homo sapiens
MAASAARGAAALRRSINQPVAFVRRIPWTAASSQLKEHFAQFGHVRRCILPFDKETGFHRGLGWVQFSSEEGLRNALQQENHIIDGVKVHTRRPKLPQTSDDEKKDF

SEQ ID NO: 974 - protein, 736 aa, Homo sapiens
MKEMSANTVLDSQRQQKHYGITSPISLASPKEIDHIYTQKLIDAMKPFGVFEDEEELNHRLVVLGKLNNLVKEWISDVSESKNLPPSVVATVGGKIFTFGSYRLGVHTKGADIDALCVAPRHVERSDFFQSFFEKLKHQDGIRNLRAVEDAFVPVIKFEFDGIEIDLVFARLAIQTISDNLDLRDDSRLRSLDIRCIRSLNGCRVTDEILHLVPNKETFRLTLRAVKLWAKRRGIYSNMLGFLGGVSWAMLVARTCQLYPNAAASTLVHKFFLVFSKWEWPNPVLLKQPEESNLNLPVWDPRVNPSDRYHLMPIITPAYPQQNSTYNVSTSTRTVMVEEFKQGLAVTDEILQGKSDWSKLLEPPNFFQKYRHYIVLTASASTEENHLEWVGLVESKIRVLVGNLERNEFITLAHVNPQSFPGNKEHHKDNNYVSMWFLGIIFRRVENAESVNIDLTYDIQSFTDTVYRQANNINMLKEGMKIEATHVKKKQLHHYLPAEILQKKKKQSLSDVNRSSGGLQSKRLSLDSSCLDSSRDTDNGTPFNSPASKSDSPSVGETERNSAEPAAVIVEKPLSVPPAQGLSIPVIGAKVDSTVKTVSPPTVCTIPTVVGRNVIPRITTPHNPAQGQPHLNGMSNITKTVTPKRSHSPSIDGTPKRLKDVEKFIRLESTFKDPRTAEERKRKSVDAIGGESMPIPTIDTSRKKRLPSKELPDSSSPVPANNIRVIKNSIRLTLNR

SEQ ID NO: 975 - protein, 332 aa, Homo sapiens
MLAVHFDKPGGPENLYVKEVAKPSPGEGEVLLKVAASALNRADLMQRQGQYDPPPGASNILGLEASGHVAELGPGCQGHWKIGDTAMALLPGGGQAQYVTVPEGLLMPIPEGLTLTQAAAIPEAWLTAFQLLHLVGNVQAGDYVLIHAGLSGVGTAAIQLTRMAGAIPLVTAGSQKKLQMAEKLGAAAGFNYKKEDFSEATLKFTKGAGVNLILDCIGGSYWEKNVNCLALDGRWVLYGLMGGGDINGPLFSKLLFKRGSLITSLLRSRDNKYKQMLVNAFTEQILPHFSTEGPQRLLPVLDRIYPVTEIQEAHKYMEANKNIGKIVLELPQ

SEQ ID NO: 976 - protein, 205 aa, Homo sapiens
MAHGPGALMLKCVVVGDGAVGKTCLLMSYANDAFPEEYVPTVFDHYAVSVTVGGKQYLLGLYDTAGQEDYDRLRPLSYPMTDVFLICFSVVNPASFQNVKEEWVPELKEYAPNVPFLLIGTQIDLRDDPKTLARLNDMKEKPICVEQGQKLAKEIGACCYVECSALTQKGLKTVFDEAIIAILTPKKHTVKKRIGSRCINCCLIT

SEQ ID NO: 977 - protein, 689 aa, Homo sapiens
MATKTAGVGRWEVVKKGRRPGVGAGAGGRGGGRNRRALGEANGVWKYDLTPAIQTTSTLYERGFENIMKRQNKEQVPPPAVEPKKPGNKKQPKKVATPPNQNQKQGRFRSLEEALKALDVADLQKELDKSQSVFSGNPSIWLKDLASYLNYKLQAPLSEPTLSQHTHDYPYSLVSRELRGIIRGLLAKAAGSLELFFDHCLFTMLQELDKTPGESLHGYRICIQAILQDKPKIATANLGKFLELLRSHQSRPAKCLTIMWALGQAGFANLTEGLKVWLGIMLPVLGIKSLSPFAITYLDRLLLMHPNLTKGFGMIGPKDFFPLLDFAYMPNNSLTPSLQEQLCQLYPRLKVLAFGAKPDSTLHTYFPSFLSRATPSCPPEMKKELLSSLTECLTVDPLSASVWRQLYPKHLSQSSLLLEHLLSSWEQIPKKVQKSLQETIQSLKLTNQELLRKGSSNNQDVVTCDMACKGLLQQVQGPRLPWTRLLLLLLVFAVGFLCHDLRSHSSFQASLTGRLLRSSGFLPASQQACAKLYSYSLQGYSWLGETLPLWGSHLLTVVRPSLQLAWAHTNATVSFLSAHCASHLAWFGDSLTSLSQRLQIQLPDSVNQLLRYLRELPLLFHQNVLLPLWHLLLEALAWAQEHCHEACRGEVTWDCMKTQLSEAVHWTWLCLQDITVAFLDWALALISQQ

SEQ ID NO: 978 - protein, 518 aa, Homo sapiens
MECDLMETDILESLEDLGYKGPLLEDGALSQAVSAGASSPEFTKLCAWLVSELRVLCKLEENVQATNSPSEAEEFQLEVSGLLGEMNCPYLSLTSGDVTKRLLIQKNCLLLLTYLISELEAARMLCVNAPPKKAQEGGGSEVFQELKGICIALGMSKPPANITMFQFFSGIEKKLKETLAKVPPNHVGKPLLKKPMGPAHWEKIEAINQAIANEYEVRRKLLIKRLDVTVQSFGWSDRAKSQTEKLAKVYQPKRSVLSPKTTISVAHLLAARQDLSKILRTSSGSIREKTACAINKVLMGRVPDRGGRPNEIEPPPPEMPPWQKRQDGPQQQTGGRGGGRGGYEHSSYGGRGGHEQGGGRGGRGGYDHGGRGGGRGNKHQGGWTDGGSGGGGGYQDGGYRDSGFQPGGYHGGHSSGGYQGGGYGGFQTSSSYTGSGYQGGGYQQDNRYQDGGHHGDRGGGRGGRGGRGGRGGRAGQGGGWGGRGSQNYHQGGQFEQHFQHGGYQYNHSGFGQGRHYTS

SEQ ID NO: 979 - protein, 244 aa, Homo sapiens
MQPPGPPPAYAPTNGDFTFVSSADAEDLSGSIASPDVKLNLGGDFIKESTATTFLRQRGYGWLLEVEDDDPEDNKPLLEELDIDLKDIYYKIRCVLMPMPSLGFNRQVVRDNPDFWGPLAVVLFFSMISLYGQFRVVSWIITIWIFGSLTIFLLARVLGGEVAYGQVLGVIGYSLLPLIVIAPVLLVVGSFEVVSTLIKLFGVFWAAYSAASLLVGEEFKTKKPLLIYPIFLLYIYFLSLYTGV

SEQ ID NO: 980 - protein, 909 aa, Homo sapiens
MEPDIIRMYSSSPPPLDNGAEDDDDDEFGEFGGFSEVSPSGVGFVDFDTPDYTRPKEEFVPSNHFMPIHEFSENVDSLTSFKSIKNGNDKDITAELSAPVKGQSDVLLSTTSKEIISSEMLATSIDGMERPGNLNKVVEQRQNVGTLESFSPGDFRTNMNVVHQNKQLESCNGEKPPCLEILTNGFAVLETVNPQGTDDLDNVADSKGRKPLSTHSTEYNLDSVPSPAEEFADFATFSKKERIQLEEIECAVLNDREALTIRENNKINRVNELNSVKEVALGRSLDNKGDTDGEDQVCVSEISIVTNRGFSVEKQGLPTLQQDEFLQSGVQSKAWSLVDSADNSEAIRREQCKTEEKLDLLTSKCAHLCMDSVKTSDDEVGSPKEESRKFTNFQSPNIDPTEENDLDDSLSVKNGDSSNDFVTCNDINEDDFGDFGDFGSASGSTPPFVTGTQDSMSDATFEESSEHFPHFSEPGDDFGEFGDINAVSCQEETILTKSDLKQTSDNLSEECQLARKSSGTGTEPVAKLKNGQEGEIGHFDSVPNIQDDCNGFQDSDDFADFSSAGPSQVVDWNAFEDEQKDSCSWAAFGDQQATESHHRKEAWQSHRTDENIDTPGTPKTHSVPSATSKGAVASGHLQESATSVQTALLNRLERIFEACFPSILVPDAEEEVTSLKHLLETSTLPIKTREALPESGELLDVWTELQDIHDAHGLRYQWGGSHSNKKLLSSLGIDTRNILFTGNKKQPVIVPMYAAGLGMLEPTKEPLKPLSAAEKIASIGQTATMSPDMNTCTSDQFQESLPPVQFDWSSSGLTNPLDGVDPELYELTTSKLEISTSSLKVTDAFARLMSTVEKTSTSTSRKPKREEHLSEEAIKVIAGLPDLTFMHAKVLMFPATLTPSTSSQEKADG

SEQ ID NO: 981 - protein, 172 aa, Homo sapiens
MAGSVADSDAVVKLDDGHLNNSLSSPVQADVYFPRLIVPFCGHIKGGMRPGKKVLVMGIVDLNPESFAISLTCGDSEDPPADVAIELKAVFTDRQLLRNSCISGERGEEQSAIPYFPFIPDQPFRVEILCEHPRFRVFVDGHQLFDFYHRIQTLSAIDTIKINGDLQITKLG

SEQ ID NO: 982 - protein, 101 aa, Homo sapiens
MVCEKCEKKLGTVITPDTWKDGARNTTESGGRKLNENKALTSKKARFDPYGKNKFSTCRICKSSVHQPGSHYCQGCAYKKGICAMCGKKVLDTKNYKQTSV

SEQ ID NO: 983 - protein, 398 aa, Homo sapiens
MWLLLTMASLISVLGTTHGLFGKLHPGSPEVTMNISQMITYWGYPNEEYEVVTEDGYILEVNRIPYGKKNSGNTGQRPVVFLQHGLLASATNWISNLPNNSLAFILADAGYDVWLGNSRGNTWARRNLYYSPDSVEFWAFSFDEMAKYDLPATIDFIVKKTGQKQLHYVGHSQGTTIGFIAFSTNPSLAKRIKTFYALAPVATVKYTKSLINKLRFVPQSLFKFIFGDKIFYPHNFFDQFLATEVCSREMLNLLCSNALFIICGFDSKNFNTSRLDVYLSHNPAGTSVQNMFHWTQAVKSGKFQAYDWGSPVQNRMHYDQSQPPYYNVTAMNVPIAVWNGGKDLLADPQDVGLLLPKLPNLIYHKEIPFYNHLDFIWAMDAPQEVYNDIVSMISEDKK

SEQ ID NO: 984 - protein, 317 aa, Homo sapiens
MSCTRMIQVLDPRPLTSSVMPVDVAMRLCLAHSPPVKSFLGPYDEFQRRHFVNKLKPLKSCLNIKHKAKSQNDWKCSHNQAKKRVVFADSKGLSLTAIHVFSDLPEEPAWDLQFDLLDLNDISSALKHHEEKNLILDFPQPSTDYLSFRSHFQKNFVCLENCSLQERTVTGTVKVKNVSFEKKVQIRITFDSWKNYTDVDCVYMKNVYGGTDSDTFSFAIDLPPVIPTEQKIEFCISYHANGQVFWDNNDGQNYRIVHVQWKPDGVQTQMAPQDCAFHQTSPKTELESTIFGSPRLASGLFPEWQSWGRMENLASYR

SEQ ID NO: 985 - protein, 228 aa, Homo sapiens
MERVKMINVQRLLEAAEFLERRERECEHGYASSFPSMPSPRLQHSKPPRRLSRAQKHSSGSSNTSTANRSTHNELEKNRRAHLRLCLERLKVLIPLGPDCTRHTTLGLLNKAKAHIKKLEEAERKSQHQLENLEREQRFLKWRLEQLQGPQEMERIRMDSIGSTISSDRSDSEREEIEVDVESTEFSHGEVDNISTTSISDIDDHSSLPSIGSDEGYSSASVKLSFTS

SEQ ID NO: 986 - protein, 243 aa, Homo sapiens
MSSYFVNSLFSKYKTGESLRPNYYDCGFAQDLGGRPTVVYGPSSGGSFQHPSQIQEFYHGPSSLSTAPYQQNPCAVACHGDPGNFYGYDPLQRQSLFGAQDPDLVQYADCKLAAASGLGEEAEGSEQSPSPTQLFPWMRPQAAAGRRRGRQTYSRYQTLELEKEFLFNPYLTRKRRIEVSHALGLTERQVKIWFQNRRMKWKKENNKDKFPSSKCEQEELEKQKLERAPEAADEGDAQKGDKK

SEQ ID NO: 987 - protein, 145 aa, Homo sapiens
MGGHPQLRLVKALLLLGLNPVSASLQDQHCESLSLASNISGLQCNASVDLIGTCWPRSPAGQLVVRPCPAFFYGVRYNTTNNGYRECLANGSWAARVNYSECQEILNEEKKSKVHYHVAVIINYLGHCISLVALLVAFVLFLRLS

SEQ ID NO: 988 - protein, 367 aa, Homo sapiens
MVMEVGTLDAGGLRALLGERAAQCLLLDCRSFFAFNAGHIAGSVNVRFSTIVRRRAKGAMGLEHIVPNAELRGRLLAGAYHAVVLLDERSAALDGAKRDGTLALAAGALCREARAAQVFFLKGGYEAFSASCPELCSKQSTPMGLSLPLSTSVPDSAESGCSSCSTPLYDQGGPVEILPFLYLGSAYHASRKDMLDALGITALINVSANCPNHFEGHYQYKSIPVEDNHKADISSWFNEAIDFIDSIKNAGGRVFVHCQAGISRSATICLAYLMRTNRVKLDEAFEFVKQRRSIISPNFSFMGQLLQFESQVLAPHCSAEAGSPAMAVLDRGTSTTTVFNFPVSIPVHSTNSALSYLQSPITTSPSC

SEQ ID NO: 989 - protein, 370 aa, Homo sapiens
MKIKDAKKPSFPWFGMDIGGTLVKLSYFEPIDITAEEEQEEVESLKSIRKYLTSNVAYGSTGIRDVHLELKDLTLFGRRGNLHFIRFPTQDLPTFIQMGRDKNFSTLQTVLCATGGGAYKFEKDFRTIGNLHLHKLDELDCLVKGLLYIDSVSFNGQAECYYFANASEPERCQKMPFNLDDPYPLLVVNIGSGVSILAVHSKDNYKRVTGTSLGGGTFLGLCSLLTGCESFEEALEMASKGDSTQADKLVRDIYGGDYERFGLPGWAVASSFGNMIYKEKRESVSKEDLARATLVTITNNIGSVARMCAVNEKINRVVFVGNFLRVNTLSMKLLAYALDYWSKGQLKALFLEHEGYFGAVGALLGLPNFS

SEQ ID NO: 990 - protein, 267 aa, Homo sapiens
MASPSKGNDLFSPDEEGPAVVAGPGPGPGGAEGAAEERRVKVSSLPFSVEALMSDKKPPKEASPLPAESASAGATLRPLLLSGHGAREAHSPGPLVKPFETASVKSENSEDGAAWMQEPGRYSPPPRHMSPTTCTLRKHKTNRKPRTPFTTSQLLALERKFRQKQYLSIAERAEFSSSLNLTETQVKIWFQNRRAKAKRLQEAELEKLKMAAKPMLPSSFSLPFPISSPLQAASIYGASYPFHRPVLPIPPVGLYATPVGYGMYHLS

SEQ ID NO: 991 - protein, 139 aa, Homo sapiens
MASLFRSYLPAIWLLLSQLLRESLAAELRGCGPRFGKHLLSYCPMPEKTFTTTPGGWLLESGRPKEMVSTSNNKDGQALGTTSEFIPNLSPELKKPLSEGQPSLKKIILSRKKRSGRHRFDPFCCEVICDDGTSVKLCT

SEQ ID NO: 992 - protein, 189 aa, Homo sapiens
MARSFSLLMVVLVLSYKSICSLGCDLPQTHSLRNRRALILLAQMGRISPFSCLKDRHEFRFPEEEFDGHQFQKTQAISVLHEMIQQTFNLFSTEDSSAAWEQSLLEKFSTELYQQLNDLEACVIQEVGVEETPLMNEDFILAVRKYFQRITLYLMEKKYSPCAWEVVRAEIMRSFSFSTNLKKGLRRKD

SEQ ID NO: 993 - protein, 500 aa, Homo sapiens
MASVAQESAGSQRRLPPRHGALRGLLLLCLWLPSGRAALPPAAPLSELHAQLSGVEQLLEEFRRQLQQERPQEELELELRAGGGPQEDCPGPGSGGYSAMPDAIIRTKDSLAAGASFLRAPAAVRGWRQCVAACCSEPRCSVAVVELPRRPAPPAAVLGCYLFNCTARGRNVCKFALHSGYSSYSLSRAPDGAALATARASPRQEKDAPPLSKAGQDVVLHLPTDGVVLDGRESTDDHAIVQYEWALLQGDPSVDMKVPQSGTLKLSHLQEGTYTFQLTVTDTAGQRSSDNVSVTVLRAAYSTGGCLHTCSRYHFFCDDGCCIDITLACDGVQQCPDGSDEDFCQNLGLDRKMVTHTAASPALPRTTGPSEDAGGDSLVEKSQKATAPNKPPALSNTEKRNHSAFWGPESQIIPVMPDSSSSGKNRKEESYIFESKGDGGGGEHPAPETGAVLPLALGLAITALLLLMVACRLRLVKQKLKKARPITSEESDYLINGMYL

SEQ ID NO: 994 - protein, 1544 aa, Homo sapiens
MAAPQDLDIAVWLATVHLEQYADTFRRHGLATAGAARGLGHEELKQLGISATGHRKRILRLLQTGTEEGSLDPKSDSAMEPSPSPAPQAQPPKPVPKPRTVFGGLSGPATTQRPGLSPALGGPGVSRSPEPSPRPPPLPTSSSEQSSALNTVEMMPNSIYFGLDSRGRAQAAQDKAPDSSQISAPTPALRPTTGTVHIMDPGCLYYGVQPVGTPGAPDRRESRGVCQGRAEHRLSRQDLEAREDAGYASLELPGDSTLLSPTLETEETSDDLISPYASFSFTADRLTPLLSGWLDKLSPQGNYVFQRRFVQFNGRSLMYFGSDKDPFPKGVIPLTAIEMTRSSKDNKFQVITGQRVFVFRTESEAQRDMWCSTLQSCLKEQRLLGHPRPPQPPRPLRTGMLELRGHKAKVFAALSPGELALYKSEQAFSLGIGICFIELQGCSVRETKSRSFDLLTPHRCFSFTAESGGARQSWAAALQEAVTETLSDYEVAEKIWSNRANRQCADCGSSRPDWAAVNLGVVICKQCAGQHRALGSGISKVQSLKLDTSVWSNEIVQLFIVLGNDRANRFWAGTLPPGEGLHPDATPGPRGEFISRKYRLGLFRKPHPQYPDHSQLLQALCAAVARPNLLKNMTQLLCVEAFEGEEPWFPPAPDGSCPGLLPSDPSPGVYNEVVVRATYSGFLYCSPVSNKAGPSPPRRGRDAPPRLWCVLGAALEMFASENSPEPLSLIQPQDIVCLGVSPPPTDPGDRFPFSFELILAGGRIQHFGTDGADSLEAWTSAVGKWFSPLSCHQLLGPGLLRLGRLWLRSPSHTAPAPGLWLSGFGLLRGDHLFLCSAPGPGPPAPEDMVHLRRLQEISVVSAADTPDKKEHLVLVETGRTLYLQGEGRLDFTAWNAAIGGAAGGGGTGLQEQQMSRGDIPIIVDACISFVTQHGLRLEGVYRKGGARARSLRLLAEFRRDARSVKLRPGEHFVEDVTDTLKRFFRELDDPVTSARLLPRWREAAELPQKNQRLEKYKDVIGCLPRVNRRTLATLIGHLYRVQKCAALNQMCTRNLALLFAPSVFQTDGRGEHEVRVLQELIDGYISVFDIDSDQVAQIDLEVSLITTWKDVQLSQAGDLIMEVYIEQQLPDNCVTLKVSPTLTAEELTNQVLEMRGTAAGMDLWVTFEIREHGELERPLHPKEKVLEQALQWCQLPEPCSASLLLKKVPLAQAGCLFTGIRRESPRVGLLRCREEPPRLLGSRFQERFFLLRGRCLLLLKEKKSSKPEREWPLEGAKVYLGIRKKLKPPTPWGFTLILEKMHLYLSCTDEDEMWDWTTSILKAQHDDQQPVVLRRHSSSDLARQKFGTMPLLPIRGDDSGATLLSANQTLRRLHNRRTLSMFFPMKSSQGSVEEQEELEEPVYEEPVYEEVGAFPELIQDTSTSFSTTREWTVKPENPLTSQKSLDQPFLSKSSTLGQEERPPEPPPGPPSKSSPQARGSLEEQLLQELSSLILRKGETTAGLGSPSQPSSPQSPSPTGLPTQTPGFPTQPPCTSSPPSSQPLT

SEQ ID NO: 995 - protein, 801 aa, Homo sapiens
MEASGKLICRQRQVLFSFLLLGLSLAGAAEPRSYSVVEETEGSSFVTNLAKDLGLEQREFSRRGVRVVSRGNKLHLQLNQETADLLLNEKLDREDLCGHTEPCVLRFQVLLESPFEFFQAELQVIDINDHSPVFLDKQMLVKVSESSPPGTAFPLKNAEDLDIGQNNIENYIISPNSYFRVLTRKRSDGRKYPELVLDKALDREEEAELRLTLTALDGGSPPRSGTAQVYIEVVDVNDNAPEFEQPFYRVQISEDSPISFLVVKVSATDVDTGVNGEISYSLFQASDEISKTFKVDFLTGEIRLKKQLDFEKFQSYEVNIEARDAGGFSGKCTVLIQVIDVNDHAPEVTMSAFTSPIPENAPETVVALFSVSDLDSGENGKISCSIQEDLPFLLKSSVGNFYTLLTETPLDRESRAEYNVTITVTDLGTPRLTTHLNMTVLVSDVNDNAPAFTQTSYTLFVRENNSPALHIGSVSATDRDSGTNAQVTYSLLPPQDPHLPLASLVSINTDNGHLFALRSLDYEALQAFEFRVGASDRGSPALSSEALVRVLVLDANDNSPFVLYPLQNGSAPCTELVPRAAEPGYLVTKVVAVDGDSGQNAWLSYQLLKATEPGLFGVWAHNGEVRTARLLSERDAAKQRLVVLVKDNGEPPCSATATLHVLLVDGFSQPYLPLPEAAPAQGQADSLTVYLVVALASVSSLFLFSVLLFVAVLLCRRSRAASVGRCSVPEGPFPGHLVDVRGTGSLSQNYQYEVCLAGGSGTNEFQLLKPVLPNIQGHSFGPEMEQNSNFRNGFGFSLQLK

SEQ ID NO: 996 - protein, 800 aa, Homo sapiens
MAVRELCFPRQRQVLFLFLFWGVSLAGSGFGRYSVTEETEKGSFVVNLAKDLGLAEGELAARGTRVVSDDNKQYLLLDSHTGNLLTNEKLDREKLCGPKEPCMLYFQILMDDPFQIYRAELRVRDINDHAPVFQDKETVLKISENTAEGTAFRLERAQDPDGGLNGIQNYTISPNSFFHINISGGDEGMIYPELVLDKALDREEQGELSLTLTALDGGSPSRSGTSTVRIVVLDVNDNAPQFAQALYETQAPENSPIGFLIVKVWAEDVDSGVNAEVSYSFFDASENIRTTFQINPFSGEIFLRELLDYELVNSYKINIQAMDGGGLSARCRVLVEVLDTNDNPPELIVSSFSNSVAENSPETPLAVFKINDRDSGENGKMVCYIQENLPFLLKPSVENFYILITEGALDREIRAEYNITITVTDLGTPRLKTEHNITVLVSDVNDNAPAFTQTSYTLFVRENNSPALHIGSVSATDRDSGTNAQVTYSLLPPQDPHLPLASLVSINADNGHLFALRSLDYEALQAFEFRVGATDRGSPALSREALVRVLVLDANDNSPFVLYPLQNGSAPCTELVPRAAEPGYLVTKVVAVDGDSGQNAWLSYQLLKATEPGLFGVWAHNGEVRTARLLSERDAAKHRLVVLVKDNGEPPRSATATLHLLLVDGFSQPYLPLPEAAPAQAQAEADLLTVYLVVALASVSSLFLLSVLLFVAVRLCRRSRAASVGRCSVPEGPFPGHLVDVRGAETLSQSYQYEVCLTGGPGTSEFKFLKPVISDIQAQGPGRKGEENSTFRNSFGFNIQ

SEQ ID NO: 997 - protein, 798 aa, Homo sapiens
MEIRGALDLRKRQVLIFLVLLGLSRAGTESAHYSVAEETEIGSFVANLARDLGLGVEELSSREARVVSDDNKKYLHLDLLTGNLLLNEKLDRDELCGSTEPCVLHFQVVLENPLQFFRFELCVKDINDHSPTFLDKEILIKISEGTTVGATFLMESAQDLDVGSNSLQNYTISPNSHFYIKIPDSSDRKIYPELVLDRALDYEQEAELRLTLTAVDGGSPPKSGTTLVLIKVLDINDNAPEFPQSLYEVQVPEDRPLGSWIATISAKDLDAGNYGKISYTFFHASEDIRKTFEINPISGEVNLRSPLDFEVIQSYTINIQATDGGGLSGKCTLLVKVMDINDNPPEVTISSITKRIPENASETLVALFSILDQDSGDNGRMICSIQDNLPFFLKPTFKNFFTLVSEKALDRESQAEYNITITVTDLGTPRLKTEYNITVLLSDVNDNAPTFTQTSYTLFVRENNSPALHIGSVSATDRDSGTNAQVNYSLLPPQDRHLPLASLVSINADNGHLFALRSLDYEALQEFEFRVGATDRGSPALSSEALVRVLVLDANDNSPFVLYPLQNGSAPCTELVPRAAEPGYLVTKVVAVDGDSGQNAWLSYQLLKATEPGLFGVWAHNGEVRTARLLSERDAAKHRLVVLVKDNGEPPRSATATLHVLLVDGFSQPYLPLPEAAPAQAQADSLTVYLVVALASVSSLFLFSVLLFVAVRLCRRSRAASVGRCSVPEGPFPGHLVDVSGTGTLSQSYQYEVCLTGGSGTNEFKFLKPIIPNFQVHDTGRNMGEIENFRNSFGLNIQ

SEQ ID NO: 998 - protein, 795 aa, Homo sapiens
MENGGAGTLQIRQVLLFFVLLGMSQAGSETGNFLVMEELQSGSFVGNLAKTLGLEVSELSSRGARVVSNDNKECLQLDTNTGDLLLREMLDREELCGSNEPCVLYFQVLMKNPTQFLQIELQVRDINDHSPVFLEKEMLLEIPENSPVGAVFLLESAKDLDVGINAVKSYTINPNSHFHVKIRVNPDNRKYPELVLDKALDYEERPELSFILTALDGGSPPRSGTALVRVVVVDINDNSPEFEQAFYEVKILENSILGSLVVTVSAWDLDSGTNSELSYTFSHASEDIRKTFEINQKSGDITLTAPLDFEAIESYSIIIQATDGGGLFGKSTVRIQVMDVNDNAPEITVSSITSPIPENTPETVVMVFRIRDRDSGDNGKMVCSIPEDIPFVLKSSVNNYYTLETERPLDRESRAEYNITITVTDLGTPRLKTEHNITVLVSDVNDNAPAFTQTSYALFVRENNSPALHIGSISATDRDSGTNAQVNYSLLPSQDPHLPLASLVSINADNGHLFALRSLDYEALQGFQFRVGATDHGSPALSSEALVRVLVLDANDNSPFVLYPLQNGSAPCTELVPWAAEPGYLVTKVVAVDGDSGQNAWLSYQLLKATEPGLFGVWAHNGEVRTARLLSERDAAKHRLVVLVKDNGEPPRSATATLHVLLVDGFSQPYLPLPEAAPAQAQADSLTVYLVVALASVSSLFLFSVLLFVAVRLCRRSRAAPVGRCSVPEGPFPGHLVDVSGTGTLSQSYHYEVCVTGGSRSNKFKFLKPIIPNFLPQSTGSEVEENPPFQNNLGF

SEQ ID NO: 999 - protein, 245 aa, Homo sapiens
MTSSYGHVLERQPALGGRLDSPGNLDTLQAKKNFSVSHLLDLEEAGDMVAAQADENVGEAGRSLLESPGLTSGSDTPQQDNDQLNSEEKKKRKQRRNRTTFNSSQLQALERVFERTHYPDAFVREDLARRVNLTEARVQVWFQNRRAKFRRNERAMLANKNASLLKSYSGDVTAVEQPIVPRPAPRPTDYLSWGTASPYSAMATYSATCANNSPAQGINMANSIANLRLKAKEYSLQRNQVPTVN

SEQ ID NO: 1000 - protein, 1299 aa, Homo sapiens
MSLQEMFRFPMGLLLGSVLLVASAPATLEPPGCSNKEQQVTVSHTYKIDVPKSALVQVDADPQPLSDDGASLLALGEAREEQNIIFRHNIRLQTPQKDCELAGSVQDLLARVKKLEEEMVEMKEQCSAQRCCQGVTDLSRHCSGHGTFSLETCSCHCEEGREGPACERLACPGACSGHGRCVDGRCLCHEPYVGADCGYPACPENCSGHGECVRGVCQCHEDFMSEDCSEKRCPGDCSGHGFCDTGECYCEEGFTGLDCAQVVTPQGLQLLKNTEDSLLVSWEPSSQVDHYLLSYYPLGKELSGKQIQVPKEQHSYEILGLLPGTKYIVTLRNVKNEVSSSPQHLLATTDLAVLGTAWVTDETENSLDVEWENPSTEVDYYKLRYGPMTGQEVAEVTVPKSSDPKSRYDITGLHPGTEYKITVVPMRGELEGKPILLNGRTEIDSPTNVVTDRVTEDTATVSWDPVQAVIDKYVVRYTSADGDTKEMAVHKDESSTVLTGLKPGEAYKVYVWAERGNQGSKKADTNALTEIDSPANLVTDRVTENTATISWDPVQATIDKYVVRYTSADDQETREVLVGKEQSSTVLTGLRPGVEYTVHVWAQKGDRESKKADTNAPTDIDSPKNLVTDRVTENMATVSWDPVQAAIDKYVVRYTSAGGETREVPVGKEQSSTVLTGLRPGMEYMVHVWAQKGDQESKKADTKAQTDIDSPQNLVTDRVTENMATVSWDPVRATIDRYVVRYTSAKDGETREVPVGKEQSSTVLTGLRPGVEYTVHVWAQKGAQESKKADTKAQTDIDSPQNLVTDWVTENTATVSWDPVQATIDRYVVHYTSANGETREVPVGKEQSSTVLTGLRPGMEYTVHVWAQKGNQESKKADTKAQTEIDGPKNLVTDWVTENMATVSWDPVQATIDKYMVRYTSADGETREVPVGKEHSSTVLTGLRPGMEYMVHVWAQKGAQESKKADTKAQTELDPPRNLRPSAVTQSGGILTWTPPSAQIHGYILTYQFPDGTVKEMQLGREDQRFALQGLEQGATYPVSLVAFKGGRRSRNVSTTLSTVGARFPHPSDCSQVQQNSNAASGLYTIYLHGDASRPLQVYCDMETDGGGWIVFQRRNTGQLDFFKRWRSYVEGFGDPMKEFWLGLDKLHNLTTGTPARYEVRVDLQTANESAYAIYDFFQVASSKERYKLTVGKYRGTAGDALTYHNGWKFTTFDRDNDIALSNCALTHHGGWWYKNCHLANPNGRYGETKHSEGVNWEPWKGHEFSIPYVELKIRPHGYSREPVLGRKKRTLRGRLRTF

SEQ ID NO: 1001 - protein, 140 aa, Homo sapiens
MDSRIPYDDYPVVFLPAYENPPAWIPPHERVHHPDYNNELTQFLPRTITLKKPPGAQLGFNIRGGKASQLGIFISKVIPDSDAHRAGLQEGDQVLAVNDVDFQDIEHSKAVEILKTAREISMRVRFFPYNYHRQKERTVH

SEQ ID NO: 1002 - protein, 583 aa, Homo sapiens
MEVAANCSLRVKRPLLDPRFEGYKLSLEPLPCYQLELDAAVAEVKLRDDQYTLEHMHAFGMYNYLHCDSWYQDSVYYIDTLGRIMNLTVMLDTALGKPREVFRLPTDLTACDNRLCASIHFSSSTWVTLSDGTGRLYVIGTGERGNSASEKWEIMFNEELGDPFIIIHSISLLNAEEHSIATLLLRIEKEELDMKGSGFYVSLEWVTISKKNQDNKKYEIIKRDILRGKSVPHYAAIEPDGNGLMIVSYKSLTFVQAGQDLEENMDEDISEKIKEPLYYWQQTEDDLTVTIRLPEDSTKEDIQIQFLPDHINIVLKDHQFLEGKLYSSIDHESSTWIIKESNSLEISLIKKNEGLTWPELVIGDKQGELIRDSAQCAAIAERLMHLTSEELNPNPDKEKPPCNAQELEECDIFFEESSSLCRFDGNTLKTTHVVNLGSNQYLFSVIVDPKEMPCFCLRHDVDALLWQPHSSKQDDMWEHIATFNALGYVQASKRDKKFFACAPNYSYAALCECLRRVFIYRQPAPMSTVLYNRKEGRQVGQVAKQQVASLETNDPILGFQATNERLFVLTTKNLFLIKVNTEN

SEQ ID NO: 1003 - protein, 488 aa, Homo sapiens
MNFTPTHTPVCRKRTVVSKRGVAVSGPTKRRGMADSLESTPLPSPEDRLAKLHPSKELLEYYQKKMAECEAENEDLLKKLELYKEACEGQHKLECDLQQREEEIAELQKALSDMQVCLFQEREHVLRLYSENDRLRIRELEDKKKIQNLLALVGTDAGEVTYFCKEPPHKVTILQKTIQAVGECEQSESSAFKADPKISKRRPSRERKESSEHYQRDIQTLILQVEALQAQLGEQTKLSREQIEGLIEDRRIHLEEIQVQHQRNQNKIKELTKNLHHTQELLYESTKDFLQLRSENQNKEKSWMLEKDNLMSKIKQYRVQCKKKEDKIGKVLPVMHESHHAQSEYIKSLKDKLVQEKKLSNMYQEQCISLEEELARIREEEGMRREIFKDRTNKMGKRLQIMTKRYEALERRRILEVEGFKTDIKVLRQKLKDLEQMLYKATVNARANQDLALLCEVRDSNRRAHKIQGELKNLKSKVFGLENELRLC

SEQ ID NO: 1004 - protein, 270 aa, Homo sapiens
MFVALLGLGLGQVVCSVALFFYFRAQMDPNRISEDGTHCIYRILRLHENADFQDTTLESQDTKLIPDSCRRIKQAFQGAVQKELQHIVGSQHIRAEKAMVDGSWLDLAKRSKLEAQPFAHLTINATDIPSGSHKVSLSSWYHDRGWAKISNMTFSNGKLIVNQDGFYYLYANICFRHHETSGDLATEYLQLMVYVTKTSIKIPSSHTLMKGGSTKYWSGNSEFHFYSINVGGFFKLRSGEEISIEVSNPSLLDPDQDATYFGAFKVRDID

SEQ ID NO: 1005 - protein, 85 aa, Homo sapiens
MSKVSFKITLTSDPRLPYKVLSVPESTPFTAVLKFAAEEFKVPAATSAIITNDGIGINPAQTAGNVFLKHGSELRIIPRDRVGSC

SEQ ID NO: 1006 - protein, 619 aa, Homo sapiens
MAAVVQQNDLVFEFASNVMEDERQLGDPAIFPAVIVEHVPGADILNSYAGLACVEEPNDMITESSLDVAEEEIIDDDDDDITLTVEASCHDGDETIETIEAAEALLNMDSPGPMLDEKRINNNIFSSPEDDMVVAPVTHVSVTLDGIPEVMETQQVQEKYADSPGASSPEQPKRKKGRKTKPPRPDSPATTPNISVKKKNKDGKGNTIYLWEFLLALLQDKATCPKYIKWTQREKGIFKLVDSKAVSRLWGKHKNKPDMNYETMGRALRYYYQRGILAKVEGQRLVYQFKEMPKDLIYINDEDPSSSIESSDPSLSSSATSNRNQTSRSRVSSSPGVKGGATTVLKPGNSKAAKPKDPVEVAQPSEVLRTVQPTQSPYPTQLFRTVHVVQPVQAVPEGEAARTSTMQDETLNSSVQSIRTIQAPTQVPVVVSPRNQQLHTVTLQTVPLTTVIASTDPSAGTGSQKFILQAIPSSQPMTVLKENVMLQSQKAGSPPSIVLGPAQVQQVLTSNVQTICNGTVSVASSPSFSATAPVVTFSPRSSQLVAHPPGTVITSVIKTQETKTLTQEVEKKESEDHLKENTEKTEQQPQPYVMVVSSSNGFTSQVAMKQNELLEPNSF

SEQ ID NO: 1007 - protein, 430 aa, Homo sapiens
MHSTTPISSLFSFTSPAVKRLLGWKQGDEEEKWAEKAVDSLVKKLKKKKGAMDELERALSCPGQPSKCVTIPRSLDGRLQVSHRKGLPHVIYCRVWRWPDLQSHHELKPLECCEFPFGSKQKEVCINPYHYRRVETPVLPPVLVPRHSEYNPQLSLLAKFRSASLHSEPLMPHNATYPDSFQQPPCSALPPSPSHAFSQSPCTASYPHSPGSPSEPESPYQHSDFRPVCYEEPQHWCSVAYYELNNRVGETFQASSRSVLIDGFTDPSNNRNRFCLGLLSNVNRNSTIENTRRHIGKGVHLYYVGGEVYAECVSDSSIFVQSRNCNYQHGFHPATVCKIPSGCSLKVFNNQLFAQLLAQSVHHGFEVVYELTKMCTIRMSFVKGWGAEYHRQDVTSTPCWIEIHLHGPLQWLDKVLTQMGSPHNPISSVS

SEQ ID NO: 1008 - protein, 324 aa, Homo sapiens
MAPLLLQLAVLGAALAAAALVLISIVAFTTATKMPALHRHEEEKFFLNAKGQKETLPSIWDSPTKQLSVVVPSYNEEKRLPVMMDEALSYLEKRQKRDPAFTYEVIVVDDGSKDQTSKVAFKYCQKYGSDKVRVITLVKNRGKGGAIRMGIFSSRGEKILMADADGATKFPDVEKLEKGLNDLQPWPNQMAIACGSRAHLEKESIAQRSYFRTLLMYGFHFLVWFLCVKGIRDTQCGFKLFTREAASRTFSSLHVERWAFDVELLYIAQFFKIPIAEIAVNWTEIEGSKLVPFWSWLQMGKDLLFIRLRYLTGAWRLEQTRKMN

SEQ ID NO: 1009 - protein, 392 aa, Homo sapiens
MITLITEQLQKQTLDELKCTRFSISLPLPDHADISNCGNSFQLVSEGASWRGLPHCSCAEFQDSLNFSYHPSGLSLHLRPPSRGNSPKEQPFSQVLRPEPPDPEKLPVPPAPPSKRHCRSLSVPVDLSRWQPVWRPAPSKLWTPIKHRGSGGGGGPQVPHQSPPKRVSSLRFLQAPSASSQCAPAHRPYSPPFFSLALAQDSSRPCAASPQSGSWESDAESLSPCPPQRRFSLSPSLGPQASRFLPSARSSPASSPELPWRPRGLRNLPRSRSQPCDLDARKTGVKRRHEEDPRRLRPSLDFDKMNQKPYSGGLCLQETAREGSSISPPWFMACSPPPLSASCSPTGGSSQVLSESEEEEEGAVRWGRQALSKRTLCQRDFGDLDLNLIEEN

SEQ ID NO: 1010 - protein, 543 aa, Homo sapiens
MAAAKAEMQLMSPLQISDPFGSFPHSPTMDNYPKLEEMMLLSNGAPQFLGAAGAPEGSGSNSSSSSSGGGGGGGGGSNSSSSSSTFNPQADTGEQPYEHLTAESFPDISLNNEKVLVETSYPSQTTRLPPITYTGRFSLEPAPNSGNTLWPEPLFSLVSGLVSMTNPPASSSSAPSPAASSASASQSPPLSCAVPSNDSSPIYSAAPTFPTPNTDIFPEPQSQAFPGSAGTALQYPPPAYPAAKGGFQVPMIPDYLFPQQQGDLGLGTPDQKPFQGLESRTQQPSLTPLSTIKAFATQSGSQDLKALNTSYQSQLIKPSRMRKYPNRPSKTPPHERPYACPVESCDRRFSRSDELTRHIRIHTGQKPFQCRICMRNFSRSDHLTTHIRTHTGEKPFACDICGRKFARSDERKRHTKIHLRQKDKKADKSVVASSATSSLSSYPSPVATSYPSPVTTSYPSPATTSYPSPVPTSFSSPGSSTYPSPVHSGFPSPSVATTYSSVPPAFPAQVSSFPSSAVTNSFSASTGLSDMTATFSPRTIEIC

SEQ ID NO: 1011 - protein, 140 aa, Homo sapiens
MAGWQSYVDNLMCDGCCQEAAIVGYCDAKYVWAATAGGVFQSITPIEIDMIVGKDREGFFTNGLTLGAKKCSVIRDSLYVDGDCTMDIRTKSQGGEPTYNVAVGRAGRVLVFVMGKEGVHGGGLNKKAYSMAKYLRDSGF

SEQ ID NO: 1012 - protein, 66 aa, Homo sapiens
MVAKQRIRMANEKHSKNITQRGNVAKTSRNAPEEKASVGPWLLALFIFVVCGSAIFQIIQSIRMGM

SEQ ID NO: 1013 - protein, 385 aa, Homo sapiens
MLWKLLLRSQSCRLCSFRKMRSPPKYRPFLACFTYTTDKQSSKENTRTVEKLYKCSVDIRKIRRLKGWVLLEDETYVEEIANILQELGADETAVASILERCPEAIVCSPTAVNTQRKLWQLVCKNEEELIKLIEQFPESFFTIKDQENQKLNVQFFQELGLKNVVISRLLTAAPNVFHNPVEKNKQMVRILQESYLDVGGSEANMKVWLLKLLSQNPFILLNSPTAIKETLEFLQEQGFTSFEILQLLSKLKGFLFQLCPRSIQNSISFSKNAFKCTDHDLKQLVLKCPALLYYSVPVLEERMQGLLREGISIAQIRETPMVLELTPQIVQYRIRKLNSSGYRIKDGHLANLNGSKKEFEANFGKIQAKKVRPLFNPVAPLNVEE

SEQ ID NO: 1014 - protein, 207 aa, Homo sapiens
MTMDGDSSTTDASQLGISADYIGGSHYVIQPHDDTEDSMNDHEDTNGSKESFREQDIYLPIANVARIMKNAIPQTGKIAKDAKECVQECVSEFISFITSEASERCHQEKRKTINGEDILFAMSTLGFDSYVEPLKLYLQKFREAMKGEKGIGGAVTATDGLSEELTEEAFTNQLPAGLITTDGQQQNVMVYTTSYQQISGVQQIQFS

SEQ ID NO: 1015 - protein, 194 aa, Homo sapiens
MDEDGLPLMGSGIDLTKVPAIQQKRTVAFLNQFVVHTVQFLNRFSTVCEEKLADLSLRIQQIETTLNILDAKLSSIPGLDDVTVEVSPLNVTSVTNGAHPEATSEQPQQNSTQDSGLQESEVSAENILTVAKDPRYARYLKMVQVGVPVMAIRNKMISEGLDPDLLERPDAPVPDGESEKTVEESSDSESSFSD

SEQ ID NO: 1016 - protein, 666 aa, Homo sapiens
MAMTWIVFSLWPLTVFMGHIGGHSLFSCEPITLRMCQDLPYNTTFMPNLLNHYDQQTAALAMEPFHPMVNLDCSRDFRPFLCALYAPICMEYGRVTLPCRRLCQRAYSECSKLMEMFGVPWPEDMECSRFPDCDEPYPRLVDLNLAGEPTEGAPVAVQRDYGFWCPRELKIDPDLGYSFLHVRDCSPPCPNMYFRREELSFARYFIGLISIICLSATLFTFLTFLIDVTRFRYPERPIIFYAVCYMMVSLIFFIGFLLEDRVACNASIPAQYKASTVTQGSHNKACTMLFMILYFFTMAGSVWWVILTITWFLAAVPKWGSEAIEKKALLFHASAWGIPGTLTIILLAMNKIEGDNISGVCFVGLYDVDALRYFVLAPLCLYVVVGVSLLLAGIISLNRVRIEIPLEKENQDKLVKFMIRIGVFSILYLVPLLVVIGCYFYEQAYRGIWETTWIQERCREYHIPCPYQVTQMSRPDLILFLMKYLMALIVGIPSVFWVGSKKTCFEWASFFHGRRKKEIVNESRQVLQEPDFAQSLLRDPNTPIIRKSRGTSTQGTSTHASSTQLAMVDDQRSKAGSIHSKVSSYHGSLHRSRDGRYTPCSYRGMEERLPHGSMSRLTDHSRHSSSHRLNEQSRHSSIRDLSNNPMTHITHGTSMNRVIEEDGTSA

SEQ ID NO: 1017 - protein, 481 aa, Homo sapiens
MKLLLLHPAFQSCLLLTLLGLWRTTPEAHASSLGAPAISAASFLQDLIHRYGEGDSLTLQQLKALLNHLDVGVGRGNVTQHVQGHRNLSTCFSSGDLFTAHNFSEQSRIGSSELQEFCPTILQQLDSRACTSENQENEENEQTEEGRPSAVEVWGYGLLCVTVISLCSLLGASVVPFMKKTFYKRLLLYFIALAIGTLYSNALFQLIPEAFGFNPLEDYYVSKSAVVFGGFYLFFFTEKILKILLKQKNEHHHGHSHYASESLPSKKDQEEGVMEKLQNGDLDHMIPQHCSSELDGKAPMVDEKVIVGSLSVQDLQASQSACYWLKGVRYSDIGTLAWMITLSDGLHNFIDGLAIGASFTVSVFQGISTSVAILCEEFPHELGDFVILLNAGMSIQQALFFNFLSACCCYLGLAFGILAGSHFSANWIFALAGGMFLYISLADMMEFCSVAQAGVQWCHLSSLQPLPLGLKRLSCLSLPSN

SEQ ID NO: 1018 - protein, 514 aa, Homo sapiens
MGPSCPVFLSFTKLSLWWLLLTPAGGEEAKRPPPRAPGDPLSSPSPTALPQGGSHTETEDRLFKHLFRGYNRWARPVPNTSDVDEKNQMMTTNVWLKQEWSDYKLRWNPTDFGNITSLRVPSEMIWIPDIVLYNNADGEFAVTHMTKAHLFSTGTVHWVPPAIYKSSCSIDVTFFPFDQQNCKMKFGSWTYDKAKIDLEQMEQTVDLKDYWESGEWAIVNATGTYNSKKYDCCAEIYPDVTYAFVIRRLPLFYTINLIIPCLLISCLTVLVFYLPSDCGEKITLCISVLLSLTVFLLLITEIIPSTSLVIPLIGEYLLFTMIFVTLSIVITVFVLNVHHRSPSTHTMPHWVRGALLGCVPRWLLMNRPPPPVELCHPLRLKLSPSYHWLESNVDAEEREVVVEEEDRWACAGHVAPSVGTLCSHGHLHSGASGPKAEALLQEGELLLSPHMQKALEGVHYIADHLRSEDADSSVKEDWKYVAMVIDRIFLWLFIIVCFLGTIGLFLPPFLAGMI

SEQ ID NO: 1019 - protein, 414 aa, Homo sapiens
MSEYIRVTEDENDEPIEIPSEDDGTVLLSTVTAQFPGACGLRYRNPVSQCMRGVRLVEGILHAPDAGWGNLVYVVNYPKDNKRKMDETDASSAVKVKRAVQKTSDLIVLGLPWKTTEQDLKEYFSTFGEVLMVQVKKDLKTGHSKGFGFVRFTEYETQVKVMSQRHMIDGRWCDCKLPNSKQSQDEPLRSRKVFVGRCTEDMTEDELREFFSQYGDVMDVFIPKPFRAFAFVTFADDQIAQSLCGEDLIIKGISVHISNAEPKHNSNRQLERSGRFGGNPGGFGNQGGFGNSRGGGAGLGNNQGSNMGGGMNFGAFSINPAMMAAAQAALQSSWGMMGMLASQQNQSGPSGNNQNQGNMQREPNQAFGSGNNSYSGSNSGAAIGWGSASNAGSGSGFNGGFGSSMDSKSSGWGM

SEQ ID NO: 1020 - protein, 341 aa, Homo sapiens
MNIVVEFFVVTFKVLWAFVLAAARWLVRPKEKSVAGQVCLITGAGSGLGRLFALEFARRRALLVLWDINTQSNEETAGMVRHIYRDLEAADAAALQAGNGEEEILPHCNLQVFTYTCDVGKRENVYLTAERVRKEVGEVSVLVNNAGVVSGHHLLECPDELIERTMMVNCHAHFWTTKAFLPTMLEINHGHIVTVASSLGLFSTAGVEDYCASKFGVVGFHESLSHELKAAEKDGIKTTLVCPYLVDTGMFRGCRIRKEIEPFLPPLKPDYCVKQAMKAILTDQPMICTPRLMYIVTFMKSILPFEAVVCMYRFLGADKCMYPFIAQRKQATNNNEAKNGI

SEQ ID NO: 1021 - protein, 432 aa, Homo sapiens
MISAAQLLDELMGRDRNLAPDEKRSNVRWDHESVCKYYLCGFCPAELFTNTRSDLGPCEKIHDENLRKQYEKSSRFMKVGYERDFLRYLQSLLAEVERRIRRGHARLALSQNQQSSGAAGPTGKNEEKIQVLTDKIDVLLQQIEELGSEGKVEEAQGMMKLVEQLKEERELLRSTTSTIESFAAQEKQMEVCEVCGAFLIVGDAQSRVDDHLMGKQHMGYAKIKATVEELKEKLRKRTEEPDRDERLKKEKQEREEREKEREREREERERKRRREEEEREKERARDRERRKRSRSRSRHSSRTSDRRCSRSRDHKRSRSRERRRSRSRDRRRSRSHDRSERKHRSRSRDRRRSKSRDRKSYKHRSKSRDREQDRKSKEKEKRGSDDKKSSVKSGSREKQSEDTNTESKESDTKNEVNGTSEDIKSEGDTQSN

SEQ ID NO: 1022 - protein, 576 aa, Homo sapiens
MAASETVRLRLQFDYPPPATPHCTAFWLLVDLNRCRVVTDLISLIRQRFGFSSGAFLGLYLEGGLLPPAESARLVRDNDCLRVKLEERGVAENSVVISNGDINLSLRKAKKRAFQLEEGEETEPDCKYSKKHWKSRENNNNNEKVLDLEPKAVTDQTVSKKNKRKNKATCGTVGDDNEEAKRKSPKKKEKCEYKKKAKNPKSPKVQAVKDWANQRCSSPKGSARNSLVKAKRKGSVSVCSKESPSSSSESESCDESISDGPSKVTLEARNSSEKLPTELSKEEPSTKNTTADKLAIKLGFSLTPSKGKTSGTTSSSSDSSAESDDQCLMSSSTPECAAGFLKTVGLFAGRGRPGPGLSSQTAGAAGWRRSGSNGGGQAPGASPSVSLPASLGRGWGREENLFSWKGAKGRGMRGRGRGRGHPVSCVVNRSTDNQRQQQLNDVVKNSSTIIQNPVETPKKDYSLLPLLAAAPQVGEKIAFKLLELTSSYSPDVSDYKEGRILSHNPETQQVDIEILSSLPALREPGKFDLVYHNENGAEVVEYAVTQESKITVFWKELIDPRLIIESPSNTSSTEPA

SEQ ID NO: 1023 - protein, 374 aa, Homo sapiens
MSRVPSPPPPAEMSSGPVAESWCYTQIKVVKFSYMWTINNFSFCREEMGEVIKSSTFSSGANDKLKWCLRVNPKGLDEESKDYLSLYLLLVSCPKSEVRAKFKFSILNAKGEETKAMESQRAYRFVQGKDWGFKKFIRRDFLLDEANGLLPDDKLTLFCEVSVVQDSVNISGQNTMNMVKVPECRLADELGGLWENSRFTDCCLCVAGQEFQAHKAILAARSPVFSAMFEHEMEESKKNRVEINDVEPEVFKEMMCFIYTGKAPNLDKMADDLLAAADKYALERLKVMCEDALCSNLSVENAAEILILADLHSADQLKTQAVDFINYHASDVLETSGWKSMVVSHPHLVAEAYRSLASAQCPFLGPPRKRLKQS

SEQ ID NO: 1024 - protein, 712 aa, Homo sapiens
MREPALAASAMAYHPFHAPRPADFPMSAFLAAAQPSFFPALALPPGALAKPLPDPGLAGAAAAAAAAAAAAEAGLHVSALGPHPPAAHLRSLKSLEPEDEVEDDPKVTLEAKELWDQFHKLGTEMVITKSGRRMFPPFKVRVSGLDKKAKYILLMDIVAADDCRYKFHNSRWMVAGKADPEMPKRMYIHPDSPATGEQWMAKPVAFHKLKLTNNISDKHGFTILNSMHKYQPRFHIVRANDILKLPYSTFRTYVFPETDFIAVTAYQNDKITQLKIDNNPFAKGFRDTGNGRREKRKQLTLPSLRLYEEHCKPERDGAESDASSCDPPPAREPPTSPGAAPSPLRLHRARAEEKSCAADSDPEPERLSEERAGAPLGRSPAPDSASPTRLTEPERARERRSPERGKEPAESGGDGPFGLRSLEKERAEARRKDEGRKEAAEGKEQGLAPLVVQTDSASPLGAGHLPGLAFSSHLHGQQFFGPLGAGQPLFLHPGQFTMGPGAFSAMGMGHLLASVAGGGNGGGGGPGTAAGLDAGGLGPAASAASTAAPFPFHLSQHMLASQGIPMPTFGGLFPYPYTYMAAAAAAASALPATSAAAAAAAAAGSLSRSPFLGSARPRLRFSPYQIPVTIPPSTSLLTTGLASEGSKAAGGNSREPSPLPELALRKVGAPSRGALSPSGSAKEAANELQSIQRLVSGLESQRALSPGRESPK

SEQ ID NO: 1025 - protein, 322 aa, Homo sapiens
MASSSSLVPDRLRLPLCFLGVFVCYFYYGILQEKITRGKYGEGAKQETFTFALTLVFIQCVINAVFAKILIQFFDTARVDRTRSWLYAACSISYLGAMVSSNSALQFVNYPTQVLGKSCKPIPVMLLGVTLLKKKYPLAKYLCVLLIVAGVALFMYKPKKVVGIEEHTVGYGELLLLLSLTLDGLTGVSQDHMRAHYQTGSNHMMLNINLWSTLLLGMGILFTGELWEFLSFAERYPAIIYNILLFGLTSALGQSFIFMTVVYFGPLTCSIITTTRKFFTILASVILFANPISPMQWVGTVLVFLGLGLDAKFGKGAKKTSH

SEQ ID NO: 1026 - protein, 741 aa, Homo sapiens
MGPPGPALPATMNNSSSETRGHPHSASSPSERVFPMPLPRKAPLNIPGTPVLEDFPQNDDEKERLQRRRSRVFDLQFSTDSPRLLASPSSRSIDISATIPKFTNTQITEHYSTCIKLSTENKITTKNAFGLHLIDFMSEILKQKDTEPTNFKVAAGTLDASTKIYAVRVDAVHADVYRVLGGLGKDAPSLEEVEGHVADGSATEMGTTKKAVKPKKKHLHRTIEQNINNLNVSEADRKCEIDPMFQKTAASFDECSTAGVFLSTLHCQDYRSELLFPSDVQTLSTGEPLELPELGCVEMTDLKAPLQQCAEDRQICPSLAGFQFTQWDSETHNESVSALVDKFKKNDQVFDINAEVDESDCGDFPDGSLGDDFDANDEPDHTAVGDHEEFRSWKEPCQVQSCQEEMISLGDGDIRTMCPLLSMKPGEYSYFSPRTMSMWAGPDHWRFRPRRKQDAPSQSENKKKSTKKDFEIDFEDDIDFDVYFRKTKAATILTKSTLENQNWRATTLPTDFNYNVDTLVQLHLKPGTRLLKMAQGHRVETEHYEEIEDYDYNNPNDTSNFCPGLQAADSDDEDLDDLFVGPVGNSDLSPYPCHPPKTAQQNGDTPEAQGLDITTYGESNLVAEPQKVNKIEIHYAKTAKKMDMKKLKQSMWSLLTALSGKEADAEANHREAGKEAALAEVADEKMLSGLTKDLQRSLPPVMAQNLSIPLAFACLLHLANEKNLKLEGTEDLSDVLVRQGD

SEQ ID NO: 1027 - protein, 553 aa, Homo sapiens
MTRGGPGGRPGLPQPPPLLLLLLLLPLLLVTAEPPKPAGVYYATAYWMPAEKTVQVKNVMDKNGDAYGFYNNSVKTTGWGILEIRAGYGSQTLSNEIIMFVAGFLEGYLTAPHMNDHYTNLYPQLITKPSIMDKVQDFMEKQDKWTRKNIKEYKTDSFWRHTGYVMAQIDGLYVGAKKRAILEGTKPMTLFQIQFLNSVGDLLDLIPSLSPTKNGSLKVFKRWDMGHCSALIKVLPGFENILFAHSSWYTYAAMLRIYKHWDFNVIDKDTSSSRLSFSSYPGFLESLDDFYILSSGLILLQTTNSVFNKTLLKQVIPETLLSWQRVRVANMMADSGKRWADIFSKYNSGTYNNQYMVLDLKKVKLNHSLDKGTLYIVEQIPTYVEYSEQTDVLRKGYWPSYNVPFHEKIYNWSGYPLLVQKLGLDYSYDLAPRAKIFRRDQGKVTDTASMKYIMRYNNYKKDPYSRGDPCNTICCREDLNSPNPSPGGCYDTKVADIYLASQYTSYAISGPTVQGGLPVFRWDRFNKTLHQGMPEVYNFDFITMKPILKLDIK

SEQ ID NO: 1028 - protein, 500 aa, Homo sapiens
MEAARPPPTAGKFVVVGGGIAGVTCAEQLATHFPSEDILLVTASPVIKAVTNFKQISKILEEFDVEEQSSTMLGKRFPNIKVIESGVKQLKSEEHCIVTEDGNQHVYKKLCLCAGAKPKLICEGNPYVLGIRDTDSAQEFQKQLTKAKRIMIIGNGGIALELVYEIEGCEVIWAIKDKAIGNTFFDAGAAEFLTSKLIAEKSEAKIAHKRTRYTTEGRKKEARSKSKADNVGSALGPDWHEGLNLKGTKEFSHKIHLETMCEVKKIYLQDEFRILKKKSFTFPRDHKSVTADTEMWPVYVELTNEKIYGCDFIVSATGVTPNVEPFLHGNSFDLGEDGGLKVDDHMHTSLPDIYAAGDICTTSWQLSPVWQQMRLWTQARQMGWYAAKCMAAASSGDSIDMDFSFELFAHVTKFFNYKVVLLGKYNAQGLGSDHELMLRCTKGREYIKVVMQNGRMMGAVLIGETDLEETFENLILNQMNLSSYGEDLLDPNIDIEDYFD

SEQ ID NO: 1029 - protein, 89 aa, Homo sapiens
MGILKLQVFLIVLSVALNHLKATPIESHQVEKRKCNTATCATQRLANFLVHSSNNFGAILSSTNVGSNTYGKRNAVEVLKREPLNYLPL

SEQ ID NO: 1030 - protein, 510 aa, Homo sapiens
MLPLEKAFASPRSSPAPPDLPTPGSAAGVQQEEPETIPERTPADLEFSRLRFREFVYQEAAGPHQTLARLHELCRQWLMPEARSKEQMLELLVLEQFLGILPDKVRPWVVAQYPESCKKAASLVEGLADVLEEPGMLLGSPAGSSSILSDGVYERHMDPLLLPGELASPSQALGAGEIPAPSETPWLSPDPLFLEQRRVREAKTEEDGPANTEQKLKSFPEDPQHLGEWGHLDPAEENLKSYRKLLLWGYQLSQPDAASRLDTEELRLVERDPQGSSLPEGGRRQESAGCACEEAAPAGVLPELPTEAPPGDALADPPSGTTEEEEEQPGKAPDPQDPQDAESDSATGSQRQSVIQQPAPDRGTAKLGTKRPHPEDGDGQSLEGVSSSGDSAGLEAGQGPGADEPGLSRGKPYACGECGEAFAWLSHLMEHHSSHGGRKRYACQGCWKTFHFSLALAEHQKTHEKEKSYALGGARGPQPSTREAQAGARAGGPPESVEGEAPPAPPEAQR

SEQ ID NO: 1031 - protein, 577 aa, Homo sapiens
MLGFPPGRPQLPVQLRPQTRMATALRDPASVPIATEVLFKLTQGSVTFEDVAVYFSWEEWDLLDEAQKHLYFDVMLENFALTSSLGCWCGVEHEETPSEQRISGERVPQFRTSKEGSSSQNADSCEICCLVLRDILHLAEHQGTNCGQKLHTCGKQFYISANLQQHQRQHITEAPFRSYVDTASFTQSCIVHVSEKPFTCREIRKDFLANMRFLHQDATQTGEKPNNSNKCAVAFYSGKSHHNWGKCSKAFSHIDTLVQDQRILTREGLFECSKCGKACTRRCNLIQHQKVHSEERPYECNECGKFFTYYSSFIIHQRVHTGERPYACPECGKSFSQIYSLNSHRKVHTGERPYECGECGKSFSQRSNLMQHRRVHTGERPYECSECGKSFSQNFSLIYHQRVHTGERPHECNECGKSFSRSSSLIHHRRLHTGERPYECSKCGKSFKQSSSFSSHRKVHTGERPYVCGECGKSFSHSSNLKNHQRVHTGERPVECSECSKSFSCKSNLIKHLRVHTGERPYECSECGKSFSQSSSLIQHRRVHTGKRPYQCSQCGKSFGCKSVLIQHQRVHIGEKP

SEQ ID NO: 1032 - protein, 400 aa, Homo sapiens
MNGQLDLSGKLIIKAQLGEDIRRIPIHNEDITYDELVLMMQRVFRGKLLSNDEVTIKYKDEDGDLITIFDSSDLSFAIQCSRILKLTLFVNGQPRPLESSQVKYLRRELIELRNKVNRLLDSLEPPGEPGPSTNIPENDTVDGREEKSASDSSGKQSTQVMAASMSAFDPLKNQDEINKNVMSAFGLTDDQVSGPPSAPAEDRSGTPDSIASSSSAAHPPGVQPQQPPYTGAQTQAGQIEGQMYQQYQQQAGYGAQQPQAPPQQPQQYGIQYSASYSQQTGPQQPQQFQGYGQQPTSQAPAPAFSGQPQQLPAQPPQQYQASNYPAQTYTAQTSQPTNYTVAPASQPGMAPSQPGAYQPRPGFTSLPGSTMTPPPSGPNPYARNRPPFGQGYTQPGPGYR

SEQ ID NO: 1033 - protein, 169 aa, Homo sapiens
MKGSRIELGDVTPHNIKQLKRLNQVIFPVSYNDKFYKDVLEVGELAKLAYFNDIAVGAVCCRVDHSQNQKRLYIMTLGCLAPYRRLGIGTKMLNHVLNICEKDGTFDNIYLHVQISNESAIDFYRKFGFEIIETKKNYYKRIEPADAHVLQKNLKVPSGQNADVQKTDN

SEQ ID NO: 1034 - protein, 511 aa, Homo sapiens
MATVQEKAAALNLSALHSPAHRPPGFSVAQKPFGATYVWSSIINTLQTQVEVKKRRHRLKRHNDCFVGSEAVDVIFSHLIQNKYFGDVDIPRAKVVRVCQALMDYKVFEAVPTKVFGKDKKPTFEDSSCSLYRFTTIPNQDSQLGKENKLYSPARYADALFKSSDIRSASLEDLWENLSLKPANSPHVNISATLSPQVINEVWQEETIGRLLQLVDLPLLDSLLKQQEAVPKIPQPKRQSTMVNSSNYLDRGILKAYSDSQEDEWLSAAIDCLEYLPDQMVVEISRSFPEQPDRTDLVKELLFDAIGRYYSSREPLLNHLSDVHNGIAELLVNGKTEIALEATQLLLKLLDFQNREEFRRLLYFMAVAANPSEFKLQKESDNRMVVKRIFSKAIVDNKNLSKGKTDLLVLFLMDHQKDVFKIPGTLHKIVSVKLMAIQNGRDPNRDAGYIYCQRIDQRDYSNNTEKTTKDELLNLLKTLDEDSKLSAKEKKKLLGQFYKCHPDIFIEHFGD

SEQ ID NO: 1035 - protein, 527 aa, Homo sapiens
MADSRDPASDQMQHWKEQRAAQKADVLTTGAGNPVGDKLNVITVGPRGPLLVQDVVFTDEMAHFDRERIPERVVHAKGAGAFGYFEVTHDITKYSKAKVFEHIGKKTPIAVRFSTVAGESGSADTVRDPRGFAVKFYTEDGNWDLVGNNTPIFFIRDPILFPSFIHSQKRNPQTHLKDPDMVWDFWSLRPESLHQVSFLFSDRGIPDGHRHMNGYGSHTFKLVNANGEAVYCKFHYKTDQGIKNLSVEDAARLSQEDPDYGIRDLFNAIATGKYPSWTFYIQVMTFNQAETFPFNPFDLTKVWPHKDYPLIPVGKLVLNRNPVNYFAEVEQIAFDPSNMPPGIEASPDKMLQGRLFAYPDTHRHRLGPNYLHIPVNCPYRARVANYQRDGPMCMQDNQGGAPNYYPNSFGAPEQQPSALEHSIQYSGEVRRFNTANDDNVTQVRAFYVNVLNEEQRKRLCENIAGHLKDAQIFIQKKAVKNFTEVHPDYGSHIQALLDKYNAEKPKNAIHTFVQSGSHLAAREKANL

SEQ ID NO: 1036 - protein, 614 aa, Homo sapiens
MRPPQCLLHTPSLASPLLLLLLWLLGGGVGAEGREDAELLVTVRGGRLRGIRLKTPGGPVSAFLGIPFAEPPMGPRRFLPPEPKQPWSGVVDATTFQSVCYQYVDTLYPGFEGTEMWNPNRELSEDCLYLNVWTPYPRPTSPTPVLVWIYGGGFYSGASSLDVYDGRFLVQAERTVLVSMNYRVGAFGFLALPGSREAPGNVGLLDQRLALQWVQENVAAFGGDPTSVTLFGESAGAASVGMHLLSPPSRGLFHRAVLQSGAPNGPWATVGMGEARRRATQLAHLVGCPPGGTGGNDTELVACLRTRPAQVLVNHEWHVLPQESVFRFSFVPVVDGDFLSDTPEALINAGDFHGLQVLVGVVKDEGSYFLVYGAPGFSKDNESLISRAEFLAGVRVGVPQVSDLAAEAVVLHYTDWLHPEDPARLREALSDVVGDHNVVCPVAQLAGRLAAQGARVYAYVFEHRASTLSWPLWMGVPHGYEIEFIFGIPLDPSRNYTAEEKIFAQRLMRYWANFARTGDPNEPRDPKAPQWPPYTAGAQQYVSLDLRPLEVRRGLRAQACAFWNRFLPKLLSATDTLDEAERQWKAEFHRWSSYMVHWKNQFDHYSKQDRCSDL

SEQ ID NO: 1037 - protein, 281 aa, Homo sapiens [sequence omitted]

SEQ ID NO: 1038 - protein, 977 aa, Homo sapiens
MKPSIAEMLHRGRMLWIILLSTIALGWTTPIPLIEDSEEIDEPCFDPCYCEVKESLFHIHCDSKGFTNISQITEFWSRPFKLYLQRNSMRKLYTNSFLHLNNAVSINLGNNALQDIQTGAFNGLKILKRLYLHENKLDVFRNDTFLGLESLEYLQADYNVIKRIESGAFRNLSKLRVLILNDNLIPMLPTNLFKAVSLTHLDLRGNRLKVLFYRGMLDHIGRSLMELQLEENPWNCTCEIVQLKSWLERIPYTALVGDITCETPFHFHGKDLREIRKTELCPLLSDSEVEASLGIPHSSSSKENAWPTKPSSMLSSVHFTASSVEYKSSNKQPKPTKQPRTPRPPSTSQALYPGPNQPPIAPYQTRPPIPIICPTGCTCNLHINDLGLTVNCKERGFNNISELLPRPLNAKKLYLSSNLIQKIYRSDFWNFSSLDLLHLGNNRISYVQDGAFINLPNLKSLFLNGNDIEKLTPGMFRGLQSLHYLYFEFNVIREIQPAAFSLMPNLKLLFLNNNLLRTLPTDAFAGTSLARLNLRKNYFLYLPVAGVLEHLNAIVQIDLNENPWDCTCDLVPFKQWIETISSVSVVGDVLCRSPENLTHRDVRTIELEVLCPEMLHVAPAGESPAQPGDSHLIGAPTSASPYEFSPPGGPVPLSVLILSLLVLFFSAVFVAAGLFAYVLRRRRKKLPFRSKRQEGVDLTGIQMQCHRLFEDGGGGGGGSGGGGRPTLSSPEKAPPVGHVYEYIPHPVTQMCNNPIYKPREEEEVAVSSAQEAGSAERGGPGTQPPGMGEALLGSEQFAETPKENHSNYRTLLEKEKEWALAVSSSQLNTIVTVNHHHPHHPAVGGVSGVVGGTGGDLAGFRHHEKNGGVVLFPPGGGCGSGSMLLDRERPQPAPCTVGFVDCLYGTVPKLKELHVHPPGMQYPDLQQDARLKETLLFSAGKGFTDHQTQKSDYLELRAKLQTKPDYLEVLEKTTYRF

SEQ ID NO: 1039 - protein, 756 aa, Homo sapiens
MSRPGTATPALALVLLAVTLAGVGAQGAALEDPDYYGQEIWSREPYYARPEPELETFSPPLPAGPGEEWERRPQEPRPPKRATKPKKAPKREKSAPEPPPPGKHSNKKVMRTKSSEKAANDDHSVRVAREDVRESCPPLGLETLKITDFQLHASTVKRYGLGAHRGRLNIQAGINENDFYDGAWCAGRNDLQQWIEVDARRLTRFTGVITQGRNSLWLSDWVTSYKVMVSNDSHTWVTVKNGSGDMIFEGNSEKEIPVLNELPVPMVARYIRINPQSWFDNGSICMRMEILGCPLPDPNNYYHRRNEMTTTDDLDFKHHNYKEMRQLMKVVNEMCPNITRIYNIGKSHQGLKLYAVEISDHPGEHEVGEPEFHYIAGAHGNEVLGRELLLLLVQFVCQEYLARNARIVHLVEETRIHVLPSLNPDGYEKAYEGGSELGGWSLGRWTHDGIDINNNFPDLNTLLWEAEDRQNVPRKVPNHYIAIPEWFLSENATVAAETRAVIAWMEKIPFVLGGNLQGGELVVAYPYDLVRSPWKTQEHTPTPDDHVFRWLAYSYASTHRLMTDARRRVCHTEDFQKEEGTVNGASWHTVAGSLNDFSYLHTNCFELSIYVGCDKYPHESQLPEEWENNRESLIVFMEQVHRGIKGLVRDSHGKGIPNAIISVEGINHDIRTANDGDYWRLLNPGEYVVTAKAEGFTASTKNCMVGYDMGATRCDFTLSKTNMARIREIMEKFGKQPVSLPARRLKLRGQKRRQRG

SEQ ID NO: 1040 - protein, 218 aa, Homo sapiens
MPMTLGYWNIRGLAHSIRLLLEYTDSSYEEKKYTMGDAPDYDRSQWLNEKFKLGLDFPNLPYLIDGTHKITQSNAILRYIARKHNLCGESEKEQIREDILENQFMDSRMQLAKLCYDPDFEKLKPEYLQALPEMLKLYSQFLGKQPWFLGDKITFVDFIAYDVLERNQVFEPSCLDAFPNLKDFISRFEGLEKISAYMKSSRFLPRPVFTKMAVWGNK

SEQ ID NO: 1041 - protein, 513 aa, Homo sapiens
MGAAAKLAFAVFLISCSSGAILGRSETQECLFFNANWEKDRTNQTGVEPCYGDKDKRRHCFATWKNISGSIEIVKQGCWLDDINCYDRTDCVEKKDSPEVYFCCCEGNMCNEKFSYFPEMEVTQPTSNPVTPKPPYYNILLYSLVPLMLIAGIVICAFWVYRHHKMAYPPVLVPTQDPGPPPPSPLLGLKPLQLLEVKARGRFGCVWKAQLLNEYVAVKIFPIQDKQSWQNEYEVYSLPGMKHENILQFIGAEKRGTSVDVDLWLITAFHEKGSLSDFLKANVVSWNELCHIAETMARGLAYLHEDIPGLKDGHKPAISHRDIKSKNVLLKNNLTACIADFGLALKFEAGKSAGDTHGQVGTRRYMAPEVLEGAINFQRDAFLRIDMYAMGLVLWELASRCTAADGPVDEYMLPFEEEIGQHPSLEDMQEVVVHKKKRPVLRDYWQKHAGMAMLCETIEECWDHDAEARLSAGCVGERITQMQRLTNIITTEDIVTVVTMVTNVDFPPKESSL

SEQ ID NO: 1042 - protein, 870 aa, Homo sapiens
MDSTKEKCDSYKDDLLLRMGLNDNKAGMEGLDKEKINKIIMEATKGSRFYGNELKKEKQVNQRIENMMQQKAQITSQQLRKAQLQVDRFAMELEQSRNLSNTIVHIDMDAFYAAVEMRDNPELKDKPIAVGSMSMLSTSNYHARRFGVRAAMPGFIAKRLCPQLIIVPPNFDKYRAVSKEVKEILADYDPNFMAMSLDEAYLNITKHLEERQNWPEDKRRYFIKMGSSVENDNPGKEVNKLSEHERSISPLLFEESPSDVQPPGDPFQVNFEEQNNPQILQNSVVFGTSAQEVVKEIRFRIEQKTTLTASAGIAPNTMLAKVCSDKNKPNGQYQILPNRQAVMDFIKDLPIRKVSGIGKVTEKMLKALGIITCTELYQQRALLSLLFSETSWHYFLHISLGLGSTHLTRDGERKSMSVERTFSEINKAEEQYSLCQELCSELAQDLQKERLKGRTVTIKLKNVNFEVKTRASTVSSVVSTAEEIFAIAKELLKTEIDADFPHPLRLRLMGVRISSFPNEEDRKHQQRSIIGFLQAGNQALSATECTLEKTDKDKFVKPLEMSHKKSFFDKKRSERKWSHQDTFKCEAVNKQSFQTSQPFQVLKKKMNENLEISENSDDCQILTCPVCFRAQGCISLEALNKHVDECLDGPSISENFKMFSCSHVSATKVNKKENVPASSLCEKQDYEAHPKIKEISSVDCIALVDTIDNSSKAESIDALSNKHSKEECSSLPSKSFNIEHCHQNSSSTVSLENEDVGSFRQEYRQPYLCEVKTGQALVCPVCNVEQKTSDLTLFNVHVDVCLNKSFIQELRKDKFNPVNQPKESSRSTGSSSGVQKAVTRTKRPGLMTKYSTSKKIKPNNPKHTLDIFFK

SEQ ID NO: 1043 - protein, 993 aa, Homo sapiens
MPALARDGGQLPLLVVFSAMIFGTITNQDLPVIKCVLINHKNNDSSVGKSSSYPMVSESPEDLGCALRPQSSGTVYEAAAVEVDVSASITLQVLVDAPGNISCLWVFKHSSLNCQPHFDLQNRGVVSMVILKMTETQAGEYLLFIQSEATNYTILFTVSIRNTLLYTLRRPYFRKMENQDALVCISESVPEPIVEWVLCDSQGESCKEESPAVVKKEEKVLHELFGTDIRCCARNELGRECTRLFTIDLNQTPQTTLPQLFLKVGEPLWIRCKAVHVNHGFGLTWELENKALEEGNYFEMSTYSTNRTMIRILFAFVSSVARNDTGYYTCSSSKHPSQSALVTIVEKGFINATNSSEDYEIDQYEEFCFSVRFKAYPQIRCTWTFSRKSFPCEQKGLDNGYSISKFCNHKHQPGEYIFHAENDDAQFTKMFTLNIRRKPQVLAEASASQASCFSDGYPLPSWTWKKCSDKSPNCTEEITEGVWNRKANRKVFGQWVSSSTLNMSEAIKGFLVKCCAYNSLGTSCETILLNSPGPFPFIQDNISFYATIGVCLLFIVVLTLLICHKYKKQFRYESQLQMVQVTGSSDNEYFYVDFREYEYDLKWEFPRENLEFGKVLGSGAFGKVMNATAYGISKTGVSIQVAVKMLKEKADSSEREALMSELKMMTQLGSHENIVNLLGACTLSGPIYLIFEYCCYGDLLNYLRSKREKFHRTWTEIFKEHNFSFYPTFQSHPNSSMPGSREVQIHPDSDQISGLHGNSFHSEDEIEYENQKRLEEEEDLNVLTFEDLLCFAYQVAKGMEFLEFKSCVHRDLAARNVLVTHGKVVKICDFGLARDIMSDSNYVVRGNARLPVKWMAPESLFEGIYTIKSDVWSYGILLWEIFSLGVNPYPGIPVDANFYKLIQNGFKMDQPFYATEEIYIIMQSCWAFDSRKRPSFPNLTSFLGCQLADAEEAMYQNVDGRVSECPHTYQNRRPFSREMDLGLLSPQAQVEDS

SEQ ID NO: 1044 - protein, 242 aa, Homo sapiens
MRPLSMSGHFLLAPIPESSSDYLLPKDIKLAVLGAGRVGKSAMIVRFLTKRFIGDYEPNTGKLYSRLVYVEGDQLSLQIQDTPGGVQIQDSLPQVVDSLSKCVQWAEGFLLVYSITDYDSYLSIRPLYQHIRKVHPDSKAPVIIVGNKGDLLHARQVQTQDGIQLANELGSLFLEISTSENYEDVCDVFQHLCKEVSKMHGLSGERRRASIIPRPRSPNMQDLKRRFKQALSPKVKAPSALG

SEQ ID NO: 1045 - protein, 318 aa, Homo sapiens
MNRFGTRLVGATATSSPPPKARSNENLDKIDMSLDDIIKLNRKEGKKQNFPRLNRRLLQQSGAQQFRMRVRWGIQQNSGFGKTSLNRRGRVMPGKRRPNGVITGLAARKTTGIRKGISPMNRPPLSDKNIEQYFPVLKRKANLLRQNEGQRKPVAVLKRPSQLSRKNNIPANFTRSGNKLNHQKDTRQATFLFRRGLKVQAQLNTEQLLDDVVAKRTRQWRTSTTNGGILTVSIDNPGAVQCPVTQKPRLTRTAVPSFLTKREQSDVKKVPKGVPLQFDINSVGKQTGMTLNERFGILKEQRATLTYNKGGSRFVTVG

SEQ ID NO: 1046 - protein, 381 aa, Homo sapiens
MAAFGRQVLDWHRLIPLTWACMARQTPHLGEQRRTTASLLRKLTTASNGGVIEELSCVRSNNYVQEPECRRNLVQCLLEKQGTPVVQGSLELERVMSSLLDMGFSNAHINELLSVRRGASLQQLLDIISEFILLGLNPEPVCVVLKKSPQLLKLPIMQMRKRSSYLQKLGLGEGKLKRVLYCCPEIFTMRQQDINDTVRLLKEKCLFTVQQVTKILHSCPSVLREDLGQLEYKFQYAYFRMGIKHPDIVKSEYLQYSLTKIKQRHIYLERLGRYQTPDKKGQTQIPNPLLKDILRVSEAEFLARTACTSVEEFQVFKKLLAREEEESESSTSDDKRASLDEDEDDDDEEDNDEDDNDEDDDDEDDDEAEDNDEDEDDDEEE

SEQ ID NO: 1047 - protein, 296 aa, Homo sapiens
MATSSAALPRILGAGARAPSRWLGFLGKATPRPARPSRRTLGSATALMIRESEDSTDFNDKILNEPLKHSDFFNVKELFSVRSLFDARVHLGHKAGCRHRFMEPYIFGSRLDHDIIDLEQTATHLQLALNFTAHMAYRKGIILFISRNRQFSYLIENMARDCGEYAHTRYFRGGMLTNARLLFGPTVRLPDLIIFLHTLNNIFEPHVAVRDAAKMNIPTVGIVDTNCNPCLITYPVPGNDDSPLAVHLYCRLFQTAITRAKEKRQQVEALYRLQGQKEPGDQGPAHPPGADMSHSL

SEQ ID NO: 1048 - protein, 1224 aa, Homo sapiens
MLTKFETKSARVKGLSFHPKRPWILTSLHNGVIQLWDYRMCTLIDKFDEHDGPVRGIDFHKQQPLFVSGGDDYKIKVWNYKLRRCLFTLLGHLDYIRTTFFHHEYPWILSASDDQTIRVWNWQSRTCVCVLTGHNHYVMCAQFHPTEDLVVSASLDQTVRVWDISGLRKKNLSPGAVESDVRGITGVDLFGTTDAVVKHVLEGHDRGVNWAAFHPTMPLIVSGADDRQVKIWRMNESKAWEVDTCRGHYNNVSCAVFHPRQELILSNSEDKSIRVWDMSKRTGVQTFRRDHDRFWVLAAHPNLNLFAAGHDGGMIVFKLERERPAYAVHGNMLHYVKDRFLRQLDFNSSKDVAVMQLRSGSKFPVFNMSYNPAENAVLLCTRASNLENSTYDLYTIPKDADSQNPDAPEGKRSSGLTAVWVARNRFAVLDRMHSLLIKNLKNEITKKVQVPNCDEIFYAGTGNLLLRDADSITLFDVQQKRTLASVKISKVKYVIWSADMSHVALLAKHAIVICNRKLDALCNIHENIRVKSGAWDESGVFIYTTSNHIKYAVTTGDHGIIRTLDLPIYVTRVKGNNVYCLDRECRPRVLTIDPTEFKFKLALINRKYDEVLHMVRNAKLVGQSIIAYLQKKGYPEVALHFVKDEKTRFSLALECGNIEIALEAAKALDDKNCWEKLGEVALLQGNHQIVEMCYQRTKNFDKLSFLYLITGNLEKLRKMMKIAEIRKDMSGHYQNALYLGDVSERVRILKNCGQKSLAYLTAATHGLDEEAESLKETFDPEKETIPDIDPNAKLLQPPAPIMPLDTNWPLLTVSKGFFEGTIASKGKGGALAADIDIDTVGTEGWGEDAELQLDEDGFVEATEGLGDDALGKGQEEGGGWDVEEDLELPPELDISPGAAGGAEDGFFVPPTKGTSPTQIWCNNSQLPVDHILAGSFETAMRLLHDQVGVIQFGPYKQLFLQTYARGRTTYQALPCLPSMYGYPNRNWKDAGLKNGVPAVGLKLNDLIQRLQLCYQLTTVGKFEEAVEKFRSILLSVPLLVVDNKQEIAEAQQLITICREYIVGLSVETERKKLPKETLEQQKRICEMAAYFTHSNLQPVHMILVLRTALNLFFKLKNFKTAATFARRLLELGPKPEVAQQTRKILSACEKNPTDAYQLNYDMHNPFDICAASYRPIYRGKPVEKCPLSGACYSPEFKGQICRVTTVTEIGKDVIGLRISPLQFR

SEQ ID NO: 1049 - protein, 848 aa, Homo sapiens
MNSSSANITYASRKRRKPVQKTVKPIPAEGIKSNPSKRHRDRLNTELDRLASLLPFPQDVINKLDKLSVLRLSVSYLRAKSFFDVALKSSPTERNGGQDNCRAANFREGLNLQEGEFLLQALNGFVLVVTTDALVFYASSTIQDYLGFQQSDVIHQSVYELIHTEDRAEFQRQLHWALNPSQCTESGQGIEEATGLPQTVVCYNPDQIPPENSPLMERCFICRLRCLLDNSSGFLAMNFQGKLKYLHGQKKKGKDGSILPPQLALFAIATPLQPPSILEIRTKNFIFRTKHKLDFTPIGCDAKGRIVLGYTEAELCTRGSGYQFIHAADMLYCAESHIRMIKTGESGMIVFRLLTKNNRWTWVQSNARLLYKNGRPDYIIVTQRPLTDEEGTEHLRKRNTKLPFMFTTGEAVLYEATNPFPAIMDPLPLRTKNGTSGKDSATTSTLSKDSLNPSSLLAAMMQQDESIYLYPASSTSSTAPFENNFFNESMNECRNWQDNTAPMGNDTILKHEQIDQPQDVNSFAGGHPGLFQDSKNSDLYSIMKNLGIDFEDIRHMQNEKFFRNDFSGEVDFRDIDLTDEILTYVQDSLSKSPFIPSDYQQQQSLALNSSCMVQEHLHLEQQQQHHQKQVVVEPQQQLCQKMKHMQVNGMFENWNSNQFVPFNCPQQDPQQYNVFTDLHGISQEFPYKSEMDSMPYTQNFISCNQPVLPQHSKCTELDYPMGSFEPSPYPTTSSLEDFVTCLQLPENQKHGLNPQSAIITPQTCYAGAVSMYQCQPEPQHTHVGQMQYNPVLPGQQAFLNKFQNGVLNETYPAELNNINNTQTTTHLQPLHHPSEARPFPDLTSSGFL

SEQ ID NO: 1050 - protein, 414 aa, Homo sapiens
MAAAPPSYCFVAFPPRAKDGLVVFGKNSARPRDEVQEVVYFSAADHEPESKVECTYISIDQVPRTYAIMISRPAWLWGAEMGANEHGVCIANEAINTREPAAEIEALLGMDLVRLGLERGETAKEALDVIVSLLEEHGQGGNYFEDANSCHSFQSAYLIVDRDEAWVLETIGKYWAAEKVTEGVRCICSQLSLTTKMDAEHPELRSYAQSQGWWTGEGEFNFSEVFSPVEDHLDCGAGKDSLEKQEESITVQTMMNTLRDKASGVCIDSEFFLTTASGVSVLPQNRSSPCIHYFTGTPDPSRSIFKPFIFVDDVKLVPKTQSPCFGDDDPAKKEPRFQEKPDRRHELYKAHEWARAIIESDQEQGRKLRSTMLELEKQGLEAMEEILTSSEPLDPAEVGDLFYDCVDTEIKFFK

SEQ ID NO: 1051 - protein, 887 aa, Homo sapiens
MSLFKARDWWSTILGDKEEFDQGCLCLANVDNSGNGQDKIIVGSFMGYLRIFSPHPAKTGDGAQAEDLLLEVDLRDPVLQVEVGKFVSGTEMLHLAVLHSRKLCVYSVSGTLGNVEHGNQCQMKLMYEHNLQRTACNMTYGSFGGVKGRDLICIQSMDGMLMVFEQESYAFGRFLPGFLLPGPLAYSSRTDSFLTVSSCQQVESYKYQVLAFATDADKRQETEQQKLGSGKRLVVDWTLNIGEQALDICIVSFNQSASSVFVLGERNFFCLKDNGQIRFMKKLDWSPSCFLPYCSVSEGTINTLIGNHNNMLHIYQDVTLKWATQLPHIPVAVRVGCLHDLKGVIVTLSDDGHLQCSYLGTDPSLFQAPNVQSRELNYDELDVEMKELQKIIKDVNKSQGVWPMTEREDDLNVSVVVSPNFDSVSQATDVEVGTDLVPSVTVKVTLQNRVILQKAKLSVYVQPPLELTCDQFTFEFMTPDLTRTVSFSVYLKRSYTPSELEGNAVVSYSRPTDRNPDGIPRVIQCKFRLPLKLICLPGQPSKTASHKITIDTNKSPVSLLSLFPGFASQSDDDQVNVMGFHFLGGARITVLASKTSQRYRIQSEQFEDLWLITNELILRLQEYFEKQGVKDFACSFSGSIPLQEYFELIDHHFELRINGEKLEELLSERAVQFRAIQRRLLARFKDKTPAPLQHLDTLLDGTYKQVIALADAVEENQGNLFQSFTRLKSATHLVILLIALWQKLSADQVAILEAAFLPLQEDTQELGWEETVDAAISHLLKTCLSKSSKEQALNLNSQLNIPKDTSQLKKHITLLCDRLSKGGRLCLSTDAAAPQTMVMPGGCTTIPESDLEERSVEQDSTELFTNHRHLTAETPRPEVSPLQGVSE

SEQ ID NO: 1052 - protein, 569 aa, Homo sapiens
MGSTLGCHRSIPRDPSDLSHSRKFSAACNFSNILVNQERLNINTATEEELMTLPGVTRAVARSIVEYREYIGGFKKVEDLALVSGVGATKLEQVKFEICVSSKGSSAQHSPSSLRRDLLAEQQPHHLATAVPLTPRVNINTATPAQLMSVRGLSEKMALSIVDFRREHGPFRSVEDLVRMDGINAAFLDRIRHQVFAERSRPPSTHTNGGLTFTAKPHPSPTSLSLQSEDLDLPPGGPTQIISTRPSVEAFGGTRDGRPVLRLATWNLQGCSVEKANNPGVREVVCMTLLENSIKLLAVQELLDREALEKFCTELNQPTLPNIRKWKGPRGCWKAVVAEKPSSQLQKGAGYAGFLWDAAAGMELRDAGSQESSPSNGHGKLAGPSPYLGRFKVGSHDLTLVNLHLAALTLLGSENPSKNHSDGHRLASFAQTLQETLKGEKDVIILGDFGQGPDSNDYDILRKEKFHHLIPAHTFTNISTKNPQGSKSLDNIWISKSLKKVFTGHWAVVREGLTNPWIPDNWSWGGVASEHCPVLAEFYTEKDWSKKDAPRNGSGVALERSEANIKHER

SEQ ID NO: 1053 - protein, 97 aa, Homo sapiens
MLGNKRLGLSGLTLALSLLVCLGALAEAYPSKPDNPGEDAPAEDMARYYSALRHYINLITRQRYGKRSSPETLISDLLMRESTENVPRTRLEDPAMW

SEQ ID NO: 1054 - protein, 426 aa, Homo sapiens
MPLLWLRGFLLASCWIIVRSSPTPGSEGHSAAPDCPSCALAALPKDVPNSQPEMVEAVKKHILNMLHLKKRPDVTQPVPKAALLNAIRKLHVGKVGENGYVEIEDDIGRRAEMNELMEQTSEIITFAESGTARKTLHFEISKEGSDLSVVERAEVWLFLKVPKANRTRTKVTIRLFQQQKHPQGSLDTGEEAEEVGLKGERSELLLSEKVVDARKSTWHVFPVSSSIQRLLDQGKSSLDVRIACEQCQESGASLVLLGKKKKKEEEGEGKKKGGGEGGAGADEEKEQSHRPFLMLQARQSEDHPHRRRRRGLECDGKVNICCKKQFFVSFKDIGWNDWIIAPSGYHANYCEGECPSHIAGTSGSSLSFHSTVINHYRMRGHSPFANLKSCCVPTKLRPMSMLYYDDGQNIIKKDIQNMIVEECGCS

SEQ ID NO: 1055 - protein, 570 aa, Homo sapiens
MAFRGWRPPPPPLLLLLLWVTGQAAPVAGLGSDAELQIERRFVPDECPRTVRSGDFVRYHYVGTFPDGQKFDSSYDRDSTFNVFVGKGQLITGMDQALVGMCVNERRFVKIPPKLAYGNEGVSGVIPPNSVLHFDVLLMDIWNSEDQVQIHTYFKPPSCPRTIQVSDFVRYHYNGTFLDGTLFDSSHNRMKTYDTYVGIGWLIPGMDKGLLGMCVGEKRIITIPPFLAYGEDGDGKDIPGQASLVFDVALLDLHNPKDSISIENKVVPENCERISQSGDFLRYHYNGTLLDGTLFDSSYSRNRTFDTYIGQGYVIPGMDEGLLGVCIGEKRRIVVPPHLGYGEEGRGNIPGSAVLVFDIHVIDFHNPSDSISITSHYKPPDCSVLSKKGDYLKYHYNASLLDGTLLDSTWNLGKTYNIVLGSGQVVLGMDMGLREMCVGEKRTVIIPPHLGYGEAGVDGEVPGSAVLVFDIELLELVAGLPEGYMFIWNGEVSPNLFEEIDKDGNGEVLLEEFSEYIHAQVASGKGKLAPGFDAELIVKNMFTNQDRNGDGKVTAEEFKLKDQEAKHDEL

SEQ ID NO: 1056 - protein, 494 aa, Homo sapiens
MLPKRRRARVGSPSGDAASSTPPSTRFPGVAIYLVEPRMGRSRRAFLTGLARSKGFRVLDACSSEATHVVMEETSAEEAVSWQERRMAAAPPGCTPPALLDISWLTESLGAGQPVPVECRHRLEVAGPRKGPLSPAWMPAYACQRPTPLTHHNTGLSEALEILAEAAGFEGSEGRLLTFCRAASVLKALPSPVTTLSQLQGLPHFGEHSSRVVQELLEHGVCEEVERVRRSERYQTMKLFTQIFGVGVKTADRWYREGLRTLDDLREQPQKLTQQQKAGLQHHQDLSTPVLRSDVDALQQVVEEAVGQALPGATVTLTGGFRRGKLQGHDVDFLITHPKEGQEAGLLPRVMCRLQDQGLILYHQHQHSCCESPTRLAQQSHMDAFERSFCIFRLPQPPGAAVGGSTRPCPSWKAVRVDLVVAPVSQFPFALLGWTGSKLFQRELRRFSRKEKGLWLNSHGLFDPEQKTFFQAASEEDIFRHLGLEYLPPEQRNA

SEQ ID NO: 1057 - protein, 148 aa, Homo sapiens
METGALRRPQLLPLLLLLCGGCPRAGGCNETGMLERLPLCGKAFADMMGKVDVWKWCNLSEFIVYYESFTNCTEMEANVVGCYWPNPLAQGFITGIHRQFFSNCTVDRVHLEDPPDEVLIPLIVIPVVLTVAMAGLVVWRSKRTDTLL

SEQ ID NO: 1058 - protein, 202 aa, Homo sapiens
MMQDVSSSPVSPADDSLSNSEEEPDRQQPPSGKRGGRKRRSSRRSAGGGAGPGGAAGGGVGGGDEPGSPAQGKRGKKSAGCGGGGGAGGGGGSSSGGGSPQSYEELQTQRVMANVRERQRTQSLNEAFAALRKIIPTLPSDKLSKIQTLKLAARYIDFLYQVLQSDELDSKMASCSYVAHERLSYAFSVWRMEGAWSMSASH

SEQ ID NO: 1059 - protein, 372 aa, Homo sapiens
MAAPVPWACCAVLAAAAAVVYAQRHSPQEAPHVQYERLGSDVTLPCGTANWDAAVTWRVNGTDLAPDLLNGSQLVLHGLELGHSGLYACFHRDSWHLRHQVLLHVGLPPREPVLSCRSNTYPKGFYCSWHLPTPTYIPNTFNVTVLHGSKIMVCEKDPALKNRCHIRYMHLFSTIKYKVSISVSNALGHNATAITFDEFTIVKPDPPENVVARPVPSNPRRLEVTWQTPSTWPDPESFPLKFFLRYRPLILDQWQHVELSDGTAHTITDAYAGKEYIIQVAAKDNEIGTWSDWSVAAHATPWTEEPRHLTTEAQAAETTTSTTSSLAPPPTTKICDPGELGSGGGPSAPFLVSVPITLALAAAAATASSLLI

SEQ ID NO: 1060 - protein, 902 aa, Homo sapiens
MADPEVCCFITKILCAHGGRMALDALLQEIALSEPQLCEVLQVAGPDRFVVLETGGEAGITRSVVATTRARVCRRKYCQRPCDNLHLCKLNLLGRCNYSQSERNLCKYSHEVLSEENFKVLKNHELSGLNKEELAVLLLQSDPFFMPEICKSYKGEGRQQICNQQPPCSRLHICDHFTRGNCRFPNCLRSHNLMDRKVLAIMREHGLNPDVVQNIQDICNSKHMQKNPPGPRAPSSHRRNMAYRARSKSRDRFFQGSQEFLASASASAERSCTPSPDQISHRASLEDAPVDDLTRKFTYLGSQDRARPPSGSSKATDLGGTSQAGTSQRFLENGSQEDLLHGNPGSTYLASNSTSAPNWKSLTSWTNDQGARRKTVFSPTLPAARSSLGSLQTPEAVTTRKGTGLLSSDYRIINGKSGTQDIQPGPLFNNNADGVATDITSTRSLNYKSTSSGHREISSPRIQDAGPASRDVQATGRIADDADPRVALVNDSLSDVTSTTSSRVDDHDSEEICLDHLCKGCPLNGSCSKVHFHLPYRWQMLIGKTWTDFEHMETIEKGYCNPGIHLCSVGSYTINFRVMSCDSFPIRRLSTPSSVTKPANSVFTTKWIWYWKNESGTWIQYGEEKDKRKNSNVDSSYLESLYQSCPRGVVPFQAGSRNYELSFQGMIQTNIASKTQKDVIRRPTFVPQWYVQQMKRGPDHQPAKTSSVSLTATFRPQEDFCFLSSKKYKLSEIHHLHPEYVRVSEHFKASMKNFKIEKIKKIENSELLDKFTWKKSQMKEEGKLLFYATSRAYVESICSNNFDSFLHETHENKYGKGIYFAKDAIYSHKNCPYDAKNVVMFVAQVLVGKFTEGNITYTSPPPQFDSCVDTRSNPSVFVIFQKDQVYPQYVIEYTEDKACVIS

SEQ ID NO: 1061 - protein, 158 aa, Homo sapiens
MMQKLLKCSRLVLALALILVLESSVQGYPTRRARYQWVRCNPDSNSANCLEEKGPMFELLPGESNKIPRLRTDLFPKTRIQDLNRIFPLSEDYSGSGFGSGSGSGSGSGSGFLTEMEQDYQLVDESDAFHDNLRSLDRNLPSDSQDLGQHGLEEDFML

SEQ ID NO: 1062 - protein, 582 aa, Homo sapiens
MISRYTRKAVPQSLELKGITKHALNHHPPPEKLEEISPTSDSHEKDTSSQSKSDITRESSFTSADTGNSLSAFPSYTGAGISTEGSSDFSWGYGELDQNATEKVQTMFTAIDELLYEQKLSVHTKSLQEECQQWTASFPHLRILGRQIITPSEGYRLYPRSPSAVSASYETTLSQERDSTIFGIRGKKLHFSSSYAHKASSIAKSSSFCSMERDEEDSIIVSEGIIEEYLAFDHIDIEEGFHGKKSEAATEKQKLGYPPIAPFYCMKEDVLAYVFDSVWCKVVSCMEQLTRSHWEGFASDDESNVAVTRPDSESSCVLSELHPLVLPRVPQSKVLYITSNPMSLCQASRHQPNVNDLLVHGMPLQPRNLSLMDKLLDLDDKLLMRPGSSTILSTRNWPNRAVEFSTSSLSYTVQSTRRRNPPPRTLHPISTSHSCAETPRSVEEILRGARVPVAPDSLSSPSPTPLSRNNLLPPIGTAEVEHVSTVGPQRQMKPHGDSSRAQSAVVDEPNYQQPQERLLLPDFFPRPNTTQSFLLDTQYRRSCAVEYPHQARPGRGSAGPQLHGSTKSQSGGRPVSRTRQGP

SEQ ID NO: 1063 - protein, 313 aa, Homo sapiens
MIGQKTLYSFFSPSPARKRHAPSPEPAVQGTGVAGVPEESGDAAAIPAKKAPAGQEEPGTPPSSPLSAEQLDRIQRNKAAALLRLAARNVPVGFGESWKKHLSGEFGKPYFIKLMGFVAEERKHYTVYPPPHQVFTWTQMCDIKDVKVVILGQDPYHGPNQAHGLCFSVQRPVPPPPSLENIYKELSTDIEDFVHPGHGDLSGWAKQGVLLLNAVLTVRAHQANSHKERGWEQFTDAVVSWLNQNSNGLVFLLWGSYAQKKGSAIDRKRHHVLQTAHPSPLSVYRGFFGCRHFSKTNELLQKSGKKPIDWKEL

SEQ ID NO: 1064 - protein, 89 aa, Homo sapiens
MCDRKAVIKNADMSEEMQQDSVECATQALEKYNIEKDIAAHIKKEFDKKYNPTWHCIVGRNFGSYVTHETKHFIYFYLGQVAILLFKSG

SEQ ID NO: 1065 - protein, 412 aa, Homo sapiens
MAAALLARASGPARRALCPRAWRQLHTIYQSVELPETHQMLLQTCRDFAEKELFPIAAQVDKEHLFPAAQVKKMGGLGLLAMDVPEELGGAGLDYLAYAIAMEEISRGCASTGVIMSVNNSLYLGPILKFGSKEQKQAWVTPFTSGDKIGCFALSEPGNGSDAGAASTTARAEGDSWVLNGTKAWITNAWEASAAVVFASTDRALQNKGISAFLVPMPTPGLTLGKKEDKLGIRGSSTANLIFEDCRIPKDSILGEPGMGFKIAMQTLDMGRIGIASQALGIAQTALDCAVNYAENRMAFGAPLTKLQVIQFKLADMALALESARLLTWRAAMLKDNKKPFIKEAAMAKLAASEAATAISHQAIQILGGMGYVTEMPAERHYRDARITEIYEGTSEIQRLVIAGHLLRSYRS

SEQ ID NO: 1066 - protein, 154 aa, Homo sapiens
MGNCLKSPTSDDISLLHESQSDRASFGEGTEPDQEPPPPYQEQVPVPVYHPTPSQTRLATQLTEEEQIRIAQRIGLIQHLPKGVYDPGRDGSEKKIRECVICMMDFVYGDPIRFLPCMHIYHLDCIDDWLMRSFTCPSCMEPVDAALLSSYETN

SEQ ID NO: 1067 - protein, 482 aa, Homo sapiens
MDEGIPHLQERQLLEHRDFIGLDYSSLYMCKPKRSMKRDDTKDTYKLPHRLIEKKRRDRINECIAQLKDLLPEHLKLTTLGHLEKAVVLELTLKHLKALTALTEQQHQKIIALQNGERSLKSPIQSDLDAFHSGFQTCAKEVLQYLSRFESWTPREPRCVQLINHLHAVATQFLPTPQLLTQQVPLSKGTGAPSAAGSAAAPCLERAGQKLEPLAYCVPVIQRTQPSAELAAENDTDTDSGYGGEAEARPDREKGKGAGASRVTIKQEPPGEDSPAPKRMKLDSRGGGSGGGPGGGAAAAAAALLGPDPAAAAALLRPDAALLSSLVAFGGGGGAPFPQPAAAAAPFCLPFCFLSPSAAAAYVQPFLDKSGLEKYLYPAAAAAPFPLLYPGIPAPAAAAAAAAAAAAAAAAFPCLSSVLSPPPEKAGAAAATLLPHEVAPLGAPHPQHPHGRTHLPFAGPREPGNPESSAQEDPSQPGKEAP

SEQ ID NO: 1068 - protein, 243 aa, Homo sapiens
MGKNKQPRGQQRQGGPPAADAAGPDDMEPKKGTGAPKECGEEEPRTCCGCRFPLLLALLQLALGIAVTVVGFLMASISSSLLVRDTPFWAGIIVCLVAYLGLFMLCVSYQVDERTCIQFSMKLLYFLLSALGLTVCVLAVAFAAHHYSQLTQFTCETTLDSCQCKLPSSEPLSRTFVYRDVTDCTSVTGTFKLFLLIQMILNLVCGLVCLLACFVMWKHRYQVFYVGVRICSLTASEGPQQKI

SEQ ID NO: 1069 - protein, 427 aa, Homo sapiens
MAEQDVENDLLDYDEEEEPQAPQESTPAPPKKDIKGSYVSIHSSGFRDFLLKPELLRAIVDCGFEHPSEVQHECIPQAILGMDVLCQAKSGMGKTAVFVLATLQQIEPVNGQVTVLVMCHTRELAFQISKEYERFSKYMPSVKVSVFFGGLSIKKDEEVLKKNCPHVVVGTPGRILALVRNRSFSLKNVKHFVLDECDKMLEQLDMRRDVQEIFRLTPHEKQCMMFSATLSKDIRPVCRKFMQDPMEVFVDDETKLTLHGLQQYYVKLKDSEKNRKLFDLLDVLEFNQVIIFVKSVQRCMALAQLLVEQNFPAIAIHRGMAQEERLSRYQQFKDFQRRILVATNLFGRGMDIERVNIVFNYDMPEDSDTYLHRVARAGRFGTKGLAITFVSDENDAKILNDVQDRFEVNVAELPEEIDISTYIEQSR

SEQ ID NO: 1070 - protein, 942 aa, Homo sapiens
MASDAVQSEPRSWSLLEQLGLAGADLAAPGVQQQLELERERLRREIRKELKLKEGAENLRRATTDLGRSLGPVELLLRGSSRRLDLLHQQLQELHAHVVLPDPAATHDGPQSPGAGGPTCSATNLSRVAGLEKQLAIELKVKQGAENMIQTYSNGSTKDRKLLLTAQQMLQDSKTKIDIIRMQLRRALQAGQLENQAAPDDTQGSPDLGAVELRIEELRHHFRVEHAVAEGAKNVLRLLSAAKAPDRKAVSEAQEKLTESNQKLGLLREALERRLGELPADHPKGRLLREELAAASSAAFSTRLAGPFPATHYSTLCKPAPLTGTLEVRVVGCRDLPETIPWNPTPSMGGPGTPDSRPPFLSRPARGLYSRSGSLSGRSSLKAEAENTSEVSTVLKLDNTVVGQTSWKPCGPNAWDQSFTLELERARELELAVFWRDQRGLCALKFLKLEDFLDNERHEVQLDMEPQGCLVAEVTFRNPVIERIPRLRRQKKIFSKQQGKAFQRARQMNIDVATWVRLLRRLIPNATGTGTFSPGASPGSEARTTGDISVEKLNLGTDSDSSPQKSSRDPPSSPSSLSSPIQESTAPELPSETQETPGPALCSPLRKSPLTLEDFKFLAVLGRGHFGKVLLSEFRPSGELFAIKALKKGDIVARDEVESLMCEKRILAAVTSAGHPFLVNLFGCFQTPEHVCFVMEYSAGGDLMLHIHSDVFSEPRAIFYSACVVLGLQFLHEHKIVYRDLKLDNLLLDTEGYVKIADFGLCKEGMGYGDRTSTFCGTPEFLAPEVLTDTSYTRAVDWWGLGVLLYEMLVGESPFPGDDEEEVFDSIVNDEVRYPRFLSAEAIGIMRRLLRRNPERRLGSSERDAEDVKKQPFFRTLGWEALLARRLPPPFVPTLSGRTDVSNFDEEFTGEAPTLSPPRDARPLTAAEQAAFLDFDFVAGGC

SEQ ID NO: 1071 - protein, 176 aa, Homo sapiens
MAARGRRAEPQGREAPGPAGGGGGGSRWAESGSGTSPESGDEEVSGAGSSPVSGGVNLFANDGSFLELFKRKMEEEQRQRQEEPPPGPQRPDQSAAAAGPGDPKRKGGPGSTLSFVGKRRGGNKLALKTGIVAKKQKTEDEVLTSKGDAWAKYMAEVKKYKAHQCGDDDKTRPLVK

SEQ ID NO: 1072 - protein, 835 aa, Homo sapiens
MGGRVFLAFCVWLTLPGAETQDSRGCARWCPQNSSCVNATACRCNPGFSSFSEIITTPTETCDDINECATPSKVSCGKFSDCWNTEGSYDCVCSPGYEPVSGAKTFKNESENTCQDVDECQQNPRLCKSYGTCVNTLGSYTCQCLPGFKFIPEDPKVCTDVNECTSGQNPCHSSTHCLNNVGSYQCRCRPGWQPIPGSPNGPNNTVCEDVDECSSGQHQCDSSTVCFNTVGSYSCRCRPGWKPRHGIPNNQKDTVCEDMTFSTWTPPPGVHSQTLSRFFDKVQDLGRDSKTSSAEVTIQNVIKLVDELMEAPGDVEALAPPVRHLIATQLLSNLEDIMRILAKSLPKGPFTYISPSNTELTLMIQERGDKNVTMGQSSARMKLNWAVAAGAEDPGPAVAGILSIQNMTTLLANASLNLHSKKQAELEEIYESSIRGVQLRRLSAVNSIFLSHNNTKELNSPILFAFSHLESSDGEAGRDPPAKDVMPGPRQELLCAFWKSDSDRGGHWATEGCQVLGSKNGSTTCQCSHLSSFAILMAHYDVEDWKLTLITRVGLALSLFCLLLCILTFLLVRPIQGSRTTIHLHLCICLFVGSTIFLAGIENEGGQVGLRCRLVAGLLHYCFLAAFCWMSLEGLELYFLVVRVFQGQGLSTRWLCLIGYGVPLLIVGVSAAIYSKGYGRPRYCWLDFEQGFLWSFLGPVTFIILCNAVIFVTTVWKLTQKFSEINPDMKKLKKARALTITAIAQLFLLGCTWVFGLFIFDDRSLVLTYVFTILNCLQGAFLYLLHCLLNKKVREEYRKWACLVAGGSKYSEFTSTTSGTGHNQTRALRASESGI

SEQ ID NO: 1073 - protein, 600 aa, Homo sapiens
MVLILGRRLNREDLGVRDSPATKRKVFEMDPKSLTGHEFFDFSSGSSHAENILQIFNEFRDSRLFTDVIICVEGKEFPCHRAVLSACSSYFRAMFCNDHRESREMLVEINGILAEAMECFLQYVYTGKVKITTENVQYLFETSSLFQISVLRDACAKFLEEQLDPCNCLGIQRFADTHSLKTLFTKCKNFALQTFEDVSQHEEFLELDKDELIDYICSDELVIGKEEMVFEAVMRWVYRAVDLRRPLLHELLTHVRLPLLHPNYFVQTVEVDQLIQNSPECYQLLHEARRYHILGNEMMSPRTRPRRSTGYSEVIVVVGGCERVGGFNLPYTECYDPVTGEWKSLAKLPEFTKSEYAVCALRNDILVSGGRINSRDVWIYNSQLNIWIRVASLNKGRWRHKMAVLLGKVYVVGGYDGQNRLSSVECYDSFSNRWTEVAPLKEAVSSPAVTSCVGKLFVIGGGPDDNTCSDKVQSYDPETNSWLLRAAIPIAKRCITAVSLNNLIYVAGGLTKAIYCYDPVEDYWMHVQNTFSRQENCGMSVCNGKIYILGGRRENGEATDTILCYDPATSIITGVAAMPRPVSYHGCVTIHRYNEKCFKL

SEQ ID NO: 1074 - protein, 206 aa, Homo sapiens
MGAEWELGAEAGGSLLLCAALLAAGCALGLRLGRGQGAADRGALIWLCYDALVHFALEGPFVYLSLVGNVANSDGLIASLWKEYGKADARWVYFDPTIVSVEILTVALDGSLALFLIYAIVKEKYYRHFLQITLCVCELYGCWMTFLPEWLTRSPNLNTSNWLYCWLYLFFFNGVWVLIPGLLLWQSWLELKKMHQKETSSVKKFQ

SEQ ID NO: 1075 - protein, 1465 aa, Homo sapiens
MPEQERQITAREGASRKILSKLSLPTRAWEPAMKKSFAFDNVGYEGGLDGLGPSSQVATSTVRILGMTCQSCVKSIEDRISNLKGIISMKVSLEQGSATVKYVPSVVCLQQVCHQIGDMGFEASIAEGKAASWPSRSLPAQEAVVKLRVEGMTCQSCVSSIEGKVRKLQGVVRVKVSLSNQEAVITYQPYLIQPEDLRDHVNDMGFEAAIKSKVAPLSLGPIDIERLQSTNPKRPLSSANQNFNNSETLGHQGSHVVTLQLRIDGMHCKSCVLNIEENIGQLLGVQSIQVSLENKTAQVKYDPSCTSPVALQRAIEALPPGNFKVSLPDGAEGSGTDHRSSSSHSPGSPPRNQVQGTCSTTLIAIAGMTCASCVHSIEGMISQLEGVQQISVSLAEGTATVLYNPSVISPEELRAAIEDMGFEASVVSESCSTNPLGNHSAGNSMVQTTDGTPTSVQEVAPHTGRLPANHAPDILAKSPQSTRAVAPQKCFLQIKGMTCASCVSNIERNLQKEAGVLSVLVALMAGKAEIKYDPEVIQPLEIAQFIQDLGFEAAVMEDYAGSDGNIELTITGMTCASCVHNIESKLTRTNGITYASVALATSKALVKFDPEIIGPRDIIKIIEEIGFHASLAQRNPNAHHLDHKMEIKQWKKSFLCSLVFGIPVMALMIYMLIPSNEPHQSMVLDHNIIPGLSILNLIFFILCTFVQLLGGWYFYVQAYKSLRHRSANMDVLIVLATSIAYVYSLVILVVAVAEKAERSPVTFFDTPPMLFVFIALGRWLEHLAKSKTSEALAKLMSLQATEATVVTLGEDNLIIREEQVPMELVQRGDIVKVVPGGKFPVDGKVLEGNTMADESLITGEAMPVTKKPGSTVIAGSINAHGSVLIKATHVGNDTTLAQIVKLVEEAQMSKAPIQQLADRFSGYFVPFIIIMSTLTLVVWIVIGFIDFGVVQRYFPNPNKHISQTEVIIRFAFQTSITVLCIACPCSLGLATPTAVMVGTGVAAQNGILIKGGKPLEMAHKIKTVMFDKTGTITHGVPRVMRVLLLGDVATLPLRKVLAVVGTAEASSEHPLGVAVTKYCKEELGTETLGYCTDFQAVPGCGIGCKVSNVEGILAHSERPLSAPASHLNEAGSLPAEKDAVPQTFSVLIGNREWLRRNGLTISSDVSDAMTDHEMKGQTAILVAIDGVLCGMIAIADAVKQEAALAVHTLQSMGVDVVLITGDNRKTARAIATQVGINKVFAEVLPSHKVAKVQELQNKGKKVAMVGDGVNDSPALAQADMGVAIGTGTDVAIEAADVVLIRNDLLDVVASIHLSKRTVRRIRINLVLALIYNLVGIPIAAGVFMPIGIVLQPWMGSAAMAASSVSVVLSSLQLKCYKKPDLERYEAQAHGHMKPLTASQVSVHIGMDDRWRDSPRATPWDQVSYVSQVSLSSLTSDKPSRHSAAADDDGDKWSLLLNGRDEEQYI

SEQ ID NO: 1076 - protein, 1668 aa, Homo sapiens
MSKIRRKVTVENTKTISDSTSRRPSVFERLGPSTGSTAETQCRNWLKTGNCLYGNTCRFVHGPSPRGKGYSSNYRRSPERPTGDLRERMKNKRQDVDTEPQKRNTEESSSPVRKESSRGRHREKEDIKITKERTPESEEENVEWETNRDDSDNGDINYDYVHELSLEMKRQKIQRELMKLEQENMEKREEIIIKKEVSPEVVRSKLSPSPSLRKSSKSPKRKSSPKSSSASKKDRKTSAVSSPLLDQQRNSKTNQSKKKGPRTPSPPPPIPEDIALGKKYKEKYKVKDRIEEKTRDGKDRGRDFERQREKRDKPRSTSPAGQHHSPISSRHHSSSSQSGSSIQRHSPSPRRKRTPSPSYQRTLTPPLRRSASPYPSHSLSSPQRKQSPPRHRSPMREKGRHDHERTSQSHDRRHERREDTRGKRDREKDSREEREYEQDQSSSRDHRDDREPRDGRDRRDARDTRDRRELRDSRDMRDSREMRDYSRDTKESRDPRDSRSTRDAHDYRDREGRDTHRKEDTYPEESRSYGRNHLREESSRTEIRNESRNESRSEIRNDRMGRSRGRVPELPEKGSRGSRGSQIDSHSSNSNYHDSWETRSSYPERDRYPERDNRDQARDSSFERRHGERDRRDNRERDQRPSSPIRHQGRNDELERDERREERRVDRVDDRRDERARERDRERERDRERERERERERDREREKERELERERAREREREREKERDRERDRDRDHDRERERERERDREKEREREREERERERERERERERERERERERARERDKERERQRDWEDKDKGRDDRREKREEIREDRNPRDGHDERKSKKRYRNEGSPSPRQSPKRRREHSPDSDAYNSGDDKNEKHRLLSQVVRPQESRSLSPSHLTEDRQGRWKEEDRKPERKESSRRYEEQELKEKVSSVDKQREQTEILESSRMRAQDIIGHHQSEDRETSDRAHDENKKKAKIQKKPIKKKKEDDVGIERGNIETTSEDGQVFSPKKGQKKKSIEKKRKKSKGDSDISDEEAAQQSKKKRGPRTPPITTKEELVEMCNGKNGILEDSQKKEDTAFSDWSDEDVPDRTEVTEAEHTATATTPGSTPSPLSSLLPPPPPVATATATTVPATLAATTAAAATSFSTSAITISTSATPTNTTNNTFANEDSHRKCHRTRVEKVETPHVTIEDAQHRKPMDQKRSSSLGSNRSNRSHTSGRLRSPSNDSAHRSGDDQSGRKRVLHSGSRDREKTKSLEITGERKSRIDQLKRGEPSRSTSSDRQDSRSHSSRRSSPESDRQVHSRSGSFDSRDRLQERDRYEHDRERERERRDTRQREWDRDADKDWPRNRDRDRLRERERERERDKRRDLDRERERLISDSVERDRDRDRDRTFESSQIESVKRCEAKLEGEHERDLESTSRDSLALDKERMDKDLGSVQGFEETNKSERTESLEGDDESKLDDAHSLGSGAGEGYEPISDDELDEILAGDAEKREDQQDEEKMPDPLDVIDVDWSGLMPKHPKEPREPGAALLKFTPGAVMLRVGISKKLAGSELFAKVKETCQRLLEKPKDADNLFEHELGALNMAALLRKEERASLLSNLGPCCKALCFRRDSAIRKQLVKNEKGTIKQAYTSAPMVDNELLRLSLRLFKRKTTCHAPGHEKTEDNKLSQSSIQQELCVS

SEQ ID NO: 1077 - protein, 269 aa, Homo sapiens
MNQEDLDPDSTTDVGDVTNTEEELIRECEEMWKDMEECQNKLSLIGTETLTDSNAQLSLLIMQVKCLTAELSQWQKKTPETIPLTEDVLITLGKEEFQKLRQDLEMVLSTKESKNEKLKEDLEREQRWLDEQQQIMESLNVLHSELKNKVETFSESRIFNELKTKMLNIKEYKEKLLSTLGEFLEDHFPLPDRSVKKKKKNIQESSVNLITLHEMLEILINRLFDVPHDPYVKISDSFWPPYVELLLRNGIALRHPEDPTRIRLEAFHQ

SEQ ID NO: 1078 - protein, 153 aa, Homo sapiens
MNVGVAHSEVNPNTRVMNSRGIWLAYIILVGLLHMVLLSIPFFSIPVVWTLTNVIHNLATYVFLHTVKGTPFETPDQGKARLLTHWEQMDYGLQFTSSRKFLSISPIVLYLLASFYTKYDAAHFLINTASLLSVLLPKLPQFHGVRVFGINKY

SEQ ID NO: 1079 - protein, 598 aa, Homo sapiens
MPCIQAQYGTPAPSPGPRDHLASDPLTPEFIKPTMDLASPEAAPAAPTALPSFSTFMDGYTGEFDTFLYQLPGTVQPCSSASSSASSTSSSSATSPASASFKFEDFQVYGCYPGPLSGPVDEALSSSGSDYYGSPCSAPSPSTPSFQPPQLSPWDGSFGHFSPSQTYEGLRAWTEQLPKASGPPQPPAFFSFSPPTGPSPSLAQSPLKLFPSQATHQLGEGESYSMPTAFPGLAPTSPHLEGSGILDTPVTSTKARSGAPGGSEGRCAVCGDNASCQHYGVRTCEGCKGFFKRTVQKNAKYICLANKDCPVDKRRRNRCQFCRFQKCLAVGMVKEVVRTDSLKGRRGRLPSKPKQPPDASPANLLTSLVRAHLDSGPSTAKLDYSKFQELVLPHFGKEDAGDVQQFYDLLSGSLEVIRKWAEKIPGFAELSPADQDLLLESAFLELFILRLAYRSKPGEGKLIFCSGLVLHRLQCARGFGDWIDSILAFSRSLHSLLVDVPAFACLSALVLITDRHGLQEPRRVEELQNRIASCLKEHVAAVAGEPQPASCLSRLLGKLPELRTLCTQGLQRIFYLKLEDLVPPPPIIDKIFMDTLPF

SEQ ID NO: 1080 - protein, 4544 aa, Homo sapiens
MLTPPLLLLLPLLSALVAAAIDAPKTCSPKQFACRDQITCISKGWRCDGERDCPDGSDEAPEICPQSKAQRCQPNEHNCLGTELCVPMSRLCNGVQDCMDGSDEGPHCRELQGNCSRLGCQHHCVPTLDGPTCYCNSSFQLQADGKTCKDFDECSVYGTCSQLCTNTDGSFICGCVEGYLLQPDNRSCKAKNEPVDRPPVLLIANSQNILATYLSGAQVSTITPTSTRQTTAMDFSYANETVCWVHVGDSAAQTQLKCARMPGLKGFVDEHTINISLSLHHVEQMAIDWLTGNFYFVDDIDDRIFVCNRNGDTCVTLLDLELYNPKGIALDPAMGKVFFTDYGQIPKVERCDMDGQNRTKLVDSKIVFPHGITLDLVSRLVYWADAYLDYIEVVDYEGKGRQTIIQGILIEHLYGLTVFENYLYATNSDNANAQQKTSVIRVNRFNSTEYQVVTRVDKGGALHIYHQRRQPRVRSHACENDQYGKPGGCSDICLLANSHKARTCRCRSGFSLGSDGKSCKKPEHELFLVYGKGRPGIIRGMDMGAKVPDEHMIPIENLMNPRALDFHAETGFIYFADTTSYLIGRQKIDGTERETILKDGIHNVEGVAVDWMGDNLYWTDDGPKKTISVARLEKAAQTRKTLIEGKMTHPRAIVVDPLNGWMYWTDWEEDPKDSRRGRLERAWMDGSHRDIFVTSKTVLWPNGLSLDIPAGRLYWVDAFYDRIETILLNGTDRKIVYEGPELNHAFGLCHHGNYLFWTEYRSGSVYRLERGVGGAPPTVTLLRSERPPIFEIRMYDAQQQQVGTNKCRVNNGGCSSLCLATPGSRQCACAEDQVLDADGVTCLANPSYVPPPQCQPGEFACANSRCIQERWKCDGDNDCLDNSDEAPALCHQHTCPSDRFKCENNRCIPNRWLCDGDNDCGNSEDESNATCSARTCPPNQFSCASGRCIPISWTCDLDDDCGDRSDESASCAYPTCFPLTQFTCNNGRCININWRCDNDNDCGDNSDEAGCSHSCSSTQFKCNSGRCIPEHWTCDGDNDCGDYSDETHANCTNQATRPPGGCHTDEFQCRLDGLCIPLRWRCDGDTDCMDSSDEKSCEGVTHVCDPSVKFGCKDSARCISKAWVCDGDNDCEDNSDEENCESLACRPPSHPCANNTSVCLPPDKLCDGNDDCGDGSDEGELCDQCSLNNGGCSHNCSVAPGEGIVCSCPLGMELGPDNHTCQIQSYCAKHLKCSQKCDQNKFSVKCSCYEGWVLEPDGESCRSLDPFKPFIIFSNRHEIRRIDLHKGDYSVLVPGLRNTIALDFHLSQSALYWTDVVEDKIYRGKLLDNGALTSFEVVIQYGLATPEGLAVDWIAGNIYWVESNLDQIEVAKLDGTLRTTLLAGDIEHPRAIALDPRDGILFWTDWDASLPRIEAASMSGAGRRTVHRETGSGGWPNGLTVDYLEKRILWIDARSDAIYSARYDGSGHMEVLRGHEFLSHPFAVTLYGGEVYWTDWRTNTLAKANKWTGHNVTVVQRTNTQPFDLQVYHPSRQPMAPNPCEANGGQGPCSHLCLINYNRTVSCACPHLMKLHKDNTTCYEFKKFLLYARQMEIRGVDLDAPYYNYIISFTVPDIDNVTVLDYDAREQRVYWSDVRTQAIKRAFINGTGVETVVSADLPNAHGLAVDWVSRNLFWTSYDTNKKQINVARLDGSFKNAVVQGLEQPHGLVVHPLRGKLYWTDGDNISMANMDGSNRTLLFSGQKGPVGLAIDFPESKLYWISSGNHTINRCNLDGSGLEVIDAMRSQLGKATALAIMGDKLWWADQVSEKMGTCSKADGSGSVVLRNSTTLVMHMKVYDESIQLDHKGTNPCSVNNGDCSQLCLPTSETTRSCMCTAGYSLRSGQQACEGVGSFLLYSVHEGIRGIPLDPNDKSDALVPVSGTSLAVGIDFHAENDTIYWVDMGLSTISRAKRDQTWREDVVTNGIGRVEGIAVDWIAGNIYWTDQGFDVIEVARLNGSFRYVVISQGLDKPRAITVHPEKGYLFWTEWGQYPRIERSRLDGTERVVLVNVSISWPNGISVDYQDGKLYWCDARTDKIERIDLETGENREVVLSSNNMDMFSVSVFEDFIYWSDRTHANGSIKRGSKDNATDSVPLRTGIGVQLKDIKVFNRDRQKGTNVCAVANGGCQQLCLYRGRGQRACACAHGMLAEDGASCREYAGYLLYSERTILKSIHLSDERNLNAPVQPFEDPEHMKNVIALAFDYRAGTSPGTPNRIFFSDIHFGNIQQINDDGSRRITIVENVGSVEGLAYHRGWDTLYWTSYTTSTITRHTVDQTRPGAFERETVITMSGDDHPRAFVLDECQNLMFWTNWNEQHPSIMRAALSGANVLTLIEKDIRTPNGLAIDHRAEKLYFSDATLDKIERCEYDGSHRYVILKSEPVHPFGLAVYGEHIFWTDWVRRAVQRANKHVGSNMKLLRVDIPQQPMGIIAVANDTNSCELSPCRINNGGCQDLCLLTHQGHVNCSCRGGRILQDDLTCRAVNSSCRAQDEFECANGECINFSLTCDGVPHCKDKSDEKPSYCNSRRCKKTFRQCSNGRCVSNMLWCNGADDCGDGSDEIPCNKTACGVGEFRCRDGTCIGNSSRCNQFVDCEDASDEMNCSATDCSSYFRLGVKGVLFQPCERTSLCYAPSWVCDGANDCGDYSDERDCPGVKRPRCPLNYFACPSGRCIPMSWTCDKEDDCEHGEDETHCNKFCSEAQFECQNHRCISKQWLCDGSDDCGDGSDEAAHCEGKTCGPSSFSCPGTHVCVPERWLCDGDKDCADGADESIAAGCLYNSTCDDREFMCQNRQCIPKHFVCDHDRDCADGSDESPECEYPTCGPSEFRCANGRCLSSRQWECDGENDCHDQSDEAPKNPHCTSQEHKCNASSQFLCSSGRCVAEALLCNGQDDCGDSSDERGCHINECLSRKLSGCSQDCEDLKIGFKCRCRPGFRLKDDGRTCADVDECSTTFPCSQRCINTHGSYKCLCVEGYAPRGGDPHSCKAVTDEEPFLIFANRYYLRKLNLDGSNYTLLKQGLNNAVALDFDYREQMIYWTDVTTQGSMIRRMHLNGSNVQVLHRTGLSNPDGLAVDWVGGNLYWCDKGRDTIEVSKLNGAYRTVLVSSGLREPRALVVDVQNGYLYWTDWGDHSLIGRIGMDGSSRSVIVDTKITWPNGLTLDYVTERIYWADAREDYIEFASLDGSNRHVVLSQDIPHIFALTLFEDYVYWTDWETKSINRAHKTTGTNKTLLISTLHRPMDLHVFHALRQPDVPNHPCKVNNGGCSNLCLLSPGGGHKCACPTNFYLGSDGRTCVSNCTASQFVCKNDKCIPFWWKCDTEDDCGDHSDEPPDCPEFKCRPGQFQCSTGICTNPAFICDGDNDCQDNSDEANCDIHVCLPSQFKCTNTNRCIPGIFRCNGQDNCGDGEDERDCPEVTCAPNQFQCSITKRCIPRVWVCDRDNDCVDGSDEPANCTQMTCGVDEFRCKDSGRCIPARWKCDGEDDCGDGSDEPKEECDERTCEPYQFRCKNNRCVPGRWQCDYDNDCGDNSDEESCTPRPCSESEFSCANGRCIAGRWKCDGDHDCADGSDEKDCTPRCDMDQFQCKSGHCIPLRWRCDADADCMDGSDEEACGTGVRTCPLDEFQCNNTLCKPLAWKCDGEDDCGDNSDENPEECARFVCPPNRPFRCKNDRVCLWIGRQCDGTDNCGDGTDEEDCEPPTAHTTHCKDKKEFLCRNQRCLSSSLRCNMFDDCGDGSDEEDCSIDPKLTSCATNASICGDEARCVRTEKAAYCACRSGFHTVPGQPGCQDINECLRFGTCSQLCNNTKGGHLCSCARNFMKTHNTCKAEGSEYQVLYIADDNEIRSLFPGHPHSAYEQAFQGDESVRIDAMDVHVKAGRVYWTNWHTGTISYRSLPPAAPPTTSNRHRRQIDRGVTHLNISGLKMPRGIAIDWVAGNVYWTDSGRDVIEVAQMKGENRKTLISGMIDEPHAIVVDPLRGTMYWSDWGNHPKIETAAMDGTLRETLVQDNIQWPTGLAVDYHNERLYWADAKLSVIGSIRLNGTDPIVAADSKRGLSHPFSIDVFEDYIYGVTYINNRVFKIHKFGHSPLVNLTGGLSHASDVVLYHQHKQPEVTNPCDRKKCEWLCLLSPSGPVCTCPNGKRLDNGTCVPVPSPTPPPDAPRPGTCNLQCFNGGSCFLNARRQPKCRCQPRYTGDKCELDQCWEHCRNGGTCAASPSGMPTCRCPTGFTGPKCTQQVCAGYCANNSTCTVNQGNQPQCRCLPGFLGDRCQYRQCSGYCENFGTCQMAADGSRQCRCTAYFEGSRCEVNKCSRCLEGACVVNKQSGDVTCNCTDGRVAPSCLTCVGHCSNGGSCTMNSKMMPECQCPPHMTGPRCEEHVFSQQQPGHIASILIPLLLLLLLVLVAGVVFWYKRRVQGAKGFQHQRMTNGAMNVEIGNPTYKMYEGGEPDDVGGLLDADFALDPDKPTNFTNPVYATLYMGGHGSRHSLASTDEKRELLGRGPEDEIGDPLA

SEQ ID NO: 1081 - protein, 235 aa, Homo sapiens
MNSYFTNPSLSCHLAGGQDVLPNVALNSTAYDPVRHFSTYGAAVAQNRIYSTPFYSPQENVVFSSSRGPYDYGSNSFYQEKDMLSNCRQNTLGHNTQTSIAQDFSSEQGRTAPQDQKASIQIYPWMQRMNSHSGVGYGADRRRGRQIYSRYQTLELEKEFHFNRYLTRRRRIEIANALCLTERQIKIWFQNRRMKWKKESNLTSTLSGGGGGATADSLGGKEEKREETEEEKQKE

SEQ ID NO: 1082 - protein, 290 aa, Homo sapiens
MSNYVNDMWPGSPQEKDSPSTSRSGGSSRLSSRSRSRSFSRSSRSHSRVSSRFSSRSRRSKSRSRSRRRHQRKYRRYSRSYSRSRSRSRSRRYRERRYGFTRRYYRSPSRYRSRSRSRSRSRGRSYCGRAYAIARGQRYYGFGRTVYPEEHSRWRDRSRTRSRSRTPFRLSEKDRMELLEIAKTNAAKALGTTNIDLPASLRTVPSAKETSRGIGVSSNGAKPELSEKVTEDGTRNPNEKPTQQRSIAFSSNNSVAKPIQKSAKAATEEASSRSPKIDQKKSPYGLWIPI

SEQ ID NO: 1083 - protein, 380 aa, Homo sapiens
MAFVCLAIGCLYTFLISTTFGCTSSSDTEIKVNPPQDFEIVDPGYLGYLYLQWQPPLSLDHFKECTVEYELKYRNIGSETWKTIITKNLHYKDGFDLNKGIEAKIHTLLPWQCTNGSEVQSSWAETTYWISPQGIPETKVQDMDCVYYNWQYLLCSWKPGIGVLLDTNYNLFYWYEGLDHALQCVDYIKADGQNIGCRFPYLEASDYKDFYICVNGSSENKPIRSSYFTFQLQNIVKPLPPVYLTFTRESSCEIKLKWSIPLGPIPARCFDYEIEIREDDTTLVTATVENETYTLKTTNETRQLCFVVRSKVNIYCSDDGIWSEWSDKQCWEGEDLSKKTLLRFWLPFGFILILVIFVTGLLLRKPNTYPKMIPEFFCDT

SEQ ID NO: 1084 - protein, 87 aa, Homo sapiens
MALSSAWRSVLPLWLLWSAACSRAASGDDNAFPFDIEGSSAVGRQDPPETSEPRVALGRLPPAAEKCNAGFFHTLSGECVPCDCNGN

SEQ ID NO: 1085 - protein, 680 aa, Homo sapiens
MLPQIPFLLLVSLNLVHGVFYAERYQMPTGIKGPLPNTKTQFFIPYTIKSKGIAVRGEQGTPGPPGPAGPRGHPGPSGPPGKPGYGSPGLQGEPGLPGPPGPSAVGKPGVPGLPGKPGERGPYGPKGDVGPAGLPGPRGPPGPPGIPGPAGISVPGKPGQQGPTGAPGPRGFPGEKGAPGVPGMNGQKGEMGYGAPGRPGERGLPGPQGPTGPSGPPGVGKRGENGVPGQPGIKGDRGFPGEMGPIGPPGPQGPPGERGPEGIGKPGAAGAPGQPGIPGTKGLPGAPGIAGPPGPPGFGKPGLPGLKGERGPAGLPGGPGAKGEQGPAGLPGKPGLTGPPGNMGPQGPKGIPGSHGLPGPKGETGPAGPAGYPGAKGERGSPGSDGKPGYPGKPGLDGPKGNPGLPGPKGDPGVGGPPGLPGPVGPAGAKGMPGHNGEAGPRGAPGIPGTRGPIGPPGIPGFPGSKGDPGSPGPPGPAGIATKGLNGPTGPPGPPGPRGHSGEPGLPGPPGPPGPPGQAVMPEGFIKAGQRPSLSGTPLVSANQGVTGMPVSAFTVILSKAYPAIGTPIPFDKILYNRQQHYDPRTGIFTCQIPGIYYFSYHVHVKGTHVWVGLYKNGTPVMYTYDEYTKGYLDQASGSAIIDLTENDQVWLQLPNAESNGLYSSEYVHSSFSGFLVAPM

SEQ ID NO: 1086 - protein, 476 aa, Homo sapiens
MAIKFLEVIKPFCVILPEIQKPERKIQFKEKVLWTAITLFIFLVCCQIPLFGIMSSDSADPFYWMRVILASNRGTLMELGISPIVTSGLIMQLLAGAKIIEVGDTPKDRALFNGAQKLFGMIITIGQSIVYVMTGMYGDPSEMGAGICLLITIQLFVAGLIVLLLDELLQKGYGLGSGISLFIATNICETIVWKAFSPTTVNTGRGMEFEGAIIALFHLLATRTDKVRALREAFYRQNLPNLMNLIATIFVFAVVIYFQGFRVDLPIKSARYRGQYNTYPIKLFYTSNIPIILQSALVSNLYVISQMLSARFSGNLLVSLLGTWSDTSSGGPARAYPVGGLCYYLSPPESFGSVLEDPVHAVVYIVFMLGSCAFFSKTWIEVSGSSAKDVAKQLKEQQMVMRGHRETSMVHELNRYIPTAAAFGGLCIGALSVLADFLGAIGSGTGILLAVTIIYQYFEIFVKEQSEVGSMGALLF

SEQ ID NO: 1087 - protein, 200 aa, Homo sapiens
MEKPYNKNEGNLENEGKPEDEVEPDDEGKSDEEEKPDVEGKTECEGKREDEGEPGDEGQLEDEGSQEKQGRSEGEGKPQGEGKPASQAKPESQPRAAEKRPAEDYVPRKAKRKTDRGTDDSPKDSQEDLQERHLSSEEMMRECGDVSRAQEELRKKQKMGGFHWMQRDVQDPFAPRGQRGVRGVRGGGRGQRGLHDIPYL

SEQ ID NO: 1088 - protein, 2472 aa, Homo sapiens
MTARGQSPLAPLLETLEDPSASHGGQTDAYLTLTSRMTGEEGKEVITEIEKKLPRLYKVLKTHISSQNSELSSAALQALGFCLYNPKITSELSEANALELLSKLNDTIKNSDKNVRTRALWVISKQTFPSEVVGKMVSSIIDSLEILFNKGETHSAVVDFEALNVIVRLIEQAPIQMGEEAVRWAKLVIPLVVHSAQKVHLRGATALEMGMPLLLQKQQEIASITEQLMTTKLISELQKLFMSKNETYVLKLWPLFVKLLGRTLHRSGSFINSLLQLEELGFRSGAPMIKKIAFIAWKSLIDNFALNPDILCSAKRLKLLMQPLSSIHVRTETLALTKLEVWWYLLMRLGPHLPANFEQVCVPLIQSTISIDSNASPQGNSCHVATSPGLNPMTPVHKGASSPYGAPGTPRMNLSSNLGGMATIPSIQLLGLEMLLHFLLGPEALSFAKQNKLVLSLEPLEHPLISSPSFFSKHANTLITAVHDSFVAVGKDAPDVVVSAIWKELISLVKSVTESGNKKEKPGSEVLTLLLKSLESIVKSEVFPVSKTLVLMEITIKGLPQKVLGSPAYQVANMDILNGTPALFLIQLIFNNFLECGVSDERFFLSLESLVGCVLSGPTSPLAFSDSVLNVINQNAKQLENKEHLWKMWSVIVTPLTELINQTNEVNQGDALEHNFSAIYGALTLPVNHIFSEQRFPVATMKTLLRTWSELYRAFARCAALVATAEENLCCEELSSKIMSSLEDEGFSNLLFVDRIIYIITVMVDCIDFSPYNIKYQPKVKSPQRPSDWSKKKNEPLGKLTSLFKLIVKVIYSFHTLSFKEAHSDTLFTIGNSITGIISSVLGHISLPSMIRKIFATLTRPLALFYENSKLDEVPKVYSCLNNKLEKLLGEIIACLQFSYTGTYDSELLEQLSPLLCIIFLHKNKQIRKQSAQFWNATFAKVMMLVYPEELKPVLTQAKQKFLLLLPGLETVEMMEESSGPYSDGTENSQLNVKISGMERKSNGKRDSFLAQTKNKKENMKPAAKLKLESSSLKVKGEILLEEEKSTDFVFIPPEGKDAKERILTDHQKEVLKTKRCDIPAMYNNLDVSQDTLFTQYSQEEPMEIPTLTRKPKEDSKMMITEEQMDSDIVIPQDVTEDCGMAEHLEKSSLSNNECGSLDKTSPEMSNSNNDERKKALISSRKTSTECASSTENSFVVSSSSVSNTTVAGTPPYPTSRRQTFITLEKFDGSENRPFSPSPLNNISSTVTVKNNQETMIKTDFLPKAKQREGTFSKSDSEKIVNGTKRSSRRAGKAEQTGNKRSKPLMRSEPEKNTEESVEGIVVLENNPPGLLNQTECVSDNQVHLSESTMEHDNTKLKAATVENAVLLETNTVEEKNVEINLESKENTPPVVISADQMVNEDSQVQITPNQKTLRRSSRRRSEVVESTTESQDKENSHQKKERRKEEEKPLQKSPLHIKDDVLPKQKLIAEQTLQENLIEKGSNLHEKTLGETSANAETEQNKKKADPENIKSEGDGTQDIVDKSSEKLVRGRTRYQTRRASQGLLSSIENSESDSSEAKEEGSRKKRSGKWKNKSNESVDIQDQEEKVVKQECIKAENQSHDYKATSEEDVSIKSPICEKQDESNTVICQDSTVTSDLLQVPDDLPNVCEEKNETSKYAEYSFTSLPVPESNLRTRNAIKRLHKRDSFDNCSLGESSKIGISDISSLSEKTFQTLECQHKRSRRVRRSKGCDCCGEKSQPQEKSLIGLKNTENNDVEISETKKADVQAPVSPSETSQANPYSEGQFLDEHHSVNFHLGLKEDNDTINDSLIVSETKSKENTMQESLPSGIVNFREEICDMDSSEAMSLESQESPNENFKTVGPCLGDSKNVSQESLETKEEKPEETPKMELSLENVTVEGNACKVTESNLEKAKTMELNVGNEASFHGQERTKTGISEEAAIEENKRNDDSEADTAKLNAKEVATEEFNSDISLSDNTTPVKLNAQTEISEQTAAGELDGGNDVSDLHSSEETNTKMKNNEEMMIGEAMAETGHDGETENEGITTKTSKPDEAETNMLTAEMDNFVCDTVEMSTEEGIIDANKTETNTEYSKSEEKLDNNQMVMESDILQEDHHTSQKVEEPSQCLASGTAISELIIEDNNASPQKLRELDPSLVSANDSPSGMQTRCVWSPLASPSTSILKRGLKRSQEDEISSPVNKVRRVSFADPIYQAGLADDIDRRCSIVRSHSSNSSPIGKSVKTSPTTQSKHNTTSAKGFLSPGSRSPKFKSSKKCLISEMAKESIPCPTESVYPPLVNCVAPVDIILPQITSNMWARGLGQLIRAKNIKTIGDLSTLTASEIKTLPIRSPKVSNVKKALRIYHEQQVKTRGLEEIPVFDISEKTVNGIENKSLSPDEERLVSDIIDPVALEIPLSKNLLAQISALALQLDSEDLHNYSGSQLFEMHEKLSCMANSVIKNLQSRWRSPSHENSI

SEQ ID NO: 1089 - protein, 1316 aa, Homo sapiens
MDSQELKTLINYYCQERYFHHVLLVASEGIKRYGSDPVFRFYHAYGTLMEGKTQEALREFEAIKNKQDVSLCSLLALIYAHKMSPNPDREAILESDARVKEQRKGAGEKALYHAGLFLWHIGRHDKAREYIDRMIKISDGSKQGHVLKAWLDITRGKEPYTKKALKYFEEGLQDGNDTFALLGKAQCLEMRQNYSGALETVNQIIVNFPSFLPAFVKKMKLQLALQDWDQTVETAQRLLLQDSQNVEALRMQALYYVCREGDIEKASTKLENLGNTLDAMEPQNAQLFYNITLAFSRTCGRSQLILQKIQTLLERAFSLNPQQSEFATELGYQMILQGRVKEALKWYKTAMTLDETSVSALVGFIQCQLIEGQLQDADQQLEFLNEIQQSIGKSAELIYLHAVLAMKKNKRQEEVINLLNDVLDTHFSQLEGLPLGIQYFEKLNPDFLLEIVMEYLSFCPMQPASPGQPLCPLLRRCISVLETVVRTVPGLLQTVFLIAKVKYLSGDIEAAFNNLQHCLEHNPSYADAHLLLAQVYLSQEKVKLCSQSLELCLSYDFKVRDYPLYHLIKAQSQKKMGEIADAIKTLHMAMSLPGMKRIGASTKSKDRKTEVDTSHRLSIFLELIDVHRLNGEQHEATKVLQDAIHEFSGTSEEVRVTIANADLALAQGDIERALSILQNVTAEQPYFIEAREKMADIYLKHRKDKMLYITCFREIAERMANPRSFLLLGDAYMNILEPEEAIVAYEQALNQNPKDGTLASKMGKALIKTHNYSMAITYYEAALKTGQKNYLCYDLAELLLKLKWYDKAEKVLQHALAHEPVNELSALMEDGRCQVLLAKVYSKMEKLGDAITALQQARELQARVLKRVQMEQPDAVPAQKHLAAEICAEIAKHSVAQRDYEKAIKFYREALVHCETDNKIMLELARLYLAQDDPDSCLRQCALLLQSDQDNEAATMMMADLMFRKQDYEQAVFHLQQLLERKPDNYMTLSRLIDLLRRCGKLEDVPRFFSMAEKRNSRAKLEPGFQYCKGLYLWYTGEPNDALRHFNKARKDRDWGQNALYNMIEICLNPDNETVGGEVFENLDGDLGNSTEKQESVQLAVRTAEKLLKELKPQTVQGHVQLRIMENYCLMATKQKSNVEQALNTFTEIAASEKEHIPALLGMATAYMILKQTPRARNQLKRIAKMNWNAIDAEEFEKSWLLLADIYIQSAKYDMAEDLLKRCLRHNRSCCKAYEYMGYIMEKEQAYTDAALNYEMAWKYSNRTNPAVGYKLAFNYLKAKRYVDSIDICHQVLEAHPTYPKIRKDILDKARASLRP

SEQ ID NO: 1090 - protein, 307 aa, Homo sapiens
MEADKDDTQQILKEHSPDEFIKDEQNKGLIDEITKKNIQLKKEIQKLETELQEATKEFQIKEDIPETKMKFLSVETPENDSQLSNISCSFQVSSKVPYEIQKGQALITFEKEEVAQNVVSMSKHHVQIKDVNLEVTAKPVPLNSGVRFQVYVEVSKMKINVTEIPDTLREDQMRDKLELSFSKSRNGGGEVDRVDYDRQSGSAVITFVEIGVADKILKKKEYPLYINQTCHRVTVSPYTEIHLKKYQIFSGTSKRTVLLTGMEGIQMDEEIVEDLINIHFQRAKNGGGEVDVVKCSLGQPHIAYFEE

SEQ ID NO: 1091 - protein, 277 aa, Homo sapiens
MIILIYLFLLLWEDTQGWGFKDGIFHNSIWLERAAGVYHREARSGKYKLTYAEAKAVCEFEGGHLATYKQLEAARKIGFHVCAAGWMAKGRVGYPIVKPGPNCGFGKTGIIDYGIRLNRSERWDAYCYNPHAKECGGVFTDPKQIFKSPGFPNEYEDNQICYWHIRLKYGQRIHLSFLDFDLEDDPGCLADYVEIYDSYDDVHGFVGRYCGDELPDDIISTGNVMTLKFLSDASVTAGGFQIKYVAMDPVSKSSQGKNTSTTSTGNKNFLAGRFSHL

SEQ ID NO: 1092 - protein, 493 aa, Homo sapiens
MTRALCSALRQALLLLAAAAELSPGLKCVCLLCDSSNFTCQTEGACWASVMLTNGKEQVIKSCVSLPELNAQVFCHSSNNVTKTECCFTDFCNNITLHLPTASPNAPKLGPMELAIIITVPVCLLSIAAMLTVWACQGRQCSYRKKKRPNVEEPLSECNLVNAGKTLKDLIYDVTASGSGSGLPLLVQRTIARTIVLQEIVGKGRFGEVWHGRWCGEDVAVKIFSSRDERSWFREAEIYQTVMLRHENILGFIAADNKDNGTWTQLWLVSEYHEQGSLYDYLNRNIVTVAGMIKLALSIASGLAHLHMEIVGTQGKPAIAHRDIKSKNILVKKCETCAIADLGLAVKHDSILNTIDIPQNPKVGTKRYMAPEMLDDTMNVNIFESFKRADIYSVGLVYWEIARRCSVGGIVEEYQLPYYDMVPSDPSIEEMRKVVCDQKFRPSIPNQWQSCEALRVMGRIMRECWYANGAARLTALRIKKTISQLCVKEDCKA

SEQ ID NO: 1093 - protein, 439 aa, Homo sapiens
MKETPLSNCERRFLLRAIEEKKRLDGRQTYDYRNIRISFGTDYGCCIVELGKTRVLGQVSCELVSPKLNRATEGILFFNLELSQMAAPAFEPGRQSDLLVKLNRLMERCLRNSKCIDTESLCVVAGEKVWQIRVDLHLLNHDGNIIDAASIAAIVALCHFRRPDVSVQGDEVTLYTPEERDPVPLSIHHMPICVSFAFFQQGTYLLVDPNEREERVMDGLLVIAMNKHREICTIQSSGGIMLLKDQVLRCSKIAGVKVAEITELILKALENDQKVRKEGGKFGFAESIANQRITAFKMEKAPIDTSDVEEKAEEIIAEAEPPSEVVSTPVLWTPGTAQIGEGVENSWGDLEDSEKEDDEGGGDQAIILDGIKMDTGVEVSDIGSQDAPIILSDSEEEEMIILEPDKNPKKIRTQTTSAKQEKAPSKKPVKRRKKKRAAN

SEQ ID NO: 1094 - protein, 189 aa, Homo sapiens
MALLSRPALTLLLLLMAAVVRCQEQAQTTDWRATLKTIRNGVHKIDTYLNAALDLLGGEDGLCQYKCSDGSKPFPRYGYKPSPPNGCGSPLFGVHLNIGIPSLTKCCNQHDRCYETCGKSKNDCDEEFQYCLSKICRDVQKTLGLTQHVQACETTVELLFDSVIHLGCKPYLDSQRAACRCHYEEKTDL

SEQ ID NO: 1095 - protein, 282 aa, Homo sapiens
MAVPETRPNHTIYINNLNEKIKKDELKKSLYAIFSQFGQILDILVSRSLKMRGQAFVIFKEVSSATNALRSMQGFPFYDKPMRIQYAKTDSDIIAKMKGTFVERDRKREKRKPKSQETPATKKAVQGGGATPVVGAVQGPVPGMPPMTQAPRIMHHMPGQPPYMPPPGMIPPPGLAPGQIPPGAMPPQQLMPGQMPPAQPLSENPPNHILFLTNLPEETNELMLSMLFNQFPGFKEVRLVPGRHDIAFVEFDNEVQAGAARDALQGFKITQNNAMKISFAKK

SEQ ID NO: 1096 - protein, 175 aa, Homo sapiens
MAEVHVIGQIIGASGFSESSLFCKWGIHTGAAWKLLSGVREGQTQVDTPQIGDMAYWSHPIDLHFATKGLQGWPRLHFQVWSQDSFGRCQLAGYGFCHVPSSPGTHQLACPTWRPLGSWREQLARAFVGGGPQLLHGDTIYSGADRYRLHTAAGGTVHLEIGLLLRNFDRYGVEC

SEQ ID NO: 1097 - protein, 252 aa, Homo sapiens
MFFWCACCLMVAWRVSASDAEHCPELPPVDNSIFVAKEVEGQILGTYVCIKGYHLVGKKTLFCNASKEWDNTTTECRLGHCPDPVLVNGEFSSSGPVNVSDKITFMCNDHYILKGSNRSQCLEDHTWAPPFPICKSRDCDPPGNPVHGYFEGNNFTLGSTISYYCEDRYYLVGVQEQQCVDGEWSSALPVCKLIQEAPKPECEKALLAFQESKNLCEAMENFMQQLKESGMTMEELKYSLELKKAELKAKLL

SEQ ID NO: 1098 - protein, 532 aa, Homo sapiens
MIQAQESITLEDVAVDFTWEEWQLLGAAQKDLYRDVMLENYSNLVAVGYQASKPDALFKLEQGEQLWTIEDGIHSGACSDIWKVDHVLERLQSESLVNRRKPCHEHDAFENIVHCSKSQFLLGQNHDIFDLRGKSLKSNLTLVNQSKGYEIKNSVEFTGNGDSFLHANHERLHTAIKFPASQKLISTKSQFISPKHQKTRKLEKHHVCSECGKAFIKKSWLTDHQVMHTGEKPHRCSLCEKAFSRKFMLTEHQRTHTGEKPYECPECGKAFLKKSRLNIHQKTHTGEKPYICSECGKGFIQKGNLIVHQRIHTGEKPYICNECGKGFIQKTCLIAHQRFHTGKTPFVCSECGKSCSQKSGLIKHQRIHTGEKPFECSECGKAFSTKQKLIVHQRTHTGERPYGCNECGKAFAYMSCLVKHKRIHTREKQEAAKVENPPAERHSSLHTSDVMQEKNSANGATTQVPSVAPQTSLNISGLLANRNVVLVGQPVVRCAASGDNRGFAQDRNLVNAVNVVVPSVINYVLFYVTENP

SEQ ID NO: 1099 - protein, 603 aa, Homo sapiens
MSCGNEFVETLKKIGYPKADNLNGEDFDWLFEGVEDESFLKWFCGNVNEQNVLSERELEAFSILQKSGKPILEGAALDEALKTCKTSDLKTPRLDDKELEKLEDEVQTLLKLKNLKIQRRNKCQLMASVTSHKSLRLNAKEEEATKKLKQSQGILNAMITKISNELQALTDEVTQLMMFFRHSNLGQGTNPLVFLSQFSLEKYLSQEEQSTAALTLYTKKQFFQGIHEVVESSNEDNFQLLDIQTPSICDNQEILEERRLEMARLQLAYICAQHQLIHLKASNSSMKSSIKWAEESLHSLTSKAVDKENLDAKISSLTSEIMKLEKEVTQIKDRSLPAVVRENAQLLNMPVVKGDFDLQIAKQDYYTARQELVLNQLIKQKASFELLQLSYEIELRKHRDIYRQLENLVQELSQSNMMLYKQLEMLTDPSVSQQINPRNTIDTKDYSTHRLYQVLEGENKKKELFLTHGNLEEVAEKLKQNISLVQDQLAVSAQEHSFFLSKRNKDVDMLCDTLYQGGNQLLLSDQELTEQFHKVESQLNKLNHLLTDILADVKTKRKTLANNKLHQMEREFYVYFLKDEDYLKDIVENLETQSKIKAVSLED

SEQ ID NO: 1100 - protein, 775 aa, Homo sapiens
MRASLLLSVLRPAGPVAVGISLGFTLSLLSVTWVEEPCGPGPPQPGDSELPPRGNTNAARRPNSVQPGAEREKPGAGEGAGENWEPRVLPYHPAQPGQAAKKAVRTRYISTELGIRQRLLVAVLTSQTTLPTLGVAVNRTLGHRLERVVFLTGARGRRAPPGMAVVTLGEERPIGHLHLALRHLLEQHGDDFDWFFLVPDTTYTEAHGLARLTGHLSLASAAHLYLGRPQDFIGGEPTPGRYCHGGFGVLLSRMLLQQLRPHLEGCRNDIVSARPDEWLGRCILDATGVGCTGDHEGVHYSHLELSPGEPVQEGDPHFRSALTAHPVRDPVHMYQLHKAFARAELERTYQEIQELQWEIQNTSHLAVDGDQAAAWPVGIPAPSRPASRFEVLRWDYFTEQHAFSCADGSPRCPLRGADRADVADVLGTALEELNRRYHPALRLQKQQLVNGYRRFDPARGMEYTLDLQLEALTPQGGRRPLTRRVQLLRPLSRVEILPVPYVTEASRLTVLLPLAAAERDLAPGFLEAFATAALEPGDAAAALTLLLLYEPRQAQRVAHADVFAPVKAHVAELERRFPGARVPWLSVQTAAPSPLRLMDLLSKKHPLDTLFLLAGPDTVLTPDFLNRCRMHAISGWQAFFPMHFQAFHPAVAPPQGPGPPELGRDTGRFDRQAASEACFYNSDYVAARGRLAAASEQEEELLESLDVYELFLHFSSLHVLRAVEPALLQRYRAQTCSARLSEDLYHRCLQSVLEGLGSRTQLAMLLFEQEQGNST

SEQ ID NO: 1101 - protein, 366 aa, Homo sapiens
MVLHLLLFLLLTPQGGHSCQGLELARELVLAKVRALFLDALGPPAVTREGGDPGVRRLPRRHALGGFTHRGSEPEEEEDVSQAILFPATDASCEDKSAARGLAQEAEEGLFRYMFRPSQHTRSRQVTSAQLWFHTGLDRQGTAASNSSEPLLGLLALSPGGPVAVPMSLGHAPPHWAVLHLATSALSLLTHPVLVLLLRCPLCTCSARPEATPFLVAHTRTRPPSGGERARRSTPLMSWPWSPSALRLLQRPPEEPAAHANCHRVALNISFQELGWERWIVYPPSFIFHYCHGGCGLHIPPNLSLPVPGAPPTPAQPYSLLPGAQPCCAALPGTMRPLHVRTTSDGGYSFKYETVPNLLTQHCACI

SEQ ID NO: 1102 - protein, 346 aa, Homo sapiens
MCEGPSRISGPIPPDPTLCPDNYRRPTSAQGRLEGNALKLDLLTSDRALDTTAPRGPCIGPGAGEILERGQRGVGDVLLQLEGISLGPGASLKRKDPKDHEKENLRRIREIQKRFREQERSREQGQPRPLKALWRSPKYDKVESRVKAQLQEPGPASGTESAHFLRAHSRCGPGLPPPHVSSPQPTPPGPEAKEPGLGVDFIRHNARAAKRAPRRHSCSLQVLAQVLEQQRQAQEHYNATQKGHVPHYLLERRDLWRREAEARKQSQPDPAMPPGHTRMPENQRLETLTKLLQSQSQLLRELVLLPAGADSLRAQSHRAELDRKLVQVEEAIKIFSRPKVFVKMDD

SEQ ID NO: 1103 - protein, 365 aa, Homo sapiens
MGRWALDVAFLWKAVLTLGLVLLYYCFSIGITFYNKWLTKSFHFPLFMTMLHLAVIFLFSALSRALVQCSSHRARVVLSWADYLRRVAPTALATALDVGLSNWSFLYVTVSLYTMTKSSAVLFILIFSLIFKLEELRAALVLVVLLIAGGLFMFTYKSTQFNVEGFALVLGASFIGGIRWTLTQMLLQKAELGLQNPIDTMFHLQPLMFLGLFPLFAVFEGLHLSTSEKIFRFQDTGLLLRVLGSLFLGGILAFGLGFSEFLLVSRTSSLTLSIAGIFKEVCTLLLAAHLLGDQISLLNWLGFALCLSGISLHVALKALHSRGDGGPKALKGLGSSPDLELLLRSSQREEGDNEEEEYFVAQGQQ

SEQ ID NO: 1104 - protein, 156 aa, Homo sapiens
MAGQFRSYVWDPLLILSQIVLMQTVYYGSLGLWLALVDGLVRSSPSLDQMFDAEILGFSTPPGRLSMMSFILNALTCALGLLYFIRRGKQCLDFTVTVHFFHLLGCWFYSSRFPSALTWWLVQAVCIALMAVIGEYLCMRTELKEIPLNSAPKSNV

SEQ ID NO: 1105 - protein, 117 aa, Homo sapiens
MRASSFLIVVVFLIAGTLVLEAAVTGVPVKGQDTVKGRVPFNGQDPVKGQVSVKGQDKVKAQEPVKGPVSTKPGSCPIILIRCAMLNPPNRCLKDTDCPGIKKCCEGSCGMACFVPQ

SEQ ID NO: 1106 - protein, 231 aa, Homo sapiens
MMLSCLFLLKALLALGSLESWITAGEHAKEGECPPHKNPCKELCQGDELCPAEQKCCTTGCGRICRDIPKGRKRDCPRVIRKQSCLKRCITDETCPGVKKCCTLGCNKSCVVPISKQKLAEFGGECPADPLPCEELCDGDASCPQGHKCCSTGCGRTCLGDIEGGRGGDCPKVLVGLCIVGCVMDENCQAGEKCCKSGCGRFCVPPVLPPKLTMNPNWTVRSDSELEIPVP

SEQ ID NO: 1107 - protein, 499 aa, Homo sapiens
MRGLLCWPVLLLLLQPWETQLQLTGPRCHTGPLDLVFVIDSSRSVRPFEFETMRQFLMGLLRGLNVGPNATRVGVIQYSSQVQSVFPLRAFSRREDMERAIRDLVPLAQGTMTGLAIQYAMNVAFSVAEGARPPEERVPRVAVIVTDGRPQDRVAEVAAQARARGIEIYAVGVQRADVGSLRAMASPPLDEHVFLVESFDLIQEFGLQFQSRLCVRDLCNGVDHGCEFQCVSEGLSYRCLCPEGRQLQADGKSCNRCREGHVDLVLLVDGSKSVRPQNFELVKRFVNQIVDFLDVSPEGTRVGLVQFSSRVRTEFPLGRYGTAAEVKQAVLAVEYMERGTMTGLALRHMVEHSFSEAQGARPRALNVPRVGLVFTDGRSQDDISVWAARAKEEGIVMYAVGVGKAVEAELREIASEPAELHVSYAPDFGTMTHLLENLRGSICPEEGISAGTELRSPCECESLVEFQGRTLGALESLTLNLAQLTARLEDLENQLANQK

SEQ ID NO: 1108 - protein, 51 aa, Homo sapiens
MVAYWRQAGLSYIRYSQICAKAVRDALKTEFKANAEKTSGSNVKIVKVKKE

SEQ ID NO: 1109 - protein, 1291 aa, Homo sapiens
MAGAASPCANGCGPGAPSDAEVLHLCRSLEVGTVMTLFYSKKSQRPERKTFQVKLETRQITWSRGADKIEGAIDIREIKEIRPGKTSRDFDRYQEDPAFRPDQSHCFVILYGMEFRLKTLSLQATSEDEVNMWIKGLTWLMEDTLQAPTPLQIERWLRKQFYSVDRNREDRISAKDLKNMLSQVNYRVPNMRFLRERLTDLEQRSGDITYGQFAQLYRSLMYSAQKTMDLPFLEASTLRAGERPELCRVSLPEFQQFLLDYQGELWAVDRLQVQEFMLSFLRDPLREIEEPYFFLDEFVTFLFSKENSVWNSQLDAVCPDTMNNPLSHYWISSSHNTYLTGDQFSSESSLEAYARCLRMGCRCIELDCWDGPDGMPVIYHGHTLTTKIKFSDVLHTIKEHAFVASEYPVILSIEDHCSIAQQRNMAQYFKKVLGDTLLTKPVEISADGLPSPNQLKRKILIKHKKLAEGSAYEEVPTSMMYSENDISNSIKNGILYLEDPVNHEWYPHYFVLTSSKIYYSEETSSDQGNEDEEEPKEVSSSTELHSNEKWFHGKLGAGRDGRHIAERLLTEYCIETGAPDGSFLVRESETFVGDYTLSFWRNGKVQHCRIHSRQDAGTPKFFLTDNLVFDSLYDLITHYQQVPLRCNEFEMRLSEPVPQTNAHESKEWYHASLTRAQAEHMLMRVPRDGAFLVRKRNEPNSYAISFRAEGKIKHCRVQQEGQTVMLGNSEFDSLVDLISYYEKHPLYRKMKLRYPINEEALEKIGTAEPDYGALYEGRNPGFYVEANPMPTFKCAVKALFDYKAQREDELTFIKSAIIQNVEKQEGGWWRGDYGGKKQLWFPSNYVEEMVNPVALEPEREHLDENSPLGDLLRGVLDVPACQIAIRPEGKNNRLFVFSISMASVAHWSLDVAADSQEELQDWVKKIREVAQTADARLTEGKIMERRKKIALELSELVVYCRPVPFDEEKIGTERACYRDMSSFPETKAEKYVNKAKGKKFLQYNRLQLSRIYPKGQRLDSSNYDPLPMWICGSQLVALNFQTPDKPMQMNQALFMTGRHCGYVLQPSTMRDEAFDPFDKSSLRGLEPCAISIEVLGARHLPKNGRGIVCPFVEIEVAGAEYDSTKQKTEFVVDNGLNPVWPAKPFHFQISNPEFAFLRFVVYEEDMFSDQNFLAQATFPVKGLKTGYRAVPLKNNYSEDLELASLLIKIDIFPAKQENGDLSPFSGTSLRERGSDASGQLFHGRAREGSFESRYQQPFEDFRISQEHLADHFDSRERRAPRRTRVNGDNRL

SEQ ID NO: 1110 - protein, 344 aa, Homo sapiens
MPRVYIGRLSYNVREKDIQRFFSGYGRLLEVDLKNGYGFVEFEDSRDADDAVYELNGKELCGERVIVEHARGPRRDRDGYSYGSRSGGGGYSSRRTSGRDKYGPPVRTEYRLIVENLSSRCSWQDLKDFMRQAGEVTYADAHKERTNEGVIEFRSYSDMKRALDKLDGTEINGRNIRLIEDKPRTSHRRSYSGSRSRSRSRRRSRSRSRRSSRSRSRSISKSRSRSRSRSKGRSRSRSKGRKSRSKSKSKPKSDRGSHSHSRSRSKDEYEKSRSRSRSRSPKENGKGDIKSKSRSRSQSRSNSPLPVPPSKARSVSPPPKRATSRSRSRSRSKSRSRSRSSSRD

SEQ ID NO: 1111 - protein, 194 aa, Homo sapiens
MALRELKVCLLGDTGVGKSSIVWRFVEDSFDPNINPTIGASFMTKTVQYQNELHKFLIWDTAGQERFRALAPMYYRGSAAAIIVYDITKEETFSTLKNWVKELRQHGPPNIVVAIAGNKCDLIDVREVMERDAKDYADSIHAIFVETSAKNAININELFIEISRRIPSTDANLPSGGKGFKLRRQPSEPKRSCC

SEQ ID NO: 1112 - protein, 500 aa, Homo sapiens
MAWAALLGLLAALLLLLLLSRRRTRRPGEPPLDLGSIPWLGYALDFGKDAASFLTRMKEKHGDIFTILVGGRYVTVLLDPHSYDAVVWEPRTRLDFHAYAIFLMERIFDVQLPHYSPSDEKARMKLTLLHRELQALTEAMYTNLHAVLLGDATEAGSGWHEMGLLDFSYSFLLRAGYLTLYGIEALPRTHESQAQDRVHSADVFHTFRQLDRLLPKLARGSLSVGDKDHMCSVKSRLWKLLSPARLARRAHRSKWLESYLLHLEEMGVSEEMQARALVLQLWATQGNMGPAAFWLLLFLLKNPEALAAVRGELESILWQAEQPVSQTTTLPQKVLDSTPVLDSVLSESLRLTAAPFITREVVVDLAMPMADGREFNLRRGDRLLLFPFLSPQRDPEIYTDPEVFKYNRFLNPDGSEKKDFYKDGKRLKNYNMPWGAGHNHCLGRSYAVNSIKQFVFLVLVHLDLELINADVEIPEFDLSRYGFGLMQPEHDVPVRYRIRP

SEQ ID NO: 1113 - protein, 264 aa, Homo sapiens
MPRSFLVRKPSDPNRKPNYSELQDSNPEFTFQQPYDQAHLLAAIPPPEILNPTASLPMLIWDSVLAPQAQPIAWASLRLQESPRVAELTSLSDEDSGKGSQPPSPPSPAPSSFSSTSVSSLEAEAYAAFPGLGQVPKQLAQLSEAKDLQARKAFNCKYCNKEYLSLGALKMHIRSHTLPCVCGTCGKAFSRPWLLQGHVRTHTGEKPFSCPHCSRAFADRSNLRAHLQTHSDVKKYQCQACARTFSRMSLLHKHQESGCSGCPR

SEQ ID NO: 1114 - protein, 460 aa, Homo sapiens
MASREEVLALQAEVAQREEELNSLKQKLASALLAEQEPQPERLVPVSPLPPKAALSRDEILRYSRQLVLPELGVHGQLRLGTACVLIVGCGGLGCPLAQYLAAAGVGRLGLVDYDVVEMSNLARQVLHGEALAGQAKAFSAAASLRRLNSAVECVPYTQALTPATALDLVRRYDVVADCSDNVPTRYLVNDACVLAGRPLVSASALRFEGQITVYHYDGGPCYRCIFPQPPPAETVTNCADGGVLGVVTGVLGCLQALEVLKIAAGLGPSYSGSLLLFDALRGHFRSIRLRSRRLDCAACGERPTVTDLLDYEAFCGSSATDKCRSLQLLSPEERVSVTDYKRLLDSGAFHLLLDVRPQVEVDICRLPHALHIPLKHLERRDAESLKLLKEAIWEEKQGTQEGAAVPIYVICKLGNDSQKAVKILQSLSAAQELDPLTVRDVVGGLMAWAAKIDGTFPQY

SEQ ID NO: 1115 - protein, 228 aa, Homo sapiens
MAAQQRDCGGAAQLAGPAAEADPLGRFTCPVCLEVYEKPVQVPCGHVFCSACLQECLKPKKPVCGVCRSALAPGVRAVELERQIESTETSCHGCRKNFFLSKIRSHVATCSKYQNYIMEGVKATIKDASLQPRNVPNRYTFPCPYCPEKNFDQEGLVEHCKLFHSTDTKSVVCPICASMPWGDPNYRSANFREHIQRRHRFSYDTFVDYDVDEEDMMNQVLQRSIIDQ

SEQ ID NO: 1116 - protein, 493 aa, Homo sapiens
MAAATGPSFWLGNETLKVPLALFALNRQRLCERLRKNPAVQAGSIVVLQGGEETQRYCTDTGVLFRQESFFHWAFGVTEPGCYGVIDVDTGKSTLFVPRLPASHATWMGKIHSKEHFKEKYAVDDVQYVDEIASVLTSQKPSVLLTLRGVNTDSGSVCREASFDGISKFEVNNTILHPEIVECRVFKTDMELEVLRYTNKISSEAHREVMKAVKVGMKEYELESLFEHYCYSRGGMRHSSYTCICGSGENSAVLHYGHAGAPNDRTIQNGDMCLFDMGGEYYCFASDITCSFPANGKFTADQKAVYEAVLRSSRAVMGAMKPGVWWPDMHRLADRIHLEELAHMGILSGSVDAMVQAHLGAVFMPHGLGHFLGIDVHDVGGYPEGVERIDEPGLRSLRTARHLQPGMVLTVEPGIYFIDHLLDEALADPARASFLNREVLQRFRGFGGVRIEEDVVVTDSGIELLTCVPRTVEEIEACMAGCDKAFTPFSGPK

SEQ ID NO: 1117 - protein, 344 aa, Homo sapiens
MAAIYGGVEGGGTRSEVLLVSEDGKILAEADGLSTNHWLIGTDKCVERINEMVNRAKRKAGVDPLVPLRSLGLSLSGGDQEDAGRILIEELRDRFPYLSESYLITTDAAGSIATATPDGGVVLISGTGSNCRLINPDGSESGCGGWGHMMGDEGSAYWIAHQAVKIVFDSIDNLEAAPHDIGYVKQAMFHYFQVPDRLGILTHLYRDFDKCRFAGFCRKIAEGAQQGDPLSRYIFRKAGEMLGRHIVAVLPEIDPVLFQGKIGLPILCVGSVWKSWELLKEGFLLALTQGREIQAQNFFSSFTLMKLRHSSALGGASLGARHIGHLLPMDYSANAIAFYSYTFS

SEQ ID NO: 1118 - protein, 176 aa, Homo sapiens
MARVLKAAAANAVGLFSRLQAPIPTVRASSTSQPLDQVTGSVWNLGRLNHVAIAVPDLEKAAAFYKNILGAQVSEAVPLPEHGVSVVFVNLGNTKMELLHPLGRDSPIAGFLQKNKAGGMHHICIEVDNINAAVMDLKKKKIRSLSEEVKIGAHGKPVIFLHPKDCGGVLVELEQA

SEQ ID NO: 1119 - protein, 155 aa, Homo sapiens
MGRSRSRSPRRERRRSRSTSRERERRRRERSRSRERDRRRSRSRSPHRRRSRSPRRHRSTSPSPSRLKERRDEEKKETKETKSKERQITEEDLEGKTEEEIEMMKLMGFASFDSTKGKKVDGSVNAYAINVSQKRKYRQYMNRKGGFNRPLDFIA

SEQ ID NO: 1120 - protein, 681 aa, Homo sapiens
MAPQVWRRRTLERCLTEVGKATGRPECFLTIQEGLASKFTSLTKVLYDFNKILENGRIHGSPLQKLVIENFDDEQIWQQLELQNEPILQYFQNAVSETINDEDISLLPESEEQEREEDGSEIEADDKEDLEDLEEEEVSDMGNDDPEMGERAENSSKSDLRKSPVFSDEDSDLDFDISKLEQQSKVQNKGQGKPREKSIVDDKFFKLSEMEAYLENIEKEEERKDDNDEEEEDIDFFEDIDSDEDEGGLFGSKKLKSGKSSRNLKYKDFFDPVESDEDITNVHDDELDSNKEDDEIAEEEAEELSISETDEDDDLQENEDNKQHKESLKRVTFALPDDAETEDTGVLNVKKNSDEVKSSFEKRQEKMNEKIASLEKELLEKKPWQLQGEVTAQKRPENSLLEETLHFDHAVRMAPVITEETTLQLEDIIKQRIRDQAWDDVVRKEKPKEDAYEYKKRLTLDHEKSKLSLAEIYEQEYIKLNQQKTAEEENPEHVEIQKMMDSLFLKLDALSNFHFIPKPPVPEIKVVSNLPAITMEEVAPVSVSDAALLAPEEIKEKNKAGDIKTAAEKTATDKKRERRKKKYQKRMKIKEKEKRRKLLEKSSVDQAGKYSKTVASEKLKQLTKTGKASFIKDEGKDKALKSSQAFFSKLQDQVKMQINDAKKTEKKKKKRQDISVHKLKL

SEQ ID NO: 1121 - protein, 197 aa, Homo sapiens
MTLLPGLLFLTWLHTCLAHHDPSLRGHPHSHGTPHCYSAEELPLGQAPPHLLARGAKWGQALPVALVSSLEAASHRGRHERPSATTQCPVLRPEEVLEADTHQRSISPWRYRVDTDEDRYPQKLAFAECLCRGCIDARTGRETAALNSVRLLQSLLVLRRRPCSRDGSGLPTPGAFAFHTEFIHVPVGCTCVLPRSV

SEQ ID NO: 1122 - protein, 430 aa, Homo sapiens
MGHLSAPLHRVRVPWQGLLLTASLLTFWNPPTTAQLTTESMPFNVAEGKEVLLLVHNLPQQLFGYSWYKGERVDGNRQIVGYAIGTQQATPGPANSGRETIYPNASLLIQNVTQNDTGFYTLQVIKSDLVNEEATGQFHVYPELPKPSISSNNSNPVEDKDAVAFTCEPETQDTTYLWWINNQSLPVSPRLQLSNGNRTLTLLSVTRNDTGPYECEIQNPVSANRSDPVTLNVTYGPDTPTISPSDTYYRPGANLSLSCYAASNPPAQYSWLINGTFQQSTQELFIPNITVNNSGSYTCHANNSVTGCNRTTVKTIIVTDNALPQENGLSPGAIAGIVIGVVALVALIAVALACFLHFGKTGRASDQRDLTEHKPSVSNHTQDHSNDPPNKMNEVTYSTLNFEAQQPTQPTSASPSLTATEIIYSEVKKQ

SEQ ID NO: 1123 - protein, 346 aa, Homo sapiens [sequence omitted]

SEQ ID NO: 1124 - protein, 349 aa, Homo sapiens
MGPISAPSCRWRIPWQGLLLTASLFTFWNPPTTAQLTIEAVPSNAAEGKEVLLLVHNLPQDPRGYNWYKGETVDANRRIIGYVISNQQITPGPAYSNRETIYPNASLLMRNVTRNDTGSYTLQVIKLNLMSEEVTGQFSVHPETPKPSISSNNSNPVEDKDAVAFTCEPETQNTTYLWWVNGQSLPVSPRLQLSNGNRTLTLLSVTRNDVGPYECEIQNPASANFSDPVTLNVLYGPDAPTISPSDTYYHAGVNLNLSCHAASNPPSQYSWSVNGTFQQYTQKLFIPNITTKNSGSYACHTTNSATGRNRTTVRMITVSDALVQGSSPGLSARATVSIMIGVLARVALI

SEQ ID NO: 1125 - protein, 259 aa, Homo sapiens
MPGANYRAGAGAGAGARRPRGARDREEDGGGLEPAAVARDLLRGTSNMSFEELLELQSQVGTKTYKQLVAGNSPKKQASRPPIQNACVADKHRPLEMSAKIRVPFLRQVVPISKKVARDPRFDDLSGEYNPEVFDKTYQFLNDIRAKEKELVKKQLKKHLSGEEHEKLQQLLQRMEQQEMAQQERKQQQELHLALKQERRAQAQQGHRPYFLKKSEQRQLALAEKFKELKRSKKLENFLSRKRRRNAGKDRRHLPLSKE

SEQ ID NO: 1126 - protein, 526 aa, Homo sapiens
MAVFPSSGLPRCLLTLILLQLPKLDSAPFDVIGPPEPILAVVGEDAELPCRLSPNASAEHLELRWFRKKVSPAVLVHRDGREQEAEQMPEYRGRATLVQDGIAKGRVALRIRGVRVSDDGEYTCFFREDGSYEEALVHLKVAALGSDPHISMQVQENGEICLECTSVGWYPEPQVQWRTSKGEKFPSTSESRNPDEEGLFTVAASVIIRDTSAKNVSCYIQNLLLGQEKKVEISIPASSLPRLTPWIVAVAVILMVLGLLTIGSIFFTWRLYNERPRERRNEFSSKERLLEELKWKKATLHAVDVTLDPDTAHPHLFLYEDSKSVRLEDSRQKLPEKTERFDSWPCVLGRETFTSGRHYWEVEVGDRTDWAIGVCRENVMKKGFDPMTPENGFWAVELYGNGYWALTPLRTPLPLAGPPRRVGIFLDYESGDISFYNMNDGSDIYTFSNVTFSGPLRPFFCLWSSGKKPLTICPIADGPERVTVIANAQDLSKEIPLSPMGEDSAPRDADTLHSKLIPTQPSQGAP

SEQ ID NO: 1127 - protein, 584 aa, Homo sapiens
MKMASSLAFLLLNFHVSLFLVQLLTPCSAQFSVLGPSGPILAMVGEDADLPCHLFPTMSAETMELRWVSSSLRQVVNVYADGKEVEDRQSAPYRGRTSILRDGITAGKAALRIHNVTASDSGKYLCYFQDGDFYEKALVELKVAALGSDLHIEVKGYEDGGIHLECRSTGWYPQPQIKWSDTKGENIPAVEAPVVADGVGLYAVAASVIMRGSSGGGVSCIIRNSLLGLEKTASISIADPFFRSAQPWIAALAGTLPISLLLLAGASYFLWRQQKEKIALSRETEREREMKEMGYAATEQEISLREKLQEELKWRKIQYMARGEKSLAYHEWKMALFKPADVILDPDTANAILLVSEDQRSVQRAEEPRDLPDNPERFEWRYCVLGCENFTSGRHYWEVEVGDRKEWHIGVCSKNVERKKGWVKMTPENGYWTMGLTDGNKYRALTEPRTNLKLPEPPRKVGIFLDYETGEISFYNATDGSHIYTFPHASFSEPLYPVFRILTLEPTALTICPIPKEVESSPDPDLVPDHSLETPLTPGLANESGEPQAEVTSLLLPAHPGAEVSPSATTNQNHKLQARTEALY

SEQ ID NO: 1128 - protein, 159 aa, Homo sapiens
MPKFYCDYCDTYLTHDSPSVRKTHCSGRKHKENVKDYYQKWMEEQAQSLIDKTTAAFQQGKIPPTPFSAPPPAGAMIPPPPSLPGPPRPGMMPAPHMGGPPMMPMMGPPPPGMMPVGPAPGMRPPMGGHMPMMPGPPMMRPPARPMMVPTRPGMTRPDR

SEQ ID NO: 1129 - protein, 221 aa, Homo sapiens
MSETAPLAPTIPAPAEKTPVKKKAKKAGATAGKRKASGPPVSELITKAVAASKERSGVSLAALKKALAAAGYDVEKNNSRIKLGLKSLVSKGTLVQTKGTGASGSFKLNKKAASGEGKPKAKKAGAAKPRKPAGAAKKPKKVAGAATPKKSIKKTPKKVKKPATAAGTKKVAKSAKKVKTPQPKKAAKSPAKAKAPKPKAAKPKSGKPKVTKAKKAAPKKK

SEQ ID NO: 1130 - protein, 103 aa, Homo sapiens [sequence omitted]

SEQ ID NO: 1131 - protein, 985 aa, Homo sapiens
MAASVAAAARRLRRAIRRSPAWRGLSHRPLSSEPPAAKASAVRAAFLNFFRDRHGHRLVPSASVRPRGDPSLLFVNAGMNQFKPIFLGTVDPRSEMAGFRRVANSQKCVRAGGHHNDLEDVGRDLSHHTFFEMLGNWAFGGEYFKEEACNMAWELLTQVYGIPEERLWISYFDGDPKAGLDPDLETRDIWLSLGVPASRVLSFGPQENFWEMGDTGPCGPCTEIHYDLAGGVGAPQLVELWNLVFMQHNREADGSLQPLPQRHVDTGMGLERLVAVLQGKHSTYDTDLFSPLLNAIQQGCRAPPYLGRVGVADEGRTDTAYRVVADHIRTLSVCISDGIFPGMSGPPLVLRRILRRAVRFSMEILKAPPGFLGSLVPVVVETLGDAYPELQRNSAQIANLVSEDEAAFLASLERGRRIIDRTLRTLGPSDMFPAEVAWSLSLCGDLGLPLDMVELMLEEKGVQLDSAGLERLAQEEAQHRARQAEPVQKQGLWLDVHALGELQRQGVPPTDDSPKYNYSLRPSGSYEFGTCEAQVLQLYTEDGTAVASVGKGQRCGLLLDRTNFYAEQGGQASDRGYLVRAGQEDVLFPVARAQVCGGFILHEAVAPECLRLGDQVQLHVDEAWRLGCMAKHTATHLLNWALRQTLGPGTEQQGSHLNPEQLRLDVTTQTPLTPEQLRAVENTVQEAVGQDEAVYMEEVPLALTAQVPGLRSLDEVYPDPVRVVSVGVPVAHALDPASQAALQTSVELCCGTHLLRTGAVGDLVIIGDRQLSKGTTRLLAVTGEQAQQARELGQSLAQEVKAATERLSLGSRDVAEALRLSKDIGRLIEAVETAVMPQWQRRELLATVKMLQRRANTAIRKLQMGQAAKKTQELLERHSKGPLIVDTVSAESLSVLVKVVRQLCEQAPSTSVLLLSPQPMGKVLCACQVAQGAMPTFTAEAWALAVCSHMGGKAWGSRVVAQGTGSTTDLEAALSIAQTYALSQL

SEQ ID NO: 1132 - protein, 215 aa, Homo sapiens
MSETVPPAPAASAAPEKPLAGKKAKKPAKAAAASKKKPAGPSVSELIVQAASSSKERGGVSLAALKKALAAAGYDVEKNNSRIKLGIKSLVSKGTLVQTKGTGASGSFKLNKKASSVETKPGASKVATKTKATGASKKLKKATGASKKSVKTPKKAKKPAATRKSSKNPKKPKTVKPKKVAKSPAKAKAVKPKAAKARVTKPKTAKPKKAAPKKK

SEQ ID NO: 1133 - protein, 234 aa, Homo sapiens
MRKTRLWGLLWMLFVSELRAATKLTEEKYELKEGQTLDVKCDYTLEKFASSQKAWQIIRDGEMPKTLACTERPSKNSHPVQVGRIILEDYHDHGLLRVRMVNLQVEDSGLYQCVIYQPPKEPHMLFDRIRLVVTKGFSGTPGSNENSTQNVYKIPPTTTKALCPLYTSPRTVTQAPPKSTADVSTPDSEINLTNVTDIIRVPVFNIVILLAGGFLSKSLVFSVLFAVTLRSFVP

SEQ ID NO: 1134 - protein, 185 aa, Homo sapiens
MGPERHLSGAPARMATVVLGGDTMGPERIFPNQTEELGHQGPSEGTGDWSSEEPEEEQEETGSGPAGYSYQPLNQDPEQEEVELAPVGDGDVVADIQDRIQALGLHLPDPPLESEDEDEEGATALNNHSSIPMDPEHVELVKRTMAGVSLPAPGVPAWAREISDAQWEDVVQKALQARQASPAWK

SEQ ID NO: 1135 - protein, 957 aa, Homo sapiens
MAHYITFLCMVLVLLLQNSVLAEDGEVRSSCRTAPTDLVFILDGSYSVGPENFEIVKKWLVNITKNFDIGPKFIQVGVVQYSDYPVLEIPLGSYDSGEHLTAAVESILYLGGNTKTGKAIQFALDYLFAKSSRFLTKIAVVLTDGKSQDDVKDAAQAARDSKITLFAIGVGSETEDAELRAIANKPSSTYVFYVEDYIAISKIREVMKQKLCEESVCPTRIPVAARDERGFDILLGLDVNKKVKKRIQLSPKKIKGYEVTSKVDLSELTSNVFPEGLPPSYVFVSTQRFKVKKIWDLWRILTIDGRPQIAVTLNGVDKILLFTTTSVINGSQVVTFANPQVKTLFDEGWHQIRLLVTEQDVTLYIDDQQIENKPLHPVLGILINGQTQIGKYSGKEETVQFDVQKLRIYCDPEQNNRETACEIPGFNGECLNGPSDVGSTPAPCICPPGKPGLQGPKGDPGLPGNPGYPGQPGQDGKPGYQGIAGTPGVPGSPGIQGARGLPGYKGEPGRDGDKGDRGLPGFPGLHGMPGSKGEMGAKGDKGSPGFYGKKGAKGEKGNAGFPGLPGPAGEPGRHGKDGLMGSPGFKGEAGSPGAPGQDGTRGEPGIPGFPGNRGLMGQKGEIGPPGQQGKKGAPGMPGLMGSNGSPGQPGTPGSKGSKGEPGIQGMPGASGLKGEPGATGSPGEPGYMGLPGIQGKKGDKGNQGEKGIQGQKGENGRQGIPGQQGIQGHHGAKGERGEKGEPGVRGAIGSKGESGVDGLMGPAGPKGQPGDPGPQGPPGLDGKPGREFSEQFIRQVCTDVIRAQLPVLLQSGRIRNCDHCLSQHGSPGIPGPPGPIGPEGPRGLPGLPGRDGVPGLVGVPGRPGVRGLKGLPGRNGEKGSQGFGYPGEQGPPGPPGPEGPPGISKEGPPGDPGLPGKDGDHGKPGIQGQPGPPGICDPSLCFSVIARRDPFRKGPNY

SEQ ID NO: 1136 - protein, 164 aa, Homo sapiens
MSEPAGDVRQNPCGSKACRRLFGPVDSEQLSRDCDALMAGCIQEARERWNFDFVTETPLEGDFAWERVRGLGLPKLYLPTGPRRGRDELGGGRRPGTSPALLQGTAEEDHVDLSLSCTLVPRSGEQAEGSPGGPGDSQGRKRRQTSMTDFYHSKRRLIFSKRKP

SEQ ID NO: 1137 - protein, 474 aa, Homo sapiens
MVQQTNNAENTEALLAGESSDSGAGLELGIASSPTPGSTASTGGKADDPSWCKTPSGHIKRPMNAFMVWSQIERRKIMEQSPDMHNAEISKRLGKRWKLLKDSDKIPFIREAERLRLKHMADYPDYKYRPRKKVKSGNANSSSSAAASSKPGEKGDKVGGSGGGGHGGGGGGGSSNAGGGGGGASGGGANSKPAQKKSCGSKVAGGAGGGVSKPHAKLILAGGGGGGKAAAAAAASFAAEQAGAAALLPLGAAADHHSLYKARTPSASASASSAASASAALAAPGKHLAEKKVKRVYLFGGLGTSSSPVGGVGAGADPSDPLGLYEEEGAGCSPDAPSLSGRSSAASSPAAGRSPADHRGYASLRAASPAPSSAPSHASSSASSHSSSSSSSGSSSSDDEFEDDLLDLNPSSNFESMSLGSFSSSSALDRDLDFNFEPGSGSHFEFPDYCTPEVSEMISGDWLESSISNLVFTY

SEQ ID NO: 1138 - protein, 286 aa, Homo sapiens
MRLLPRLLLLLLLVFPATVLFRGGPRGLLAVAQDLTEDEETVEDSIIEDEDDEAEVEEDEPTDLVEDKEEEDVSGEPEASPSADTTILFVKGEDFPANNIVKFLVGFTNKGTEDFIVESLDASFRYPQDYQFYIQNFTALPLNTVVPPQRQATFEYSFIPAEPMGGRPFGLVINLNYKDLNGNVFQDAVFNQTVTVIEREDGLDGETIFMYMFLAGLGLLVIVGLHQLLESRKRKRPIQKVEMGTSSQNDVDMSWIPQETLNQINKASPRRLPRKRAQKRSVGSDE

SEQ ID NO: 1139 - protein, 142 aa, Homo sapiens
MGLKLNGRYISLILAVQIAYLVQAVRAAGKCDAVFKGFSDCLLKLGDSMANYPQGLDDKTNIKTVCTYWEDFHSCTVTALTDCQEGAKDMWDKLRKESKNLNIQGSLFELCGSGNGAAGSLLPAFPVLLVSLSAALATWLSF

SEQ ID NO: 1140 - protein, 815 aa, Homo sapiens
MKSNQERSNECLPPKKREIPATSRSSEEKAPTLPSDNHRVEGTAWLPGNPGGRGHGGGRHGPAGTSVELGLQQGIGLHKALSTGLDYSPPSAPRSVPVATTLPAAYATPQPGTPVSPVQYAHLPHTFQFIGSSQYSGTYASFIPSQLIPPTANPVTSAVASAAGATTPSQRSQLEAYSTLLANMGSLSQTPGHKAEQQQQQQQQQQQQHQHQQQQQQQQQQQQQQHLSRAPGLITPGSPPPAQQNQYVHISSSPQNTGRTASPPAIPVHLHPHQTMIPHTLTLGPPSQVVMQYADSGSHFVPREATKKAESSRLQQAIQAKEVLNGEMEKSRRYGAPSSADLGLGKAGGKSVPHPYESRHVVVHPSPSDYSSRDPSGVRASVMVLPNSNTPAADLEVQQATHREASPSTLNDKSGLHLGKPGHRSYALSPHTVIQTTHSASEPLPVGLPATAFYAGTQPPVIGYLSGQQQAITYAGSLPQHLVIPGTQPLLIPVGSTDMEASGAAPAIVTSSPQFAAVPHTFVTTALPKSENFNPEALVTQAAYPAMVQAQIHLPVVQSVASPAAAPPTLPPYFMKGSIIQLANGELKKVEDLKTEDFIQSAEISNDLKIDSSTVERIEDSHSPGVAVIQFAVGEHRAQVSVEVLVEYPFFVFGQGWSSCCPERTSQLFDLPCSKLSVGDVCISLTLKNLKNGSVKKGQPVDPASVLLKHSKADGLAGSRHRYAEQENGINQGSAQMLSENGELKFPEKMGLPAAPFLTKIEPSKPAATRKRRWSAPESRKLEKSEDEPPLTLPKPSLIPQEVKICIEGRSNVGK

SEQ ID NO: 1141 - protein, 169 aa, Homo sapiens
MTAGRRMEMLCAGRVPALLLCLGFHLLQAVLSTTVIPSCIPGESSDNCTALVQTEDNPRVAQVSITKCSSDMNGYCLHGQCIYLVDMSQNYCRCEVGYTGVRCEHFFLTVHQPLSKEYVALTVILIILFLITVVGSTYYFCRWYRNRKSKEPKKEYERVTSGDPELPQV

SEQ ID NO: 1142 - protein, 90 aa, Homo sapiens
MKLSVCLLLVTLALCCYQANAEFCPALVSELLDFFFISEPLFKLSLAKFDAPPEAVAAKLGVKRCTDQMSLQKRSLIAEVLVKILKKCSV

SEQ ID NO: 1143 - protein, 95 aa, Homo sapiens
MKLLMVLMLAALLLHCYADSGCKLLEDMVEKTINSDISIPEYKELLQEFIDSDAAAEAMGKFKQCFLNQSHRTLKNFGLMMHTVYDSIWCNMKSN

SEQ ID NO: 1144 - protein, 261 aa, Homo sapiens
MAGPELLLDSNIRLWVVLPIVIITFFVGMIRHYVSILLQSDKKLTQEQVSDSQVLIRSRVLRENGKYIPKQSFLTRKYYFNNPEDGFFKKTKRKVVPPSPMTDPTMLTDMMKGNVTNVLPMILIGGWINMTFSGFVTTKVPFPLTLRFKPMLQQGIELLTLDASWVSSASWYFLNVFGLRSIYSLILGQDNAADQSRMMQEQMTGAAMAMPADTNKAFKTEWEALELTDHQWALDDVEEELMAKDLHFEGMFKKELQTSIF

SEQ ID NO: 1145 - protein, 721 aa, Homo sapiens
MLLPVFTLKLRHKISPRMVAIGRYDGTHPCLAAATQTGKVFIHNPHTRNQHVSASRVFQSPLESDVSLLSINQAVSCLTAGVLNPELGYDALLVGTQTNLLAYDVYNNSDLFYREVADGANAIVLGTLGDISSPLAIIGGNCALQGFNHEGSDLFWTVTGDNVNSLALCDFDGDGKKELLVGSEDFDIRVFKEDEIVAEMTETEIVTSLCPMYGSRFGYALSNGTVGVYDKTSRYWRIKSKNHAMSIHAFDLNSDGVNELITGWSNGKVDARSDRTGEVIFKDNFSSAIAGVVEGDYRMDGHIQLICCSVDGEIRGYLPGTAEMRGNLMDTSAEQDLIRELSQKKQNLLLELRNYEENAKAELASPLNEADGHRGIIPANTRLHTTLSVSLGNETQTAHTELRISTSNDTIIRAVLIFAEGIFTGESHVVHPSIHNLSSSICIPIVPPKDVPVDLHLKAFVGYRSSTQFHVFESTRQLPRFSMYALTSLDPASEPISYVNFTIAERAQRVVVWLGQNFLLPEDTHIQNAPFQVCFTSLRNGGHLHIKIKLSGEITINTDDIDLAGDIIQSMASFFAIEDLQVEADFPVYFEELRKVLVKVDEYHSVHQKLSADMADHSNLIRSLLVGAEDARLMRDMKTMKSRYMELYDLNRDLLNGYKIRCNNHTELLGNLKAVNQAIQRAGRLRVGKPKNQVITACRDAIRSNNINTLFKIMRVGTASS

SEQ ID NO: 1146 - protein, 61 aa, Homo sapiens
MDPNCSCAAGDSCTCAGSCKCKECKCTSCKKSCCSCCPVGCAKCAQGCICKGASDKCSCCA

SEQ ID NO: 1147 - protein, 430 aa, Homo sapiens
MALLHSGRVLPGIAAAFHPGLAAAASARASSWWTHVEMGPPDPILGVTEAFKRDTNSKKMNLGVGAYRDDNGKPYVLPSVRKAEAQIAAKNLDKEYLPIGGLAEFCKASAELALGENSEVLKSGRFVTVQTISGTGALRIGASFLQRFFKFSRDVFLPKPTWGNHTPIFRDAGMQLQGYRYYDPKTCGFDFTGAVEDISKIPEQSVLLLHACAHNPTGVDPRPEQWKEIATVVKKRNLFAFFDMAYQGFASGDGDKDAWAVRHFIEQGINVCLCQSYAKNMGLYGERVGAFTMVCKDADEAKRVESQLKILIRPMYSNPPLNGARIAAAILNTPDLRKQWLQEVKVMADRIIGMRTQLVSNLKKEGSTHNWQHITDQIGMFCFTGLKPEQVERLIKEFSIYMTKDGRISVAGVTSSNVGYLAHAIHQVTK

SEQ ID NO: 1148 - protein, 183 aa, Homo sapiens
MREYKVVVLGSGGVGKSALTVQFVTGTFIEKYDPTIEDFYRKEIEVDSSPSVLEILDTAGTEQFASMRDLYIKNGQGFILVYSLVNQQSFQDIKPMRDQIIRVKRYEKVPVILVGNKVDLESEREVSSSEGRALAEEWGCPFMETSAKSKTMVDELFAEIVRQMNYAAQPDKDDPCCSACNIQ

SEQ ID NO: 1149 - protein, 557 aa, Homo sapiens
MRDYDEVTAFLGEWGPFQRLIFFLLSASIIPNGFTGLSSVFLIATPEHRCRVPDAANLSSAWRNHTVPLRLRDGREVPHSCRRYRLATIANFSALGLEPGRDVDLGQLEQESCLDGWEFSQDVYLSTIVTEWNLVCEDDWKAPLTISLFFVGVLLGSFISGQLSDRFGRKNVLFVTMGMQTGFSFLQIFSKNFEMFVVLFVLVGMGQISNYVAAFVLGTEILGKSVRIIFSTLGVCIFYAFGYMVLPLFAYFIRDWRMLLVALTMPGVLCVALWWFIPESPRWLISQGRFEEAEVIIRKAAKANGIVVPSTIFDPSELQDLSSKKQQSHNILDLLRTWNIRMVTIMSIMLWMTISVGYFGLSLDTPNLHGDIFVNCFLSAMVEVPAYVLAWLLLQYLPRRYSMATALFLGGSVLLFMQLVPPDLYYLATVLVMVGKFGVTAAFSMVYVYTAELYPTVVRNMGVGVSSTASRLGSILSPYFVYLGAYDRFLPYILMGSLTILTAILTLFLPESFGTPLPDTIDQMLRVKGMKHRKTPSHTRMLKDGQERPTILKSTAF

SEQ ID NO: 1150 - protein, 325 aa, Homo sapiens
MPITRMRMRPWLEMQINSNQIPGLIWINKEEMIFQIPWKHAAKHGWDINKDACLFRSWAIHTGRYKAGEKEPDPKTWKANFRCAMNSLPDIEEVKDQSRNKGSSAVRVYRMLPPLTKNQRKERKSKSSRDAKSKAKRKSCGDSSPDTFSDGLSSSTLPDDHSSYTVPGYMQDLEVEQALTPALSPCAVSSTLPDWHIPVEVVPDSTSDLYNFQVSPMPSTSEATTDEDEEGKLPEDIMKLLEQSEWQPTNVDGKGYLLNEPGVQPTSVYGDFSCKEEPEIDSPGGDIGLSLQRVFTDLKNMDATWLDSLLTPVRLPSIQAIPCAP

SEQ ID NO: 1151 - protein, 470 aa, Homo sapiens
MKEEKEHRPKEKRVTLLTPAGATGSGGGTSGDSSKGEDKQDRNKEKKEALSKVVIRRLPPTLTKEQLQEHLQPMPEHDYFEFFSNDTSLYPHMYARAYINFKNQEDIILFRDRFDGYVFLDNKGQEYPAIVEFAPFQKAAKKKTKKRDTKVGTIDDDPEYRKFLESYATDNEKMTSTPETLLEEIEAKNRELIAKKTTPLLSFLKNKQRMREEKREERRRREIERKRQREEERRKWKEEEKRKRKDIEKLKKIDRIPERDKLKDEPKIKLLKKPEKGDEKELDKREKAKKLDKENLSDERASGQSCTLPKRSDSELKDEKPKRPEDESGRDYREREREYERDQERILRERERLKRQEEERRRQKERYEKEKTFKRKEEEMKKEKDTLRDKGKKAESTESIGSSEKTEKKEEVVKRDRIRNKDRPAMQLYQPGARSRNRLCPPDDSTKSGDSAAERKQESGISHRKEGGEE

SEQ ID NO: 1152 - protein, 2133 aa, Homo sapiens
MDEVEQDQHEARLKELFDSFDTTGTGSLGQEELTDLCHMLSLEEVAPVLQQTLLQDNLLGRVHFDQFKEALILILSRTLSNEEHFQEPDCSLEAQPKYVRGGKRYGRRSLPEFQESVEEFPEVTVIEPLDEEARPSHIPAGDCSEHWKTQRSEEYEAEGQLRFWNPDDLNASQSGSSPPQDWIEEKLQEVCEDLGITRDGHLNRKKLVSICEQYGLQNVDGEMLEEVFHNLDPDGTMSVEDFFYGLFKNGKSLTPSASTPYRQLKRHLSMQSFDESGRRTTTSSAMTSTIGFRVFSCLDDGMGHASVERILDTWQEEGIENSQEILKALDFSLDGNINLTELTLALENELLVTKNSIHQAALASFKAEIRHLLERVDQVVREKEKLRSDLDKAEKLKSLMASEVDDHHAAIERRNEYNLRKLDEEYKERIAALKNELRKEREQILQQAGKQRLELEQEIEKAKTEENYIRDRLALSLKENSRLENELLENAEKLAEYENLTNKLQRNLENVLAEKFGDLDPSSAEFFLQEERLTQMRNEYERQCRVLQDQVDELQSELEEYRAQGRVLRLPLKNSPSEEVEANSGGIEPEHGLGSEECNPLNMSIEAELVIEQMKEQHHRDICCLRLELEDKVRHYEKQLDETVVSCKKAQENMKQRHENETHTLEKQISDLKNEIAELQGQAAVLKEAHHEATCRHEEEKKQLQVKLEEEKTHLQEKLRLQHEMELKARLTQAQASFEREREGLQSSAWTEEKVRGLTQELEQFHQEQLTSLVEKHTLEKEELRKELLEKHQRELQEGREKMETECNRRTSQIEAQFQSDCQKVTERCESALQSLEGRYRQELKDLQEQQREEKSQWEFEKDELTQECAEAQELLKETLKREKTTSLVLTQEREMLEKTYKEHLNSMVVERQQLLQDLEDLRNVSETQQSLLSDQILELKSSHKRELREREEVLCQAGASEQLASQRLERLEMEHDQERQEMMSKLLAMENIHKATCETADRERAEMSTEISRLQSKIKEMQQATSPLSMLQSGCQVIGEEEVEGDGALSLLQQGEQLLEENGDVLLSLQRAHEQAVKENVKMATEISRLQQRLQKLEPGLVMSSCLDEPATEFFGNTAEQTEQFLQQNRTKQVEGVTRRHVLSDLEDDEVRDLGSTGTSSVQRQEVKIEESEASVEGFSELENSEETRTESWELKNQISQLQEQLMMLCADCDRASEKKQDLLFDVSVLKKKLKMLERIPEASPKYKLLYEDVSRENDCLQEELRMMETRYDEALENNKELTAEVFRLQDELKKMEEVTETFLSLEKSYDEVKIENEGLNVLVLRLQGKIEKLQESVVQRCDCCLWEASLENLEIEPDGNILQLNQTLEECVPRVRSVHHVIEECKQENQYLEGNTQLLEKVKAHEIAWLHGTIQTHQERPRVQNQVILEENTTLLGFQDKHFQHQATIAELELEKTKLQELTRKLKERVTILVKQKDVLSHGEKEEELKAMMHDLQITCSEMQQKVELLRYESEKLQQENSILRNEITTLNEEDSISNLKLGTLNGSQEEMWQKTETVKQENAAVQKMVENLKKQISELKIKNQQLDLENTELSQKNSQNQEKLQELNQRLTEMLCQKEKEPGNSALEEREQEKFNLKEELERCKVQSSTLVSSLEAELSEVKIQTHIVQQENHLLKDELEKMKQLHRCPDLSDFQQKISSVLSYNEKLLKEKEALSEELNSCVDKLAKSSLLEHRIATMKQEQKSWEHQSASLKSQLVASQEKVQNLEDTVQNVNLQMSRMKSDLRVTQQEKEALKQEVMSLHKQLQNAGGKSWAPEIATHPSGLHNQQKRLSWDKLDHLMNEEQQLLWQENERLQTMVQNTKAELTHSREKVRQLESNLLPKHQKHLNPSGTMNPTEQEKLSLKRECDQFQKEQSPANRKVSQMNSLEQELETIHLENEGLKKKQVKLDEQLMEMQHLRSTATPSPSPHAWDLQLLQQQACPMVPREQFLQLQRQLLQAERINQHLQEELENRTSETNTPQGNQEQLVTVMEERMIEVEQKLKLVKRLLQEKVNQLKEQLCKNTKADAMVKDLYVENAQLLKALEVTEQRQKTAEKKNYLLEEKIASLSNIVRNLTPAPLTSTPPLRS

SEQ ID NO: 1153 - protein, 408 aa, Homo sapiens
MIPGNRMLMVVLLCQVLLGGASHASLIPETGKKKVAEIQGHAGGRRSGQSHELLRDFEATLLQMFGLRRRPQPSKSAVIPDYMRDLYRLQSGEEEEEQIHSTGLEYPERPASRANTVRSFHHEEHLENIPGTSENSAFRFLFNLSSIPENEVISSAELRLFREQVDQGPDWERGFHRINIYEVMKPPAEVVPGHLITRLLDTRLVHHNVTRWETFDVSPAVLRWTREKQPNYGLAIEVTHLHQTRTHQGQHVRISRSLPQGSGNWAQLRPLLVTFGHDGRGHALTRRRRAKRSPKHHSQRARKKNKNCRRHSLYVDFSDVGWNDWIVAPPGYQAFYCHGDCPFPLADHLNSTNHAIVQTLVNSVNSSIPKACCVPTELSAISMLYLDEYDKVVLKNYQEMVVEGCGCR

SEQ ID NO: 1154 - protein, 56 aa, Homo sapiens [sequence omitted]

SEQ ID NO: 1155 - protein, 509 aa, Homo sapiens
MNLLDPFMKMTDEQEKGLSGAPSPTMSEDSAGSPCPSGSGSDTENTRPQENTFPKGEPDLKKESEEDKFPVCIREAVSQVLKGYDWTLVPMPVRVNGSSKNKPHVKRPMNAFMVWAQAARRKLADQYPHLHNAELSKTLGKLWRLLNESEKRPFVEEAERLRVQHKKDHPDYKYQPRRRKSVKNGQAEAEEATEQTHISPNAIFKALQADSPHSSSGMSEVHSPGEHSGQSQGPPTPPTTPKTDVQPGKADLKREGRPLPEGGRQPPIDFRDVDIGELSSDVISNIETFDVNEFDQYLPPNGHPGVPATHGQVTYTGSYGISSTAATPASAGHVWMSKQQAPPPPPQQPPQAPPAPQAPPQPQAAPPQQPAAPPQQPQAHTLTTLSSEPGQSQRTHIKTEQLSPSHYSEQQQHSPQQIAYSPFNLPHYSPSYPPITRSQYDYTDHQNSSSYYSHAAGQGTGLYSTFTYMNPAQRPMYTPIADTSGVPSIPQTHSPQHWEQPVYTQLTRP

SEQ ID NO: 1156 - protein, 1941 aa, Homo sapiens
MSSDSELAVFGEAAPFLRKSERERIEAQNRPFDAKTSVFVAEPKESFVKGTIQSREGGKVTVKTEGGATLTVKDDQVFPMNPPKYDKIEDMAMMTHLHEPAVLYNLKERYAAWMIYTYSGLFCVTVNPYKWLPVYKPEVVTAYRGKKRQEAPPHIFSISDNAYQFMLTDRENQSILITGESGAGKTVNTKRVIQYFATIAVTGEKKKEEITSGKIQGTLEDQIISANPLLEAFGNAKTVRNDNSSRFGKFIRIHFGTTGKLASADIETYLLEKSRVVFQLKAERSYHIFYQITSNKKPELIEMLLITTNPYDYPFVSQGEISVASIDDQEELMATDSAIDILGFTNEEKVSIYKLTGAVMHYGNLKFKQKQREEQAEPDGTEVADKAAYLQSLNSADLLKALCYPRVKVGNEYVTKGQTVEQVSNAVGALAKAVYEKMFLWMVARINQQLDTKQPRQYFIGVLDIAGFEIFDFNSLEQLCINFTNEKLQQFFNHHMFVLEQEEYKKEGIEWTFIDFGMDLAACIELIEKPMGIFSILEEECMFPKATDTSFKNKLYDQHLGKSANFQKPKVVKGKAEAHFALIHYAGVVDYNITGWLEKNKDPLNETVVGLYQKSAMKTLAQLFSGAQTAEGEGAGGGAKKGGKKKGSSFQTVSALFRENLNKLMTNLRSTHPHFVRCIIPNETKTPGAMEHELVLHQLRCNGVLEGIRICRKGFPSRILYADFKQRYKVLNASAIPEGQFIDSKKASEKLLASIDIDHTQYKFGHTKVFFKAGLLGLLEEMRDDKLAQLITRTQARCRGFLARVEYQRMVERREAIFCIQYNIRSFMNVKHWPWMKLFFKIKPLLKSAETEKEMATMKEEFQKIKDELAKSEAKRKELEEKMVTLLKEKNDLQLQVQAEAEGLADAEERCDQLIKTKIQLEAKIKEVTERAEDEEEINAELTAKKRKLEDECSELKKDIDDLELTLAKVEKEKHATENKVKNLTEEMAGLDETIAKLTKEKKALQEAHQQTLDDLQAEEDKVNTLTKAKIKLEQQVDDLEGSLEQEKKLRMDLERAKRKLEGDLKLAQESIMDIENEKQQLDEKLKKKEFEISNLQSKIEDEQALGIQLQKKIKELQARIEELEEEIEAERASRAKAEKQRSDLSRELEEISERLEEAGGATSAQIEMNKKREAEFQKMRRDLEEATLQHEATAATLRKKHADSVAELGEQIDNLQRVKQKLEKEKSEMKMEIDDLASNVETVSKAKGNLEKMCRTLEDQLSELKSKEEEQQRLINDLTAQRGRLQTESGEFSRQLDEKEALVSQLSRGKQAFTQQIEELKRQLEEEIKAKNALAHALQSSRHDCDLLREQYEEEQESKAELQRALSKANTEVAQWRTKYETDAIQRTEELEEAKKKLAQRLQAAEEHVEAVNAKCASLEKTKQRLQNEVEDLMLDVERTNAACAALDKKQRNFDKILAEWKQKCEETHAELEASQKEARSLGTELFKIKNAYEESLDQLETLKRENKNLQQEISDLTEQIAEGGKRIHELEKIKKQVEQEKCELQAALEEAEASLEHEEGKILRIQLELNQVKSEVDRKIAEKDEEIDQLKRNHIRIVESMQSTLDAEIRSRNDAIRLKKKMEGDLNEMEIQLNHANRMAAEALRNYRNTQGILKDTQIHLDDALRSQEDLKEQLAMVERRANLLQAEIEELRATLEQTERSRKIAEQELLDASERVQLLHTQNTSLINTKKKLETDISQMQGEMEDILQEARNAEEKAKKAITDAAMMAEELKKEQDTSAHLERMKKNMEQTVKDLQLRLDEAEQLALKGGKKQIQKLEARVRELEGEVESEQKRNAEAVKGLRKHERRVKELTYQTEEDRKNILRLQDLVDKLQAKVKSYKRQAEEAEEQSNTNLAKFRKLQHELEEAEERADIAESQVNKLRVKSREVHTKVISEE

SEQ ID NO: 1157 - protein, 242 aa, Homo sapiens
MAAPAVKVARGWSGLALGVRRAVLQLPGLTQVRWSRYSPEFKDPLIDKEYYRKPVEELTEEEKYVRELKKTQLIKAAPAGKTSSVFEDPVISKFTNMMMIGGNKVLARSLMIQTLEAVKRKQFEKYHAASAEEQATIERNPYTIFHQALKNCEPMIGLVPILKGGRFYQVPVPLPDRRRRFLAMKWMITECRDKKHQRTLMPEKLSHKLLEAFHNQGPVIKRKHDLHKMAEANRALAHYRWW

SEQ ID NO: 1158 - protein, 198 aa, Homo sapiens
MAQKPKVDPHVGRLGYLQALVTEFQETQSQDAKEQVLANLANFAYDPSNYEYLRQLQVLDLFLDSLSEENETLVEFAIGGLCNLCPDRANKEHILHAGGVPLIINCLSSPNEETVLSAITTLMHLSPPGRSFLPELTATPVVQCMLRFSLSASARLRNLAQIFLEDFCSPRQVAEARSRQAHSALGIPLPRSVAPRQR

SEQ ID NO: 1159 - protein, 656 aa, Homo sapiens
MEELDGEPTVTLIPGVNSKKNQMYFDWGPGEMLVCETSFNKKEKSEMVPSCPFIYIIRKDVDVYSQILRKLFNESHGIFLGLQRIDEELTGKSRKSQLVRVSKNYRSVIRACMEEMHQVAIAAKDPANGRQFSSQVSILSAMELIWNLCEILFIEVAPAGPLLLHLLDWVRLHVCEVDSLSADVLGSENPSKHDSFWNLVTILVLQGRLDEARQMLSKEADASPASAGICRIMGDLMRTMPILSPGNTQTLTELELKWQHWHEECERYLQDSTFATSPHLESLLKIMLGDEAALLEQKELLSNWYHFLVTRLLYSNPTVKPIDLHYYAQSSLDLFLGGESSPEPLDNILLAAFEFDIHQVIKECSIALSNWWFVAHLTDLLDHCKLLQSHNLYFGSNMREFLLLEYASGLFAHPSLWQLGVDYFDYCPELGRVSLELHIERIPLNTEQKALKVLRICEQRQMTEQVRSICKILAMKAVRNNRLGSALSWSIRAKDAAFATLVSDRFLRDYCERGCFSDLDLIDNLGPAMMLSDRLTFLGKYREFHRMYGEKRFADAASLLLSLMTSRIAPRSFWMTLLTDALPLLEQKQVIFSAEQTYELMRCLEDLTSRRPVHGESDTEQLQDDDIETTKVEMLRLSLARNLARAIIREGSLEGS

SEQ ID NO: 1160 - protein, 472 aa, Homo sapiens
MSPEEWTYLVVLLISIPIGFLFKKAGPGLKRWGAAAVGLGLTLFTCGPHTLHSLVTILGTWALIQAQPCSCHALALAWTFSYLLFFRALSLLGLPTPTPFTNAVQLLLTLKLVSLASEVQDLHLAQRKEMASGFSKGPTLGLLPDVPSLMETLSYSYCYVGIMTGPFFRYRTYLDWLEQPFPGAVPSLRPLLRRAWPAPLFGLLFLLSSHLFPLEAVREDAFYARPLPARLFYMIPVFFAFRMRFYVAWIAAECGCIAAGFGAYPVAAKARAGGGPTLQCPPPSSPEKAASLEYDYETIRNIDCYSTDFCVRVRDGMRYWNMTVQWWLAQYIYKSAPARSYVLRSAWTMLLSAYWHGLHPGYYLSFLTIPLCLAAEGRLESALRGRLSPGGQKAWDWVHWFLKMRAYDYMCMGFVLLSLADTLRYWASIYFCIHFLALAALGLGLALGGGSPSRRKAASQPTSLAPEKLREE

SEQ ID NO: 1161 - protein, 632 aa, Homo sapiens
MTPALTALLCLGLSLGPRTRMQAGPFPKPTLWAEPGSVISWGSPVTIWCQGSLEAQEYQLDKEGSPEPWDRNNPLEPKNKARFSIPSMTQHHAGRYRCHYYSSAGWSEPSDPLELVMTGFYNKPTLSALPSPVVASGGNMTLRCGSQKGYHHFVLMKEGEHQLPRTLDSQQLHSGGFQALFPVGPVTPSHRWRFTCYYYYTNTPWVWSHPSDPLEILPSGVSRKPSLLTLQGPVLAPGQSLTLQCGSDVGYDRFVLYKEGERDFLQRPGQQPQAGLSQANFTLGPVSRSYGGQYRCYGAHNLSSEWSAPSDPLDILITGQIYDTVSLSAQPGPTVASGENMTLLCQSRGYFDTFLLTKEGAAHPPLRLRSMYGAHKYQAEFPMSPVTSAHAGTYRCYGSRSSNPHLLSFPSEPLELMVSGHSGGSSLPPTGPPSTPGLGRYLEVLIGVSVAFVLLLFLLLFLLLLRQRHSKHRTSDQRKTDFQRPAGAAETEPKDRGLLRRSSPAADVQEENLYAAVKDTQSEDRVELDSQQSPHDEDPQAVTYAPVKHSSPRREMASPPSSLSGEFLDTKDRQVEEDRQMDTEAAASEASQDVTYAQLHSLTLRRKATEPPPSQEGEPPAEPSIYATLAIH

SEQ ID NO: 1162 - protein, 464 aa, Homo sapiens
MTPTLAALLCLGLSLGPRTHVQAGPFPKPTLWAEPGSVISWGSPVTIWCQGSLEAQEYRLDKEGSPEPWDRNNPLEPKNKARFSIPSITEHHAGRYRCHYYSSAGWSEPSDPLELVMTGAYSKPTLSALPSPVVASGGNMTLQCGSQKGYHHFVLMKEGEHQLPRTLDSQQLHSGGFQALFPVGPVNPSHRWRFTCYYYYMNTPRVWSHPSDPLEILPSGVSRKPSLLTLQGPVLAPGQSLTLQCGSDVGYDRFVLYKEGERDFLQRPGQQPQAGLSQANFTLGPVSPSHGGQYRCYGAHNLSSEWSAPSDPLNILMAGQIYDTVSLSAQPGPTVASGENVTLLCQSWWQFDTFLLTKEGAAHPPLRLRSMYGAHKYQAEFPMSPVTSAHAGTYRCYGSYSSNPHLLSFPSEPLELMVSASHAKDYTVENLIRMGMAGLVLVFLGILLFEAQHSQRNPQDAAGR

SEQ ID NO: 1163 - protein, 523 aa, Homo sapiens
MVPPRRHRGAGRPGVLSSSPPFRLRSAKFSGIALEDLRRALKTRLQMVCVFVMNRMNSQNSGFTQRRRMALGIVILLLVDVIWVASSELTSYVFTQYNKPFFSTFAKTSMFVLYLLGFIIWKPWRQQCTRGLRGKHAAFFADAEGYFAACTTDTTMNSSLSEPLYVPVKFHDLPSEKPESTNIDTEKTPKKSRVRFSNIMEIRQLPSSHALEAKLSRMSYPVKEQESILKTVGKLTATQVAKISFFFCFVWFLANLSYQEALSDTQVAIVNILSSTSGLFTLILAAVFPSNSGDRFTLSKLLAVILSIGGVVLVNLAGSEKPAGRDTVGSIWSLAGAMLYAVYIVMIKRKVDREDKLDIPMFFGFVGLFNLLLLWPGFFLLHYTGFEDFEFPNKVVLMCIIINGLIGTVLSEFLWLWGCFLTSSLIGTLALSLTIPLSIIADMCMQKVQFSWLFFAGAIPVFFSFFIVTLLCHYNNWDPVMVGIRRIFAFICRKHRIQRVPEDSEQCESLISMHSVSQEDGAS

SEQ ID NO: 1164 - protein, 225 aa, Homo sapiens
MAEGETESPGPKKCGPYISSVTSQSVNLMIRGVVLFFIGVFLALVLNLLQIQRNVTLFPPDVIASIFSSAWWVPPCCGTASAVIGLLYPCIDRHLGEPHKFKREWSSVMRCVAVFVGINHASAKVDFDNNIQLSLTLAALSIGLWWTFDRSRSGFGLGVGIAFLATVVTQLLVYNGVYQYTSPDFLYVRSWLPCIFFAGGITMGNIGRQLAMYECKVIAEKSHQE

SEQ ID NO: 1165 - protein, 156 aa, Homo sapiens
MAVGKFLLGSLLLLSLQLGQGWGPDARGVPVADGEFSSEQVAKAGGTWLGTHRPLARLRRALSGPCQLWSLTLSVAELGLGYASEEKVIFRYCAGSCPRGARTQHGLALARLQGQGRAHGGPCCRPTRYTDVAFLDDRHRWQRLPQLSAAACGCGG

SEQ ID NO: 1166 - protein, 1593 aa, Homo sapiens
MAAAAVVVPAEWIKNWEKSGRGEFLHLCRILSENKSHDSSTYRDFQQALYELSYHVIKGNLKHEQASNVLSDISEFREDMPSILADVFCILDIETNCLEEKSKRDYFTQLVLACLYLVSDTVLKERLDPETLESLGLIKQSQQFNQKSVKIKTKLFYKQQKFNLLREENEGYAKLIAELGQDLSGSITSDLILENIKSLIGCFNLDPNRVLDVILEVFECRPEHDDFFISLLESYMSMCEPQTLCHILGFKFKFYQEPNGETPSSLYRVAAVLLQFNLIDLDDLYVHLLPADNCIMDEHKREIAEAKQIVRKLTMVVLSSEKMDEREKEKEKEEEKVEKPPDNQKLGLLEALLKIGDWQHAQNIMDQMPPYYAASHKLIALAICKLIHITIEPLYRRVGVPKGAKGSPVNALQNKRAPKQAESFEDLRRDVFNMFCYLGPHLSHDPILFAKVVRIGKSFMKEFQSDGSKQEDKEKTEVILSCLLSITDQVLLPSLSLMDCNACMSEELWGMFKTFPYQHRYRLYGQWKNETYNSHPLLVKVKAQTIDRAKYIMKRLTKENVKPSGRQIGKLSHSNPTILFDYILSQIQKYDNLITPVVDSLKYLTSLNYDVLAYCIIEALANPEKERMKHDDTTISSWLQSLASFCGAVFRKYPIDLAGLLQYVANQLKAGKSFDLLILKEVVQKMAGIEITEEMTMEQLEAMTGGEQLKAEGGYFGQIRNTKKSSQRLKDALLDHDLALPLCLLMAQQRNGVIFQEGGEKHLKLVGKLYDQCHDTLVQFGGFLASNLSTEDYIKRVPSIDVLCNEFHTPHDAAFFLSRPMYAHHISSKYDELKKSEKGSKQQHKVHKYITSCEMVMAPVHEAVVSLHVSKVWDDISPQFYATFWSLTMYDLAVPHTSYEREVNKLKVQMKAIDDNQEMPPNKKKKEKERCTALQDKLLEEEKKQMEHVQRVLQRLKLEKDNWLLAKSTKNETITKFLQLCIFPRCIFSAIDAVYCARFVELVHQQKTPNFSTLLCYDRVFSDIIYTVASCTENEASRYGRFLCCMLETVTRWHSDRATYEKECGNYPGFLTILRATGFDGGNKADQLDYENFRHVVHKWHYKLTKASVHCLETGEYTHIRNILIVLTKILPWYPKVLNLGQALERRVHKICQEEKEKRPDLYALAMGYSGQLKSRKSYMIPENEFHHKDPPPRNAVASVQNGPGGGPSSSSIGSASKSDESSTEETDKSRERSQCGVKAVNKASSTTPKGNSSNGNSGSNSNKAVKENDKEKGKEKEKEKKEKTPATTPEARVLGKDGKEKPKEERPNKDEKARETKERTPKSDKEKEKFKKEEKAKDEKFKTTVPNAESKSTQEREREKEPSRERDIAKEMKSKENVKGGEKTPVSGSLKSPVPRSDIPEPEREQKRRKIDTHPSPSHSSTVKDSLIELKESSAKLYINHTPPPLSKSKEREMDKKDLDKSRERSREREKKDEKDRKERKRDHSNNDREVPPDLTKRRKEENGTMGVSKHKSESPCESPYPNEKDKEKNKSKSSGKEKGSDSFKSEKMDKISSGGKKESRHDKEKIEKKEKRDSSGGKEEKKHHKSSDKHR

SEQ ID NO: 1167 - protein, 1663 aa, Homo sapiens
MGPTSGPSLLLLLLTHLPLALGSPMYSIITPNILRLESEETMVLEAHDAQGDVPVTVTVHDFPGKKLVLSSEKTVLTPATNHMGNVTFTIPANREFKSEKGRNKFVTVQATFGTQVVEKVVLVSLQSGYLFIQTDKTIYTPGSTVLYRIFTVNHKLLPVGRTVMVNIENPEGIPVKQDSLSSQNQLGVLPLSWDIPELVNMGQWKIRAYYENSPQQVFSTEFEVKEYVLPSFEVIVEPTEKFYYIYNEKGLEVTITARFLYGKKVEGTAFVIFGIQDGEQRISLPESLKRIPIEDGSGEVVLSRKVLLDGVQNPRAEDLVGKSLYVSATVILHSGSDMVQAERSGIPIVTSPYQIHFTKTPKYFKPGMPFDLMVFVTNPDGSPAYRVPVAVQGEDTVQSLTQGDGVAKLSINTHPSQKPLSITVRTKKQELSEAEQATRTMQALPYSTVGNSNNYLHLSVLRTELRPGETLNVNFLLRMDRAHEAKIRYYTYLIMNKGRLLKAGRQVREPGQDLVVLPLSITTDFIPSFRLVAYYTLIGASGQREVVADSVWVDVKDSCVGSLVVKSGQSEDRQPVPGQQMTLKIEGDHGARVVLVAVDKGVFVLNKKNKLTQSKIWDVVEKADIGCTPGSGKDYAGVFSDAGLTFTSSSGQQTAQRAELQCPQPAARRRRSVQLTEKRMDKVGKYPKELRKCCEDGMRENPMRFSCQRRTRFISLGEACKKVFLDCCNYITELRRQHARASHLGLARSNLDEDIIAEENIVSRSEFPESWLWNVEDLKEPPKNGISTKLMNIFLKDSITTWEILAVSMSDKKGICVADPFEVTVMQDFFIDLRLPYSVVRNEQVEIRAVLYNYRQNQELKVRVELLHNPAFCSLATTKRRHQQTVTIPPKSSLSVPYVIVPLKTGLQEVEVKAAVYHHFISDGVRKSLKVVPEGIRMNKTVAVRTLDPERLGREGVQKEDIPPADLSDQVPDTESETRILLQGTPVAQMTEDAVDAERLKHLIVTPSGCGEQNMIGMTPTVIAVHYLDETEQWEKFGLEKRQGALELIKKGYTQQLAFRQPSSAFAAFVKRAPSTWLTAYVVKVFSLAVNLIAIDSQVLCGAVKWLILEKQKPDGVFQEDAPVIHQEMIGGLRNNNEKDMALTAFVLISLQEAKDICEEQVNSLPGSITKAGDFLEANYMNLQRSYTVAIAGYALAQMGRLKGPLLNKFLTTAKDKNRWEDPGKQLYNVEATSYALLALLQLKDFDFVPPVVRWLNEQRYYGGGYGSTQATFMVFQALAQYQKDAPDHQELNLDVSLQLPSRSSKITHRIHWESASLLRSEETKENEGFTVTAEGKGQGTLSVVTMYHAKAKDQLTCNKFDLKVTIKPAPETEKRPQDAKNTMILEICTRYRGDQDATMSILDISMMTGFAPDTDDLKQLANGVDRYISKYELDKAFSDRNTLIIYLDKVSHSEDDCLAFKVHQYFNVELIQPGAVKVYAYYNLEESCTRFYHPEKEDGKLNKLCRDELCRCAEENCFIQKSDDKVTLEERLDKACEPGVDYVYKTRLVKVQLSNDFDEYIMAIEQTIKSGSDEVQVGQQRTFISPIKCREALKLEEKKHYLMWGLSSDFWGEKPNLSYIIGKDTWVEHWPEEDECQDEENQKQCQDLGAFTESMVVFGCPN

SEQ ID NO: 1168 - protein, 380 aa, Homo sapiens
MSETVICSSRATVMLYDDGNKRWLPAGTGPQAFSRVQIYHNPTANSFRVVGRKMQPDQQVVINCAIVRGVKYNQATPNFHQWRDARQVWGLNFGSKEDAAQFAAGMASALEALEGGGPPPPPALPTWSVPNGPSPEEVEQQKRQQPGPSEHIERRVSNAGGPPAPPAGGPPPPPGPPPPPGPPPPPGLPPSGVPAAAHGAGGGPPPAPPLPAAQGPGGGGAGAPGLAAAIAGAKLRKVSKQEEASGGPTAPKAESGRSGGGGLMEEMNAMLARRRKATQVGEKTPKDESANQEEPEARVPAQSESVRRPWEKNSTTLPRMKSSSSVTTSETQPCTPSSSDYSDLQRVKQELLEEVKKELQKVKEEIIEAFVQELRKRGSP

SEQ ID NO: 1169 - protein, 1274 aa, Homo sapiens
MASGSGDSVTRRSVASQFFTQEEGPGIDGMTTSERVVDLLNQAALITNDSKITVLKQVQELIINKDPTLLDNFLDEIIAFQADKSIEVRKFVIGFIEEACKRDIELLLKLIANLNMLLRDENVNVVKKAILTMTQLYKVALQWMVKSRVISELQEACWDMVSAMAGDIILLLDSDNDGIRTHAIKFVEGLIVTLSPRMADSEIPRRQEHDISLDRIPRDHPYIQYNVLWEEGKAALEQLLKFMVHPAISSINLTTALGSLANIARQRPMFMSEVIQAYETLHANLPPTLAKSQVSSVRKNLKLHLLSVLKHPASLEFQAQITTLLVDLGTPQAEIARNMPSSKDTRKRPRDDSDSTLKKMKLEPNLGEDDEDKDLEPGPSGTSKASAQISGQSDTDITAEFLQPLLTPDNVANLVLISMVYLPEAMPASFQAIYTPVESAGTEAQIKHLARLMATQMTAAGLGPGVEQTKQCKEEPKEEKVVKTESVLIKRRLSAQGQAISVVGSLSSMSPLEEEAPQAKRRPEPIIPVTQPRLAGAGGRKKIFRLSDVLKPLTDAQVEAMKLGAVKRILRAEKAVACSGAAQVRIKILASLVTQFNSGLKAEVLSFILEDVRARLDLAFAWLYQEYNAYLAAGASGSLDKYEDCLIRLLSGLQEKPDQKDGIFTKVVLEAPLITESALEVVRKYCEDESRTYLGMSTLRDLIFKRPSRQFQYLHVLLDLSSHEKDKVRSQALLFIKRMYEKEQLREYVEKFALNYLQLLVHPNPPSVLFGADKDTEVAAPWTEETVKQCLYLYLALLPQNHKLIHELAAVYTEAIADIKRTVLRVIEQPIRGMGMNSPELLLLVENCPKGAETLVTRCLHSLTDKVPPSPELVKRVRDLYHKRLPDVRFLIPVLNGLEKKEVIQALPKLIKLNPIVVKEVFNRLLGTQHGEGNSALSPLNPGELLIALHNIDSVKCDMKSIIKATNLCFAERNVYTSEVLAVVMQQLMEQSPLPMLLMRTVIQSLTMYPRLGGFVMNILSRLIMKQVWKYPKVWEGFIKCCQRTKPQSFQVILQLPPQQLGAVFDKCPELREPLLAHVRSFTPHQQAHIPNSIMTILEASGKQEPEAKEAPAGPLEEDDLEPLTLAPAPAPRPPQDLIGLRLAQEKALKRQLEEEQKLKPGGVGAPSSSSPSPSPSARPGPPPSEEAMDFREEGPECETPGIFISMDDDSGLTEAALLDSSLEGPLPKETAAGGLTLKEERSPQTLAPVGEDAMKTPSPAAEDAREPEAKGNS

SEQ ID NO: 1170 - protein, 580 aa, Homo sapiens
MEVPQPEPAPGSALSPAGVCGGAQRPGHLPGLLLGSHGLLGSPVRAAASSPVTTLTQTMHDLAGLGSETPKSQVGTLLFRSRSRLTHLSLSRRASESSLSSESSESSDAGLCMDSPSPMDPHMAEQTFEQAIQAASRIIRNEQFAIRRFQSMPVRLLGHSPVLRNITNSQAPDGRRKSEAGSGAASSSGEDKENDGFVFKMPWKPTHPSSTHALAEWASRREAFAQRPSSAPDLMCLSPDRKMEVEELSPLALGRFSLTPAEGDTEEDDGFVDILESDLKDDDAVPPGMESLISAPLVKTLEKEEEKDLVMYSKCQRLFRSPSMPCSVIRPILKRLERPQDRDTPVQNKRRRSVTPPEEQQEAEEPKARVLRSKSLCHDEIENLLDSDHRELIGDYSKAFLLQTVDGKHQDLKYISPETMVALLTGKFSNIVDKFVIVDCRYPYEYEGGHIKTAVNLPLERDAESFLLKSPIAPCSLDKRVILIFHCEFSSERGPRMCRFIRERDRAVNDYPSLYYPEMYILKGGYKEFFPQHPNFCEPQDYRPMNHEAFKDELKTFRLKTRSWAGERSRRELCSRLQDQ

SEQ ID NO: 1171 - protein, 120 aa, Homo sapiens
MASSRRGLLLLLLLTAHLGPSEAQHWSHGWYPGGKRALSSAQDPQNALRPPGRALDTAAGSPVQTAHGLPSDALAPLDDSMPWEGRTTAQWSLHRKRHLARTLLTAAREPRPAPPSSNKV

SEQ ID NO: 1172 - protein, 652 aa, Homo sapiens
MATSMGLLLLLLLLLTQPGAGTGADTEAVVCVGTACYTAHSGKLSAAEAQNHCNQNGGNLATVKSKEEAQHVQRVLAQLLRREAALTARMSKFWIGLQREKGKCLDPSLPLKGFSWVGGGEDTPYSNWHKELRNSCISKRCVSLLLDLSQPLLPSRLPKWSEGPCGSPGSPGSNIEGFVCKFSFKGMCRPLALGGPGQVTYTTPFQTTSSSLEAVPFASAANVACGEGDKDETQSHYFLCKEKAPDVFDWGSSGPLCVSPKYGCNFNNGGCHQDCFEGGDGSFLCGCRPGFRLLDDLVTCASRNPCSSSPCRGGATCVLGPHGKNYTCRCPQGYQLDSSQLDCVDVDECQDSPCAQECVNTPGGFRCECWVGYEPGGPGEGACQDVDECALGRSPCAQGCTNTDGSFHCSCEEGYVLAGEDGTQCQDVDECVGPGGPLCDSLCFNTQGSFHCGCLPGWVLAPNGVSCTMGPVSLGPPSGPPDEEDKGEKEGSTVPRAATASPTRGPEGTPKATPTTSRPSLSSDAPITSAPLKMLAPSGSPGVWREPSIHHATAASGPQEPAGGDSSVATQNNDGTDGQKLLLFYILGTVVAILLLLALALGLLVYRKRRAKREEKKEKKPQNAADSYSWVPERAESRAMENQYSPTPGTDC

SEQ ID NO: 1173 - protein, 142 aa, Homo sapiens
MPRCRWLSLILLTIPLALVARKDPKKNETGVLRKLKPVNASNANVKQCLWFAMQEYNKESEDKYVFLVVKTLQAQLQVTNLLEYLIDVEIARSDCRKPLSTNEICAIQENSKLKRKLSCSFLVGALPWNGEFTVMEKKCEDA

SEQ ID NO: 1174 - protein, 145 aa, Homo sapiens
MGIGCWRNPLLLLIALVLSAKLGHFQRWEGFQQKLMSKKNMNSTLNFFIQSYNNASNDTYLYRVQRLIRSQMQLTTGVEYIVTVKIGWTKCKRNDTSNSSCPLQSKKLRKSLICESLIYTMPWINYFQLWNNSCLEAEHVGRNLR

SEQ ID NO: 1175 - protein, 349 aa, Homo sapiens
MAGGRCGPQLTALLAAWIAAVAATAGPEEAALPPEQSRVQPMTASNWTLVMEGEWMLKFYAPWCPSCQQTDSEWEAFAKNGEILQISVGKVDVIQEPGLSGRFFVTTLPAFFHAKDGIFRRYRGPGIFEDLQNYILEKKWQSVEPLTGWKSPASLTMSGMAGLFSISGKIWHLHNYFTVTLGIPAWCSYVFFVIATLVFGLFMGLVLVVISECFYVPLPRHLSERSEQNRRSEEAHRAEQLQDAEEEKDDSNEEENKDSLVDDEEEKEDLGDEDEAEEEEEEDNLAAGVDEERSEANDQGPPGEDGVTREEVEPEEAEEGISEQPCPADTEVVEDSLRQRKSQHADKGL

SEQ ID NO: 1176 - protein, 200 aa, Homo sapiens
MVHAFLIHTLRAPNTEDTGLCRVLYSCVFGAEKSPDDPRPHGAERDRLLRKEQILAVARQVESMCRLQQQASGRPPMDLQPQSSDEQVPLHEAPRGAFRLAAENPFQEPRTVVWLGVLSLGFALVLDAHENLLLAEGTLRLLTRLLLDHLRLLAPSTSLLLRADRIEGILTRFLPHGQLLFLNDQFVQGLEKEFSAAWPR

SEQ ID NO: 1177 - protein, 1410 aa, Homo sapiens
MDIYDTQTLGVVVFGGFMVVSAIGIFLVSTFSMKETSYEEALANQRKEMAKTHHQKVEKKKKEKTVEKKGKTKKKEEKPNGKIPDHDPAPNVTVLLREPVRAPAVAVAPTPVQPPIIVAPVATVPAMPQEKLASSPKDKKKKEKKVAKVEPAVSSVVNSIQVLTSKAAILETAPKEVPMVVVPPVGAKGNTPATGTTQGKKAEGTQNQSKKAEGAPNQGRKAEGTPNQGKKTEGTPNQGKKAEGTPNQGKKAEGTPNQGKKAEGAQNQGKKVDTTPNQGKKVEGAPTQGRKAEGAQNQAKKVEGAQNQGKKAEGAQNQGKKGEGAQNQGKKAEGAQNQGKKAEGAQNQGKKAEGAQNQGKKAEGAQNQGKKAEGAQNQGKKAEGAQNQGKKVEGAQNQGKKAEGAQNQGKKAEGAQNQGKKAEGAQNQGKKAEGAQNQGKKAEGAQNQGKKAEGAQNQGKKAEGAQNQGKKVEGAQNQGKKAEGAQNQGKKAEGAQNQGKKAEGAQNQGQKGEGAQNQGKKTEGAQGKKAERSPNQGKKGEGAPIQGKKADSVANQGTKVEGITNQGKKAEGSPSEGKKAEGSPNQGKKADAAANQGKKTESASVQGRNTDVAQSPEAPKQEAPAKKKSGSKKKGEPGPPDADGPLYLPYKTLVSTVGSMVFNEGEAQRLIEILSEKAGIIQDTWHKATQKGDPVAILKRQLEEKEKLLATEQEDAAVAKSKLRELNKEMAAEKAKAAAGEAKVKKQLVAREQEITAVQARMQASYREHVKEVQQLQGKIRTLQEQLENGPNTQLARLQQENSILRDALNQATSQVESKQNAELAKLRQELSKVSKELVEKSEAVRQDEQQRKALEAKAAAFEKQVLQLQASHRESEEALQKRLDEVSRELCHTQSSHASLRADAEKAQEQQQQMAELHSKLQSSEAEVRSKCEELSGLHGQLQEARAENSQLTERIRSIEALLEAGQARDAQDVQASQAEADQQQTRLKELESQVSGLEKEAIELREAVEQQKVKNNDLREKNWKAMEALATAEQACKEKLLSLTQAKEESEKQLCLIEAQTMEALLALLPELSVLAQQNYTEWLQDLKEKGPTLLKHPPAPAEPSSDLASKLREAEETQSTLQAECDQYRSILAETEGMLRDLQKSVEEEEQVWRAKVGAAEEELQKSRVTVKHLEEIVEKLKGELESSDQVREHTSHLEAELEKHMAAASAECQNYAKEVAGLRQLLLESQSQLDAAKSEAQKQSDELALVRQQLSEMKSHVEDGDIAGAPASSPEAPPAEQDPVQLKTQLEWTEAILEDEQTQRQKLTAEFEEAQTSACRLQEELEKLRTAGPLESSETEEASQLKERLEKEKKLTSDLGRAATRLQELLKTTQEQLAREKDTVKKLQEQLEKAEDGSSSKEGTSV

SEQ ID NO: 1178 - protein, 570 aa, Homo sapiens
MSRLEAKKPSLCKSEPLTTERVRTTLSVLKRIVTSCYGPSGRLKQLHNGFGGYVCTTSQSSALLSHLLVTHPILKILTASIQNHVSSFSDCGLFTAILCCNLIENVQRLGLTPTTVIRLNKHLLSLCISYLKSETCGCRIPVDFSSTQILLCLVRSILTSKPACMLTRKETEHVSALILRAFLLTIPENAEGHIILGKSLIVPLKGQRVIDSTVLPGILIEMSEVQLMRLLPIKKSTALKVALFCTTLSGDTSDTGEGTVVVSYGVSLENAVLDQLLNLGRQLISDHVDLVLCQKVIHPSLKQFLNMHRIIAIDRIGVTLMEPLTKMTGTQPIGSLGSICPNSYGSVKDVCTAKFGSKHFFHLIPNEATICSLLLCNRNDTAWDELKLTCQTALHVLQLTLKEPWALLGGGCTETHLAAYIRHKTHNDPESILKDDECTQTELQLIAEAFCSALESVVGSLEHDGGEILTDMKYGHLWSVQADSPCVANWPDLLSQCGCGLYNSQEELNWSFLRSTRRPFVPQSCLPHEAVGSASNLTLDCLTAKLSGLQVAVETANLILDLSYVIEDKN

SEQ ID NO: 1179 - protein, 165 aa, Homo sapiens
MASGVQVADEVCRIFYDMKVRKCSTPEEIKKRKKAVIFCLSADKKCIIVEEGKEILVGDVGVTITDPFKHFVGMLPEKDCRYALYDASFETKESRKEELMFFLWAPELAPLKSKMIYASSKDAIKKKFQGIKHECQANGPEDLNRACIAEKLGGSLIVAFEGCPV

SEQ ID NO: 1180 - protein, 280 aa, Homo sapiens
MDLQGRGVPSIDRLRVLLMLFHTMAQIMAEQEVENLSGLSTNPEKDIFVVRENGTTCLMAEFAAKFIVPYDVWASNYVDLITEQADIALTRGAEVKGRCGHSQSELQVFWVDRAYALKMLFVKESHNMSKGPEATWRLSKVQFVYDSSEKTHFKDAVSAGKHTANSHHLSALVTPAGKSYECQAQQTISLASSDPQKTVTMILSAVHIQPFDIISDFVFSEEHKCPVDEREQLEETLPLILGLILGLVIMVTLAIYHVHHKMTANQVQIPRDRSQYKHMG

SEQ ID NO: 1181 - protein, 225 aa, Homo sapiens
MDIRPNHTIYINNMNDKIKKEELKRSLYALFSQFGHVVDIVALKTMKMRGQAFVIFKELGSSTNALRQLQGFPFYGKPMRIQYAKTDSDIISKMRGTFADKEKKKEKKKAKTVEQTATTTNKKPGQGTPNSANTQGNSTPNPQVPDYPPNYILFLNNLPEETNEMMLSMLFNQFPGFKEVRLVPGRHDIAFVEFENDGQAGAARDALQGFKITPSHAMKITYAKK

SEQ ID NO: 1182 - protein, 128 aa, Homo sapiens
MARILLLFLPGLVAVCAVHGIFMDRLASKKLCADDECVYTISLASAQEDYNAPDCRFINVKKGQQIYVYSKLVKENGAGEFWAGSVYGDGQDEMGVVGYFPRNLVKEQRVYQEATKEVPTTDIDFFCE

SEQ ID NO: 1183 - protein, 183 aa, Homo sapiens
MKLLFPIFASLMLQYQVNTEFIGLRRCLMGLGRCRDHCNVDEKEIQKCKMKKCCVGPKVVKLIKNYLQYGTPNVLNEDVQEMLKPAKNSSAVIQRKHILSVLPQIKSTSFFANTNFVIIPNATPMNSATISTMTPGQITYTATSTKSNTKESRDSATASPPPAPPPPNILPTPSLELEEAEEQ

SEQ ID NO: 1184 - protein, 563 aa, Homo sapiens
MLEEAGEVLENMLKASCLPLGFIVFLPAVLLLVAPPLPAADAAHEFTVYRMQQYDLQGQPYGTRNAVLNTEARTMAAEVLSRRCVLMRLLDFSYEQYQKALRQSAGAVVIILPRAMAAVPQDVVRQFMEIEPEMLAMETAVPVYFAVEDEALLSIYKQTQAASASQGSASAAEVLLRTATANGFQMVTSGVQSKAVSDWLIASVEGRLTGLGGEDLPTIVIVAHYDAFGVAPWLSLGADSNGSGVSVLLELARLFSRLYTYKRTHAAYNLLFFASGGGKFNYQGTKRWLEDNLDHTDSSLLQDNVAFVLCLDTVGRGSSLHLHVSKPPREGTLQHAFLRELETVAAHQFPEVRFSMVHKRINLAEDVLAWEHERFAIRRLPAFTLSHLESHRDGQRSSIMDVRSRVDSKTLTRNTRIIAEALTRVIYNLTEKGTPPDMPVFTEQMQIQQEQLDSVMDWLTNQPRAAQLVDKDSTFLSTLEHHLSRYLKDVKQHHVKADKRDPEFVFYDQLKQVMNAYRVKPAVFDLLLAVGIAAYLGMAYVAVQHFSLLYKTVQRLLVKAKTQ

SEQ ID NO: 1185 - protein, 96 aa, Homo sapiens
MSDNDDIEVESDEEQPRFQSAADKRAHHNALERKRRDHIKDSFHSLRDSVPSLQGEKLYFLFWKLCTPVLHRQSLMQKCHTFISSYQVHKKKECKI

SEQ ID NO: 1186 - protein, 437 aa, Homo sapiens
MASPSSFTYYCPPSSSPVWSEPLYSLRPEHARERLQDDSVETVTSIEQAKVEEKIQEVFSSYKFNHLVPRLVLQREKHFHYLKRGLRQLTDAYECLDASRPWLCYWILHSLELLDEPIPQIVATDVCQFLELCQSPEGGFGGGPGQYPHLAPTYAAVNALCIIGTEEAYDIINREKLLQYLYSLKQPDGSFLMHVGGEVDVRSAYCAASVASLTNIITPDLFEGTAEWIARCQNWEGGIGGVPGMEAHGGYTFCGLAALVILKRERSLNLKSLLQWVTSRQMRFEGGFQGRCNKLVDGCYSFWQAGLLPLLHRALHAQGDPALSMSHWMFHQQALQEYILMCCQCPAGGLLDKPGKSRDFYHTCYCLSGLSIAQHFGSGAMLHDVVLGVPENALQPTHPVYNIGPDKVIQATTYFLQKPVPGFEELKDETSAEPATD

SEQ ID NO: 1187 - protein, 558 aa, Homo sapiens
MVDSGTEARARGKAEAGLQDGISGPATARVNGKTQAEAVAEAELKTESVTQAKAGDGAMTRTHTVTYREAMAVTREVIKVEDTTKTRVMVETKTKPLAERSIVPQTKSKAMPMSRVSTVTKSEVKVVAVIEANIRSYAKSHDKANTGSRPDRREETSIGMKSSDEDEENICSWFWTGEEPSVGSWFWPEEETSLQVYKPLPKIQEKPKPTHKPTLTIKQKVIAWSRARYIVLVPVEGGEQSLPPEGNWTLVETLIETPLGIRPLTKIPPYHGPYYQTLAEIKKQIRQREKYGPNPKACHCKSRGFSLEPKEFDKLVALLKLTKDPFIHEIATMIMGISPAYPFTQDIIHDVGITVMIENLVNNPNVKEHPGALSMVDDSSESSEEPKSGESYIHQVCKGIISCPLNSPVQLAGLKLLGHLSIKFEDHYVITSYIPDFLTLLNKGSVKTKFYVLKVFSCLSKNHANTRELISAKVLSSLVAPFNKNESKANILNIIEIFENINFQFKTKAKLFTKEKFTKSELISIFQEAKQFGQKLQDLAEHSDPEVRDKVIRLILKL

SEQ ID NO: 1188 - protein, 396 aa, Homo sapiens
MACAGLLTVCLLRPPAPQPQPQTPRHPQLAPDPGPAGHTLFQDVFRRADKNDDGKLSFEEFQNYFADGVLSLGELQELFSGIDGHLTDNLETEKLCDYFSEHLGVYRPVLAALESLNRAVLAAMDATKLEYERASKVDQFVTRFLLRETVSQLQALQSSLEGASDTLEAQAHGWRSDAESVEAQSRLCGSRRAGRRALRSVSRSSTWSPGSSDTGRSSEAEMQWRLQVNRLQELIDQLECKVRAVGPGPHKGGPSWYPPEPGPCWRPGPHSVPSQAPRLEPLREEDLAKGPDLHILMAQRQVQVAEEGLQDFHRALRCYVDFTGAQSHCLHVSAQKMLDGASFTLYEFWQDEASWRRHQQSPGSKAFQRILIDHLRAPDTLTTVFFPASWWIMNNN

SEQ ID NO: 1189 - protein, 306 aa, Homo sapiens
MSLKLQASNVTNKNDPKSINSRVFIGNLNTALVKKSDVETIFSKYGRVAGCSVHKGYAFVQYSNERHARAAVLGENGRVLAGQTLDINMAGEPKPDRPKGLKRAASAIYSGYIFDYDYYRDDFYDRLFDYRGRLSPVPVPRAVPVKRPRVTVPLVRRVKTNVPVKLFARSTAVTTSSAKIKLKSSELQAIKTELTQIKSNIDALLSRLEQIAAEQKANPDGKKKGDGGGAGGGGGGGGSGGGGSGGGGGGGSSRPPAPQENTTSEAGLPQGEARTRDDGDEEGLLTHSEEELEHSQDTDADDGALQ

SEQ ID NO: 1190 - protein, 367 aa, Homo sapiens
MEANGLGPQGFPELKNDTFLRAAWGEETDYTPVWCMRQAGRYLPEFRETRAAQDFFSTCRSPEACCELTLQPLRRFPLDAAIIFSDILVVPQALGMEVTMVPGKGPSFPEPLREEQDLERLRDPEVVASELGYVFQAITLTRQRLAGRVPLIGFAGAPWTLMTYMVEGGGSSTMAQAKRWLYQRPQASHQLLRILTDALVPYLVGQVVAGAQALQLFESHAGHLGPQLFNKFALPYIRDVAKQVKARLREAGLAPVPMIIFAKDGHFALEELAQAGYEVVGLDWTVAPKKARECVGKTVTLQGNLDPCALYASEEEIGQLVKQMLDDFGPHRYIANLGHGLYPDMDPEHVGAFVDAVHKHSRLLRQN

SEQ ID NO: 1191 - protein, 637 aa, Homo sapiens
MYDNMSTMVYIKEDKLEKLTQDEIISKTKQVIQGLEALKNEHNSILQSLLETLKCLKKDDESNLVEEKSNMIRKSLEMLELGLSEAQVMMALSNHLNAVESEKQKLRAQVRRLCQENQWLRDELANTQQKLQKSEQSVAQLEEEKKHLEFMNQLKKYDDDISPSEDKDTDSTKEPLDDLFPNDEDDPGQGIQQQHSSAAAAAQQGGYEIPARLRTLHNLVIQYASQGRYEVAVPLCKQALEDLEKTSGHDHPDVATMLNILALVYRDQNKYKDAANLLNDALAIREKTLGKDHPAVAATLNNLAVLYGKRGKYKEAEPLCKRALEIREKVLGKDHPDVAKQLNNLALLCQNQGKYEEVEYYYQRALEIYQTKLGPDDPNVAKTKNNLASCYLKQGKFKQAETLYKEILTRAHEREFGSVDDENKPIWMHAEEREECKGKQKDGTSFGEYGGWYKACKVDSPTVTTTLKNLGALYRRQGKFEAAETLEEAAMRSRKQGLDNVHKQRVAEVLNDPENMEKRRSRESLNVDVVKYESGPDGGEEVSMSVEWNGDGTGSLKRSGSFSKLRASIRRSSEKLVRKLKGGSSRESEPKNPGMKRASSLNVLNVGGKAAEDRFQERNNCLADSRALSASHTDLAH

SEQ ID NO: 1192 - protein, 103 aa, Homo sapiens
MASRWAVQLLLVAAWSMGCGEALKCYTCKEPMTSASCRTITRCKPEDTACMTTLVTVEAEYPFNQSPVVTRSCSSSCVATDPDSIGAAHLIFCCFRDLCNSEL

SEQ ID NO: 1193 - protein, 628 aa, Homo sapiens
MAILPLLLCLLPLAPASSPPQSATPSPCPRRCRCQTQSLPLSVLCPGAGLLFVPPSLDRRAAELRLADNFIASVRRRDLANMTGLLHLSLSRNTIRHVAAGAFADLRALRALHLDGNRLTSLGEGQLRGLVNLRHLILSNNQLAALAAGALDDCAETLEDLDLSYNNLEQLPWEALGRLGNVNTLGLDHNLLASVPAGAFSRLHKLARLDMTSNRLTTIPPDPLFSRLPLLARPRGSPASALVLAFGGNPLHCNCELVWLRRLAREDDLEACASPPALGGRYFWAVGEEEFVCEPPVVTHRSPPLAVPAGRPAALRCRAVGDPEPRVRWVSPQGRLLGNSSRARAFPNGTLELLVTEPGDGGIFTCIAANAAGEATAAVELTVGPPPPPQLANSTSCDPPRDGDPDALTPPSAASASAKVADTGPPTDRGVQVTEHGATAALVQWPDQRPIPGIRMYQIQYNSSADDILVYRMIPAESRSFLLTDLASGRTYDLCVLAVYEDSATGLTATRPVGCARFSTEPALRPCGAPHAPFLGGTMIIALGGVIVASVLVFIFVLLMRYKVHGGQPPGKAKIPAPVSSVCSQTNGALGPTPTPAPPAPEPAALRAHTVVQLDCEPWGPGHEPVGP

SEQ ID NO: 1194 - protein, 355 aa, Homo sapiens
MGPGRCLLTALLLLALAPPPEASQYCGRLEYWNPDNKCCSSCLQRFGPPPCPDYEFRENCGLNDHGDFVTPPFRKCSSGQCNPDGAELCSPCGGGAVTPTPAAGGGRTPWRCRERPVPAKGHCPLTPGNPGAPSSQERSSPASSIAWRTPEPVPQQAWPNFLPLVVLVLLLTLAVIAILLFILLWHLCWPKEKADPYPYPGLVCGVPNTHTPSSSHLSSPGALETGDTWKEASLLPLLSRELSSLASQPLSRLLDELEVLEELIVLLDPEPGPGGGMAHGTTRHLAARYGLPAAWSTFAYSLRPSRSPLRALIEMVVAREPSASLGQLGTHLAQLGRADALRVLSKLGSSGVCWA

SEQ ID NO: 1195 - protein, 268 aa, Homo sapiens
MFLVNSFLKGGGGGGGGGGGLGGGLGNVLGGLISGAGGGGGGGGGGGGGGGGGGGGTAMRILGGVISAISEAAAQYNPEPPPPRTHYSNIEANESEEVRQFRRLFAQLAGDDMEVSATELMNILNKVVTRHPDLKTDGFGIDTCRSMVAVMDSDTTGKLGFEEFKYLWNNIKRWQAIYKQFDTDRSGTICSSELPGAFEAAGFHLNEHLYNMIIRRYSDESGNMDFDNFISCLVRLDAMFRAFKSLDKDGTGQIQVNIQEWLQLTMYS

SEQ ID NO: 1196 - protein, 358 aa, Homo sapiens
MAAVLKPVLLGLRDAPVHGSPTGPGAWTASKLGGIPDALPTVAAPRPVCQRCGQPLALVVQVYCPLEGSPFHRLLHVFACACPGCSTGGARSWKVFRSQCLQVPEREAQDAQKQGNSLAAEDWCEGADDWGSDTEEGPSPQFTLDFGNDASSAKDVDWTARLQDLRLQDAVLGAAHPVPPGLPLFLPYYICVADEDDYRDFVNLDHAHSLLRDYQQREGIAMDQLLSQSLPNDGDEKYEKTIIKSGDQTFYKFMKRIAACQEQILRYSWSGEPLFLTCPTSEVTELPACSQCGGQRIFEFQLMPALVSMLKSANLGLSVEFGTILVYTCEKSCWPPNHQTPMEEFCIIQEDPDELLFK

SEQ ID NO: 1197 - protein, 640 aa, Homo sapiens
MALSRGLPRELAEAVAGGRVLVVGAGGIGCELLKNLVLTGFSHIDLIDLDTIDVSNLNRQFLFQKKHVGRSKAQVAKESVLQFYPKANIVAYHDSIMNPDYNVEFFRQFILVMNALDNRAARNHVNRMCLAADVPLIESGTAGYLGQVTTIKKGVTECYECHPKPTQRTFPGCTIRNTPSEPIHCIVWAKYLFNQLFGEEDADQEVSPDRADPEAAWEPTEAEARARASNEDGDIKRISTKEWAKSTGYDPVKLFTKLFKDDIRYLLTMDKLWRKRKPPVPLDWAEVQSQGEETNASDQQNEPQLGLKDQQVLDVKSYARLFSKSIETLRVHLAEKGDGAELIWDKDDPSAMDFVTSAANLRMHIFSMNMKSRFDIKSMAGNIIPAIATTNAVIAGLIVLEGLKILSGKIDQCRTIFLNKQPNPRKKLLVPCALDPPNPNCYVCASKPEVTVRLNVHKVTVLTLQDKIVKEKFAMVAPDVQIEDGKGTILISSEEGETEANNHKKLSEFGIRNGSRLQADDFLQDYTLLINILHSEDLGKDVEFEVVGDAPEKVGPKQAEDAAKSITNGSDDGAQPSTSTAQEQDDVLIVDSDEEDSSNNADVSEEERSRKRKLDEKENLSAKRSRIEQKEELDDVIALD

SEQ ID NO: 1198 - protein, 614 aa, Homo sapiens
MTTLDSNNNTGGVITYIGSSGSSPSRTSPESLYSDNSNGSFQSLTQGCPTYFPPSPTGSLTQDPARSFGSIPPSLSDDGSPSSSSSSSSSSSSFYNGSPPGSLQVAMEDSSRVSPSKSTSNITKLNGMVLLCKVCGDVASGFHYGVHACEGCKGFFRRSIQQNIQYKRCLKNENCSIVRINRNRCQQCRFKKCLSVGMSRDAVRFGRIPKREKQRMLAEMQSAMNLANNQLSSQCPLETSPTQHPTPGPMGPSPPPAPVPSPLVGFSQFPQQLTPPRSPSPEPTVEDVISQVARAHREIFTYAHDKLGSSPGNFNANHASGSPPATTPHRWENQGCPPAPNDNNTLAAQRHNEALNGLRQAPSSYPPTWPPGPAHHSCHQSNSNGHRLCPTHVYAAPEGKAPANSPRQGNSKNVLLACPMNMYPHGRSGRTVQEIWEDFSMSFTPAVREVVEFAKHIPGFRDLSQHDQVTLLKAGTFEVLMVRFASLFNVKDQTVMFLSRTTYSLQELGAMGMGDLLSAMFDFSEKLNSLALTEEELGLFTAVVLVSADRSGMENSASVEQLQETLLRALRALVLKNRPLETSRFTKLLLKLPDLRTLNNMHSEKLLSFRVDAQ

SEQ ID NO: 1199 - protein, 184 aa, Homo sapiens
MGLLTILKKMKQKERELRLLMLGLDNAGKTTILKKFNGEDIDTISPTLGFNIKTLEHRGFKLNIWDVGGQKSLRSYWRNYFESTDGLIWVVDSADRQRMQDCQRELQSLLVEERLAGATLLIFANKQDLPGALSSNAIREVLELDSIRSHHWCIQGCSAVTGENLLPGIDWLLDDISSRIFTAD

SEQ ID NO: 1200 - protein, 218 aa, Homo sapiens
MSSGAASGTGRGRPRGGGPGPGDPPPSETHKLVVVGGGGVGKSALTIQFIQSYFVSDYDPTIEDSYTKICSVDGIPARLDILDTAGQEEFGAMREQYMRAGHGFLLVFAINDRQSFNEVGKLFTQILRVKDRDDFPVVLVGNKADLESQRQVPRSEASAFGASHHVAYFEASAKLRLNVDEAFEQLVRAVRKYQEQELPPSPPSAPRKKGGGCPCVLL

SEQ ID NO: 1201 - protein, 202 aa, Homo sapiens
MRGHPSLLLLYMALTTCLDTSPSEETDQEVFLGPPEAQSFLSSHTRIPRANHWDLELLTPGNLERECLEERCSWEEAREYFEDNTLTERFWESYIYNGKGGRGRVDVASLAVGLTGGILLIVLAGLGAFWYLRWRQHRGQQPCPQEAGLISPLSPLNPLGPPTPLPPPPPPPPGLPTYEQALAASGVHDAPPPPYTSLRRPH

SEQ ID NO: 1202 - protein, 478 aa, Homo sapiens
MAAGGSGVGGKRSSKSDADSGFLGLRPTSVDPALRRRRRGPRNKKRGWRRLAQEPLGLEVDQFLEDVRLQERTSGGLLSEAPNEKLFFVDTGSKEKGLTKKRTKVQKKSLLLKKPLRVDLILENTSKVPAPKDVLAHQVPNAKKLRRKEQLWEKLAKQGELPREVRRAQARLLNPSATRAKPGPQDTVERPFYDLWASDNPLDRPLVGQDEFFLEQTKKKGVKRPARLHTKPSQAPAVEVAPAGASYNPSFEDHQTLLSAAHEVELQRQKEAEKLERQLALPATEQAATQESTFQELCEGLLEESDGEGEPGQGEGPEAGDAEVCPTPARLATTEKKTEQQRRREKAVHRLRVQQAALRAARLRHQELFRLRGIKAQVALRLAELARRQRRRQARREAEADKPRRLGRLKYQAPDIDVQLSSELTDSLRTLKPEGNILRDRFKSFQRRNMIEPRERAKFKRKYKVKLVEKRAFREIQL

SEQ ID NO: 1203 - protein, 250 aa, Homo sapiens
MSIFTPTNQIRLTNVAVVRMKRAGKRFEIACYKNKVVGWRSGVEKDLDEVLQTHSVFVNVSKGQVAKKEDLISAFGTDDQTEICKQILTKGEVQVSDKERHTQLEQMFRDIATIVADKCVNPETKRPYTVILIERAMKDIHYSVKTNKSTKQQALEVIKQLKEKMKIERAHMRLRFILPVNEGKKLKEKLKPLIKVIESEDYGQQLEIVCLIDPGCFREIDELIKKETKGKGSLEVLNLKDVEEGDEKFE

SEQ ID NO: 1204 - protein, 185 aa, Homo sapiens
MRLLILTCLVAVALARPKLPLRYPERLQNPSESSEPIPLESREEYMNGMNRQRNILREKQTDEIKDTRNESTQNCVVAEPEKMESSISSSSEEMSLSKCAEQFCRLNEYNQLQLQAAHAQEQIRRMNENSHVQVPFQQLNQLAAYPYAVWYYPQIMQYVPFPPFSDISNPTAHENYEKNNVMLQW

SEQ ID NO: 1205 - protein, 62 aa, Homo sapiens
MKFLVFAFILALMVSMIGADSSEEKFLRRIGRFGYGYGPYQPVPEQPLYPQPYQPQYQQYTF

SEQ ID NO: 1206 - protein, 57 aa, Homo sapiens
MKFFVFALVLALMISMISADSHEKRHHGYRRKFHEKHHSHREFPFYGDYGSNYLYDN

SEQ ID NO: 1207 - protein, 298 aa, Homo sapiens
MTEPGASPEDPWVKASPVGAHAGEGRAGRARARRGAGRRGASLLSPKSPTLSVPRGCREDSSHPACAKVEYAYSDNSLDPGLFVESTRKGSVVSRANSIGSTSASSVPNTDDEDSDYHQEAYKESYKDRRRRAHTQAEQKRRDAIKRGYDDLQTIVPTCQQQDFSIGSQKLSKAIVLQKTIDYIQFLHKEKKKQEEEVSTLRKDVTALKIMKVNYEQIVKAHQDNPHEGEDQVSDQVKFNVFQGIMDSLFQSFNASISVASFQELSACVFSWIEEHCKPQTLREIVIGVLHQLKNQLY

SEQ ID NO: 1208 - protein, 1243 aa, Homo sapiens
MLASPATETTVLMSQTEADLALRPPPPLGTAGQPRLGPPPRRARRFSGKAEPRPRSSRLSRRSSVDLGLLSSWSLPASPAPDPPDPPDSAGPGPARSPPPSSKEPPEGTWTEGAPVKAAEDSARPELPDSAVGPGSREPLRVPEAVALERRREQEEKEDMETQAVATSPDGRYLKFDIEIGRGSFKTVYRGLDTDTTVEVAWCELQTRKLSRAERQRFSEEVEMLKGLQHPNIVRFYDSWKSVLRGQVCIVLVTELMTSGTLKTYLRRFREMKPRVLQRWSRQILRGLHFLHSRVPPILHRDLKCDNVFITGPTGSVKIGDLGLATLKRASFAKSVIGTPEFMAPEMYEEKYDEAVDVYAFGMCMLEMATSEYPYSECQNAAQIYRKVTSGRKPNSFHKVKIPEVKEIIEGCIRTDKNERFTIQDLLAHAFFREERGVHVELAEEDDGEKPGLKLWLRMEDARRGGRPRDNQAIEFLFQLGRDAAEEVAQEMVALGLVCEADYQPVARAVRERVAAIQRKREKLRKARELEALPPEPGPPPATVPMAPGPPSVFPPEPEEPEADQHQPFLFRHASYSSTTSDCETDGYLSSSGFLDASDPALQPPGGVPSSLAESHLCLPSAFALSIPRSGPGSDFSPGDSYASDAASGLSDVGEGMGQMRRPPGRNLRRRPRSRLRVTSVSDQNDRVVECQLQTHNSKMVTFRFDLDGDSPEEIAAAMVYNEFILPSERDGFLRRIREIIQRVETLLKRDTGPMEAAEDTLSPQEEPAPLPALPVPLPDPSNEELQSSTSLEHRSWTAFSTSSSSPGTPLSPGNPFSPGTPISPGPIFPITSPPCHPSPSPFSPISSQVSSNPSPHPTSSPLPFSSSTPEFPVPLSQCPWSSLPTTSPPTFSPTCSQVTLSSPFFPPCPSTSSFPSTTAAPLLSLASAFSLAVMTVAQSLLSPSPGLLSQSPPAPPSPLPSLPLPPPVAPGGQESPSPHTAEVESEASPPPARPLPGEARLAPISEEGKPQLVGRFQVTSSKEPAEPLPLQPTSPTLSGSPKPSTPQLTSESSDTEDSAGGGPETREALAESDRAAEGLGAGVEEEGDDGKEPQVGGSPQPLSHPSPVWMNYSYSSLCLSSEESESSGEDEEFWAELQSLRQKHLSEVETLQTLQKKEIEDLYSRLGKQPPPGIVAPAAMLSSRQRRLSKGSFPTSRRNSLQRSEPPGPGIMRRNSLSGSSTGSQEQRASKGVTFAGDVGRM

SEQ ID NO: 1209 - protein, 282 aa, Homo sapiens [sequence omitted]

SEQ ID NO: 1210 - protein, 704 aa, Homo sapiens
MARELRALLLWGRRLRPLLRAPALAAVPGGKPILCPRRTTAQLGPRRNPAWSLQAGRLFSTQTAEDKEEPLHSIISSTESVQGSTSKHEFQAETKKLLDIVARSLYSEKEVFIRELISNASDALEKLRHKLVSDGQALPEMEIHLQTNAEKGTITIQDTGIGMTQEELVSNLGTIARSGSKAFLDALQNQAEASSKIIGQFGVGFYSAFMVADRVEVYSRSAAPGSLGYQWLSDGSGVFEIAEASGVRTGTKIIIHLKSDCKEFSSEARVRDVVTKYSNFVSFPLYLNGRRMNTLQAIWMMDPKDVREWQHEEFYRYVAQAHDKPRYTLHYKTDAPLNIRSIFYVPDMKPSMFDVSRELGSSVALYSRKVLIQTKATDILPKWLRFIRGVVDSEDIPLNLSRELLQESALIRKLRDVLQQRLIKFFIDQSKKDAEKYAKFFEDYGLFMREGIVTATEQEVKEDIAKLLRYESSALPSGQLTSLSEYASRMRAGTRNIYYLCAPNRHLAEHSPYYEAMKKKDTEVLFCFEQFDELTLLHLREFDKKKLISVETDIVVDHYKEEKFEDRSPAAECLSEKETEELMAWMRNVLGSRVTNVKVTLRLDTHPAMVTVLEMGAARHFLRMQQLAKTQEERAQLLQPTLEINPRHALIKKLNQLRASEPGLAQLLVDQIYENAMIAAGLVDDPRAMVGRLNELLVKALERH

SEQ ID NO: 1211 - protein, 645 aa, Homo sapiens
MSLKMDNRDVAGKANRWFGVAPPKSGKMNMNILHQEELIAQKKREIEAKMEQKAKQNQVASPQPPHPGEITNAHNSSCISNKFANDGSFLQQFLKLQKAQTSTDAPTSAPSAPPSTPTPSAGKRSLLISRRTGLGLASLPGPVKSYSHAKQLPVAHRPSVFQSPDEDEEEDYEQWLEIKVSPPEGAETRKVIEKLARFVAEGGPELEKVAMEDYKDNPAFAFLHDKNSREFLYYRKKVAEIRKEAQKSQAASQKVSPPEDEEVKNLAEKLARFIADGGPEVETIALQNNRENQAFSFLYEPNSQGYKYYRQKLEEFRKAKASSTGSFTAPDPGLKRKSPPEALSGSLPPATTCPASSTPAPTIIPAPAAPGKPASAATVKRKRKSRWGPEEDKVELPPAELVQRDVDASPSPLSVQDLKGLGYEKGKPVGLVGVTELSDAQKKQLKEQQEMQQMYDMIMQHKRAMQDMQLLWEKAVQQHQHGYDSDEEVDSELGTWEHQLRRMEMDKTREWAEQLTKMGRGKHFIGDFLPPDELEKFMETFKALKEGREPDYSEYKEFKLTVENIGYQMLMKMGWKEGEGLGSEGQGIKNPVNKGTTTVDGAGFGIDRPAELSKEDDEYEAFRKRMMLAYRFRPNPLNNPRRPYY

SEQ ID NO: 1212 - protein, 483 aa, Homo sapiens
MAGFAELGLSSWLVEQCRQLGLKQPTPVQLGCIPAILEGRDCLGCAKTGSGKTAAFVLPILQKLSEDPYGIFCLVLTPTRELAYQIAEQFRVLGKPLGLKDCIIVGGMDMVAQALELSRKPHVVIATPGRLADHLRSSNTFSIKKIRFLVMDEADRLLEQGCTDFTVDLEAILAAVPARRQTLLFSATLTDTLRELQGLATNQPFFWEAQAPVSTVEQLDQRYLLVPEKVKDAYLVHLIQRFQDEHEDWSIIIFTNTCKTCQILCMMLRKFSFPTVALHSMMKQKERFAALAKFKSSIYRILIATDVASRGLDIPTVQVVINHNTPGLPKIYIHRVGRTARAGRQGQAITLVTQYDIHLVHAIEEQIKKKLEEFSVEEAEVLQILTQVNVVRRECEIKLEAAHFDEKKEINKRKQLILEGKDPDLEAKRKAELAKIKQKNRRFKEKVEETLKRQKAGRAGHKGRPPRTPSGSHSGPVPSQGLV

SEQ ID NO: 1213 - protein, 372 aa, Homo sapiens
MPPPQQGPCGHHLLLLLALLLPSLPLTRAPVPPGPAAALLQALGLRDEPQGAPRLRPVPPVMWRLFRRRDPQETRSGSRRTSPGVTLQPCHVEELGVAGNIVRHIPDRGAPTRASEPASAAGHCPEWTVVFDLSAVEPAERPSRARLELRFAAAAAAAPEGGWELSVAQAGQGAGADPGPVLLRQLVPALGPPVRAELLGAAWARNASWPRSLRLALALRPRAPAACARLAEASLLLVTLDPRLCHPLARPRRDAEPVLGGGPGGACRARRLYVSFREVGWHRWVIAPRGFLANYCQGQCALPVALSGSGGPPALNHAVLRALMHAAAPGAADLPCCVPARLSPISVLFFDNSDNVVLRQYEDMVVDECGCR

SEQ ID NO: 1214 - protein, 211 aa, Homo sapiens
MAVVPLLLLGGLWSAVGASSLGVVTCGSVVKLLNTRHNVRLHSHDVRYGSGSGQQSVTGVTSVDDSNSYWRIRGKSATVCERGTPIKCGQPIRLTHVNTGRNLHSHHFTSPLSGNQEVSAFGEEGEGDYLDDWTVLCNGPYWVRDGEVRFKHSSTEVLLSVTGEQYGRPISGQKEVHGMAQPSQNNYWKAMEGIFMKPSELLKAEAHHAEL

SEQ ID NO: 1215 - protein, 558 aa, Homo sapiens
MAIPGRQYGLILPKKTQQLHPVLQKPSVFGNDSDDDDETSVSESLQREAAKKQAMKQTKLEIQKALAEDATVYEYDSIYDEMQKKKEENNPKLLLGKDRKPKYIHNLLKAVEIRKKEQEKRMEKKIQREREMEKGEFDDKEAFVTSAYKKKLQERAEEEEREKRAAALEACLDVTKQKDLSGFYRHLLNQAVGEEEVPKCSFREARSGIKEEKSRGFSNEVSSKNRIPQEKCILQTDVKVEENPDADSDFDAKSSADDEIEETRVNCRREKVIETPENDFKHHRSQNHSRSPSEERGHSTRHHTKGSRTSRGHEKREDQHQQKQSRDQENHYTDRDYRKERDSHRHREASHRDSHWKRHEQEDKPRARDQRERSDRVWKREKDREKYSQREQERDRQQNDQNRPSEKGEKEEKSKAKEEHMKVRKERYENNDKYRDREKREVGVQSSERNQDRKESSPNSRAKDKFLDQERSNKMRNMAKDKERNQEKPSNSESSLGAKHRLTEEGQEKGKEQERPPEAVSKFAKRNNEETVMSARDRYLARQMARVNAKTYIEKEDD

SEQ ID NO: 1216 - protein, 1603 aa, Homo sapiens
MRVKPQGLVVTSSAVCSSPDYLREPKYYPGGPPTPRPLLPTRPPASPPDKAFSTHAFSENPRPPPRRDPSTRRPPVLAKGDDPLPPRAARPVSQARCPTPVGDGSSSRRCWDNGRVNLRPVVQLIDIMKDLTRLSQDLQHSGVHLDCGGLRLSRPPAPPPGDLQYSFFSSPSLANSIRSPEERATPHAKSERPSHPLYEPEPEPRDSPQPGQGHSPGATAAATGLPPEPEPDSTDYSELADADILSELASLTCPEAQLLEAQALEPPSPEPEPQLLDPQPRFLDPQALEPLGEALELPPLQPLADPLGLPGLALQALDTLPDSLESQLLDPQALDPLPKLLDVPGRRLEPQQPLGHCPLAEPLRLDLCSPHGPPGPEGHPKYALRRTDRPKILCRRRKAGRGRKADAGPEGRLLPLPMPTGLVAALAEPPPPPPPPPPALPGPGPVSVPELKPESSQTPVVSTRKGKCRGVRRMVVKMAKIPVSLGRRNKTTYKVSSLSSSLSVEGKELGLRVSAEPTPLLKMKNNGRNVVVVFPPGEMPIILKRKRGRPPKNLLLGPGKPKEPAVVAAEAATVAAATMAMPEVKKRRRRKQKLASPQPSYAADANDSKAEYSDVLAKLAFLNRQSQCAGRCSPPRCWTPSEPESVHQAPDTQSISHFLHRVQGFRRRGGKAGGFGGRGGGHAAKSARCSFSDFFEGIGKKKKVVAVAAAGVGGPGLTELGHPRKRGRGEVDAVTGKPKRKRRSRKNGTLFPEQVPSGPGFGEAGAEWAGDKGGGWAPHHGHPGGQAGRNCGFQGTEARAFASTGLESGASGRGSYYSTGAPSGQTELSQERQNLFTGYFRSLLDSDDSSDLLDFALSASRPESRKASGTYAGPPTSALPAQRGLATFPSRGAKASPVAVGSSGAGADPSFQPVLSARQTFPPGRAASYGLTPAASDCRAAETFPKLVPPPSAMARSPTTHPPANTYLPQYGGYGAGQSVFAPTKPFTGQDCANSKDCSFAYGSGNSLPASPSSAHSAGYAPPPTGGPCLPPSKASFFSSSEGAPFSGSAPTPLRCDSRASTVSPGGYMVPKGTTASATSAASAASSSSSSFQPSPENCRQFAGASQWPFRQGYGGLDWASEAFSQLYNPSFDCHVSEPNVILDISNYTPQKVKQQTAVSETFSESSSDSTQFNQPVGGGGFRRANSEASSSEGQSSLSSLEKLMMDWNEASSAPGYNWNQSVLFQSSSKPGRGRRKKVDLFEASHLGFPTSASAAASGYPSKRSTGPRQPRGGRGGGACSAKKERGGAAAKAKFIPKPQPVNPLFQDSPDLGLDYYSGDSSMSPLPSQSRAFGVGERDPCDFIGPYSMNPSTPSDGTFGQGFHCDSPSLGAPELDGKHFPPLAHPPTVFDAGLQKAYSPTCSPTLGFKEELRPPPTKLAACEPLKHGLQGASLGHAAAAQAHLSCRDLPLGQPHYDSPSCKGTAYWYPPGSAARSPPYEGKVGTGLLADFLGRTEAACLSAPHLASPPATPKADKEPLEMARPPGPPRGPAAAAAGYGCPLLSDLTLSPVPRDSLLPLQDTAYRYPGFMPQAHPGLGGGPKSGFLGPMAEPHPEDTFTVTSL

SEQ ID NO: 1217 - protein, 469 aa, Homo sapiens
MITEGAQAPRLLLPPLLLLLTLPATGSDPVLCFTQYEESSGKCKGLLGGGVSVEDCCLNTAFAYQKRSGGLCQPCRSPRWSLWSTWAPCSVTCSEGSQLRYRRCVGWNGQCSGKVAPGTLEWQLQACEDQQCCPEMGGWSGWGPWEPCSVTCSKGTRTRRRACNHPAPKCGGHCPGQAQESEACDTQQVCPTHGAWATWGPWTPCSASCHGGPHEPKETRSRKCSAPEPSQKPPGKPCPGLAYEQRRCTGLPPCPVAGGWGPWGPVSPCPVTCGLGQTMEQRTCNHPVPQHGGPFCAGDATRTHICNTAVPCPVDGEWDSWGEWSPCIRRNMKSISCQEIPGQQSRGRTCRGRKFDGHRCAGQQQDIRHCYSIQHCPLKGSWSEWSTWGLCMPPCGPNPTRARQRLCTPLLPKYPPTVSMVEGQGEKNVTFWGRPLPRCEELQGQKLVVEEKRPCLHVPACKDPEEEEL

SEQ ID NO: 1218 - protein, 428 aa, Homo sapiens
MDPSVTLWQFLLQLLREQGNGHIISWTSRDGGEFKLVDAEEVARLWGLRKNKTNMNYDKLSRALRYYYDKNIIRKVSGQKFVYKFVSYPEVAGCSTEDCPPQPEVSVTSTMPNVAPAAIHAAPGDTVSGKPGTPKGAGMAGPGGLARSSRNEYMRSGLYSTFTIQSLQPQPPPHPRPAVVLPSAAPAGAAAPPSGSRSTSPSPLEACLEAEEAGLPLQVILTPPEAPNLKSEELNVEPGLGRALPPEVKVEGPKEELEVAGERGFVPETTKAEPEVPPQEGVPARLPAVVMDTAGQAGGHAASSPEISQPQKGRKPRDLELPLSPSLLGGPGPERTPGSGSGSGLQAPGPALTPSLLPTHTLTPVLLTPSSLPPSIHFWSTLSPIAPRSPAKLSFQFPSSGSAQVHIPSISVDGLSTPVVLSPGPQKP

SEQ ID NO: 1219 - protein, 492 aa, Homo sapiens
MASPSGKGARALEAPGCGPRPLARDLVDSVDDAEGLYVAVERCPLCNTTRRRLTCAKCVQSGDFVYFDGRDRERFIDKKERLSRLKSKQEEFQKEVLKAMEGKWITDQLRWKIMSCKMRIEQLKQTICKGNEEMEKNSEGLLKTKEKNQKLYSRAQRHQEKKEKIQRHNRKLGDLVEKKTIDLRSHYERLANLRRSHILELTSVIFPIEEVKTGVRDPADVSSESDSAMTSSTVSKLAEARRTTYLSGRWVCDDHNGDTSISITGPWISLPNNGDYSAYYSWVEEKKTTQGPDMEQSNPAYTISAALCYATQLVNILSHILDVNLPKKLCNSEFCGENLSKQKFTRAVKKLNANILYLCFSQHVNLDQLQPLHTLRNLMYLVSPSSEHLGRSGPFEVRADLEESMEFVDPGVAGESDESGDERVSDEETDLGTDWENLPSPRFCDIPSQSVEVSQSQSTQASPPIASSSAGGMISSAAASVTSWFKAYTGHR

SEQ ID NO: 1220 - protein, 354 aa, Homo sapiens
MESALAVPRLPPHDPGTPVLSVVDMHTGGEPLRIVLAGCPEVSGPTLLAKRRYMRQHLDHVRRRLMFEPRGHRDMYGAVLVPSELPDAHLGVLFLHNEGYSSMCGHAVLALGRFALDFGLVPAPPAGTREARVNIHCPCGLVTAFVACEDGRSHGPVRFHSVPAFVLATDLMVDVPGHGKVMVDIAYGGAFYAFVTAEKLGLDICSAKTRDLVDAASAVTEAVKAQFKINHPDSEDLAFLYGTILTDGKDAYTKEPTTNICVFADEQVDRSPTGSGVTARIALQYHKGLLELNQMRAFKSSATGSVFTGKAVREAKCGDFKAVIVEVSGQAHYTGTASFIIEDDDPLRDGFLLK

SEQ ID NO: 1221 - protein, 639 aa, Homo sapiens
MSARGPAIGIDLGTTYSCVGVFQHGKVEIIANDQGNRTTPSYVAFTDTERLIGDAAKNQVAMNPTNTIFDAKRLIGRKFEDATVQSDMKHWPFRVVSEGGKPKVQVEYKGETKTFFPEEISSMVLTKMKEIAEAYLGGKVHSAVITVPAYFNDSQRQATKDAGTITGLNVLRIINEPTAAAIAYGLDKKGCAGGEKNVLIFDLGGGTFDVSILTIEDGIFEVKSTAGDTHLGGEDFDNRMVSHLAEEFKRKHKKDIGPNKRAVRRLRTACERAKRTLSSSTQASIEIDSLYEGVDFYTSITRARFEELNADLFRGTLEPVEKALRDAKLDKGQIQEIVLVGGSTRIPKIQKLLQDFFNGKELNKSINPDEAVAYGAAVQAAILIGDKSENVQDLLLLDVTPLSLGIETAGGVMTPLIKRNTTIPTKQTQTFTTYSDNQSSVLVQVYEGERAMTKDNNLLGKFDLTGIPPAPRGVPQIEVTFDIDANGILNVTAADKSTGKENKITITNDKGRLSKDDIDRMVQEAERYKSEDEANRDRVAAKNALESYTYNIKQTVEDEKLRGKISEQDKNKILDKCQEVINWLDRNQMAEKDEYEHKQKELERVCNPIISKLYQGGPGGGSGGGGSGASGGPTIEEVD

SEQ ID NO: 1222 - protein, 441 aa, Homo sapiens
MSLRQRLAQLVGRLQDPQKVARFQRLCGVEAPPRRSADRREDEKAEAPLAGDPRLRGRQPGAPGGPQPPGSDRNQCPAKPDGGGAPNGVRNGLAAELGPASPRRAGALRRNSLTGEEGQLARVSNWPLYCLFCFGTELGNELFYILFFPFWIWNLDPLVGRRLVVIWVLVMYLGQCTKDIIRWPRPASPPVVKLEVFYNSEYSMPSTHAMSGTAIPISMVLLTYGRWQYPLIYGLILIPCWCSLVCLSRIYMGMHSILDIIAGFLYTILILAVFYPFVDLIDNFNQTHKYAPFIIIGLHLALGIFSFTLDTWSTSRGDTAEILGSGAGIACGSHVTYNMGLVLDPSLDTLPLAGPPITVTLFGKAILRILIGMVFVLIIRDVMKKITIPLACKIFNIPCDDIRKARQHMEVELPYRYITYGMVGFSITFFVPYIFFFIGIS

SEQ ID NO: 1223 - protein, 440 aa, Homo sapiens
MEYQILKMSLCLFILLFLTPGILCICPLQCICTERHRHVDCSGRNLSTLPSGLQENIIHLNLSYNHFTDLHNQLTQYTNLRTLDISNNRLESLPAHLPRSLWNMSAANNNIKLLDKSDTAYQWNLKYLDVSKNMLEKVVLIKNTLRSLEVLNLSSNKLWTVPTNMPSKLHIVDLSNNSLTQILPGTLINLTNLTHLYLHNNKFTFIPDQSFDQLFQLQEITLYNNRWSCDHKQNITYLLKWMMETKAHVIGTPCSTQISSLKEHNMYPTPSGFTSSLFTVSGMQTVDTINSLSVVTQPKVTKIPKQYRTKETTFGATLSKDTTFTSTDKAFVPYPEDTSTETINSHEAAAATLTIHLQDGMVTNTSLTSSTKSSPTPMTLSITSGMPNNFSEMPQQSTTLNLWREETTTNVKTPLPSVANAWKVNASFLLLLNVVVMLAV

SEQ ID NO: 1224 - protein, 592 aa, Homo sapiens
MEGKWLLCMLLVLGTAIVEAHDGHDDDVIDIEDDLDDVIEEVEDSKPDTTAPPSSPKVTYKAPVPTGEVYFADSFDRGTLSGWILSKAKKDDTDDEIAKYDGKWEVEEMKESKLPGDKGLVLMSRAKHHAISAKLNKPFLFDTKPLIVQYEVNFQNGIECGGAYVKLLSKTPELNLDQFHDKTPYTIMFGPDKCGEDYKLHFIFRHKNPKTGIYEEKHAKRPDADLKTYFTDKKTHLYTLILNPDNSFEILVDQSVVNSGNLLNDMTPPVNPSREIEDPEDRKPEDWDERPKIPDPEAVKPDDWDEDAPAKIPDEEATKPEGWLDDEPEYVPDPDAEKPEDWDEDMDGEWEAPQIANPRCESAPGCGVWQRPVIDNPNYKGKWKPPMIDNPSYQGIWKPRKIPNPDFFEDLEPFRMTPFSAIGLELWSMTSDIFFDNFIICADRRIVDDWANDGWGLKKAADGAAEPGVVGQMIEAAEERPWLWVVYILTVALPVFLVILFCCSGKKQTSGMEYKKTDAPQPDVKEEEEEKEEEKDKGDEEEEGEEKLEEKQKSDAEEDGGTVSQEEEDRKPKAEEDEILNRSPRNRKPRRE

SEQ ID NO: 1225 - protein, 195 aa, Homo sapiens
MGRARDAILDALENLTAEELKKFKLKLLSVPLREGYGRIPRGALLSMDALDLTDKLVSFYLETYGAELTANVLRDMGLQEMAGQLQAATHQGSGAAPAGIQAPPQSAAKPGLHFIDQHRAALIARVTNVEWLLDALYGKVLTDEQYQAVRAEPTNPSKMRKLFSFTPAWNWTCKDLLLQALRESQSYLVEDLERS

SEQ ID NO: 1226 - protein, 125 aa, Homo sapiens
MAVADLALIPDVDIDSDGVFKYVLIRVHSAPRSGAPAAESKEIVRGYKWAEYHADIYDKVSGDMQKQGCDCECLGGGRISHQSQDKKIHVYGYSMAYGPAQHAISTEKIKAKYPDYEVTWANDGY

SEQ ID NO: 1227 - protein, 501 aa, Homo sapiens
MAAASVTPPGSLELLQPGFSKTLLGTKLEAKYLCSACRNVLRRPFQAQCGHRYCSFCLASILSSGPQNCAACVHEGIYEEGISILESSSAFPDNAARREVESLPAVCPSDGCTWKGTLKEYESCHEGRCPLMLTECPACKGLVRLGEKERHLEHECPERSLSCRHCRAPCCGADVKAHHEVCPKFPLTCDGCGKKKIPREKFQDHVKTCGKCRVPCRFHAIGCLETVEGEKQQEHEVQWLREHLAMLLSSVLEAKPLLGDQSHAGSELLQRCESLEKKTATFENIVCVLNREVERVAMTAEACSRQHRLDQDKIEALSSKVQQLERSIGLKDLAMADLEQKVLEMEASTYDGVFIWKISDFARKRQEAVAGRIPAIFSPAFYTSRYGYKMCLRIYLNGDGTGRGTHLSLFFVVMKGPNDALLRWPFNQKVTLMLLDQNNREHVIDAFRPDVTSSSFQRPVNDMNIASGCPLFCPVSKMEAKNSYVRDDAIFIKAIVDLTGL

SEQ ID NO: 1228 - protein, 439 aa, Homo sapiens
MLTGVTDGIFCCLLGTPPNAVGPLESVESSDGYTFVEVKPGRVLRVKHAGPAPAAAPPPPSSASSDAAQGDLSGLVRCQRRITVYRNGRLLVENLGRAPRADLLHGQNGSGEPPAALEVELADPAGSDGRLAPGSAGSGSGSGSGGRRRRARRPKRTIHIDCEKRITSCKGAQADVVLFFIHGVGGSLAIWKEQLDFFVRLGYEVVAPDLAGHGASSAPQVAAAYTFYALAEDMRAIFKRYAKKRNVLIGHSYGVSFCTFLAHEYPDLVHKVIMINGGGPTALEPSFCSIFNMPTCVLHCLSPCLAWSFLKAGFARQGAKEKQLLKEGNAFNVSSFVLRAMMSGQYWPEGDEVYHAELTVPVLLVHGMHDKFVPVEEDQRMAEILLLAFLKLIDEGSHMVMLECPETVNTLLHEFLLWEPEPSPKALPEPLPAPPEDKK

SEQ ID NO: 1229 - protein, 227 aa, Homo sapiens
MFKRMAEFGPDSGGRVKGVTIVKPIVYGNVARYFGKKREEDGHTHQWTVYVKPYRNEDMSAYVKKIQFKLHESYGNPLRVVTKPPYEITETGWGEFEIIIKIFFIDPNERPVTLYHLLKLFQSDTNAMLGKKTVVSEFYDEMIFQDPTAMMQQLLTTSRQLTLGAYKHETEFAELEVKTREKLEAAKKKTSFEIAELKERLKASRETINCLKNEIRKLEEDDQAKDI

SEQ ID NO: 1230 - protein, 831 aa, Homo sapiens
MENQRSSPLSFPSVPQEETLRQAPAGLPRETLFQSRVLPPKEIPSLSPTIPRQGSLPQTSSAPKQETSGRMPHVLQKGPSLLCSAASEQETSLQGPLASQEGTQYPPPAAAEQEVSLLSHSPHHQEAPVHSPEAPEKDPLTLSPTVPETDMDPLLQSPVSQKDTPFQISSAVQKEQPLPTAEITRLAVWAAVQAVERKLEAQAMRLLTLEGRTGTNEKKIADCEKTAVEFANHLESKWVVLGTLLQEYGLLQRRLENMENLLKNRNFWILRLPPGSNGEVPKVPVTFDDVAVHFSEQEWGNLSEWQKELYKNVMRGNYESLVSMDYAISKPDLMSQMERGERPTMQEQEDSEEGETPTDPSAAHDGIVIKIEVQTNDEGSESLETPEPLMGQVEEHGFQDSELGDPCGEQPDLDMQEPENTLEESTEGSSEFSELKQMLVQQRNCTEGIVIKTEEQDEEEEEEEEDELPQHLQSLGQLSGRYEASMYQTPLPGEMSPEGEESPPPLQLGNPAVKRLAPSVHGERHLSENRGASSQQQRNRRGERPFTCMECGKSFRLKINLIIHQRNHIKEGPYECAECEISFRHKQQLTLHQRIHRVRGGCVSPERGPTFNPKHALKPRPKSPSSGSGGGGPKPYKCPECDSSFSHKSSLTKHQITHTGERPYTCPECKKSFRLHISLVIHQRVHAGKHEVSFICSLCGKSFSRPSHLLRHQRTHTGERPFKCPECEKSFSEKSKLTNHCRVHSRERPHACPECGKSFIRKHHLLEHRRIHTGERPYHCAECGKRFTQKHHLLEHQRAHTGERPYPCTHCAKCFRYKQSLKYHLRTHTGE

SEQ ID NO: 1231 - protein, 653 aa, Homo sapiens
MRPLRPRAALLALLASLLAAPPVAPAEAPHLVHVDAARALWPLRRFWRSTGFCPPLPHSQADQYVLSWDQQLNLAYVGAVPHRGIKQVRTHWLLELVTTRGSTGRGLSYNFTHLDGYLDLLRENQLLPGFELMGSASGHFTDFEDKQQVFEWKDLVSSLARRYIGRYGLAHVSKWNFETWNEPDHHDFDNVSMTMQGFLNYYDACSEGLRAASPALRLGGPGDSFHTPPRSPLSWGLLRHCHDGTNFFTGEAGVRLDYISLHRKGARSSISILEQEKVVAQQIRQLFPKFADTPIYNDEADPLVGWSLPQPWRADVTYAAMVVKVIAQHQNLLLANTTSAFPYALLSNDNAFLSYHPHPFAQRTLTARFQVNNTRPPHVQLLRKPVLTAMGLLALLDEEQLWAEVSQAGTVLDSNHTVGVLASAHRPQGPADAWRAAVLIYASDDTRAHPNRSVAVTLRLRGVPPGPGLVYVTRYLDNGLCSPDGEWRRLGRPVFPTAEQFRRMRAAEDPVAAAPRPLPAGGRLTLRPALRLPSLLLVHVCARPEKPPGQVTRLRALPLTQGQLVLVWSDEHVGSKCLWTYEIQFSQDGKAYTPVSRKPSTFNLFVFSPDTGAVSGSYRVRALDYWARPGPFSDPVPYLEVPVPRGPPSPGNP

SEQ ID NO: 1232 - protein, 163 aa, Homo sapiens
MADEEKLPPGWEKRMSRSSGRVYYFNHITNASQWERPSGNSSSGGKNGQGEPARVRCSHLLVKHSQSRRPSSWRQEKITRTKEEALELINGYIQKIKSGEEDFESLASQFSDCSSAKARGDLGAFSRGQMQKPFEDASFALRTGEMSGPVFTDSGIHIILRTE

SEQ ID NO: 1233 - protein, 150 aa, Homo sapiens
MLIATSFFLFFSSVVAAPTHSSFWQFQRRVKHITGRSAFFSYYGYGCYCGLGDKGIPVDDTDSPSSPSPYEKLKEFSCQPVLNSYQFHIVNGAVVCGCTLGPGASCHCRLKACECDKQSVHCFKESLPTYEKNFKQFSSQPRCGRHKPWC

SEQ ID NO: 1234 - protein, 524 aa, Homo sapiens
MPQLSLSWLGLGPVAASPWLLLLLVGGSWLLARVLAWTYTFYDNCRRLQCFPQPPKQNWFWGHQGLVTPTEEGMKTLTQLVTTYPQGFKLWLGPTFPLLILCHPDIIRPITSASAAVAPKDMIFYGFLKPWLGDGLLLSGGDKWSRHRRMLTPAFHFNILKPYMKIFNKSVNIMHDKWQRLASEGSARLDMFEHISLMTLDSLQKCVFSFESNCQEKPSEYIAAILELSAFVEKRNQQILLHTDFLYYLTPDGQRFRRACHLVHDFTDAVIQERRCTLPTQGIDDFLKNKAKSKTLDFIDVLLLSKDEDGKELSDEDIRAEADTFMFEGHDTTASGLSWVLYHLAKHPEYQEQCRQEVQELLKDREPIEIEWDDLAQLPFLTMCIKESLRLHPPVPVISRCCTQDFVLPDGRVIPKGIVCLINIIGIHYNPTVWPDPEVYDPFRFDQENIKERSPLAFIPFSAGPRNCIGQAFAMAEMKVVLALTLLHFRILPTHTEPRRKPELILRAEGGLWLRVEPLGANSQ

SEQ ID NO: 1235 - protein, 1130 aa, Homo sapiens
MAHAGGGSGGSGAGGPAGRGLSGARWGRSGSAGHEKLPVHVEDALTYLDQVKIRFGSDPATYNGFLEIMKEFKSQSIDTPGVIRRVSQLFHEHPDLIVGFNAFLPLGYRIDIPKNGKLNIQSPLTSQENSHNHGDGAEDFKQQVPYKEDKPQVPLESDSVEFNNAISYVNKIKTRFLDHPEIYRSFLEILHTYQKEQLNTRGRPFRGMSEEEVFTEVANLFRGQEDLLSEFGQFLPEAKRSLFTGNGPCEMHSVQKNEHDKTPEHSRKRSRPSLLRPVSAPAKKKMKLRGTKDLSIAAVGKYGTLQEFSFFDKVRRVLKSQEVYENFLRCIALFNQELVSGSELLQLVSPFLGKFPELFAQFKSFLGVKELSFAPPMSDRSGDGISREIDYASCKRIGSSYRALPKTYQQPKCSGRTAICKEVLNDTWVSFPSWSEDSTFVSSKKTPYEEQLHRCEDERFELDVVLETNLATIRVLESVQKKLSRMAPEDQEKFRLDDSLGGTSEVIQRRAIYRIYGDKAPEIIESLKKNPVTAVPVVLKRLKAKEEEWREAQQGFNKIWREQYEKAYLKSLDHQAVNFKQNDTKALRSKSLLNEIESVYDEHQEQHSEGRSAPSSEPHLIFVYEDRQILEDAAALISYYVKRQPAIQKEDQGTIHQLLHQFVPSLFFSQQLDLGASEESADEDRDSPQGQTTDPSERKKPAPGPHSSPPEEKGAFGDAPATEQPPLPPPAPHKPLDDVYSLFFANNNWYFFLRLHQTLCSRLLKIYRQAQKQLLEYRTEKEREKLLCEGRREKGSDPAMELRLKQPSEVELEEYYPAFLDMVRSLLEGSIDPTQYEDTLREMFTIHAYVGFTMDKLVQNIARQLHHLVSDDVCLKVVELYLNEKKRGAAGGNLSSRCVRAARETSYQWKAERCMADENCFKVMFLQRKGQVIMTIELLDTEEAQTEDPVEVQHLARYVEQYVGTEGASSSPTEGFLLKPVFLQRNLKKFRRRWQSEQARALRGEARSSWKRLVGVESACDVDCRFKLSTHKMVFIVNSEDYMYRRGTLCRAKQVQPLVLLRHHQHFEEWHSRWLEDNVTVEAASLVQDWLMGEEDEDMVPCKTLCETVHVHGLPVTRYRVQYSRRPASP

SEQ ID NO: 1236 - protein, 864 aa, Homo sapiens
MAAPLIPLSQQIPTGNSLYESYYKQVDPAYTGRVGASEAALFLKKSGLSDIILGKIWDLADPEGKGFLDKQGFYVALRLVACAQSGHEVTLSNLNLSMPPPKFHDTSSPLMVTPPSAEAHWAVRVEEKAKFDGIFESLLPINGLLSGDKVKPVLMNSKLPLDVLGRVWDLSDIDKDGHLDRDEFAVAMHLVYRALEKEPVPSALPPSLIPPSKRKKTVFPGAVPVLPASPPPKDSLRSTPSHGSVSSLNSTGSLSPKHSLKQTQPTVNWVVPVADKMRFDEIFLKTDLDLDGYVSGQEVKEIFMHSGLTQNLLAHIWALADTRQTGKLSKDQFALAMYFIQQKVSKGIDPPQVLSPDMVPPSERGTPGPDSSGSLGSGEFTGVKELDDISQEIAQLQREKYSLEQDIREKEEAIRQKTSEVQELQNDLDRETSSLQELEAQKQDAQDRLDEMDQQKAKLRDMLSDVRQKCQDETQMISSLKTQIQSQESDLKSQEDDLNRAKSELNRLQQEETQLEQSIQAGRVQLETIIKSLKSTQDEINQARSKLSQLHESRQEAHRSLEQYDQVLDGAHGASLTDLANLSEGVSLAERGSFGAMDDPFKNKALLFSNNTQELHPDPFQTEDPFKSDPFKGADPFKGDPFQNDPFAEQQTTSTDPFGGDPFKESDPFRGSATDDFFKKQTKNDPFTSDPFTKNPSLPSKLDPFESSDPFSSSSVSSKGSDPFGTLDPFGSGSFNSAEGFADFSQMSKPPPSGPFTSSLGGAGFSDDPFKSKQDTPALPPKKPAPPRPKPPSGKSTPVSQLGSADFPEAPDPFQPLGADSGDPFQSKKGFGDPFSGKDPFVPSSAAKPSKASASGFADFTSVS

SEQ ID NO: 1237 - protein, 355 aa, Homo sapiens
MALSEPILPSFSTFASPCRERGLQERWPRAEPESGGTDDDLNSVLDFILSMGLDGLGAEAAPEPPPPPPPPAFYYPEPGAPPPYSAPAGGLVSELLRPELDAPLGPALHGRFLLAPPGRLVKAEPPEADGGGGYGCAPGLTRGPRGLKREGAPGPAASCMRGPGGRPPPPPDTPPLSPDGPARLPAPGPRASFPPPFGGPGFGAPGPGLHYAPPAPPAFGLFDDAAAAAAALGLAPPAARGLLTPPASPLELLEAKPKRGRRSWPRKRTATHTCSYAGCGKTYTKSSHLKAHLRTHTGEKPYHCNWDGCGWKFARSDELTRHYRKHTGHRPFQCHLCDRAFSRSDHLALHMKRHM

SEQ ID NO: 1238 - protein, 385 aa, Homo sapiens
MWGRLLLWPLVLGFSLSGGTQTPSVYDESGSTGGGDDSTPSILPAPRGYPGQVCANDSDTLELPDSSRALLLGWVPTRLVPALYGLVLVVGLPANGLALWVLATQAPRLPSTMLLMNLAAADLLLALALPPRIAYHLRGQRWPFGEAACRLATAALYGHMYGSVLLLAAVSLDRYLALVHPLRARALRGRRLALGLCMAAWLMAAALALPLTLQRQTFRLARSDRVLCHDALPLDAQASHWQPAFTCLALLGCFLPLLAMLLCYGATLHTLAASGRRYGHALRLTAVVLASAVAFFVPSNLLLLLHYSDPSPSAWGNLYGAYVPSLALSTLNSCVDPFIYYYVSAEFRDKVRAGLFQRSPGDTVASKASAEGGSRGMGTHSSLLQ

SEQ ID NO: 1239 - protein, 138 aa, Homo sapiens
MILQQPLQRGPQGGAQRLPRAALGVTWGLDASSPLRGAVPMSTKRRLEEEQEPLRKQFLSEENMATHFSQLSLHNDHPYCSPPMTFSPALPPLRSPCSELLLWRYPGSLIPEALRLLRLGDTPSPPYPATPAGDIMEL

SEQ ID NO: 1240 - protein, 190 aa, Homo sapiens
MFQVPDSEGGRAGSRAMKPPGGESSNLFGSPEEATPSSRPNRMASNIFGPTEEPQNIPKRTNPPGGKGSGIFDESTPVQTRQHLNPPGGKTSDIFGSPVTATSRLAHPNKPKDHVFLCEGEEPKSDLKAARSIPAGAEPGEKGSARKAGPAKEQEPMPTVDSHEPRLGPRPRSHNKVLNPPGGKSSISFY

SEQ ID NO: 1241 - protein, 205 aa, Homo sapiens
MAAPGERGRFHGGNLFFLPGGARSEMMDDLATDARGRGAGRRDAAASASTPAQAPTSDSPVAEDASRRRPCRACVDFKTWMRTQQKRDTKFREDCPPDREELGRHSWAVLHTLAAYYPDLPTPEQQQDMAQFIHLFSKFYPCEECAEDLRKRLCRNHPDTRTRACFTQWLCHLHNEVNRKLGKPDFDCSKVDERWRDGWKDGSCD

SEQ ID NO: 1242 - protein, 281 aa, Homo sapiens
MGSQGSPVKSYDYLLKFLLVGDSDVGKGEILESLQDGAAESPYAYSNGIDYKTTTILLDGRRVKLELWDTSGQGRFCTIFRSYSRGAQGILLVYDITNRWSFDGIDRWIKEIDEHAPGVPRILVGNRLHLAFKRQVPTEQARAYAEKNCMTFFEVSPLCNFNVIESFTELSRIVLMRHGMEKIWRPNRVFSLQDLCCRAIVSCTPVHLIDKLPLPVTIKSHLKSFSMANGMNAVMMHGRSYSLASGAGGGGSKGNSLKRSKSIRPPQSPPQNCSRSNCKIS

SEQ ID NO: 1243 - protein, 603 aa, Homo sapiens
MAASCPLPVTPDLPTLRAKLQGLLQFLRDALSISNAHTVDFYTESVWEELVDLPPETVLAALRKSASETEALPSETRPLVEAEWEAGMTDFPKIFCETSQKLVSVEAFALAAKYYSVQNLGICTPFEQLLVALRGNQNQRIGENQKAVEFMNMKKSHEVQAMSELISSIADYYGIKQVIDLGSGKGYLSSFLSLKYGLKVYGIDSSNTNTHGAEERNRKLKKHWKLCHAQSRLDVNGLALKMAKERKVQNKVKNKADTEEVFNNSPTNQEKMPTSAILPDFSGSVISNIRNQMETLHSQPHQEENLCFENSFSLINLLPINAVEPTSSQQIPNRETSEANKERRKMTSKSSESNIYSPLTSFITADSELHDIIKDLEDCLMVGLHTCGDLAPNTLRIFTSNSEIKGVCSVGCCYHLLSEEFENQHKERTQEKWGFPMCHYLKEERWCCGRNARMSACLALERVAAGQGLPTESLFYRAVLQDIIKDCYGITKCDRHVGKIYSKCSSFLDYVRRSLKKLGLDESKLPEKIIMNYYEKYKPRMNELEAFNMLKVVLAPCIETLILLDRLCYLKEQEDIAWSALVKLFDPVKSPRCYAVIALKKQQ

SEQ ID NO: 1244 - protein, 218 aa, Homo sapiens
MAMFEQMRANVGKLLKGIDRYNPENLATLERYVETQAKENAYDLEANLAVLKLYQFNPAFFQTTVTAQILLKALTNLPHTDFTLCKCMIDQAHQEERPIRQILYLGDLLETCHFQAFWQALDENMDLLEGITGFEDSVRKFICHVVGITYQHIDRWLLAEMLGDLSDSQLKVWMSKYGWSADESGQIFICSQEESIKPKNIVEKIDFDSVSSIMASSQ

SEQ ID NO: 1245 - protein, 110 aa, Homo sapiens
MAAVVAKREGPPFISEAAVRGNAAVLDYCRTSVSALSGATAGILGLTGLYGFIFYLLASVLLSLLLILKAGRRWNKYFKSRRPLFTGGLIGGLFTYVLFWTFLYGMVHVY

SEQ ID NO: 1246 - protein, 434 aa, Homo sapiens
MESESESGAAADTPPLETLSFHGDEEIIEVVELDPGPPDPDDLAQEMEDVDFEEEEEEEGNEEGWVLEPQEGVVGSMEGPDDSEVTFALHSASVFCVSLDPKTNTLAVTGGEDDKAFVWRLSDGELLFECAGHKDSVTCAGFSHDSTLVATGDMSGLLKVWQVDTKEEVWSFEAGDLEWMEWHPRAPVLLAGTADGNTWMWKVPNGDCKTFQGPNCPATCGRVLPDGKRAVVGYEDGTIRIWDLKQGSPIHVLKGTEGHQGPLTCVAANQDGSLILTGSVDCQAKLVSATTGKVVGVFRPETVASQPSLGEGEESESNSVESLGFCSVMPLAAVGYLDGTLAIYDLATQTLRHQCQHQSGIVQLLWEAGTAVVYTCSLDGIVRLWDARTGRLLTDYRGHTAEILDFALSKDASLVVTTSGDHKAKVFCVQRPDR

SEQ ID NO: 1247 - protein, 417 aa, Homo sapiens
MALKVLLEQEKTFFTLLVLLGYLSCKVTCESGDCRQQEFRDRSGNCVPCNQCGPGMELSKECGFGYGEDAQCVTCRLHRFKEDWGFQKCKPCLDCAVVNRFQKANCSATSDAICGDCLPGFYRKTKLVGFQDMECVPCGDPPPPYEPHCASKVNLVKIASTASSPRDTALAAVICSALATVLLALLILCVIYCKRQFMEKKPSWSLRSQDIQYNGSELSCFDRPQLHEYAHRACCQCRRDSVQTCGPVRLLPSMCCEEACSPNPATLGCGVHSAASLQARNAGPAGEMVPTFFGSLTQSICGEFSDAWPLMQNPMGGDNISFCDSYPELTGEDIHSLNPELESSTSLDSNSSQDLVGGAVPVQSHSENFTAATDLSRYNNTLVESASTQDALTMRSQLDQESGAVIHPATQTSLQEA

SEQ ID NO: 1248 - protein, 205 aa, Homo sapiens
MTERRVPFSLLRGPSWDPFRDWYPHSRLFDQAFGLPRLPEEWSQWLGGSSWPGYVRPLPPAAIESPAVAAPAYSRALSRQLSSGVSEIRHTADRWRVSLDVNHFAPDELTVKTKDGVVEITGKHEERQDEHGYISRCFTRKYTLPPGVDPTQVSSSLSPEGTLTVEAPMPKLATQSNEITIPVTFESRAQLGGPEAAKSDETAAK

SEQ ID NO: 1249 - protein, 73 aa, Homo sapiens
MPALHIEDLPEKEKLKMEVEQLRKEVKLQRQQVSKCSEEIKNYIEERSGEDPLVKGIPEDKNPFKEKGSCVIS

SEQ ID NO: 1250 - protein, 780 aa, Homo sapiens
MEQVEILRKFIQRVQAMKSPDHNGEDNFARDFMRLRRLSTKYRTEKIYPTATGEKEENVKKNRYKDILPFDHSRVKLTLKTPSQDSDYINANFIKGVYGPKAYVATQGPLANTVIDFWRMIWEYNVVIIVMACREFEMGRKKCERYWPLYGEDPITFAPFKISCEDEQARTDYFIRTLLLEFQNESRRLYQFHYVNWPDHDVPSSFDSILDMISLMRKYQEHEDVPICIHCSAGCGRTGAICAIDYTWNLLKAGKIPEEFNVFNLIQEMRTQRHSAVQTKEQYELVHRAIAQLFEKQLQLYEIHGAQKIADGVNEINTENMVSSIEPEKQDSPPPKPPRTRSCLVEGDAKEEILQPPEPHPVPPILTPSPPSAFPTVTTVWQDNDRYHPKPVLHMVSSEQHSADLNRNYSKSTELPGKNESTIEQIDKKLERNLSFEIKKVPLQEGPKSFDGNTLLNRGHAIKIKSASPCIADKISKPQELSSDLNVGDTSQNSCVDCSVTQSNKVSVTPPEESQNSDTPPRPDRLPLDEKGHVTWSFHGPENAIPIPDLSEGNSSDINYQTRKTVSLTPSPTTQVETPDLVDHDNTSPLFRTPLSFTNPLHSDDSDSDERNSDGAVTQNKTNISTASATVSAATSTESISTRKVLPMSIARHNIAGTTHSGAEKDVDVSEDSPPPLPERTPESFVLASEHNTPVRSEWSELQSQERSEQKKSEGLITSENEKCDHPAGGIHYEMCIECPPTFSDKREQISENPTEATDIGFGNRCGKPKGPRDPPSEWT

SEQ ID NO: 1251 - protein, 439 aa, Homo sapiens
MKLANWYWLSSAVLATYGFLVVANNETEEIKDERAKDVCPVRLESRGKCEEAGECPYQVSLPPLTIQLPKQFSRIEEVFKEVQNLKEIVNSLKKSCQDCKLQADDNGDPGRNGLLLPSTGAPGEVGDNRVRELESEVNKLSSELKNAKEEINVLHGRLEKLNLVNMNNIENYVDSKVANLTFVVNSLDGKCSKCPSQEQIQSRPVQHLIYKDCSDYYAIGKRSSETYRVTPDPKNSSFEVYCDMETMGGGWTVLQARLDGSTNFTRTWQDYKAGFGNLRREFWLGNDKIHLLTKSKEMILRIDLEDFNGVELYALYDQFYVANEFLKYRLHVGNYNGTAGDALRFNKHYNHDLKFFTTPDKDNDRYPSGNCGLYYSSGWWFDACLSANLNGKYYHQKYRGVRNGIFWGTWPGVSEAHPGGYKSSFKEAKMMIRPKHFKP

SEQ ID NO: 1252 - protein, 313 aa, Homo sapiens
MPGLLLCEPTELYNILNQATKLSRLTDPNYLCLLDVRSKWEYDESHVITALRVKKKNNEYLLPESVDLECVKYCVVYDNNSSTLEILLKDDDDDSDSDGDGKDLVPQAAIEYGRILTRLTHHPVYILKGGYERFSGTYHFLRTQKIIWMPQELDAFQPYPIEIVPGKVFVGNFSQACDPKIQKDLKIKAHVNVSMDTGPFFAGDADKLLHIRIEDSPEAQILPFLRHMCHFIEIHHHLGSVILIFSTQGISRSCAAIIAYLMHSNEQTLQRSWAYVKKCKNNMCPNRGLVSQLLEWEKTILGDSITNIMDPLY

SEQ ID NO: 1253 - protein, 771 aa, Homo sapiens
MAPGPFSSALLSPPPAALPFLLLLWAGASRGQPCPGRCICQNVAPTLTMLCAKTGLLFVPPAIDRRVVELRLTDNFIAAVRRRDFANMTSLVHLTLSRNTIGQVAAGAFADLRALRALHLDSNRLAEVRGDQLRGLGNLRHLILGNNQIRRVESAAFDAFLSTVEDLDLSYNNLEALPWEAVGQMVNLNTLTLDHNLIDHIAEGTFVQLHKLVRLDMTSNRLHKLPPDGLFLRSQGTGPKPPTPLTVSFGGNPLHCNCELLWLRRLTREDDLETCATPEHLTDRYFWSIPEEEFLCEPPLITRQAGGRALVVEGQAVSLRCRAVGDPEPVVHWVAPDGRLLGNSSRTRVRGDGTLDVTITTLRDSGTFTCIASNAAGEATAPVEVCVVPLPLMAPPPAAPPPLTEPGSSDIATPGRPGANDSAAERRLVAAELTSNSVLIRWPAQRPVPGIRMYQVQYNSSVDDSLVYRMIPSTSQTFLVNDLAAGRAYDLCVLAVYDDGATALPATRVVGCVQFTTAGDPAPCRPLRAHFLGGTMIIAIGGVIVASVLVFIVLLMIRYKVYGDGDSRRVKGSRSLPRVSHVCSQTNGAGTGAAQAPALPAQDHYEALREVESQAAPAVAVEAKAMEAETASAEPEVVLGRSLGGSATSLCLLPSEETSGEESRAAVGPRRSRSGALEPPTSAPPTLALVPGGAAARPRPQQRYSFDGDYGALFQSHSYPRRARRTKRHRSTPHLDGAGGGAAGEDGDLGLGSARACLAFTSTEWMLESTV

SEQ ID NO: 1254 - protein, 84 aa, Homo sapiens
MALSVLRLALLLLAVTFAASLIPQFGLFSKYRTPNCSQYRLPGCPRHFNPVCGSDMSTYANECTLCMKIREGGHNIKIIRNGPC

SEQ ID NO: 1255 - protein, 248 aa, Homo sapiens
MRLIQNMCTIAEYPAPGNAAASDCCVGAAGRRLVKIAVVGASGVGKTALVVRFLTKRFIGDYERNAGNLYTRQVQIEGETLALQVQDTPGIQVHENSLSCSEQLNRCIRWADAVVIVFSITDYKSYELISQLHQHVQQLHLGTRLPVVVVANKADLLHIKQVDPQLGLQLASMLGCSFYEVSVSENYNDVYSAFHVLCKEVSHKQQPSSTPEKRRTSLIPRPKSPNMQDLKRRFKQALSAKVRTVTSV

SEQ ID NO: 1256 - protein, 1819 aa, Homo sapiens
MASITQLFDDLCEALLPAAKTHLGQRSVNRKRAKRSLKKVAYNALFTNLFQDETQQLQPDMSKLPARNKILMLSFDLRVGGLGPKADRLEELVEELEAAPCCPLLEVGSVLDLLVQLAGSGPPQVLPRKRDYFLNNKHVGRNVPYSGYDCDDLSVFEMDVQSLISREECLCHSMIQETLQVMEAAPGTGLPTVGLFSFGDPCGDRFERDTRVSLFGALVHSRTYDMDVRLGLPPVPDNADLSGLAIKVPPSVDQWEDEGFQSASNLTPDSQSEPSVTPDVDLWEAALTYEASKRRCWERVGCPPGHREEPYLTEAGRDAFDKFCRLHQGELQLLAGGVLQAPQPVLVKECELVKDVLNVLIGVVSATFSLCQPAQAFVVKRGVHVSGASPESISSLLSEVAEYGTCYTRLSHFSLQPVLDSLYSKGLVFQAFTSGLRRYLQYYRACVLSTPPTLSLLTIGFLFKKLGRQLRYLAELCGVGAVLPGTCGGGPRAAFPTGVKLLSYLYQEALHNCSNEHYPVLLSLLKTSCEPYTRFIHDWVYSGVFRDAYGEFMIQVNHEYLSFRDKLYWTHGYVLISKEVEDCVPVFLKHIAHDIYVCGKTINLLKLCCPRHYLCWSDVPVPRISVIFSLEELKEIEKDCAVYVGRMERVARHSSVSKEEKELRMEIAKQELIAHAREAASRVLSALSDRQMSERMALDARKREQFQRLKEQFVKDQERRQAARQEELDDDFSYARELRDRERRLKSLEEELERKARQALVDHYSKLSAEAARREQKALWRIQRHRLESARLRFLLEDEKHIQEMLKAVSEAHQPQEPPDVLLSVHPQVTSPGPEHPEGGQGCDSGSAEQHSPAWDGWNRPGLLTPQPLKPLAVGAGGRGLQQAEGARPFSDSLSIGDFLPVGPGAEPSVQTGMVPLLEVALQTINLDLPPSAPGEAPAAASTQPSRPQEYDFSTVLRPAVATSPAPGPLQAAECSLGSSGLQLWEDSCGKMDACGSASRETLLPSHPPRRAALEEGSSQPTERLFGQVSGGGLPTGDYASEIAPTRPRWNTHGHVSDASIRVGENVSDVAPTQPRWNTHGHVSNASISLGESVSDVAPTRPRWNIHGHVSNASIRVGENVSDVAPTRPRWNTHGHVSNASIRVGENVSDVAPTRPRWNTHGHVSDASISLGESVSDMAPARPRWNTHGHVSDASISLGESVSDMAPTRPRWNTHGHVSDTSIRVGENVSDVAPIRSRCNTHGHVSDASISLGEPVSDVVSTRPRWNTHVPIPPPHMVLGALSPEAEPNTPRPQQSPPGHTSQSALSLGAQSTVLDCGPRLPVEVGPSLSSPSSGCGEGSISVGENVSDVAPTQPWWPNTPGDSVSEELGPGRSGDTEDLSPNWPLNSQEDTAAQSSPGRGEEAEASAAEAQGGEQAYLAGLAGQYHLERYPDSYESMSEPPIAHLLRPVLPRAFAFPVDPQVQSAADETAVQLSELLTLPVLMKRSITAPLAAHISLVNKAAVDYFFVELHLEAHYEALRHFLLMEDGEFAQSLSDLLFEKLGAGQTPGELLNPLVLNSVLSKALQCSLHGDTPHASNLSLALKYLPEVFAPNAPDVLSCLELRYKVDWPLNIVITEGCVSKYSGVFSFLLQLKLMMWALKDVCFHLKRTALLSHMAGSVQFRQLQLFKHEMQHFVKVIQGYIANQILHVTWCEFRARLATVGDLEEIQRAHAEYLHKAVFRGLLTEKAAPVMNVIHSIFSLVLKFRSQLISQAWGPPGGPRGAEHPNFALMQQSYNTFKYYSHFLFKVVTKLVNRGYQPHLEDFLLRINFNNYYQDA

SEQ ID NO: 1257 - protein, 220 aa, Homo sapiens
MERYAAALEEVADGARQQERHYQLLSALQSLVKELPSSFQQRLSYTTLSDLALALLDGTVFEIVQGLLEIQHLTEKSLYNQRLRLQNEHRVLRQALRQKHQEAQQACRPHNLPVVQAAQQRELEAVEHRIREEQRAMDQKIILELDRKVADQQSTLEKAGVAGFYVTTNPQELMLQMNLLELIRKLQQRGCRAGNAALGLGGPWQSPAAQCDQKGSPVPP

SEQ ID NO: 1258 - protein, 419 aa, Homo sapiens
MWPGNAWRAALFWVPRGRRAQSALAQLRGILEGELEGIRGAGTWKSERVITSRQGPHIRVDGVSGGILNFCANNYLGLSSHPEVIQAGLQALEEFGAGLSSVRFICGTQSIHKNLEAKIARFHQREDAILYPSCYDANAGLFEALLTPEDAVLSDELNHASIIDGIRLCKAHKYRYRHLDMADLEAKLQEAQKHRLRLVATDGAFSMDGDIAPLQEICCLASRYGALVFMDECHATGFLGPTGRGTDELLGVMDQVTIINSTLGKALGGASGGYTTGPGPLVSLLRQRARPYLFSNSLPPAVVGCASKALDLLMGSNTIVQSMAAKTQRFRSKMEAAGFTISGASHPICPVMLGDARLASRMADDMLKRGIFVIGFSYPVVPKGKARIRVQISAVHSEEDIDRCVEAFVEVGRLHGALP

SEQ ID NO: 1259 - protein, 749 aa, Homo sapiens
MSGSHTPACGPFSALTPSIWPQEILAKYTQKEESAEQPEFYYDEFGFRVYKEEGDEPGSSLLANSPLMEDAPQRLRWQAHLEFTHNHDVGDLTWDKIAVSLPRSEKLRSLVLAGIPHGMRPQLWMRLSGALQKKRNSELSYREIVKNSSNDETIAAKQIEKDLLRTMPSNACFASMGSIGVPRLRRVLRALAWLYPEIGYCQGTGMVAACLLLFLEEEDAFWMMSAIIEDLLPASYFSTTLLGVQTDQRVLRHLIVQYLPRLDKLLQEHDIELSLITLHWFLTAFASVVDIKLLLRIWDLFFYEGSRVLFQLTLGMLHLKEEELIQSENSASIFNTLSDIPSQMEDAELLLGVAMRLAGSLTDVAVETQRRKHLAYLIADQGQLLGAGTLTNLSQVVRRRTQRRKSTITALLFGEDDLEALKAKNIKQTELVADLREAILRVARHFQCTDPKNCSVELTPDYSMESHQRDHENYVACSRSHRRRAKALLDFERHDDDELGFRKNDIITIVSQKDEHCWVGELNGLRGWFPAKFVEVLDERSKEYSIAGDDSVTEGVTDLVRGTLCPALKALFEHGLKKPSLLGGACHPWLFIEEAAGREVERDFASVYSRLVLCKTFRLDEDGKVLTPEELLYRAVQSVNVTHDAVHAQMDVKLRSLICVGLNEQVLHLWLEVLCSSLPTVEKWYQPWSFLRSPGWVQIKCELRVLCCFAFSLSQDWELPAKREAQQPLKEGVRDMLVKHHLFSWDVDG

SEQ ID NO: 1260 - protein, 1024 aa, Homo sapiens
MPAARPPAAGLRGISLFLALLLGSPAAALERDALPEGDASPLGPYLLPSGAPERGSPGKEHPEERVVTAPPSSSQSAEVLGELVLDGTAPSAHHDIPALSPLLPEEARPKHALPPKKKLPSLKQVNSARKQLRPKATSAATVQRAGSQPASQGLDLLSSSTEKPGPPGDPDPIVASEEASEVPLWLDRKESAVPTTPAPLQISPFTSQPYVAHTLPQRPEPGEPGPDMAQEAPQEDTSPMALMDKGENELTGSASEESQETTTSTIITTTVITTEQAPALCSVSFSNPEGYIDSSDYPLLPLNNFLECTYNVTVYTGYGVELQVKSVNLSDGELLSIRGVDGPTLTVLANQTLLVEGQVIRSPTNTISVYFRTFQDDGLGTFQLHYQAFMLSCNFPRRPDSGDVTVMDLHSGGVAHFHCHLGYELQGAKMLTCINASKPHWSSQEPICSAPCGGAVHNATIGRVLSPSYPENTNGSQFCIWTIEAPEGQKLHLHFERLLLHDKDRMTVHSGQTNKSALLYDSLQTESVPFEGLLSEGNTIRIEFTSDQARAASTFNIRFEAFEKGHCYEPYIQNGNFTTSDPTYNIGTIVEFTCDPGHSLEQGPAIIECINVRDPYWNDTEPLCRAMCGGELSAVAGVVLSPNWPEPYVEGEDCIWKIHVGEEKRIFLDIQFLNLSNSDILTIYDGDEVMPHILGQYLGNSGPQKLYSSTPDLTIQFHSDPAGLIFGKGQGFIMNYIEVSRNDSCSDLPEIQNGWKTTSHTELVRGARITYQCDPGYDIVGSDTLTCQWDLSWSSDPPFCEKIMYCTDPGEVDHSTRLISDPVLLVGTTIQYTCNPGFVLEGSSLLTCYSRETGTPIWTSRLPHCVSEESLACDNPGLPENGYQILYKRLYLPGESLTFMCYEGFELMGEVTIRCILGQPSHWNGPLPVCKVNQDSFEHALEVAEAAAETSLEGGNMALAIFIPVLIISLLLGGAYIYITRCRYYSNLRLPLMYSHPYSQITVETEFDNPIYETGETREYEVSI

SEQ ID NO: 1261 - protein, 123 aa, Homo sapiens
MACRCLSFLLMGTFLSVSQTVLAQLDALLVFPGQVAQLSCTLSPQHVTIRDYGVSWYQQRAGSAPRYLLYYRSEEDHHRPADIPDRFSAAKDEAHNACVLTISPVQPEDDADYYCSVGYGFSP

SEQ ID NO: 1262 - protein, 221 aa, Homo sapiens
MWSAGRGGAAWPVLLGLLLALLVPGGGAAKTGAELVTCGSVLKLLNTHHRVRLHSHDIKYGSGSGQQSVTGVEASDDANSYWRIRGGSEGGCPRGSPVRCGQAVRLTHVLTGKNLHTHHFPSPLSNNQEVSAFGEDGEGDDLDLWTVRCSGQHWEREAAVRFQHVGTSVFLSVTGEQYGSPIRGQHEVHGMPSANTHNTWKAMEGIFIKPSVEPSAGHDEL

SEQ ID NO: 1263 - protein, 246 aa, Homo sapiens
MGDREQLLQRARLAEQAERYDDMASAMKAVTELNEPLSNEDRNLLSVAYKNVVGARRSSWRVISSIEQKTMADGNEKKLEKVKAYREKIEKELETVCNDVLSLLDKFLIKNCNDFQYESKVFYLKMKGDYYRYLAEVASGEKKNSVVEASEAAYKEAFEISKEQMQPTHPIRLGLALNFSVFYYEIQNAPEQACLLAKQAFDDAIAELDTLNEDSYKDSTLIMQLLRDNLTLWTSDQQDEEAGEGN

SEQ ID NO: 1264 - protein, 353 aa, Homo sapiens
MSKPPDLLLRLLRGAPRQRVCTLFIIGFKFTFFVSIMIYWHVVGEPKEKGQLYNLPAEIPCPTLTPPTPPSHGPTPGNIFFLETSDRTNPNFLFMCSVESAARTHPESHVLVLMKGLPGGNASLPRHLGISLLSCFPNVQMLPLDLRELFRDTPLADWYAAVQGRWEPYLLPVLSDASRIALMWKFGGIYLDTDFIVLKNLRNLTNVLGTQSRYVLNGAFLAFERRHEFMALCMRDFVDHYNGWIWGHQGPQLLTRVFKKWCSIRSLAESRACRGVTTLPPEAFYPIPWQDWKKYFEDINPEELPRLLSATYAVHVWNKKSQGTRFEATSRALLAQLHARYCPTTHEAMKMYL

SEQ ID NO: 1265 - protein, 391 aa, Homo sapiens
MPGPQGGRGAATMSLGKLSPVGWVSSSQGKRRLTADMISHPLGDFRHTMHVGRGGDVFGDTSFLSNHGGSSGSTHRSPRSFLAKKLQLVRRVGAPPRRMASPPAPSPAPPAISPIIKNAISLPQLNQAAYDSLVVGKLSFDSSPTSSTDGHSSYGLDSGFCTISRLPRSEKPHDRDRDGSFPSEPGLRRSDSLLSFRLDLDLGPSLLSELLGVMSLPEAPAAETPAPAANPPAPTANPTGPAANPPATTANPPAPAANPSAPAATPTGPAANPPAPAASSTPHGHCPNGVTAGLGPVAEVKSSPVGGGPRGPAGPALGRHWGAGWDGGHHYPEMDARQERVEVLPQARASWESLDEEWRAPQAGSRTPVPSTVQANTFEFADAEEDDEVKV

SEQ ID NO: 1266 - protein, 297 aa, Homo sapiens
MVHQVLYRALVSTKWLAESIRTGKLGPGLRVLDASWYSPGTREARKEYLERHVPGASFFDIEECRDTASPYEMMLPSEAGFAEYVGRLGISNHTHVVVYDGEHLGSFYAPRVWWMFRVFGHRTVSVLNGGFRNWLKEGHPVTSEPSRPEPAVFKATLDRSLLKTYEQVLENLESKRFQLVDSRSQGRFLGTEPEPDAVGLDSGHIRGAVNMPFMDFLTEDGFEKGPEELRALFQTKKVDLSQPLIATCRKGVTACHVALAAYLCGKPDVAVYDGSWSEWFRRAPPESRVSQGKSEKA

SEQ ID NO: 1267 - protein, 337 aa, Homo sapiens
MNPESSIFIEDYLKYFQDQVSRENLLQLLTDDEAWNGFVAAAELPRDEADELRKALNKLASHMVMKDKNRHDKDQQHRQWFLKEFPRLKRELEDHIRKLRALAEEVEQVHRGTTIANVVSNSVGTTSGILTLLGLGLAPFTEGISFVLLDTGMGLGAAAAVAGITCSVVELVNKLRARAQARNLDQSGTNVAKVMKEFVGGNTPNVLTLVDNWYQVTQGIGRNIRAIRRARANPQLGAYAPPPHVIGRISAEGGEQVERVVEGPAQAMSRGTMIVGAATGGILLLLDVVSLAYESKHLLEGAKSESAEELKKRAQELEGKLNFLTKIHEMLQPGQDQ

SEQ ID NO: 1268 - protein, 192 aa, Homo sapiens
MQAIKCVVVGDGAVGKTCLLISYTTNAFPGEYIPTVFDNYSANVMVDSKPVNLGLWDTAGQEDYDRLRPLSYPQTDVFLICFSLVSPASYENVRAKWFPEVRHHCPSTPIILVGTKLDLRDDKDTIEKLKEKKLAPITYPQGLALAKEIDSVKYLECSALTQRGLKTVFDEAIRAVLCPQPTRQQKRACSLL

SEQ ID NO: 1269 - protein, 202 aa, Homo sapiens
MKVLAAGVVPLLLVLHWKHGAGSPLPITPVNATCAIRHPCHNNLMNQIRSQLAQLNGSANALFILYYTAQGEPFPNNLDKLCGPNVTDFPPFHANGTEKAKLVELYRIVVYLGTSLGNITRDQKILNPSALSLHSKLNATADILRGLLSNVLCRLCSKYHVGHVDVTYGPDTSGKDVFQKKKLGCQLLGKYKQIIAVLAQAF

SEQ ID NO: 1270 - protein, 119 aa, Homo sapiens
MAGRGKLIAVIGDEDTVTGFLLGGIGELNKNRHPNFLVVEKDTTINEIEDTFRQFLNRDDIGIILINQYIAEMVRHALDAHQQSIPAVLEIPSKEHPYDAAKDSILRRARGMFTAEDLR

SEQ ID NO: 1271 - protein, 96 aa, Homo sapiens
MTSALENYINRTVAVITSDGRMIVGTLKGFDQTINLILDESHERVFSSSQGVEQVVLGLYIVRGDNVAVIGEIDEETDSALDLGNIRAEPLNSVAH

SEQ ID NO: 1272 - protein, 615 aa, Homo sapiens
MKALRLSASALFCLLLINGLGAAPPGRPEAQPPPLSSEHKEPVAGDAVPGPKDGSAPEVRGARNSEPQDEGELFQGVDPRALAAVLLQALDRPASPPAPSGSQQGPEEEAAEALLTETVRSQTHSLPAPESPEPAAPPRPQTPENGPEASDPSEELEALASLLQELRDFSPSSAKRQQETAAAETETRTHTLTRVNLESPGPERVWRASWGEFQARVPERAPLPPPAPSQFQARMPDSGPLPETHKFGEGVSSPKTHLGEALAPLSKAYQGVAAPFPKARRPESALLGGSEAGERLLQQGLAQVEAGRRQAEATRQAAAQEERLADLASDLLLQYLLQGGARQRGLGGRGLQEAAEERESAREEEEAEQERRGGEERVGEEDEEAAEAEAEAEEAERARQNALLFAEEEDGEAGAEDKRSQEETPGHRRKEAEGTEEGGEEEDDEEMDPQTIDSLIELSTKLHLPADDVVSIIEEVEEKRKRKKNAPPEPVPPPRAAPAPTHVRSPQPPPPAPAPARDELPDWNEVLPPWDREEDEVYPPGPYHPFPNYIRPRTLQPPSALRRRHYHHALPPSRHYPGREAQARRAQEEAEAEERRLQEQEELENYIEHVLLRRP

SEQ ID NO: 1273 - protein, 834 aa, Homo sapiens
MEDPAAPGTGGPPANGNGNGGGKGKQAAPKGREAFRSQRRESEGSVDCPTLEFEYGDADGHAAELSELYSYTENLEFTNNRRCFEEDFKTQVQGKEWLELEEDAQKAYIMGLLDRLEVVSRERRLKVARAVLYLAQGTFGECDSEVDVLHWSRYNCFLLYQMGTFSTFLELLHMEIDNSQACSSALRKPAVSIADSTELRVLLSVMYLMVENIRLERETDPCGWRTARETFRTELSFSMHNEEPFALLLFSMVTKFCSGLAPHFPIKKVLLLLWKVVMFTLGGFEHLQTLKVQKRAELGLPPLAEDSIQVVKSMRAASPPSYTLDLGESQLAPPPSKLRGRRGSRRQLLTKQDSLDIYNERDLFKTEEPATEEEEESAGDGERTLDGELDLLEQDPLVPPPPSQAPLSAERVAFPKGLPWAPKVRQKDIEHFLEMSRNKFIGFTLGQDTDTLVGLPRPIHESVKTLKQHKYISIADVQIKNEEELEKCPMSLGEEVVPETPCEILYQGMLYSLPQYMIALLKILLAAAPTSKAKTDSINILADVLPEEMPITVLQSMKLGIDVNRHKEIIVKSISTLLLLLLKHFKLNHIYQFEYVSQHLVFANCIPLILKFFNQNILSYITAKNSISVLDYPCCTIQDLPELTTESLEAGDNSQFCWRNLFSCINLLRLLNKLTKWKHSRTMMLVVFKSAPILKRALKVKQAMLQLYVLKLLKLQTKYLGRQWRKSNMKTMSAIYQKVRHRMNDDWAYGNDIDARPWDFQAEECTLRANIEAFNSRRYDRPQDSEFSPVDNCLQSVLGQRLDLPEDFHYSYELWLEREVFSQPICWEELLQNH

SEQ ID NO: 1274 - protein, 223 aa, Homo sapiens
MATPQSIFIFAICILMITELILASKSYYDILGVPKSASERQIKKAFHKLAMKYHPDKNKSPDAEAKFREIAEAYETLSDANRRKEYDTLGHSAFTSGKGQRGSGSSFEQSFNFNFDDLFKDFGFFGQNQNTGSKKRFENHFQTRQDGGSSRQRHHFQEFSFGGGLFDDMFEDMEKMFSFSGFDSTNQHTVQTENRFHGSSKHCRTVTQRRGNMVTTYTDCSGQ

SEQ ID NO: 1275 - protein, 315 aa, Homo sapiens
MDLRQFLMCLSLCTAFALSKPTEKKDRVHHEPQLSDKVHNDAQSFDYDHDAFLGAEEAKTFDQLTPEESKERLGKIVSKIDGDKDGFVTVDELKDWIKFAQKRWIYEDVERQWKGHDLNEDGLVSWEEYKNATYGYVLDDPDPDDGFNYKQMMVRDERRFKMADKDGDLIATKEEFTAFLHPEEYDYMKDIVVQETMEDIDKNADGFIDLEEYIGDMYSHDGNTDEPEWVKTEREQFVEFRDKNRDGKMDKEETKDWILPSDYDHAEAEARHLVYESDQNKDGKLTKEEIVDKYDLFVGSQATDFGEALVRHDEF

SEQ ID NO: 1276 - protein, 787 aa, Homo sapiens
MAAARPARGPELPLLGLLLLLLLGDPGRGAASSGNATGPGPRSAGGSARRSAAVTGPPPPLSHCGRAAPCEPLRYNVCLGSVLPYGATSTLLAGDSDSQEEAHGKLVLWSGLRNAPRCWAVIQPLLCAVYMPKCENDRVELPSRTLCQATRGPCAIVERERGWPDFLRCTPDRFPEGCTNEVQNIKFNSSGQCEVPLVRTDNPKSWYEDVEGCGIQCQNPLFTEAEHQDMHSYIAAFGAVTGLCTLFTLATFVADWRNSNRYPAVILFYVNACFFVGSIGWLAQFMDGARREIVCRADGTMRLGEPTSNETLSCVIIFVIVYYALMAGVVWFVVLTYAWHTSFKALGTTYQPLSGKTSYFHLLTWSLPFVLTVAILAVAQVDGDSVSGICFVGYKNYRYRAGFVLAPIGLVLIVGGYFLIRGVMTLFSIKSNHPGLLSEKAASKINETMLRLGIFGFLAFGFVLITFSCHFYDFFNQAEWERSFRDYVLCQANVTIGLPTKQPIPDCEIKNRPSLLVEKINLFAMFGTGIAMSTWVWTKATLLIWRRTWCRLTGQSDDEPKRIKKSKMIAKAFSKRHELLQNPGQELSFSMHTVSHDGPVAGLAFDLNEPSADVSSAWAQHVTKMVARRGAILPQDISVTPVATPVPPEEQANLWLVEAEISPELQKRLGRKKKRRKRKKEVCPLAPPPELHPPAPAPSTIPRLPQLPRQKCLVAAGAWGAGDSCRQGAWTLVSNPFCPEPSPPQDPFLPSAPAPVAWAHGRRQGLGPIHSRTNLMDTELMDADSDF

SEQ ID NO: 1277 - protein, 313 aa, Homo sapiens
MRVVTIVILLCFCKAAELRKASPGSVRSRVNHGRAGGGRRGSNPVKRYAPGLPCDVYTYLHEKYLDCQERKLVYVLPGWPQDLLHMLLARNKIRTLKNNMFSKFKKLKSLDLQQNEISKIESEAFFGLNKLTTLLLQHNQIKVLTEEVFIYTPLLSYLRLYDNPWHCTCEIETLISMLQIPRNRNLGNYAKCESPQEQKNKKLRQIKSEQLCNEEEKEQLDPKPQVSGRPPVIKPEVDSTFCHNYVFPIQTLDCKRKELKKVPNNIPPDIVKLDLSYNKINQLRPKEFEDVHELKKLNLSSNGIEFIDPGSLR

SEQ ID NO: 1278 - protein, 389 aa, Homo sapiens
MAEPDPSHPLETQAGKVQEAQDSDSDSEGGAAGGEADMDFLRNLFSQTLSLGSQKERLLDELTLEGVARYMQSERCRRVICLVGAGISTSAGIPDFRSPSTGLYDNLEKYHLPYPEAIFEISYFKKHPEPFFALAKELYPGQFKPTICHYFMRLLKDKGLLLRCYTQNIDTLERIAGLEQEDLVEAHGTFYTSHCVSASCRHEYPLSWMKEKIFSEVTPKCEDCQSLVKPDIVFFGESLPARFFSCMQSDFLKVDLLLVMGTSLQVQPFASLISKAPLSTPRLLINKEKAGQSDPFLGMIMGLGGGMDFDSKKAYRDVAWLGECDQGCLALAELLGWKKELEDLVRREHASIDAQSGAGVPNPSTSASPKKSPPPAKDEARTTEREKPQ

SEQ ID NO: 1279 - protein, 263 aa, Homo sapiens
MSLVAEAFVSQIAAAEPWPENATLYQQLKGEQILLSDNAASLAVQAFLQMCNLPIKVVCRANAEYMSPSGKVPFIHVGNQVVSELGPIVQFVKAKGHSLSDGLEEVQKAEMKAYMELVNNMLLTAELYLQWCDEATVGEITHARYGSPYPWPLNHILAYQKQWEVKRKMKAIGWGKKTLDQVLEDVDQCCQALSQRLGTQPYFFNKQPTELDALVFGHLYTILTTQLTNDELSEKVKNYSNLLAFCRRIEQHYFEDRGKGRLS

SEQ ID NO: 1280 - protein, 651 aa, Homo sapiens
MADSAELKQMVMSLRVSELQVLLGYAGRNKHGRKHELLTKALHLLKAGCSPAVQMKIKELYRRRFPQKIMTPADLSIPNVHSSPMPATLSPSTIPQLTYDGHPASSPLLPVSLLGPKHELELPHLTSALHPVHPDIKLQKLPFYDLLDELIKPTSLASDNSQRFRETCFAFALTPQQVQQISSSMDISGTKCDFTVQVQLRFCLSETSCPQEDHFPPNLCVKVNTKPCSLPGYLPPTKNGVEPKRPSRPINITSLVRLSTTVPNTIVVSWTAEIGRNYSMAVYLVKQLSSTVLLQRLRAKGIRNPDHSRALIKEKLTADPDSEIATTSLRVSLLCPLGKMRLTIPCRALTCSHLQCFDATLYIQMNEKKPTWVCPVCDKKAPYEHLIIDGLFMEILKYCTDCDEIQFKEDGTWAPMRSKKEVQEVSASYNGVDGCLSSTLEHQVASHHQSSNKNKKVEVIDLTIDSSSDEEEEEPSAKRTCPSLSPTSPLNNKGILSLPHQASPVSRTPSLPAVDTSYINTSLIQDYRHPFHMTPMPYDLQGLDFFPFLSGDNQHYNTSLLAAAAAAVSDDQDLLHSSRFFPYTSSQMFLDQLSAGGSTSLPTTNGSSSGSNSSLVSSNSLRESHSHTVTNRSSTDTASIFGIIPDIISLD

SEQ ID NO: 1281 - protein, 211 aa, Homo sapiens
MDNLSSEEIQQRAHQITDESLESTRRILGLAIESQDAGIKTITMLDEQKEQLNRIEEGLDQINKDMRETEKTLTELNKCCGLCVCPCNRTKNFESGKAYKTTWGDGGENSPCNVVSKQPGPVTNGQLQQPTTGAASGGYIKRITNDAREDEMEENLTQVGSILGNLKDMALNIGNEIDAQNPQIKRITDKADTNRDRIDIANARAKKLIDS

SEQ ID NO: 1282 - protein, 351 aa, Homo sapiens
MALPFQKELEKYKNIDEDELLGKLSEEELKQLENVLDDLDPESAMLPAGFRQKDQTQKAATGPFDREHLLMYLEKEALEQKDREDFVPFTGEKKGRVFIPKEKPIETRKEEKVTLDPELEEALASASDTELYDLAAVLGVHNLLNNPKFDEETANNKGGKGPVRNVVKGEKVKPVFEEPPNPTNVEISLQQMKANDPSLQEVNLNNIKNIPIPTLREFAKALETNTHVKKFSLAATRSNDPVAIAFADMLKVNKTLTSLNIESNFITGTGILALVEALKENDTLTEIKIDNQRQQLGTAVEMEIAQMLEENSRILKFGYQFTKQGPRTRVAAAITKNNDLVRKKRVEADRR

SEQ ID NO: 1283 - protein, 685 aa, Homo sapiens
MAAASRSASGWALLLLVALWQQRAAGSGVFQLQLQEFINERGVLASGRPCEPGCRTFFRVCLKHFQAVVSPGPCTFGTVSTPVLGTNSFAVRDDSSGGGRNPLQLPFNFTWPGTFSLIIEAWHAPGDDLRPEALPPDALISKIAIQGSLAVGQNWLLDEQTSTLTRLRYSYRVICSDNYYGDNCSRLCKKRNDHFGHYVCQPDGNLSCLPGWTGEYCQQPICLSGCHEQNGYCSKPAECLCRPGWQGRLCNECIPHNGCRHGTCSTPWQCTCDEGWGGLFCDQDLNYCTHHSPCKNGATCSNSGQRSYTCTCRPGYTGVDCELELSECDSNPCRNGGSCKDQEDGYHCLCPPGYYGLHCEHSTLSCADSPCFNGGSCRERNQGANYACECPPNFTGSNCEKKVDRCTSNPCANGGQCLNRGPSRMCRCRPGFTGTYCELHVSDCARNPCAHGGTCHDLENGLMCTCPAGFSGRRCEVRTSIDACASSPCFNRATCYTDLSTDTFVCNCPYGFVGSRCEFPVGLPPSFPWVAVSLGVGLAVLLVLLGMVAVAVRQLRLRRPDDGSREAMNNLSDFQKDNLIPAAQLKNTNQKKELEVDCGLDKSNCGKQQNHTLDYNLAPGPLGRGTMPGKFPHSDKSLGEKAPLRLHSEKPECRISAICSPRDSMYQSVCLISEERNECVIATEV

SEQ ID NO: 1284 - protein, 316 aa, Homo sapiens
MAAPEAPPLDRVFRTTWLSTECDSHPLPPSYRKFLFETQAADLAGGTTVAAGNLLNESEKDCGQDRRAPGVQPCRLVTMTSVVKTVYSLQPPSALSGGQPADTQTRATSKSLLPVRSKEVDVSKQLHSGGPENDVTKITKLRRENGQMKATDTATRRNVRKGYKPLSKQKSEEELKDKNQLLEAVNKQLHQKLTETQGELKDLTQKVELLEKFRDNCLAILESKGLDPALGSETLASRQESTTDHMDSMLLLETLQEELKLFNETAKKQMEELQALKVKLEMKEERVRFLEQQTLCNNQVNDLTTALKEMEQLLEM

SEQ ID NO: 1285 - protein, 59 aa, Homo sapiens
MTRGNQRELARQKNMKKQSDSVKGKRRDDGLSAAARKQRDSEIMQQKQKKANEKKEEPK

SEQ ID NO: 1286 - protein, 311 aa, Homo sapiens
MEATRRRQHLGATGGPGAQLGASFLQARHGSVSADEAARTAPFHLDLWFYFTLQNWVLDFGRPIAMLVFPLEWFPLNKPSVGDYFHMAYNVITPFLLLKLIERSPRTLPRSITYVSIIIFIMGASIHLVGDSVNHRLLFSGYQHHLSVRENPIIKNLKPETLIDSFELLYYYDEYLGHCMWYIPFFLILFMYFSGCFTASKAESLIPGPALLLVAPSGLYYWYLVTEGQIFILFIFTFFAMLALVLHQKRKRLFLDSNGLFLFSSFALTLLLVALWVAWLWNDPVLRKKYPGVIYVPEPWAFYTLHVSSRH

SEQ ID NO: 1287 - protein, 112 aa, Homo sapiens
MSAEVPEAASAEEQKEMEDKVTSPEKAEEAKLKARYPHLGQKPGGSDFLRKRLQKGQKYFDSGDYNMAKAKMKNKQLPTAAPDKTEVTGDHIPTPQDLPQRKPSLVASKLAG

SEQ ID NO: 1288 - protein, 428 aa, Homo sapiens
MQELHLLWWALLLGLAQACPEPCDCGEKYGFQIADCAYRDLESVPPGFPANVTTLSLSANRLPGLPEGAFREVPLLQSLWLAHNEIRTVAAGALASLSHLKSLDLSHNLISDFAWSDLHNLSALQLLKMDSNELTFIPRDAFRSLRALRSLQLNHNRLHTLAEGTFTPLTALSHLQINENPFDCTCGIVWLKTWALTTAVSIPEQDNIACTSPHVLKGTPLSRLPPLPCSAPSVQLSYQPSQDGAELRPGFVLALHCDVDGQPAPQLHWHIQIPSGIVEITSPNVGTDGRALPGTPVASSQPRFQAFANGSLLIPDFGKLEEGTYSCLATNELGSAESSVDVALATPGEGGEDTLGRRFHGKAVEGKGCYTVDNEVQPSGPEDNVVIIYLSRAGNPEAAVAEGVPGQLPPGLLLLGQSLLLFFFLTSF

SEQ ID NO: 1289 - protein, 257 aa, Homo sapiens
MPARCVAAHCGNTTKSGKSLFRFPKDRAVRLLWDRFVRGCRADWYGGNDRSVICSDHFAPACFDVSSVIQKNLRFSQRLRLVAGAVPTLHRVPAPAPKRGEEGDQAGRLDTRGELQAARHSEAAPGPVSCTRPRAGKQAAASQITCENELVQTQPHADNPSNTVTSVPTHCEEGPVHKSTQISLKRPRHRSVGIQAKVKAFGKRLCNATTQTEELWSRTSSLFDIYSSDSETDTDWDIKSEQSDLSYMAVQVKEETC

SEQ ID NO: 1290 - protein, 780 aa, Homo sapiens
MRTLEDSSGTVLHRLIQEQLRYGNLTETRTLLAIQQQALRGGAGTGGTGSPQASLEILAPEDSQVLQQATRQEPQGQEHQGGENHLAENTLYRLCPQPSKGEELPTYEEAKAHSQYYAAQQAGTRPHAGDRDPRGAPGGSRRQDEALRELRHGHVRSLSERLLQLSLERNGARAPSHMSSSHSFPQLARNQQGPPLRGPPAEGPESRGPPPQYPHVVLAHETTTAVTDPRYRARGSPHFQHAEVRILQAQVPPVFLQQQQQYQYLQQSQEHPPPPHPAALGHGPLSSLSPPAVEGPVSAQASSATSGSAHLAQMEAVLRENARLQRDNERLQRELESSAEKAGRIEKLESEIQRLSEAHESLTRASSKREALEKTMRNKMDSEMRRLQDFNRDLRERLESANRRLASKTQEAQAGSQDMVAKLLAQSYEQQQEQEKLEREMALLRGAIEDQRRRAELLEQALGNAQGRAARAEEELRKKQAYVEKVERLQQALGQLQAACEKREQLELRLRTRLEQELKALRAQQRQAGAPGGSSGSGGSPELSALRLSEQLREKEEQILALEADMTKWEQKYLEERAMRQFAMDAAATAAAQRDTTLIRHSPQPSPSSSFNEGLLTGGHRHQEMESRLKVLHAQILEKDAVIKVLQQRSRRDPGKAIQGSLRPAKSVPSVFAAAAAGTQGWQGLSSSERQTADAPARLTTADRAPTEEPVVTAPPAAHAKHGSRDGSTQTEGPPDSTSTCLPPEPDSLLGCSSSQRAASLDSVATSRVQDLSDMVEILI

SEQ ID NO: 1291 - protein, 350 aa, Homo sapiens
MALEQNQSTDYYYEENEMNGTYDYSQYELICIKEDVREFAKVFLPVFLTIVFVIGLAGNSMVVAIYAYYKKQRTKTDVYILNLAVADLLLLFTLPFWAVNAVHGWVLGKIMCKITSALYTLNFVSGMQFLACISIDRYVAVTKVPSQSGVGKPCWIICFCVWMAAILLSIPQLVFYTVNDNARCIPIFPRYLGTSMKALIQMLEICIGFVVPFLIMGVCYFITARTLMKMPNIKISRPLKVLLTVVIVFIVTQLPYNIVKFCRAIDIIYSLITSCNMSKRMDIAIQVTESIALFHSCLNPILYVFMGASFKNYVMKVAKKYGSWRRQRQSVEEFPFDSEGPTEPTSTFSI

SEQ ID NO: 1292 - protein, 580 aa, Homo sapiens
MGTTGLESLSLGDRGAAPTVTSSERLVPDPPNDLRKEDVAMELERVGEDEEQMMIKRSSECNPLLQEPIASAQFGATAGTECRKSVPCGWERVVKQRLFGKTAGRFDVYFISPQGLKFRSKSSLANYLHKNGETSLKPEDFDFTVLSKRGIKSRYKDCSMAALTSHLQNQSNNSNWNLRTRSKCKKDVFMPPSSSSELQESRGLSNFTSTHLLLKEDEGVDDVNFRKVRKPKGKVTILKGIPIKKTKKGCRKSCSGFVQSDSKRESVCNKADAESEPVAQKSQLDRTVCISDAGACGETLSVTSEENSLVKKKERSLSSGSNFCSEQKTSGIINKFCSAKDSEHNEKYEDTFLESEEIGTKVEVVERKEHLHTDILKRGSEMDNNCSPTRKDFTGEKIFQEDTIPRTQIERRKTSLYFSSKYNKEALSPPRRKAFKKWTPPRSPFNLVQETLFHDPWKLLIATIFLNRTSGKMAIPVLWKFLEKYPSAEVARTADWRDVSELLKPLGLYDLRAKTIVKFSDEYLTKQWKYPIELHGIGKYGNDSYRIFCVNEWKQVHPEDHKLNKYHDWLWENHEKLSLS

SEQ ID NO: 1293 - protein, 953 aa, Homo sapiens
MTAAENVCYTLINVPMDSEPPSEISLKNDLEKGDVKSKTEALKKVIIMILNGEKLPGLLMTIIRFVLPLQDHTIKKLLLVFWEIVPKTTPDGRLLHEMILVCDAYRKDLQHPNEFIRGSTLRFLCKLKEAELLEPLMPAIRACLEHRHSYVRRNAVLAIYTIYRNFEHLIPDAPELIHDFLVNEKDASCKRNAFMMLIHADQDRALDYLSTCIDQVQTFGDILQLVIVELIYKVCHANPSERARFIRCIYNLLQSSSPAVKYEAAGTLVTLSSAPTAIKAAAQCYIDLIIKESDNNVKLIVLDRLIELKEHPAHERVLQDLVMDILRVLSTPDLEVRKKTLQLALDLVSSRNVEELVIVLKKEVIKTNNVSEHEDTDKYRQLLVRTLHSCSVRFPDMAANVIPVLMEFLSDNNEAAAADVLEFVREAIQRFDNLRMLIVEKMLEVFHAIKSVKIYRGALWILGEYCSTKEDIQSVMTEIRRSLGEIPIVESEIKKEAGELKPEEEITVGPVQKLVTEMGTYATQSALSSSRPTKKEEDRPPLRGFLLDGDFFVAASLATTLTKIALRYVALVQEKKKQNSFVAEAMLLMATILHLGKSSLPKKPITDDDVDRISLCLKVLSECSPLMNDIFNKECRQSLSHMLSAKLEEEKLSQKKESEKRNVTVQPDDPISFMQLTAKNEMNCKEDQFQLSLLAAMGNTQRKEAADPLASKLNKVTQLTGFSDPVYAEAYVHVNQYDIVLDVLVVNQTSDTLQNCTLELATLGDLKLVEKPSPLTLAPHDFANIKANVKVASTENGIIFGNIVYDVSGAASDRNCVVLSDIHIDIMDYIQPATCTDAEFRQMWAEFEWENKVTVNTNMVDLNDYLQHILKSTNMKCLTPEKALSGYCGFMAANLYARSIFGEDALANVSIEKPIHQGPDAAVTGHIRIRAKSQGMALSLGDKINLSQKKTSI

SEQ ID NO: 1294 - protein, 354 aa, Homo sapiens
MRLAVLFSGALLGLLAAQGTGNDCPHKKSATLLPSFTVTPTVTESTGTTSHRTTKSHKTTTHRTTTTGTTSHGPTTATHNPTTTSHGNVTVHPTSNSTATSQGPSTATHSPATTSHGNATVHPTSNSTATSPGFTSSAHPEPPPPSPSPSPTSKETIGDYTWTNGSQPCVHLQAQIQIRVMYTTQGGGEAWGISVLNPNKTKVQGSCEGAHPHLLLSFPYGHLSFGFMQDLQQKVVYLSYMAVEYNVSFPHAAQWTFSAQNASLRDLQAPLGQSFSCSNSSIILSPAVHLDLLSLRLQAAQLPHTGVFGQSFSCPSDRSILLPLIIGLILLGLLALVLIAFCIIRRRPSAYQAL

SEQ ID NO: 1295 - protein, 123 aa, Homo sapiens
MARYEEVSVSGFEEFHRAVEQHNGKTIFAYFTGSKDAGGKSWCPDCVQAEPVVREGLKHISEGCVFIYCQVGEKPYWKDPNNDFRKNLKVTAVPTLLKYGTPQKLVESECLQANLVEMLFSED

SEQ ID NO: 1296 - protein, 673 aa, Homo sapiens
MGGLASGGDVEPGLPVEVRGSNGAFYKGFVKDVHEDSVTIFFENNWQSERQIPFGDVRLPPPADYNKEITEGDEVEVYSRANEQEPCGWWLARVRMMKGDFYVIEYAACDATYNEIVTLERLRPVNPNPLATKGSFFKVTMAVPEDLREACSNENVHKEFKKALGANCIFLNITNSELFILSTTEAPVKRASLLGDMHFRSLRTKLLLMSRNEEATKHLETSKQLAAAFQEEFTVREDLMGLAIGTHGANIQQARKVPGVTAIELGEETCTFRIYGETPEACRQARSYLEFSEDSVQVPRNLVGKVIGKNGKVIQEIVDKSGVVRVRVEGDNDKKNPREEGMVPFIFVGTRENISNAQALLEYHLSYLQEVEQLRLERLQIDEQLRQIGLGFRPPGSGRGSGGSDKAGYSTDESSSSSLHATRTYGGSYGGRGRGRRTGGPAYGPSSDVSTASETESEKREEPNRAGPGDRDPPTRGEESRRRPTGGRGRGPPPAPRPTSRYNSSSISSVLKDPDSNPYSLLDTSEPEPPVDSEPGEPPPASARRRRSRRRRTDEDRTVMDGGLESDGPNMTENGLEDESRPQRRNRSRRRRNRGNRTDGSISGDRQPVTVADYISRAESQSRQRPPLERTKPSEDSLSGQKGDSVSKLPKGPSENGELSAPLELGSMVNGVS

SEQ ID NO: 1297 - protein, 247 aa, Homo sapiens
MAAEADGPLKRLLVPILLPEKCYDQLFVQWDLLHVPCLKILLSKGLGLGIVAGSLLVKLPQVFKILGAKSAEGLSLQSVMLELVALTGTMVYSITNNFPFSSWGEALFLMLQTITICFLVMHYRGQTVKGVAFLACYGLVLLVLLSPLTPLTVVTLLQASNVPAVVVGRLLQAATNYHNGHTGQLSAITVFLLFGGSLARIFTSIQETGDPLMAGTFVVSSLCNGLIAAQLLFYWNAKPPHKQKKAQ

SEQ ID NO: 1298 - protein, 367 aa, Homo sapiens
MRWFLPWTLAAVTAAAASTVLATALSPAPTTMDFTPAPLEDTSSRPQFCKWPCECPPSPPRCPLGVSLITDGCECCKMCAQQLGDNCTEAAICDPHRGLYCDYSGDRPRYAIGVCAQVVGVGCVLDGVRYNNGQSFQPNCKYNCTCIDGAVGCTPLCLRVRPPRLWCPHPRRVSIPGHCCEQWVCEDDAKRPRKTAPRDTGAFDAVGEVEAWHRNCIAYTSPWSPCSTSCGLGVSTRISNVNAQCWPEQESRLCNLRPCDVDIHTLIKAGKKCLAVYQPEASMNFTLAGCISTRSYQPKYCGVCMDNRCCIPYKSKTIDVSFQCPDGLGFSRQVLWINACFCNLSCRNPNDIFADLESYPDFSEIAN

SEQ ID NO: 1299 - protein, 403 aa, Homo sapiens
MAGAATQASLESAPRIMRLVAECSRSRARAGELWLPHGTVATPVFMPVGTQATMKGITTEQLDALGCRICLGNTYHLGLRPGPELIQKANGLHGFMNWPHNLLTDSGGFQMVSLVSLSEVTEEGVRFRSPYDGNETLLSPEKSVQIQNALGSDIIMQLDDVVSSTVTGPRVEEAMYRSIRWLDRCIAAHQRPDKQNLFAIIQGGLDADLRATCLEEMTKRDVPGFAIGGLSGGESKSQFWRMVALSTSRLPKDKPRYLMGVGYATDLVVCVALGCDMFDCVFPTRTARFGSALVPTGNLQLRKKVFEKDFGPIDPECTCPTCQKHSRAFLHALLHSDNTAALHHLTVHNIAYQLQLMSAVRTSIVEKRFPDFVRDFMGAMYGDPTLCPTWATDALASVGITLG

SEQ ID NO: 1300 - protein, 690 aa, Homo sapiens
MRPMRIFVNDDRHVMAKHSSVYPTQEELEAVQNMVSHTERALKAVSDWIDEQEKGSSEQAESDNMDVPPEDDSKEGAGEQKTEHMTRTLRGVMRVGLVAKGLLLKGDLDLELVLLCKEKPTTALLDKVADNLAIQLAAVTEDKYEILQSVDDAAIVIKNTKEPPLSLTIHLTSPVVREEMEKVLAGETLSVNDPPDVLDRQKCLAALASLRHAKWFQARANGLKSCVIVIRVLRDLCTRVPTWGPLRGWPLELLCEKSIGTANRPMGAGEALRRVLECLASGIVMPDGSGIYDPCEKEATDAIGHLDRQQREDITQSAQHALRLAAFGQLHKVLGMDPLPSKMPKKPKNENPVDYTVQIPPSTTYAITPMKRPMEEDGEEKSPSKKKKKIQKKEEKAEPPQAMNALMRLNQLKPGLQYKLVSQTGPVHAPIFTMSVEVDGNSFEASGPSKKTAKLHVAVKVLQDMGLPTGAEGRDSSKGEDSAEETEAKPAVVAPAPVVEAVSTPSAAFPSDATAEQGPILTKHGKNPVMELNEKRRGLKYELISETGGSHDKRFVMEVEVDGQKFQGAGSNKKVAKAYAALAALEKLFPDTPLALDANKKKRAPVPVRGGPKFAAKPHNPGFGMGGPMHNEVPPPPNLRGRGRGGSIRGRGRGRGFGGANHGGYMNAGAGYGSYGYGGNSATAGYTGFV

SEQ ID NO: 1301 - protein, 349 aa, Homo sapiens
MEDPQSKEPAGEAVALALLESPRPEGGEEPPRPSPEETQQCKFDGQETKGSKFITSSASDFSDPVYKEIAITNGCINRMSKEELRAKLSEFKLETRGVKDVLKKRLKNYYKKQKLMLKESNFADSYYDYICIIDFEATCEEGNPPEFVHEIIEFPVVLLNTHTLEIEDTFQQYVRPEINTQLSDFCISLTGITQDQVDRADTFPQVLKKVIDWMKLKELGTKYKYSLLTDGSWDMSKFLNIQCQLSRLKYPPFAKKWINIRKSYGNFYKVPRSQTKLTIMLEKLGMDYDGRPHCGLDDSKNIARIAVRMLQDGCELRINEKMHAGQLMSVSSSLPIEGTPPPQMPHFRK

SEQ ID NO: 1302 - protein, 323 aa, Homo sapiens
MQAAWLLGALVVPQLLGFGHGARGAEREWEGGWGGAQEEEREREALMLKHLQEALGLPAGRGDENPAGTVEGKEDWEMEEDQGEEEEEEATPTPSSGPSPSPTPEDIVTYILGRLAGLDAGLHQLHVRLHALDTRVVELTQGLRQLRNAAGDTRDAVQALQEAQGRAEREHGRLEGCLKGLRLGHKCFLLSRDFEAQAAAQARCTARGGSLAQPADRQQMEALTRYLRAALAPYNWPVWLGVHDRRAEGLYLFENGQRVSFFAWHRSPRPELGAQPSASPHPLSPDQPNGGTLENCVAQASDDGSWWDHDCQRRLYYVCEFPF

SEQ ID NO: 1303 - protein, 254 aa, Homo sapiens
MGLSIFLLLCVLGLSQAATPKIFNGTECGRNSQPWQVGLFEGTSLRCGGVLIDHRWVLTAAHCSGSRYWVRLGEHSLSQLDWTEQIRHSGFSVTHPGYLGASTSHEHDLRLLRLRLPVRVTSSVQPLPLPNDCATAGTECHVSGWGITNHPRNPFPDLLQCLNLSIVSHATCHGVYPGRITSNMVCAGGVPGQDACQGDSGGPLVCGGVLQGLVSWGSVGPCGQDGIPGVYTYICNSTLVGLGTSWNFNSCQPF

SEQ ID NO: 1304 - protein, 463 aa, Homo sapiens
MLLLLLPLLWGRERAEGQTSKLLTMQSSVTVQEGLCVHVPCSFSYPSHGWIYPGPVVHGYWFREGANTDQDAPVATNNPARAVWEETRDRFHLLGDPHTKNCTLSIRDARRSDAGRYFFRMEKGSIKWNYKHHRLSVNVTALTHRPNILIPGTLESGCPQNLTCSVPWACEQGTPPMISWIGTSVSPLDPSTTRSSVLTLIPQPQDHGTSLTCQVTFPGASVTTNKTVHLNVSYPPQNLTMTVFQGDGTVSTVLGNGSSLSLPEGQSLRLVCAVDAVDSNPPARLSLSWRGLTLCPSQPSNPGVLELPWVHLRDAAEFTCRAQNPLGSQQVYLNVSLQSKATSGVTQGVVGGAGATALVFLSFCVIFVVVRSCRKKSARPAAGVGDTGIEDANAVRGSASQGPLTEPWAEDSPPDQPPPASARSSVGEGELQYASLSFQMVKPWDSRGQEATDTEYSEIKIHR

SEQ ID NO: 1305 - protein, 250 aa, Homo sapiens
MKLGLLCALLSLLAGHGWADTRAIGAEECRPNSQPWQAGLFHLTRLFCGATLISDRWLLTAAHCRKPYLWVRLGEHHLWKWEGPEQLFRVTDFFPHPGFNKDLSANDHNDDIMLIRLPRQARLSPAVQPLNLSQTCVSPGMQCLISGWGAVSSPKALFPVTLQCANISILENKLCHWAYPGHISDSMLCAGLWEGGRGSCQGDSGGPLVCNGTLAGVVSGGAEPCSRPRRPAVYTSVCHYLDWIQEIMEN

SEQ ID NO: 1306 - protein, 902 aa, Homo sapiens
MGAASCEDEELEFKLVFGEEKEAPPLGAGGLGEELDSEDAPPCCRLALGEPPPYGAAPIGIPRPPPPRPGMHSPPPRPAPSPGTWESQPARSVRLGGPGGGAGGAGGGRVLECPSIRITSISPTPEPPAALEDNPDAWGDGSPRDYPPPEGFGGYREAGGQGGGAFFSPSPGSSSLSSWSFFSDASDEAALYAACDEVESELNEAASRFGLGSPLPSPRASPRPWTPEDPWSLYGPSPGGRGPEDSWLLLSAPGPTPASPRPASPCGKRRYSSSGTPSSASPALSRRGSLGEEGSEPPPPPPLPLARDPGSPGPFDYVGAPPAESIPQKTRRTSSEQAVALPRSEEPASCNGKLPLGAEESVAPPGGSRKEVAGMDYLAVPSPLAWSKARIGGHSPIFRTSALPPLDWPLPSQYEQLELRIEVQPRAHHRAHYETEGSRGAVKAAPGGHPVVKLLGYSEKPLTLQMFIGTADERNLRPHAFYQVHRITGKMVATASYEAVVSGTKVLEMTLLPENNMAANIDCAGILKLRNSDIELRKGETDIGRKNTRVRLVFRVHVPQGGGKVVSVQAASVPIECSQRSAQELPQVEAYSPSACSVRGGEELVLTGSNFLPDSKVVFIERGPDGKLQWEEEATVNRLQSNEVTLTLTVPEYSNKRVSRPVQVYFYVSNGRRKRSPTQSFRFLPVICKEEPLPDSSLRGFPSASATPFGTDMDFSPPRPPYPSYPHEDPACETPYLSEGFGYGMPPLYPQTGPPPSYRPGLRMFPETRGTTGCAQPPAVSFLPRPFPSDPYGGRGSSFSLGLPFSPPAPFRPPPLPASPPLEGPFPSQSDVHPLPAEGYNKVGPGYGPGEGAPEQEKSRGGYSSGFRDSVPIQGITLEEVSEIIGRDLSGFPAPPGEEPPA

SEQ ID NO: 1307 - protein, 567 aa, Homo sapiens
MTFYLFGIRSFPKLWKSPYLGLGPGHSYVSLFLADRCGIRNQQRLFSLKTMSPQNTKATNLIAKARYLRKDEGSNKQVYSVPHFFLAGAAKERSQMNSQTEDHALAPVRNTIQLPTQPLNSEEWDKLKEDLKENTGKTSFESWIISQMAGCHSSIDVAKSLLAWVAAKNNGIVSYDLLVKYLYLCVFHMQTSEVIDVFEIMKARYKTLEPRGYSLLIRGLIHSDRWREALLLLEDIKKVITPSKKNYNDCIQGALLHQDVNTAWNLYQELLGHDIVPMLETLKAFFDFGKDIKDDNYSNKLLDILSYLRNNQLYPGESFAHSIKTWFESGQCSGCGKTIESIQLSPEEYECLKGKIMRDVIDGGDQYRKTTPQELKRFENFIKSRPPFDVVIDGLNVAKMFPKVRESQLLLNVVSQLAKRNLRLLVLGRKHMLRRSSQWSRDEMEEVQKQASCFFADDISEDDPFLLYATLHSGNHCRFITRDLMRDHKACLPDAKTQRLFFKWQQGHQLAIVNRFPGSKLTFQRILSYDTVVQTTGDSWHIPYDEDLVERCSCEVPTKWLCLHQKT

SEQ ID NO: 1308 - protein, 247 aa, Homo sapiens
MLLLPLPLLLFLLCSRAEAGEIIGGTECKPHSRPYMAYLEIVTSNGPSKFCGGFLIRRNFVLTAAHCAGRSITVTLGAHNITEEEDTWQKLEVIKQFRHPKYNTSTLHHDIMLLKLKEKASLTLAVGTLPFPSQFNFVPPGRMCRVAGWGRTGVLKPGSDTLQEVKLRLMDPQACSHFRDFDHNLQLCVGNPRKTKSAFKGDSGGPLLCAGVAQGIVSYGRSDAKPPAVFTRISHYRPWINQILQAN

SEQ ID NO: 1309 - protein, 193 aa, Homo sapiens
MATPASAPDTRALVADFVGYKLRQKGYVCGAGPGEGPAADPLHQAMRAAGDEFETRFRRTFSDLAAQLHVTPGSAQQRFTQVSDELFQGGPNWGRLVAFFVFGAALCAESVNKEMEPLVGQVQEWMVAYLETQLADWIHSSGGWAEFTALYGDGALEEARRLREGNWASVRTVLTGAVALGALVTVGAFFASK

SEQ ID NO: 1310 - protein, 285 aa, Homo sapiens
MNRLPDDYDPYAVEEPSDEEPALSSSEDEVDVLLHGTPDQKRKLIRECLTGESESSSEDEFEKEMEAELNSTMKTMEDKLSSLGTGSSSGNGKVATAPTRYYDDIYFDSDSEDEDRAVQVTKKKKKKQHKIPTNDELLYDPEKDNRDQAWVDAQRRGYHGLGPQRSRQQQPVPNSDAVLNCPACMTTLCLDCQRHESYKTQYRAMFVMNCSINKEEVLRYKASENRKKRRVHKKMRSNREDAAEKAETDVEEIYHPVMCTECSTEVAVYDKDEVFHFFNVLASHS

SEQ ID NO: 1311 - protein, 277 aa, Homo sapiens
MAADGERSPLLSEPIDGGAGGNGLVGPGGSGAGPGGGLTPSAPPYGAAFPPFPEGHPAVLPGEDPPPYSPLTSPDSGSAPMITCRVCQSLINVEGKMHQHVVKCGVCNEATPIKNAPPGKKYVRCPCNCLLICKVTSQRIACPRPYCKRIINLGPVHPGPLSPEPQPMGVRVICGHCKNTFLWTEFTDRTLARCPHCRKVSSIGRRYPRKRCICCFLLGLLLAVTATGLAFGTWKHARRYGGIYAAWAFVILLAVLCLGRALYWACMKVSHPVQNFS

SEQ ID NO: 1312 - protein, 81 aa, Homo sapiens
MLIKVKTLTGKEIEIDIEPTDKVERIKERVEEKEGIPPQQQRLIYSGKQMNDEKTAADYKILGGSVLHLVLALRGGGGLRQ

SEQ ID NO: 1313 - protein, 113 aa, Homo sapiens
MSASVVSVISRFLEEYLSSTPQRLKLLDAYLLYILLTGALQFGYCLLVGTFPFNSFLSGFISCVGSFILAVCLRIQINPQNKADFQGISPERAFADFLFASTILHLVVMNFVG

SEQ ID NO: 1314 - protein, 200 aa, Homo sapiens
MEQTEVLKPRTLADLIRILHQLFAGDEVNVEEVQAIMEAYESDPTEWAMYAKFDQYRYTRNLVDQGNGKFNLMILCWGEGHGSSIHDHTNSHCFLKMLQGNLKETLFAWPDKKSNEMVKKSERVLRENQCAYINDSIGLHRVENISHTEPAVSLHLYSPPFDTCHAFDQRTGHKNKVTMTFHSKFGIRTPNATSGSLENN

SEQ ID NO: 1315 - protein, 184 aa, Homo sapiens
MREYKLVVLGSGGVGKSALTVQFVQGIFVEKYDPTIEDSYRKQVEVDAQQCMLEILDTAGTEQFTAMRDLYMKNGQGFALVYSITAQSTFNDLQDLREQILRVKDTDDVPMILVGNKCDLEDERVVGKEQGQNLARQWNNCAFLESSAKSKINVNEIFYDLVRQINRKTPVPGKARKKSSCQLL

SEQ ID NO: 1316 - protein, 821 aa, Homo sapiens
MRGFNLLLFWGCCVMHSWEGHIRPTRKPNTKGNNCRDSTLCPAYATCTNTVDSYYCACKQGFLSSNGQNHFKDPGVRCKDIDECSQSPQPCGPNSSCKNLSGRYKCSCLDGFSSPTGNDWVPGKPGNFSCTDINECLTSSVCPEHSDCVNSMGSYSCSCQVGFISRNSTCEDVDECADPRACPEHATCNNTVGNYSCFCNPGFESSSGHLSFQGLKASCEDIDECTEMCPINSTCTNTPGSYFCTCHPGFAPSNGQLNFTDQGVECRDIDECRQDPSTCGPNSICTNALGSYSCGCIAGFHPNPEGSQKDGNFSCQRVLFKCKEDVIPDNKQIQQCQEGTAVKPAYVSFCAQINNIFSVLDKVCENKTTVVSLKNTTESFVPVLKQISTWTKFTKEETSSLATVFLESVESMTLASFWKPSANITPAVRTEYLDIESKVINKECSEENVTLDLVAKGDKMKIGCSTIEESESTETTGVAFVSFVGMESVLNERFFKDHQAPLTTSEIKLKMNSRVVGGIMTGEKKDGFSDPIIYTLENIQPKQKFERPICVSWSTDVKGGRWTSFGCVILEASETYTICSCNQMANLAVIMASGELTMGCAIIAGFLHYLFLACFFWMLVEAVILFLMVRNLKVVNYFSSRNIKMLHICAFGYGLPMLVVVISASVQPQGYGMHNRCWLNTETGFIWSFLGPVCTVIVINSLLLTWTLWILRQRLSSVNAEVSTLKDTRLLTFKAFAQLFILGCSWVLGIFQIGPVAGVMAYLFTIINSLQGAFIFLIHCLLNGQVREEYKRWITGKTKPSSQSQTSRILLSSMPSASKTG

SEQ ID NO: 1317 - protein, 327 aa, Homo sapiens
MQMPAMMSLLLVSVGLMEALQAQSHPITRRDLFSQEIQLDMALASFDDQYAGCAAAMTAALPDLNHTEFQANQVYADSWTLASSQWQERQARWPEWSLSPTRPSPPPLGFRDEHGVALLAYTANSPLHKEFNAAVREAGRSRAHYLHHFSFKTLHFLLTEALQLLGSGQRPPRCHQVFRGVHGLRFRPAGPRATVRLGGFASASLKHVAAQQFGEDTFFGIWTCLGAPIKGYSFFPGEEEVLIPPFETFQVINASRLAQGPARIYLRALGKHSTYNCEYIKDKKCKSGPCHLDNSAMGQSPLSAVWSLLLLLWFLVVRAFPDGPGLL

SEQ ID NO: 1318 - protein, 450 aa, Homo sapiens
MGLRSHHLSLGLLLLFLLPAECLGAEGRLALKLFRDLFANYTSALRPVADTDQTLNVTLEVTLSQIIDMDERNQVLTLYLWIRQEWTDAYLRWDPNAYGGLDAIRIPSSLVWRPDIVLYNKADAQPPGSASTNVVLRHDGAVRWDAPAITRSSCRVDVAAFPFDAQHCGLTFGSWTHGGHQLDVRPRGAAASLADFVENVEWRVLGMPARRRVLTYGCCSEPYPDVTFTLLLRRRAAAYVCNLLLPCVLISLLAPLAFHLPADSGEKVSLGVTVLLALTVFQLLLAESMPPAESVPLIGKYYMATMTMVTFSTALTILIMNLHYCGPSVRPVPAWARALLLGHLARGLCVRERGEPCGQSRPPELSPSPQSPEGGAGPPAGPCHEPRCLCRQEALLHHVATIANTFRSHRAAQRCHEDWKRLARVMDRFFLAIFFSMALVMSLLVLVQAL

SEQ ID NO: 1319 - protein, 252 aa, Homo sapiens
MSAAVACVDYFAADVLMAISSGAVVHRGRPGPEGAGPAAGLDVRAARREAASPGTPGPPPPPPAASGPGPGAAAAPHLLAASILADLRGGPGAAPGGASPASSSSAASSPSSGRAPGAAPSAAAKSHRCPFPDCAKAYYKSSHLKSHLRTHTGERPFACDWQGCDKKFARSDELARHHRTHTGEKRFSCPLCSKRFTRSDHLAKHARRHPGFHPDLLRRPGARSTSPSDSLPCSLAGSPAPSPAPSPAPAGL

SEQ ID NO: 1320 - protein, 578 aa, Homo sapiens
MEPDVPLPQTLLSHPSYLKVFVPDYTRELLLELRDCVSNGSLGCPVRLTVGPVTLPSNFQKVLTCTGAPWPCRLLLPSPPWDRWLQVTAESLVGPLGTVAFSAVAALTACRPRSVTIQPLLQSSQNQSFNASSGLLSPSPDHQDLGRSGRVDRSPFCLTNYPVTREDMDVVSVHFQPLDRVSVRVCSDTPSVMRLRLNTGMDSGGSLTISLRANKTEMRNETVVVACVNAASPFLGFNTSLNCTTAFFQGYPLSLSAWSRRANLIIPYPETDNWYLSLQLMCPENAEDCEQAVVHVETTLYLVPCLNDCGPYGQCLLLRRHSYLYASCSCKAGWRGWSCTDNSTAQTVAQQRAATLLLTLSNLMFLAPIAVSVRRFFLVEASVYAYTMFFSTFYHACDQPGEAVLCILSYDTLQYCDFLGSGAAIWVTILCMARLKTVLKYVLFLLGTLVIAMSLQLDRRGMWNMLGPCLFAFVIMASMWAYRCGHRRQCYPTSWQRWAFYLLPGVSMASVGIAIYTSMMTSDNYYYTHSIWHILLAGSAALLLPPPDQPAEPWACSQKFPCHYQICKNDREELYAVT

SEQ ID NO: 1321 - protein, 110 aa, Homo sapiens
MALWMRLLPLLALLALWGPDPAAAFVNQHLCGSHLVEALYLVCGERGFFYTPKTRREAEDLQVGQVELGGGPGAGSLQPLALEGSLQKRGIVEQCCTSICSLYQLENYCN

SEQ ID NO: 1322 - protein, 510 aa, Homo sapiens
MAGSRQRGLRARVRPLFCALLLSLGRFVRGDGVGGDPAVALPHRRFEYKYSFKGPHLVQSDGTVPFWAHAGNAIPSSDQIRVAPSLKSQRGSVWTKTKAAFENWEVEVTFRVTGRGRIGADGLAIWYAENQGLEGPVFGSADLWNGVGIFFDSFDNDGKKNNPAIVIIGNNGQIHYDHQNDGASQALASCQRDFRNKPYPVRAKITYYQNTLTVMINNGFTPDKNDYEFCAKVENMIIPAQGHFGISAATGGLADDHDVLSFLTFQLTEPGKEPPTPDKEISEKEKEKYQEEFEHFQQELDKKKEEFQKGHPDLQGQPAEEIFESVGDRELRQVFEGQNRIHLEIKQLNRQLDMILDEQRRYVSSLTEEISKRGAGMPGQHGQITQQELDTVVKTQHEILRQVNEMKNSMSETVRLVSGMQHPGSAGGVYETTQHFIDIKEHLHIVKRDIDNLVQRNMPSNEKPKCPELPPFPSCLSTVHFIIFVVVQTVLFIGYIMYRSQQEAAAKKFF

SEQ ID NO: 1323 - protein, 326 aa, Homo sapiens
MKQDASRNAAYTVDCEDYVHVVEFNPFENGDSGNLIAYGGNNYVVIGTCTFQEEEADVEGIQYKTLRTFHHGVRVDGIAWSPETRLDSLPPVIKFCTSAADMKIRLFTSDLQDKNEYKVLEGHTDFINGLVFDPKEGQEIASVSDDHTCRIWNLEGVQTAHFVLHSPGMSVCWHPEETFKLMVAEKNGTIRFYDLLAQQAILSLESEQVPLMSAHWCLKNTFKVGAVAGNDWLIWDITRSSYPQNKRPVHMDRACLFRWSTISENLFATTGYPGKMASQFQIHHLGHPQPILMGSVAVGSGLSWHRTLPLCVIGGDHKLLFWVTEV

SEQ ID NO: 1324 - protein, 3036 aa, Homo sapiens
MHLHQVLTGAVNPGDNCYSVGSVGDVPFTAYGSGCDIVILANDFECVQIIPGAKHGNIQVSCVECSNQQGRIAASYGNAVCIFEPLGINSHKRNCQLKCQWLKTGQFFLSSVTYNLAWDPQDNRLLTATDSIQLWAPPGDDILEEEEEIDNTVPPVLNDWKCVWQCKTSVSVHLMEWSPDGEYFATAGKDDCLLKVWYPMTGWKSSIIPQDHHEVKRRQSSTQFSFVYLAHPRAVTGFSWRKTSKYMPRGSVCNVLLTSCHDGVCRLWAETLLPEDCLLGEQICETTTSSIASSLSHAGRHKDRIQHALETIHHLKNLRKGQRRSSVLVTHAELMPDQTAMHEVQRHISHHANALCHFHIAASINPATDIPNVLVGTAFNVDDGNGGFVVHWLNNKEFHFTSSTEVFMHQLRKLSDKQVDHENDDADREDEEHSQEDRERGLHMKLDHDLSLDRESEAGTGSSEHEDGEREGSPRTYSRLSVPMPLPTVLLDRKIETLLTEWNKNPDMLFTIHPVDGTFLVWHVKYLDEYNPGIFRQVQVSFSSRIPVAFPSGDASSLSKNIMMYACINATKDSHHTLLHQEGMSVGSPHGSQPHSRSHSTHMNILAPTVMMISKHIDGSLNQWAVTFADKSAFTTVLTVSHKFRYCGHRFHLNDLACHSVLPLLLTSSHHNALLTPELDCQWDSDNKLSRLMDPVKHIKGSSKQPLRNAATRTFHDPNAIYSELILWRVDPIGPLSYTGGVSELARINSLHTSAFSNVAWLPTLIPSYCLGTYCNSASACFVASDGKNLRLYQAVVDARKLLDELSDPESSKLIGEVFNIVSQQSTARPGCIIELDAITNQCGSNTQLLHVFQEDFIIGYKPHKEDMEKKETEIFFQPSQGYRPPPFSEKFFLVVIEKDSNNNSILHMWHLHLKSVQACLAKASEGASSESLLSVPGQKNVDSSPETSPSVSPMPHSSSIANLQTASKLILSSRLVYSQPLDLPESVEVIRATPSAGHLSSSSIYPVCLAPYLVVTTCSDNKVRFWKCCMEANPECNKSDEKEIYHWKRWPLMNDEGEDNSSTVSIVGRPVAVSCSYTGRLAVAYKQPIHHNGFVSKEFSMHVCIFECESTGGSEWVLEQTIHLDDLVKVGSVLDSRVSVDSNLFVYSKSDALLSKDRYLIPNIKHLVHLDWVSKEDGSHILTVGVGANIFMYGRLSGIVTEQTNSKDGVAVITLPLGGSIKQGVKSRWVLLRSIDLVSSVDGTPSLPVSLSWVRDGILVVGMDCEMHVYAQWKHAVKFGDTEADSSNAEEAAMQDHSTFKSNMLARKSVVEGTAISDDVFCSPTVIQDGGLFEAAHVLSPTLPQYHPTQLLELMDLGKVRRAKAILSHLVKCIAGEVAIVRDPDAGEGTKRHLSRTISVSGSTAKETVTVGKDGTRDYTEIDSIPPLPLYALLAADQDTSYRISEESTKIPQSYEDQTVSQPEDQYSELFQIQDIPTDDIDLEPEKRENKSKVINLSQYGPAYFGQEHARVLSSHLMHSSLPGLTRLEQMFLVALADTVATTSTELDESRDKSCSGRDTLDECGLRYLLAMRLHTCLLTSLPPLYRVQLLHQGVSTCHFAWAFHSEAEEELINMIPAIQRGDPQWSELRAMGIGWWVRNINTLRRCIEKVAKASFQRNNDALDAALFYLSMKKKAVVWGLFRSQHDEKMTTFFSHNFNEDRWRKAALKNAFSLLGKQRFEQSAAFFLLAGSLKDAIEVCLEKMEDIQLAMVIARLYESEFETSSTYISILNQKILGCQKDGSGFSCKRLHPDPFLRSLAYWVMKDYTRALDTLLEQTPKEDDEHQVIIKSCNPVAFSFYNYLRTHPLLIRRNLASPEGTLATLGLKTEKNFVDKINLIERKLFFTTANAHFKVGCPVLALEVLSKIPKVTKTSALSAKKDQPDFISHRMDDVPSHSKALSDGNGSSGIEWSNVTSSQYDWSQPIVKVDEEPLNLDWGEDHDSALDEEEDDAVGLVMKSTDAREKDKQSDQKASDPNMLLTPQEEDDPEGDTEVDVIAEQLKFRACLKILMTELRTLATGYEVDGGKLRFQLYNWLEKEIAALHEICNHESVIKEYSSKTYSKVESDLLDQEEMVDKPDIGSYERHQIERRRLQAKREHAERRKSWLQKNQDLLRVFLSYCSLHGAQGGGLASVRMELKFLLQESQQETTVKQLQSPLPLPTTLPLLSASIASTKTVIANPVLYLNNHIHDILYTIVQMKTPPHPSIEDVKVHTLHSLAASLSASIYQALCDSHSYSQTEGNQFTGMAYQGLLLSDRRRLRTESIEEHATPNSSPAQWPGVSSLINLLSSAQDEDQPKLNILLCEAVVAVYLSLLIHALATNSSSELFRLAAHPLNNRMWAAVFGGGVKLVVKPRRQSENISAPPVLSEDIDKHRRRFNMRMLVPGRPVKDATPPPVPAERPSYKEKFIPPELSMWDYFVAKPFLPLSDSGVIYDSDESIHSDEEDDAFFSDTQIQEHQDPNSYSWALLHLTMVKLALHNVKNFFPIAGLEFSELPVTSPLGIAVIKNLENWEQILQEKMDQFEGPPPNYINTYPTDLSVGAGPAILRNKAMLEPENTPFKSRDSSAFPVKRLWHFLVKQEVLQETFIRYIFTKKRKQSEVEADLGYPGGKAKVIHKESDMIMAFSVNKANCNEIVLASTHDVQELDVTSLLACQSYIWIGEEYDRESKSSDDVDYRGSTTTLYQPSATSYSASQVHPPSSLPWLGTGQTSTGASVLMKRNLHNVKRMTSHPVHQYYLTGAQDGSVRMFEWTRPQQLVCFRQAGNARVTRLYFNSQGNKCGVADGEGFLSIWQVNQTASNPKPYMSWQCHSKATSDFAFITSSSLVATSGHSNDNRNVCLWDTLISPGNSLIHGFTCHDHGATVLQYAPKQQLLISGGRKGHVCIFDIRQRQLIHTFQAHDSAIKALALDPYEEYFTTGSAEGNIKVWRLTGHGLIHSFKSEHAKQSIFRNIGAGVMQIDIIQGNRLFSCGADGTLKTRVLPNAFNIPNRILDIL

SEQ ID NO: 1325 - protein, 670 aa, Homo sapiens
MIASCLCYLLLPATRLFRALSDAFFTCRKNVLLANSSSPQVEGDFAMAPRGPEQEECEGLLQQWREEGLSQVLSTASEGPLIDKGLAQSSLALLMDNPGEENAASEDRWSSRQLSDLRAAENLDEPFPEMLGEEPLLEVEGVEGSMWAAIPMQSEPQYADCAALPVGALATEQWEEDPAVLAWSIAPEPVPQEEASIWPFEGLGQLQPPAVEIPYHEILWREWEDFSTQPDAQGLKAGDGPQFQFTLMSYNILAQDLMQQSSELYLHCHPDILNWNYRFVNLMQEFQHWDPDILCLQEVQEDHYWEQLEPSLRMMGFTCFYKRRTGCKTDGCAVCYKPTRFRLLCASPVEYFRPGLELLNRDNVGLVLLLQPLVPEGLGQVSVAPLCVANTHILYNPRRGDVKLAQMAILLAEVDKVARLSDGSHCPIILCGDLNSVPDSPLYNFIRDGELQYHGMPAWKVSGQEDFSHQLYQRKLQAPLWPSSLGITDCCQYVTSCHPKRSERRKYGRDFLLRFRFCSIACQRPVGLVLMEGVTDTKPERPAGWAESVLEEDASELEPAFSRTVGTIQHCLHLTSVYTHFLPQRGRPEVTTMPLGLGMTVDYIFFSAESCENGNRTDHRLYRDGTLKLLGRLSLLSEEILWAANGLPNPFCSSDHLCLLASFGMEVTAP

SEQ ID NO: 1326 - protein, 2539 aa, Homo sapiens
MNHPFGKEEAASQKQLFGFFCECLRRGEWELAQACVPQLQEGQGDIPKRVEDILQALVVCPNLLRCGQDINPQRVAWVWLLVLEKWLAREKKLLPVVFRRKLEFLLLSEDLQGDIPENILEELYETLTQGAVGHVPDGNPRRESWTPRLSSEAVSVLWDLLRQSPQPAQALLELLLEEDDGTGLCHWPLQNALVDLIRKALRALQGPDSVPPGVVDAIYGALRTLRCPAEPLGVELHLLCEELLEACRTEGSPLREERLLSCLLHKASRGLLSLYGHTYAEKVTEKPPRATASGKVSPDHLDPERAMLALFSNPNPAEAWKVAYFYCLSNNKHFLEQILVTALTLLKEEDFPNLGCLLDREFRPLSCLLVLLGWTHCQSLESAKRLLQTLHRTQGPGCDELLRDACDGLWAHLEVLEWCIQQSSNPIPKRDLLYHLHGGDSHSVLYTLHHLTNLPALREEDVLKLLQKVPAKDPQQEPDAVDAPVPEHLSQCQNLTLYQGFCAMKYAIYALCVNSHQHSQCQDCKDSLSEDLASATEPANDSLSSPGAANLFSTYLARCQQYLCSIPDSLCLELLENIFSLLLITSADLHPEPHLPEDYAEDDDIEGKSPSGLRSPSESPQHIAHPERKSERGSLGVPKTLAYTMPSHVKAEPKDSYPGPHRHSFLDLKHFTSGISGFLADEFAIGAFLRLLQEQLDEISSRSPPEKPKQESQSCSGSRDGLQSRLHRLSKVVSEAQWRHKVVTSNHRSEEQPSRRYQPATRHPSLRRGRRTRRSQADGRDRGSNPSLESTSSELSTSTSEGSLSAMSGRNELHSRLHPHPQSSLIPMMFSPPESLLASCILRGNFAEAHQVLFTFNLKSSPSSGELMFMERYQEVIQELAQVEHKIENQNSDAGSSTIRRTGSGRSTLQAIGSAAAAGMVFYSISDVTDKLLNTSGDPIPMLQEDFWISTALVEPTAPLREVLEDLSPPAMAAFDLACSQCQLWKTCKQLLETAERRLNSSLERRGRRIDHVLLNADGIRGFPVVLQQISKSLNYLLMSASQTKSESVEEKGGGPPRCSITELLQMCWPSLSEDCVASHTTLSQQLDQVLQSLREALELPEPRTPPLSSLVEQAAQKAPEAEAHPVQIQTQLLQKNLGKQTPSGSRQMDYLGTFFSYCSTLAAVLLQSLSSEPDHVEVKVGNPFVLLQQSSSQLVSHLLFERQVPPERLAALLAQENLSLSVPQVIVSCCCEPLALCSSRQSQQTSSLLTRLGTLAQLHASHCLDDLPLSTPSSPRTTENPTLERKPYSSPRDSSLPALTSSALAFLKSRSKLLATVACLGASPRLKVSKPSLSWKELRGRREVPLAAEQVARECERLLEQFPLFEAFLLAAWEPLRGSLQQGQSLAVNLCGWASLSTVLLGLHSPIALDVLSEAFEESLVARDWSRALQLTEVYGRDVDDLSSIKDAVLSCAVACDKEGWQYLFPVKDASLRSRLALQFVDRWPLESCLEILAYCISDTAVQEGLKCELQRKLAELQVYQKILGLQSPPVWCDWQTLRSCCVEDPSTVMNMILEAQEYELCEEWGCLYPIPREHLISLHQKHLLHLLERRDHDKALQLLRRIPDPTMCLEVTEQSLDQHTSLATSHFLANYLTTHFYGQLTAVRHREIQALYVGSKILLTLPEQHRASYSHLSSNPLFMLEQLLMNMKVDWATVAVQTLQQLLVGQEIGFTMDEVDSLLSRYAEKALDFPYPQREKRSDSVIHLQEIVHQAADPETLPRSPSAEFSPAAPPGISSIHSPSLRERSFPPTQPSQEFVPPATPPARHQWVPDETESICMVCCREHFTMFNRRHHCRRCGRLVCSSCSTKKMVVEGCRENPARVCDQCYSYCNKDVPEEPSEKPEALDSSKNESPPYSFVVRVPKADEVEWILDLKEEENELVRSEFYYEQAPSASLCIAILNLHRDSIACGHQLIEHCCRLSKGLTNPEVDAGLLTDIMKQLLFSAKMMFVKAGQSQDLALCDSYISKVDVLNILVAAAYRHVPSLDQILQPAAVTRLRNQLLEAEYYQLGVEVSTKTGLDTTGAWHAWGMACLKAGNLTAAREKFSRCLKPPFDLNQLNHGSRLVQDVVEYLESTVRPFVSLQDDDYFATLRELEATLRTQSLSLAVIPEGKIMNNTYYQECLFYLHNYSTNLAIISFYVRHSCLREALLHLLNKESPPEVFIEGIFQPSYKSGKLHTLENLLESIDPTLESWGKYLIAACQHLQKKNYYHILYELQQFMKDQVRAAMTCIRFFSHKAKSYTELGEKLSWLLKAKDHLKIYLQETSRSSGRKKTTFFRKKMTAADVSRHMNTLQLQMEVTRFLHRCESAGTSQITTLPLPTLFGNNHMKMDVACKVMLGGKNVEDGFGIAFRVLQDFQLDAAMTYCRAARQLVEKEKYSEIQQLLKCVSESGMAAKSDGDTILLNCLEAFKRIPPQELEGLIQAIHNDDNKVRAYLICCKLRSAYLIAVKQEHSRATALVQQVQQAAKSSGDAVVQDICAQWLLTSHPRGAHGPGSRK

SEQ ID NO: 1327 - protein, 1738 aa, Homo sapiens
MLKRKQSSRVEAQPVTDFGPDESLSDNADILWINKPWVHSLLRICAIISVISVCMNTPMTFEHYPPLQYVTFTLDTLLMFLYTAEMIAKMHIRGIVKGDSSYVKDRWCVFDGFMVFCLWVSLVLQVFEIADIVDQMSPWGMLRIPRPLIMIRAFRIYFRFELPRTRITNILKRSGEQIWSVSIFLLFFLLLYGILGVQMFGTFTYHCVVNDTKPGNVTWNSLAIPDTHCSPELEEGYQCPPGFKCMDLEDLGLSRQELGYSGFNEIGTSIFTVYEAASQEGWVFLMYRAIDSFPRWRSYFYFITLIFFLAWLVKNVFIAVIIETFAEIRVQFQQMWGSRSSTTSTATTQMFHEDAAGGWQLVAVDVNKPQGRAPACLQKMMRSSVFHMFILSMVTVDVIVAASNYYKGENFRRQYDEFYLAEVAFTVLFDLEALLKIWCLGFTGYISSSLHKFELLLVIGTTLHVYPDLYHSQFTYFQVLRVVRLIKISPALEDFVYKIFGPGKKLGSLVVFTASLLIVMSAISLQMFCFVEELDRFTTFPRAFMSMFQILTQEGWVDVMDQTLNAVGHMWAPVVAIYFILYHLFATLILLSLFVAVILDNLELDEDLKKLKQLKQSEANADTKEKLPLRLRIFEKFPNRPQMVKISKLPSDFTVPKIRESFMKQFIDRQQQDTCCLLRSLPTTSSSSCDHSKRSAIEDNKYIDQKLRKSVFSIRARNLLEKETAVTKILRACTRQRMLSGSFEGQPAKERSILSVQHHIRQERRSLRHGSNSQRISRGKSLETLTQDHSNTVRYRNAQREDSEIKMIQEKKEQAEMKRKVQEEELRENHPYFDKPLFIVGREHRFRNFCRVVVRARFNASKTDPVTGAVKNTKYHQLYDLLGLVTYLDWVMIIVTICSCISMMFESPFRRVMHAPTLQIAEYVFVIFMSIELNLKIMADGLFFTPTAVIRDFGGVMDIFIYLVSLIFLCWMPQNVPAESGAQLLMVLRCLRPLRIFKLVPQMRKVVRELFSGFKEIFLVSILLLTLMLVFASFGVQLFAGKLAKCNDPNIIRREDCNGIFRINVSVSKNLNLKLRPGEKKPGFWVPRVWANPRNFNFDNVGNAMLALFEVLSLKGWVEVRDVIIHRVGPIHGIYIHVFVFLGCMIGLTLFVGVVIANFNENKGTALLTVDQRRWEDLKSRLKIAQPLHLPPRPDNDGFRAKMYDITQHPFFKRTIALLVLAQSVLLSVKWDVEDPVTVPLATMSVVFTFIFVLEVTMKIIAMSPAGFWQSRRNRYDLLVTSLGVVWVVLHFALLNAYTYMMGACVIVFRFFSICGKHVTLKMLLLTVVVSMYKSFFIIVGMFLLLLCYAFAGVVLFGTVKYGENINRHANFSSAGKAITVLFRIVTGEDWNKIMHDCMVQPPFCTPDEFTYWATDCGNYAGALMYFCSFYVIIAYIMLNLLVAIIVENFSLFYSTEEDQLLSYNDLRHFQIIWNMVDDKREGVIPTFRVKFLLRLLRGRLEVDLDKDKLLFKHMCYEMERLHNGGDVTFHDVLSMLSYRSVDIRKSLQLEELLAREQLEYTIEEEVAKQTIRMWLKKCLKRIRAKQQQSCSIIHSLRESQQQELSRFLNPPSIETTQPSEDTNANSQDNSMQPETSSQQQLLSPTLSDRGGSRQDAADAGKPQRKFGQWRLPSAPKPISHSVSSVNLRFGGRTTMKSVVCKMNPMTDAASCGSEVKKWWTRQLTVESDESGDDLLDI

SEQ ID NO: 1328 - protein, 925 aa, Homo sapiens
MNRFRVSKFRHTEARPPRRESWISDIRAGTAPSCRNHIKSSCSLIAFNSDRPGVLGIVPLQGQGEDKRRVAHLGCHSDLVTDLDFSPFDDFLLATGSADRTVKLWRLPGPGQALPSAPGVVLGPEDLPVEVLQFHPTSDGILVSAAGTTVKVWDAAKQQPLTELAAHGDLVQSAVWSRDGALVGTACKDKQLRIFDPRTKPRASQSTQAHENSRDSRLAWMGTWEHLVSTGFNQMREREVKLWDTRFFSSALASLTLDTSLGCLVPLLDPDSGLLVLAGKGERQLYCYEVVPQQPALSPVTQCVLESVLRGAALVPRQALAVMSCEVLRVLQLSDTAIVPIGYHVPRKAVEFHEDLFPDTAGCVPATDPHSWWAGDNQQVQKVSLNPACRPHPSFTSCLVPPAEPLPDTAQPAVMETPVGDADASEGFSSPPSSLTSPSTPSSLGPSLSSTSGIGTSPSLRSLQSLLGPSSKFRHAQGTVLHRDSHITNLKGLNLTTPGESDGFCANKLRVAVPLLSSGGQVAVLELRKPGRLPDTALPTLQNGAAVTDLAWDPFDPHRLAVAGEDARIRLWRVPAEGLEEVLTTPETVLTGHTEKICSLRFHPLAANVLASSSYDLTVRIWDLQAGADRLKLQGHQDQIFSLAWSPDGQQLATVCKDGRVRVYRPRSGPEPLQEGPGPKGGRGARIVWVCDGRCLLVSGFDSQSERQLLLYEAEALAGGPLAVLGLDVAPSTLLPSYDPDTGLVLLTGKGDTRVFLYELLPESPFFLECNSFTSPDPHKGLVLLPKTECDVREVELMRCLRLRQSSLEPVAFRLPRVRKEFFQDDVFPDTAVIWEPVLSAEAWLQGANGQPWLLSLQPPDMSPVSQAPREAPARRAPSSAQYLEEKSDQQKKEELLNAMVAKLGNREDPLPQDSFEGVDEDEWD

SEQ ID NO: 1329 - protein, 304 aa, Homo sapiens
MSLNPPIFLKRSEENSSKFVETKQSQTTSIASEDPLQNLCLASQEVLQKAQQSGRSKCLKCGGSRMFYCYTCYVPVENVPIEQIPLVKLPLKIDIIKHPNETDGKSTAIHAKLLAPEFVNIYTYPCIPEYEEKDHEVALIFPGPQSISIKDISFHLQKRIQNNVRGKNDDPDKPSFKRKRTEEQEFCDLNDSKCKGTTLKKIIFIDSTWNQTNKIFTDERLQGLLQVELKTRKTCFWRHQKGKPDTFLSTIEAIYYFLVDYHTDILKEKYRGQYDNLLFFYSFMYQLIKNAKCSGDKETGKLTH

SEQ ID NO: 1330 - protein, 2845 aa, Homo sapiens
MALGKVLAMALVLALAVLGSLSPGARAGDCKGQRQVLREAPGFVTDGAGNYSVNGNCEWLIEAPSPQHRILLDFLFLDTECTYDYLFVYDGDSPRGPLLASLSGSTRPPPIEASSGKMLLHLFSDANYNLLGFNASFRFSLCPGGCQSHGQCQPPGVCACEPGWGGPDCGLQECSAYCGSHGTCASPLGPCRCEPGFLGRACDLHLWENQGAGWWHNVSARDPAFSARIGAAGAFLSPPGLLAVFGGQDLNNALGDLVLYNFSANTWESWDLSPAPAARHSHVAVAWAGSLVLMGGELADGSLTNDVWAFSPLGRGHWELLAPPASSSSGPPGLAGHAAALVDDVWLYVSGGRTPHDLFSSGLFRFRLDSTSGGYWEQVIPAGGRPPAATGHSMVFHAPSRALLVHGGHRPSTARFSVRVNSTELFHVDRHVWTTLKGRDGLQGPRERAFHTASVLGNYMVVYGGNVHTHYQEEKCYEDGIFFYHLGCHQWVSGAELAPPGTPEGRAAPPSGRYSHVAAVLGGSVLLVAGGYSGRPRGDLMAYKVPPFVFQAPAPDYHLDYCSMYTDHSVCSRDPECSWCQGACQAAPPPGTPLGACPAASCLGLGRLLGDCQACLAFSSPTAPPRGPGTLGWCVHNESCLPRPEQARCRGEQISGTVGWWGPAPVFVTSLEACVTQSFLPGLHLLTFQQPPNTSQPDKVSIVRSTTITLTPSAETDVSLVYRGFIYPMLPGGPGGPGAEDVAVWTRAQRLHVLARMARGPDTENMEEVGRWVAHQEKETRRLQRPGSARLFPLPGRDHKYAVEIQGQLNGSAGPGHSELTLLWDRTGVPGGSEISFFFLEPYRSSSCTSYSSCLGCLADQGCGWCLTSATCHLRQGGAHCGDDGAGGSLLVLVPTLCPLCEEHRDCHACTQDPFCEWHQSTSRKGDAACSRRGRGRGALKSPEECPPLCSQRLTCEDCLANSSQCAWCQSTHTCFLFAAYLARYPHGGCRGWDDSVHSEPRCRSCDGFLTCHECLQSHECGWCGNEDNPTLGRCLQGDFSGPLGGGNCSLWVGEGLGLPVALPARWAYARCPDVDECRLGLARCHPRATCLNTPLSYECHCQRGYQGDGISHCNRTCLEDCGHGVCSGPPDFTCVCDLGWTSDLPPPTPAPGPPAPRCSRDCGCSFHSHCRKRGPGFCDECQDWTWGEHCERCRPGSFGNATGSRGCRPCQCNGHGDPRRGHCDNLSGLCFCQDHTEGAHCQLCSPGYYGDPRAGGSCFRECGGRALLTNVSSVALGSRRVGGLLPPGGGAARAGPGLSYCVWVVSATEELQPCAPGTLCPPLTLTFSPDSSTPCTLSYVLAFDGFPRFLDTGVVQSDRSLIAAFCGQRRDRPLTVQALSGLLVLHWEANGSSSWGFNASVGSARCGSGGPGSCPVPQECVPQDGAAGAGLCRCPQGWAGPHCRMALCPENCNAHTGAGTCNQSLGVCICAEGFGGPDCATKLDGGQLVWETLMDSRLSADTASRFLHRLGHTMVDGPDATLWMFGGLGLPQGLLGNLYRYSVSERRWTQMLAGAEDGGPGPSPRSFHAAAYVPAGRGAMYLLGGLTAGGVTRDFWVLNLTTLQWRQEKAPQTVELPAVAGHTLTARRGLSLLLVGGYSPENGFNQQLLEYQLATGTWVSGAQSGTPPTGLYGHSAVYHEATDSLYVFGGFRFHVELAAPSPELYSLHCPDRTWSLLAPSQGAKRDRMRNVRGSSRGLGQVPGEQPGSWGFREVRKKMALWAALAGTGGFLEEISPHLKEPRPRLFHASALLGDTMVVLGGRSDPDEFSSDVLLYQVNCNAWLLPDLTRSASVGPPMEESVAHAVAAVGSRLYISGGFGGVALGRLLALTLPPDPCRLLSSPEACNQSGACTWCHGACLSGDQAHRLGCGGSPCSPMPRSPEECRRLRTCSECLARHPRTLQPGDGEASTPRCKWCTNCPEGACIGRNGSCTSENDCRINQREVFWAGNCSEAACGAADCEQCTREGKCMWTRQFKRTGETRRILSVQPTYDWTCFSHSLLNVSPMPVESSPPLPCPTPCHLLPNCTSCLDSKGADGGWQHCVWSSSLQQCLSPSYLPLRCMAGGCGRLLRGPESCSLGCAQATQCALCLRRPHCGWCAWGGQDGGGRCMEGGLSGPRDGLTCGRPGASWAFLSCPPEDECANGHHDCNETQNCHDQPHGYECSCKTGYTMDNMTGLCRPVCAQGCVNGSCVEPDHCRCHFGFVGRNCSTECRCNRHSECAGVGARDHCLLCRNHTKGSHCEQCLPLFVGSAVGGGTCRPCHAFCRGNSHICISRKELQMSKGEPKKYSLDPEEIENWVTEGPSEDEAVCVNCQNNSYGEKCESCLQGYFLLDGKCTKCQCNGHADTCNEQDGTGCPCQNNTETGTCQGSSPSDRRDCYKYQCAKCRESFHGSPLGGQQCYRLISVEQECCLDPTSQTNCFHEPKRRALGPGRTVLFGVQPKFTNVDIRLTLDVTFGAVDLYVSTSYDTFVVRVAPDTGVHTVHIQPPPAPPPPPPPADGGPRGAGDPGGAGASSGPGAPAEPRVREVWPRGLITYVTVTEPSAVLVVRGVRDRLVITYPHEHHALKSSRFYLLLLGVGDPSGPGANGSADSQGLLFFRQDQAHIDLFVFFSVFFSCFFLFLSLCVLLWKAKQALDQRQEQRRHLQEMTKMASRPFAKVTVCFPPDPTAPASAWKPAGLPPPAFRRSEPFLAPLLLTGAGGPWGPMGGGCCPPAIPATTAGLRAGPITLEPTEDGMAGVATLLLQLPGGPHAPNGACLGSALVTLRHRLHEYCGGGGGAGGSGHGTGAGRKGLLSQDNLTSMSL

SEQ ID NO: 1331 - protein, 617 aa, Homo sapiens
MISPSLELLHSGLCKFPEVEGKMTTFKEAVTFKDVAVVFTEEELGLLDPAQRKLYRDVMLENFRNLLSVGNQPFHQDTFHFLGKEKFWKMKTTSQREGNSGGKIQIEMETVPEAGPHEEWSCQQIWEQIASDLTRSQNSIRNSSQFFKEGDVPCQIEARLSISHVQQKPYRCNECKQSFSDVSVFDLHQQSHSGEKSHTCGECGKSFCYSPALHIHQRVHMGEKCYKCDVCGKEFNQSSHLQTHQRVHTGEKPFKCGQCGKGFHSRSALNVHCKLHTGEKPYNCEECGKAFIHDSQLQEHQRIHTGEKPFKCDICGKSFRVRSRLNRHSMVHTGEKPFRCDTCGKNFRQRSALNSHSMVHIEEKPYKCEQCGKGFICRRDFCKHQMVHTGEKPYNCKECGKTFRWSSCLLNHQQVHSGQKSFKCEECGKGFYTNSRRSSHQRSHNGEKPYNCEECGKDYKRRLDLEFHQRVHTGERPYNCKECGKSFGWASCLLKHQRLHSGEKPFKCEECGKRFTQSSQLHSHQTCHTGEKLYKCEQCEKGYNSKFNLDMHQRVHGGERPYNCKECGKSFGWASCLLKHQRLHSGEKPLKSGVWEEIYSEFTASFTSVSLCGRKAI

SEQ ID NO: 1332 - protein, 889 aa, Homo sapiens
MDARGGGGRPGESPGATPAPGPPPPPPPAPPQQQPPPPPPPAPPPGPGPAPPQHPPRAEALPPEAADEGGPRGRLRSRDSSCGRPGTPGAASTAKGSPNGECGRGEPQCSPAGPEGPARGPKVSFSCRGAASGPAPGPGPAEEAGSEEAGPAGEPRGSQASFMQRQFGALLQPGVNKFSLRMFGSQKAVEREQERVKSAGAWIIHPYSDFRFYWDFTMLLFMVGNLIIIPVGITFFKDETTAPWIVFNVVSDTFFLMDLVLNFRTGIVIEDNTEIILDPEKIKKKYLRTWFVVDFVSSIPVDYIFLIVEKGIDSEVYKTARALRIVRFTKILSLLRLLRLSRLIRYIHQWEEIFHMTYDLASAVMRICNLISMMLLLCHWDGCLQFLVPMLQDFPRNCWVSINGMVNHSWSELYSFALFKAMSHMLCIGYGRQAPESMTDIWLTMLSMIVGATCYAMFIGHATALIQSLDSSRRQYQEKYKQVEQYMSFHKLPADFRQKIHDYYEHRYQGKMFDEDSILGELNGPLREEIVNFNCRKLVASMPLFANADPNFVTAMLTKLKFEVFQPGDYIIREGTIGKKMYFIQHGVVSVLTKGNKEMKLSDGSYFGEICLLTRGRRTASVRADTYCRLYSLSVDNFNEVLEEYPMMRRAFETVAIDRLDRIGKKNSILLHKVQHDLNSGVFNNQENAIIQEIVKYDREMVQQAELGQRVGLFPPPPPPPQVTSAIATLQQAAAMSFCPQVARPLVGPLALGSPRLVRRPPPGPAPAAASPGPPPPASPPGAPASPRAPRTSPYGGLPAAPLAGPALPARRLSRASRPLSASQPSLPHGAPGPAASTRPASSSTPRLGPTPAARAAAPSPDRRDSASPGAAGGLDPQDSARSRLSSNL

SEQ ID NO: 1333 - protein, 467 aa, Homo sapiens
MRTAPSLRRCVCLLLAAILDLARGYLTVNIEPLPPVVAGDAVTLKCNFKTDGRMREIVWYRVTDGGTIKQKIFTFDAMFSTNYSHMENYRKREDLVYQSTVRLPEVRISDNGPYECHVGIYDRATREKVVLASGNIFLNVMAPPTSIEVVAADTPAPFSRYQAQNFTLVCIVSGGKPAPMVYFKRDGEPIDAVPLSEPPAASSGPLQDSRPFRSLLHRDLDDTKMQKSLSLLDAENRGGRPYTERPSRGLTPDPNILLQPTTENIPETVVSREFPRWVHSAEPTYFLRHSRTPSSDGTVEVRALLTWTLNPQIDNEALFSCEVKHPALSMPMQAEVTLVAPKGPKIVMTPSRARVGDTVRILVHGFQNEVFPEPMFTWTRVGSRLLDGSAEFDGKELVLERVPAELNGSMYRCTAQNPLGSTDTHTRLIVFENPNIPRGTEDSNGSIGPTGARLTLVLALTVILELT

SEQ ID NO: 1334 - protein, 1196 aa, Homo sapiens
MTECTSLQFVSPFAFEAMQKVDVVCLASLSDPELRLLLPCLVRMALCAPADQSQSWAQDKKLILRLLSGVEAVNSIVALLSVDFHALEQDASKEQQLRHKLGGGSGESILVSQLQHGLTLEFEHSDSPRRLRLVLSELLAIMNKVSESNGEFFFKSSELFESPVYLEEAADVLCILQAELPSLLPIVDVAEALLHVRNGAWFLCLLVANVPDSFNEVCRGLIKNGERQDEESLGGRRRTDALRFLCKMNPSQALKVRGMVVEECHLPGLGVALTLDHTKNEACEDGVSDLVCFVSGLLLGTNAKVRTWFGTFIRNGQQRKRETSSSVLWQMRRQLLLELMGILPTVRSTRIVEEADVDMEPNVSVYSGLKEEHVVKASALLRLYCALMGIAGLKPTEEEAEQLLQLMTSRPPATPAGVRFVSLSFCMLLAFSTLVSTPEQEQLMVVWLSWMIKEEAYFESTSGVSASFGEMLLLVAMYFHSNQLSAIIDLVCSTLGMKIVIKPSSLSRMKTIFTQEIFTEQVVTAHAVRVPVTSNLSANITGFLPIHCIYQLLRSRSFTKHKVSIKDWIYRQLCETSTPLHPQLLPLIDVYINSILTPASKSNPEATNQPVTEQEILNIFQGVIGGDNIRLNQRFSITAQLLVLYYILSYEEALLANTKTLAAMQRKPKSYSSSLMDQIPIKFLIRQAQGLQQELGGLHSALLRLLATNYPHLCIVDDWICEEEITGTDALLRRMLLTNNAKNHSPKQLQEAFSAVPVNNTQVMQIIEHLTLLSASELIPYAEVLTSNMSQLLNSGVPRRILQTVNKLWMVLNTVMPRRLWVMTVNALQPSIKFVRQQKYTQNDLMIDPLIVLRCDQRVHRCPPLMDITLHMLNGYLLASKAYLSAHLKETEQDRPSQNNTIGLVGQTDAPEVTREELKNALLAAQDSAAVQILLEICLPTEEEKANGVNPDSLLRNVQSVITTSAPNKGMEEGEDNLLCNLREVQCLICCLLHQMYIADPNIAKLVHFQGYPCELLPLTVAGIPSMHICLDFIPELIAQPELEKQIFAIQLLSHLCIQYALPKSLSVARLAVNVMGTLLTVLTQAKRYAFFMPTLPSLVSFCRAFPPLYEDIMSLLIQIGQVCASDVATQTRDIDPIITRLQQIKEKPSGWSQICKDSSYKNGSRDTGSMDPDVQLCHCIERTVIEIINMSVSGI

SEQ ID NO: 1335 - protein, 678 aa, Homo sapiens
MPTWGARPASPDRFAVSAEAENKVREQQPHVERIFSVGVSVLPKDCPDNPHIWLQLEGPKENASRAKEYLKGLCSPELQDEIHYPPKLHCIFLGAQGFFLDCLAWSTSAHLVPRAPGSLMISGLTEAFVMAQSRVEELAERLSWDFTPGPSSGASQCTGVLRDFSALLQSPGDAHREALLQLPLAVQEELLSLVQEASSGQGPGALASWEGRSSALLGAQCQGVRAPPSDGRESLDTGSMGPGDCRGARGDTYAVEKEGGKQGGPREMDWGWKELPGEEAWEREVALRPQSVGGGARESAPLKGKALGKEEIALGGGGFCVHREPPGAHGSCHRAAQSRGASLLQRLHNGNASPPRVPSPPPAPEPPWHCGDRGDCGDRGDVGDRGDKQQGMARGRGPQWKRGARGGNLVTGTQRFKEALQDPFTLCLANVPGQPDLRHIVIDGSNVAMVHGLQHYFSSRGIAIAVQYFWDRGHRDITVFVPQWRFSKDAKVRESHFLQKLYSLSLLSLTPSRVMDGKRISSYDDRFMVKLAEETDGIIVSNDQFRDLAEESEKWMAIIRERLLPFTFVGNLFMVPDDPLGRNGPTLDEFLKKPARTQGSSKAQHPSRGFAEHGKQQQGREEEKGSGGIRKTRETERLRRQLLEVFWGQDHKVDFILQREPYCRDINQLSEALLSLNF

SEQ ID NO: 1336 - protein, 394 aa, Homo sapiens
MLSSFNEWFWQDRFWLPPNVTWTELEDRDGRVYPHPQDLLAALPLALVLLAMRLAFERFIGLPLSRWLGVRDQTRRQVKPNATLEKHFLTEGHRPKEPQLSLLAAQCGLTLQQTQRWFRRRRNQDRPQLTKKFCEASWRFLFYLSSFVGGLSVLYHESWLWAPVMCWDRYPNQTLKPSLYWWYLLELGFYLSLLIRLPFDVKRKDFKEQVIHHFVAVILMTFSYSANLLRIGSLVLLLHDSSDYLLEACKMVNYMQYQQVCDALFLIFSFVFFYTRLVLFPTQILYTTYYESISNRGPFFGYYFFNGLLMLLQLLHVFWSCLILRMLYSFMKKGQMEKDIRSDVEESDSSEEAAAAQEPLQLKNGAAGGPRPAPTDGPRSRVAGRLTNRHTTAT

SEQ ID NO: 1337 - protein, 489 aa, Homo sapiens
MTPIVTVLICLRLSLGPRTHVQAGTLPKPTLWAEPGSVITQGSPVTLWCQGILETQEYRLYREKKTAPWITRIPQEIVKKGQFPIPSITWEHTGRYRCFYGSHTAGWSEPSDPLELVVTGAYIKPTLSALPSPVVTSGGNVTLHCVSQVAFGSFILCKEGEDEHPQCLNSQPRTHGWSRAIFSVGPVSPSRRWSYRCYAYDSNSPHVWSLPSDLLELLVLGVSKKPSLSVQPGPIVAPGESLTLQCVSDVSYDRFVLYKEGERDFLQLPGPQPQAGLSQANFTLGPVSRSYGGQYRCSGAYNLSSEWSAPSDPLDILIAGQFRGRPFISVHPGPTVASGENVTLLCQSWGPFHTFLLTKAGAADAPLRLRSIHEYPKYQAEFPMSPVTSAHSGTYRCYGSLSSNPYLLSHPSDSLELMVSGAAETLSPPQNKSDSKAGAANTLSPSQNKTASHPQDYTVENLIRMGIAGLVLVVLGILLFEAQHSQRSL

SEQ ID NO: 1338 - protein, 466 aa, Homo sapiens
MTPILTVLICLGLSLGPRTHVQAGHLPKPTLWAEPGSVIIQGSPVTLRCQGSLQAEEYHLYRENKSASWVRRIQEPGKNGQFPIPSITWEHAGRYHCQYYSHNHSSEYSDPLELVVTGAYSKPTLSALPSPVVTSGGNVTLQCVSQVAFDGFILCKEGEDEHPQRLNSHSHARGWSWAIFSVGPVSPSRRWSYRCYAYDSNSPYVWSLPSDLLELLVPGVSKKPSLSVQPGPMVAPGESLTLQCVSDVGYDRFVLYKEGERDFLQRPGWQPQAGLSQANFTLGPVSPSHGGQYRCYSAHNLSSEWSAPSDPLDILITGQFYDRPSLSVQPVPTVAPGKNVTLLCQSRGQFHTFLLTKEGAGHPPLHLRSEHQAQQNQAEFRMGPVTSAHVGTYRCYSSLSSNPYLLSLPSDPLELVVSASLGQHPQDYTVENLIRMGVAGLVLVVLGILLFEAQHSQRSLQDAAGR

SEQ ID NO: 1339 - protein, 483 aa, Homo sapiens
MTPILTVLICLGLSLGPRTHVQAGHLPKPTLWAEPGSVIIQGSPVTLRCQGSLQAEEYHLYRENKSASWVRRIQEPGKNGQFPIPSITWEHAGRYHCQYYSHNHSSEYSDPLELVVTGAYSKPTLSALPSPVVTSGGNVTLQCVSQVAFDGFILCKEGEDEHPQRLNSHSHARGWSWAIFSVGPVSPSRRWSYRCYAYDSNSPYVWSLPSDLLELLVPGVSKKPSLSVQPGPMVAPGESLTLQCVSDVGYDRFVLYKEGERDFLQRPGWQPQAGLSQANFTLGPVSPSHGGQYRCYSAHNLSSEWSAPSDPLDILITGQFYDRPSLSVQPVPTVAPGKNVTLLCQSRGQFHTFLLTKEGAGHPPLHLRSEHQAQQNQAEFRMGPVTSAHVGTYRCYSSLSSNPYLLSLPSDPLELVVSEAAETLSPSQNKTDSTTTSLGQHPQDYTVENLIRMGVAGLVLVVLGILLFEAQHSQRSLQDAAGR

SEQ ID NO: 1340 - protein, 451 aa, Homo sapiens
MPREIITLQLGQCGNQIGFEFWKQLCAEHGISPEGIVEEFATEGTDRKDVFFYQADDEHYIPRAVLLDLEPRVIHSILNSPYAKLYNPENIYLSEHGGGAGNNWASGFSQGEKIHEDIFDIIDREADGSDSLEGFVLCHSIAGGTGSGLGSYLLERLNDRYPKKLVQTYSVFPYQDEMSDVVVQPYNSLLTLKRLTQNADCVVVLDNTALNRIATDRLHIQNPSFSQINQLVSTIMSASTTTLRYPGYMNNDLIGLIASLIPTPRLHFLMTGYTPLTTDQSVASVRKTTVLDVMRRLLQPKNVMVSTGRDRQTNHCYIAILNIIQGEVDPTQVHKSLQRIRERKLANFIPWGPASIQVALSRKSPYLPSAHRVSGLMMANHTSISSLFESSCQQFDKLRKRDAFLEQFRKEDMFKDNFDEMDRSREVVQELIDEYHAATQPDYISWGTQEQ

SEQ ID NO: 1341 - protein, 451 aa, Homo sapiens
MPREIITLQLGQCGNQIGFEFWKQLCAEHGISPEGIVEEFATEGTDRKDVFFYQADDEHYIPRAVLLDLEPRVIHSILNSPYAKLYNPENIYLSEHGGGAGNNWASGFSQGEKIHEDIFDIIDREADGSDSLEGFVLCHSIAGGTGSGLGSYLLERLNDRYPKKLVQTYSVFPNQDEMSDVVVQPYNSLLTLKRLTQNADCVVVLDNTALNRIATDRLHIQNPSFSQINQLVSTIMSASTTTLRYPGYMNNDLIGLIASLIPTPRLHFLMTGYTPLTTDQSVASVRKTTVLDVMRRLLQPKNVMVSTGRDRQTNHCYIAILNIIQGEVDPTQVHKSLQRIRERKLANFIPWGPASIQVALSRKSPYLPSAHRVSGLMMANHTSISSLFERTCRQYDKLRKREAFLEQFRKEDMFKDNFDEMDTSREIVQQLIDEYHAATRPDYISWGTQEQ

SEQ ID NO: 1342 - protein, 331 aa, Homo sapiens
MLLLINVILTLWVSCANGQEVKPCDFPEIQHGGLYYKSLRRLYFPAAAGQSYSYYCDQNFVTPSGSYWDYIHCTQDGWSPTVPCLRTCSKSDIEIENGFISESSSIYILNKEIQYKCKPGYATADGNSSGSITCLQNGWSAQPICIKFCDMPVFENSRAKSNGMRFKLHDTLDYECYDGYEISYGNTTGSIVCGEDGWSHFPTCYNSSEKCGPPPPISNGDTTSFLLKVYVPQSRVEYQCQSYYELQGSNYVTCSNGEWSEPPRCIHPCIITEENMNKNNIQLKGKSDIKYYAKTGDTIEFMCKLGYNANTSVLSFQAVCREGIVEYPRCE

SEQ ID NO: 1343 - protein, 146 aa, Homo sapiens [sequence omitted]

SEQ ID NO: 1344 - protein, 343 aa, Homo sapiens
MAGGRPHLKRSFSIIPCFVFVESVLLGIVILLAYRLEFTDTFPVHTQGFFCYDSTYAKPYPGPEAASRVPPALVYALVTAGPTLTILLGELARAFFPAPPSAVPVIGESTIVSGACCRFSPPVRRLVRFLGVYSFGLFTTTIFANAGQVVTGNPTPHFLSVCRPNYTALGCLPPSPDRPGPDRFVTDQGACAGSPSLVAAARRAFPCKDAALCAYAVTYTAMYVTLVFRVKGSRLVKPSLCLALLCPAFLVGVVRVAEYRNHWSDVLAGFLTGAAIATFLVTCVVHNFQSRPPSGRRLSPWEDLGQAPTMDSPLEKNPRSAGRIRHRHGSPHPSRRTAPAVAT

SEQ ID NO: 1345 - protein, 1015 aa, Homo sapiens
MGAERRLLSIKEAFRLAQQPHQNQAKLVVALSRTYRTMDDKTVFHEEFIHYLKYVMVVYKREPAVERVIEFAAKFVTSFHQSDMEDDEEEEDGGLLNYLFTFLLKSHEANSNAVRFRVCLLINKLLGSMPENAQIDDDVFDKINKAMLIRLKDKIPNVRIQAVLALSRLQDPKDDECPVVNAYATLIENDSNPEVRRAVLSCIAPSAKTLPKIVGRTKDVKEAVRKLAYQVLAEKVHMRAMSIAQRVMLLQQGLNDRSDAVKQAMQKHLLQGWLRFSEGNILELLHRLDVENSSEVAVSVLNALFSITPLSELVGLCKNNDGRKLIPVETLTPEIALYWCALCEYLKSKGDEGEEFLEQILPEPVVYADYLLSYIQSIPVVNEEHRGDFSYIGNLMTKEFIGQQLILIIKSLDTSEEGGRKKLLAVLQEILILPTIPISLVSFLVERLLHIIIDDNKRTQIVTEIISEIRAPIVTVGVNNDPADVRKKELKMAEIKVKLIEAKEALENCITLQDFNRASELKEEIKALEDARINLLKETEQLEIKEVHIEKNDAETLQKCLILCYELLKQMSISTGLSATMNGIIESLILPGIISIHPVVRNLAVLCLGCCGLQNQDFARKHFVLLLQVLQIDDVTIKISALKAIFDQLMTFGIEPFKTKKIKTLHCEGTEINSDDEQESKEVEETATAKNVLKLLSDFLDSEVSELRTGAAEGLAKLMFSGLLVSSRILSRLILLWYNPVTEEDVQLRHCLGVFFPVFAYASRTNQECFEEAFLPTLQTLANAPASSPLAEIDITNVAELLVDLTRPSGLNPQAKTSQDYQALTVHDNLAMKICNEILTSPCSPEIRVYTKALSSLELSSHLAKDLLVLLNEILEQVKDRTCLRALEKIKIQLEKGNKEFGDQAEAAQDATLTTTTFQNEDEKNKEVYMTPLRGVKATQASKSTQLKTNRGQRKVTVSARTNRRCQTAEADSESDHEVPEPESEMKMRLPRRAKTAALEKSKLNLAQFLNEDLS

SEQ ID NO: 1346 - protein, 815 aa, Homo sapiens
MEVRASLQKVSGSSDSVATMNSEEFVLVPQYADDNSTKHEEKPQLKIVSNGDEQLEKAMEEILRDSEKRPSSLLVDCQSSSEISDHSFGDIPASQTNKPSLQLILDPSNTEISTPRPSSPGGLPEEDSVLFNKLTYLGCMKVSSPRNEVEALRAMATMKSSSQYPFPVTLYVPNVPEGSVRIIDQSSNVEIASFPIYKVLFCARGHDGTTESNCFAFTESSHGSEEFQIHVFSCEIKEAVSRILYSFCTAFKRSSRQVSDVKDSVIPTPDSDVFTFSVSLEVKEDDGKGNFSPVPKDRDKFYFKLKQGIEKKVVITVQQLSNKELAIERCFGMLLSPGRNVKNSDMHLLDMESMGKSYDGRAYVITGMWNPNAPVFLALNEETPKDKQVYMTVAVDMVVTEVVEPVRFLLETVVRVYPANERFWYFSRKTFTETFFMRLKQSEGKGHTNAGDAIYEVVSLQRESDKEEPVTPTSGGGPMSPQDDEAEEESDNELSSGTGDVSKDCPEKILYSWGELLGKWHSNLGARPKGLSTLVKSGVPEALRAEVWQLLAGCHDNQAMLDRYRILITKDSAQESVITRDIHRTFPAHDYFKDTGGDGQESLYKICKAYSVYDEDIGYCQGQSFLAAVLLLHMPEEQAFCVLVKIMYDYGLRDLYRNNFEDLHCKFYQLERLMQEQLPDLHSHFSDLNLEAHMYASQWFLTLFTAKFPLCMVFHIIDLLLCEGLNIIFHVALALLKTSKEDLLQADFEGALKFFRVQLPKRYRAEENARRLMEQACNIKVPTKKLKKYEKEYQTMRESQLQQEDPMDRYKFVYL

SEQ ID NO: 1347 - protein, 845 aa, Homo sapiens
MSGARGEGPEAGAGGAGGRAAPENPGGVLSVELPGLLAQLARSFALLLPVYALGYLGLSFSWVLLALALLAWCRRSRGLKALRLCRALALLEDEERVVRLGVRACDLPAWVHFPDTERAEWLNKTVKHMWPFICQFIEKLFRETIEPAVRGANTHLSTFSFTKVDVGQQPLRINGVKVYTENVDKRQIILDLQISFVGNCEIDLEIKRYFCRAGVKSIQIHGTMRVILEPLIGDMPLVGALSIFFLRKPLLEINWTGLTNLLDVPGLNGLSDTIILDIISNYLVLPNRITVPLVSEVQIAQLRFPVPKGVLRIHFIEAQDLQGKDTYLKGLVKGKSDPYGIIRVGNQIFQSRVIKENLSPKWNEVYEALVYEHPGQELEIELFDEDPDKDDFLGSLMIDLIEVEKERLLDEWFTLDEVPKGKLHLRLEWLTLMPNASNLDKVLTDIKADKDQANDGLSSALLILYLDSARNLPSGKKISSNPNPVVQMSVGHKAQESKIRYKTNEPVWEENFTFFIHNPKRQDLEVEVRDEQHQCSLGNLKVPLSQLLTSEDMTVSQRFQLSNSGPNSTIKMKIALRVLHLEKRERPPDHQHSAQVKRPSVSKEGRKTSIKSHMSGSPGPGGSNTAPSTPVIGGSDKPGMEEKAQPPEAGPQGLHDLGRSSSSLLASPGHISVKEPTPSIASDISLPIATQELRQRLRQLENGTTLGQSPLGQIQLTIRHSSQRNKLIVVVHACRNLIAFSEDGSDPYVRMYLLPDKRRSGRRKTHVSKKTLNPVFDQSFDFSVSLPEVQRRTLDVAVKNSGGFLSKDKGLLGKVLVALASEELAKGWTQWYDLTEDGTRPQAMT

SEQ ID NO: 1348 - protein, 224 aa, Homo sapiens
MAVGNINELPENILLELFTHVPARQLLLNCRLVCSLWRDLIDLVTLWKRKCLREGFITEDWDQPVADWKIFYFLRSLHRNLLHNPCAEEGFEFWSLDVNGGDEWKVEDLSRDQRKEFPNDQVRSQARLRVQVPAVRSAPVVRARASGDLPARPGDHPAEERCQVEGGLPHILQLPARRPLHLVSARRRGHSLLGRLVRPEGHQQQHHHRAPAALTPPEPPSAEP

SEQ ID NO: 1349 - protein, 255 aa, Homo sapiens
MAVGNINELPENILLELFTHVPARQLLLNCRLVCSLWRDLIDLVTLWKRKCLREGFITEDWDQPVADWKIFYFLRSLHRNLLHNPCAEEGFEFWSLDVNGGDEWKVEDLSRDQRKEFPNDQVKKYFVTSYYTCLKSQVVDLKAEGYWEELMDTTRPDIEVKDWFAARPDCGSKYQLCVQLLSSAHAPLGTFQPDPATIQQKSDAKWREVSHTFSNYPPGVRYIWFQHGGVDTHYWAGWYGPRVTNSSITIGPPLP

SEQ ID NO: 1350 - protein, 527 aa, Homo sapiens
MRSDKSALVFLLLQLFCVGCGFCGKVLVWPCDMSHWLNVKVILEELIVRGHEVTVLTHSKPSLIDYRKPSALKFEVVHMPQDRTEENEIFVDLALNVLPGLSTWQSVIKLNDFFVEIRGTLKMMCESFIYNQTLMKKLQETNYDVMLIDPVIPCGDLMAELLAVPFVLTLRISVGGNMERSCGKLPAPLSYVPVPMTGLTDRMTFLERVKNSMLSVLFHFWIQDYDYHFWEEFYSKALGRPTTLCETVGKAEIWLIRTYWDFEFPQPYQPNFEFVGGLHCKPAKALPKEMENFVQSSGEDGIVVFSLGSLFQNVTEEKANIIASALAQIPQKVLWRYKGKKPSTLGANTRLYDWIPQNDLLGHPKTKAFITHGGMNGIYEAIYHGVPMVGVPIFGDQLDNIAHMKAKGAAVEINFKTMTSEDLLRALRTVITDSSYKENAMRLSRIHHDQPVKPLDRAVFWIEFVMRHKGAKHLRSAAHDLTWFQHYSIDVIGFLLACVATAIFLFTKCFLFSCQKFNKTRKIEKRE

SEQ ID NO: 1351 - protein, 1211 aa, Homo sapiens
MDPPAGAARRLLCPALLLLLLLLPPPLLPPPPPPANARLAAAADPPGGPLGHGAERILAVPVRTDAQGRLVSHVVSAATSRAGVRARRAAPVRTPSFPGGNEEEPGSHLFYNVTVFGRDLHLRLRPNARLVAPGATMEWQGEKGTTRVEPLLGSCLYVGDVAGLAEASSVALSNCDGLAGLIRMEEEEFFIEPLEKGLAAQEAEQGRVHVVYRRPPTSPPLGGPQALDTGASLDSLDSLSRALGVLEEHANSSRRRARRHAADDDYNIEVLLGVDDSVVQFHGKEHVQKYLLTLMNIVNEIYHDESLGAHINVVLVRIILLSYGKSMSLIEIGNPSQSLENVCRWAYLQQKPDTGHDEYHDHAIFLTRQDFGPSGMQGYAPVTGMCHPVRSCTLNHEDGFSSAFVVAHETGHVLGMEHDGQGNRCGDEVRLGSIMAPLVQAAFHRFHWSRCSQQELSRYLHSYDCLLDDPFAHDWPALPQLPGLHYSMNEQCRFDFGLGYMMCTAFRTFDPCKQLWCSHPDNPYFCKTKKGPPLDGTMCAPGKHCFKGHCIWLTPDILKRDGSWGAWSPFGSCSRTCGTGVKFRTRQCDNPHPANGGRTCSGLAYDFQLCSRQDCPDSLADFREEQCRQWDLYFEHGDAQHHWLPHEHRDAKERCHLYCESRETGEVVSMKRMVHDGTRCSYKDAFSLCVRGDCRKVGCDGVIGSSKQEDKCGVCGGDNSHCKVVKGTFTRSPKKHGYIKMFEIPAGARHLLIQEVDATSHHLAVKNLETGKFILNEENDVDASSKTFIAMGVEWEYRDEDGRETLQTMGPLHGTITVLVIPVGDTRVSLTYKYMIHEDSLNVDDNNVLEEDSVVYEWALKKWSPCSKPCGGGSQFTKYGCRRRLDHKMVHRGFCAALSKPKAIRRACNPQECSQPVWVTGEWEPCSQTCGRTGMQVRSVRCIQPLHDNTTRSVHAKHCNDARPESRRACSRELCPGRWRAGPWSQCSVTCGNGTQERPVLCRTADDSFGICQEERPETARTCRLGPCPRNISDPSKKSYVVQWLSRPDPDSPIRKISSKGHCQGDKSIFCRMEVLSRYCSIPGYNKLCCKSCNLYNNLTNVEGRIEPPPGKHNDIDVFMPTLPVPTVAMEVRPSPSTPLEVPLNASSTNATEDHPETNAVDEPYKIHGLEDEVQPPNLIPRRPSPYEKTRNQRIQELIDEMRKKEMLGKF

SEQ ID NO: 1352 - protein, 476 aa, Homo sapiens
MASPFSGALQLTDLDDFIGPSQECIKPVKVEKRAGSGVAKIRIEDDGSYFQINQDGGTRRLEKAKVSLNDCLACSGCITSAETVLITQQSHEELKKVLDANKMAAPSQQRLVVVSVSPQSRASLAARFQLNPTDTARKLTSFFKKIGVHFVFDTAFSRHFSLLESQREFVRRFRGQADCRQALPLLASACPGWICYAEKTHGSFILPHISTARSPQQVMGSLVKDFFAQQQHLTPDKIYHVTVMPCYDKKLEASRPDFFNQEHQTRDVDCVLTTGEVFRLLEEEGVSLPDLEPAPLDSLCSGASAEEPTSHRGGGSGGYLEHVFRHAARELFGIHVAEVTYKPLRNKDFQEVTLEKEGQVLLHFAMAYGFRNIQNLVQRLKRGRCPYHYVEVMACPSGCLNGGGQLQAPDRPSRELLQHVERLYGMVRAEAPEDAPGVQELYTHWLQGTDSECAGRLLHTQYHAVEKASTGLGIRW

SEQ ID NO: 1353 - protein, 434 aa, Homo sapiens
MLRCLYHWHRPVLNRRWSRLCLPKQYLFTMKLQSPEFQSLFTEGLKSLTELFVKENHELRIAGGAVRDLLNGVKPQDIDFATTATPTQMKEMFQSAGIRMINNRGEKHGTITARLHEENFEITTLRIDVTTDGRHAEVEFTTDWQKDAERRDLTINSMFLGFDGTLFDYFNGYEDLKNKKVRFVGHAKQRIQEDYLRILRYFRFYGRIVDKPGDHDPETLEAIAENAKGLAGISGERIWVELKKILVGNHVNHLIHLIYDLDVAPYIGLPANASLEEFDKVSKNVDGFSPKPVTLLASLFKVQDDVTKLDLRLKIAKEEKNLGLFIVKNRKDLIKATDSSDPLKPYQDFIIDSREPDATTRVCELLKYQGEHCLLKEMQQWSIPPFPVSGHDIRKVGISSGKEIGALLQQLREQWKKSGYQMEKDELLSYIKKT

SEQ ID NO: 1354 - protein, 375 aa, Homo sapiens
MKVWLLLGLLLVHEALEDVTGQHLPKNKRPKEPGENRIKPTNKKVKPKIPKMKDRDSANSAPKTQSIMMQVLDKGRFQKPAATLSLLAGQTVELRCKGSRIGWSYPAYLDTFKDSRLSVKQNERYGQLTLVNSTSADTGEFSCWVQLCSGYICRKDEAKTGSTYIFFTEKGELFVPSPSYFDVVYLNPDRQAVVPCRVTVLSAKVTLHREFPAKEIPANGTDIVYDMKRGFVYLQPHSEHQGVVYCRAEAGGRSQISVKYQLLYVAVPSGPPSTTILASSNKVKSGDDISVLCTVLGEPDVEVEFTWIFPGQKDERPVTIQDTWRLIHRGLGHTTRISQSVITVEDFETIDAGYYICTAQNLQGQTTVATTVEFS

SEQ ID NO: 1355 - protein, 539 aa, Homo sapiens
MAAALRVAAVGARLSVLASGLRAAVRSLCSQATSVNERIENKRRTALLGGGQRRIDAQHKRGKLTARERISLLLDPGSFVESDMFVEHRCADFGMAADKNKFPGDSVVTGRGRINGRLVYVFSQDFTVFGGSLSGAHAQKICKIMDQAITVGAPVIGLNDSGGARIQEGVESLAGYADIFLRNVTASGVIPQISLIMGPCAGGAVYSPALTDFTFMVKDTSYLFITGPDVVKSVTNEDVTQEELGGAKTHTTMSGVAHRAFENDVDALCNLRDFFNYLPLSSQDPAPVRECHDPSDRLVPELDTIVPLESTKAYNMVDIIHSVVDEREFFEIMPNYAKNIIVGFARMNGRTVGIVGNQPKVASGCLDINSSVKGARFVRFCDAFNIPLITFVDVPGFLPGTAQEYGGIIRHGAKLLYAFAEATVPKVTVITRKAYGGAYDVMSSKHLCGDTNYAWPTAEIAVMGAKGAVEIIFKGHENVEAAQAEYIEKFANPFPAAVRGFVDDIIQPSSTRARICCDLDVLASKKVQRPWRKHANIPL

SEQ ID NO: 1356 - protein, 1235 aa, Homo sapiens
MFGDLFEEEYSTVSNNQYGKGKKLKTKALEPPAPREFTNLSGIRNQGGTCYLNSLLQTLHFTPEFREALFSLGPEELGLFEDKDKPDAKVRIIPLQLQRLFAQLLLLDQEAASTADLTDSFGWTSNEEMRQHDVQELNRILFSALETSLVGTSGHDLIYRLYHGTIVNQIVCKECKNVSERQEDFLDLTVAVKNVSGLEDALWNMYVEEEVFDCDNLYHCGTCDRLVKAAKSAKLRKLPPFLTVSLLRFNFDFVKCERYKETSCYTFPLRINLKPFCEQSELDDLEYIYDLFSVIIHKGGCYGGHYHVYIKDVDHLGNWQFQEEKSKPDVNLKDLQSEEEIDHPLMILKAILLEENNLIPVDQLGQKLLKKIGISWNKKYRKQHGPLRKFLQLHSQIFLLSSDESTVRLLKNSSLQAESDFQRNDQQIFKMLPPESPGLNNSISCPHWFDINDSKVQPIREKDIEQQFQGKESAYMLFYRKSQLQRPPEARANPRYGVPCHLLNEMDAANIELQTKRAECDSANNTFELHLHLGPQYHFFNGALHPVVSQTESVWDLTFDKRKTLGDLRQSIFQLLEFWEGDMVLSVAKLVPAGLHIYQSLGGDELTLCETEIADGEDIFVWNGVEVGGVHIQTGIDCEPLLLNVLHLDTSSDGEKCCQVIESPHVFPANAEVGTVLTALAIPAGVIFINSAGCPGGEGWTAIPKEDMRKTFREQGLRNGSSILIQDSHDDNSLLTKEEKWVTSMNEIDWLHVKNLCQLESEEKQVKISATVNTMVFDIRIKAIKELKLMKELADNSCLRPIDRNGKLLCPVPDSYTLKEAELKMGSSLGLCLGKAPSSSQLFLFFAMGSDVQPGTEMEIVVEETISVRDCLKLMLKKSGLQGDAWHLRKMDWCYEAGEPLCEEDATLKELLICSGDTLLLIEGQLPPLGFLKVPIWWYQLQGPSGHWESHQDQTNCTSSWGRVWRATSSQGASGNEPAQVSLLYLGDIEISEDATLAELKSQAMTLPPFLEFGVPSPAHLRAWTVERKRPGRLLRTDRQPLREYKLGRRIEICLEPLQKGENLGPQDVLLRTQVRIPGERTYAPALDLVWNAAQGGTAGSLRQRVADFYRLPVEKIEIAKYFPEKFEWLPISSWNQQITKRKKKKKQDYLQGAPYYLKDGDTIGVKNLLIDDDDDFSTIRDDTGKEKQKQRALGRRKSQEALHEQSSYILSSAETPARPRAPETSLSIHVGSFR

SEQ ID NO: 1357 - protein, 327 aa, Homo sapiens
MQKIKSLMTRQGLKSPQESLSDLGAIESLRVPGKEEFRELREQPSDPQAEQELINSIEQVYFSVDSFDIVKYELEKLPPVLNLQELEAYRDKLKQQQAAVSKKVADLILEKQPAYVKELERVTSLQTGLQLAAVICTNGRRHLNIAKEGFTQASLGLLANQRKRQLLIGLLKSLRTIKTLQRTDVRLSEMLEEEDYPGAIQLCLECQKAASTFKHYSCISELNSKLQDTLEQIEEQLDVALSKICKNFDINHYTKVQQAYRLLGKTQTAMDQLHMHFTQAIHNTVFQVVLGYVELCAGNTDTKFQKLQYKDLCTVCSDLITIHISLL

SEQ ID NO: 1358 - protein, 450 aa, Homo sapiens
MEQAPPDPERQLQPAPLEPLGSPDAGLGAAVGKEAEGAGEESSGVDTMTHNNFWLKKIEISVSEAEKRTGRNAMNMQETYTAYLIETRSVEHTDGQSVLTDSLWRRYSEFELLRSYLLVYYPHIVVPPLPEKRAEFVWHKLSADNMDPDFVERRRIGLENFLLRIASHPILCRDKIFYLFLTQEGNWKETVNETGFQLKADSRLKALNATFRVKNPDKRFTDLKHYSDELQSVISHLLRVRARVADRLYGVYKVHGNYGRVFSEWSAIEKEMGDGLQSAGHHMDVYASSIDDILEDEEHYADQLKEYLFYAEALRAVCRKHELMQYDLEMAAQDLASKKQQCEELVTGTVRTFSLKGMTTKLFGQETPEQREARIKVLEEQINEGEQQLKSKNLEGREFVKNAWADIERFKEQKNRDLKEALISYAVMQISMCKKGIQVWTNAKECFSKM

SEQ ID NO: 1359 - protein, 351 aa, Homo sapiens
MGDPERPEAAGLDQDERSSSDTNESEIKSNEEPLLRKSSRRFVIFPIQYPDIWKMYKQAQASFWTAEEVDLSKDLPHWNKLKADEKYFISHILAFFAASDGIVNENLVERFSQEVQVPEARCFYGFQILIENVHSEMYSLLIDTYIRDPKKREFLFNAIETMPYVKKKADWALRWIADRKSTFGERVVAFAAVEGVFFSGSFAAIFWLKKRGLMPGLTFSNELISRDEGLHCDFACLMFQYLVNKPSEERVREIIVDAVKIEQEFLTEALPVGLIGMNCILMKQYIEFVADRLLVELGFSKVFQAENPFDFMENISLEGKTNFFEKRVSEYQRFAVMAETTDNVFTLDADF

SEQ ID NO: 1360 - protein, 648 aa, Homo sapiens [sequence omitted]

SEQ ID NO: 1361 - protein, 651 aa, Homo sapiens
MSGVRAVRISIESACEKQVHEVGLDGTETYLPPLSMSQNLARLAQRIDFSQGSGSEEEEAAGTEGDAQEWPGAGSSADQDDEEGVVKFQPSLWPWDSVRNNLRSALTEMCVLYDVLSIVRDKKFMTLDPVSQDALPPKQNPQTLQLISKKKSLAGAAQILLKGAERLTKSVTENQENKLQRDFNSELLRLRQHWKLRKVGDKILGDLSYRSAGSLFPHHGTFEVIKNTDLDLDKKIPEDYCPLDVQIPSDLEGSAYIKVSIQKQAPDIGDLGTVNLFKRPLPKSKPGSPHWQTKLEAAQNVLLCKEIFAQLSREAVQIKSQVPHIVVKNQIISQPFPSLQLSISLCHSSNDKKSQKFATEKQCPEDHLYVLEHNLHLLIREFHKQTLSSIMMPHPASAPFGHKRMRLSGPQAFDKNEINSLQSSEGLLEKIIKQAKHIFLRSRAAATIDSLASRIEDPQIQAHWSNINDVYESSVKVLITSQGYEQICKSIQLQLNIGVEQIRVVHRDGRVITLSYQEQELQDFLLSQMSQHQVHAVQQLAKVMGWQVLSFSNHVGLGPIESIGNASAITVASPSGDYAISVRNGPESGSKIMVQFPRNQCKDLPKSDVLQDNKWSHLRGPFKEVQWNKMEGRNFVYKMELLMSALSPCLL

SEQ ID NO: 1362 - protein, 390 aa, Homo sapiens
MAVSESQLKKMVSKYKYRDLTVRETVNVITLYKDLKPVLDSYVFNDGSSRELMNLTGTIPVPYRGNTYNIPICLWLLDTYPYNPPICFVKPTSSMTIKTGKHVDANGKIYLPYLHEWKHPQSDLLGLIQVMIVVFGDEPPVFSRPISASYPPYQATGPPNTSYMPGMPGGISPYPSGYPPNPSGYPGCPYPPGGPYPATTSSQYPSQPPVTTVGPSRDGTISEDTIRASLISAVSDKLRWRMKEEMDRAQAELNALKRTEEDLKKGHQKLEEMVTRLDQEVAEVDKNIELLKKKDEELSSALEKMENQSENNDIDEVIIPTAPLYKQILNLYAEENAIEDTIFYLGEALRRGVIDLDVFLKHVRLLSRKQFQLRALMQKARKTAGLSDLY

SEQ ID NO: 1363 - protein, 1032 aa, Homo sapiens
MPGRAEAGEAEEEAGAGSGSEAEEDALWERIEGVRHRLARALNPAKLTPYLRQCRVIDEQDEEEVLSTYRFPCRVNRTGRLMDILRCRGKRGYEAFLEALEFYYPEHFTLLTGQEPAQRCSMILDEEGPEGLTQFLMTEVRRLREARKSQLQREQQLQARGRVLEEERAGLEQRLRDQQQAQERCQRLREDWEAGSLELLRLKDENYMIAMRLAQLSEEKNSAVLRSRDLQLAVDQLKLKVSRLEEECALLRRARGPPPGAEEKEKEKEKEKEPDNVDLVSELRAENQRLTASLRELQEGLQQEASRPGAPGSERILLDILEHDWREAQDSRQELCQKLHAVQGELQWAEELRDQYLQEMEDLRLKHRTLQKDCDLYKHRMATVLAQLEEIEKERDQAIQSRDRIQLQYSQSLIEKDQYRKQVRGLEAERDELLTTLTSLEGTKALLEVQLQRAQGGTCLKACASSHSLCSNLSSTWSLSEFPSPLGGPEATGEAAVMGGPEPHNSEEATDSEKEINRLSILPFPPSAGSILRRQREEDPAPPKRSFSSMSDITGSVTLKPWSPGLSSSSSSDSVWPLGKPEGLLARGCGLDFLNRSLAIRVSGRSPPGGPEPQDKGPDGLSFYGDRWSGAVVRRVLSGPGSARMEPREQRVEAAGLEGACLEAEAQQRTLLWNQGSTLPSLMDSKACQSFHEALEAWAKGPGAEPFYIRANLTLPERADPHALCVKAQEILRLVDSAYKRRQEWFCTRVDPLTLRDLDRGTVPNYQRAQQLLEVQEKCLPSSRHRGPRSNLKKRALDQLRLVRPKPVGAPAGDSPDQLLLEPCAEPERSLRPYSLVRPLLVSALRPVVLLPECLAPRLIRNLLDLPSSRLDFQVCPAESLSGEELCPSSAPGAPKAQPATPGLGSRIRAIQESVGKKHCLLELGARGVRELVQNEIYPIVIHVEVTEKNVREVRGLLGRPGWRDSELLRQCRGSEQVLWGLPCSWVQVPAHEWGHAEELAKVVRGRILQEQARLVWVECGSSRGCPSSSEA

SEQ ID NO: 1364 - protein, 409 aa, Homo sapiens
MGSQAAAEWRNWASWEVSSSLSGCSMGCFKDDRIVFWTWMFSTYFMEKWAPRQDDMLFYVRRKLAYSGSESGADGRKAAEPEVEVEVYRRDSKKLPGLGDPDIDWEESVCLNLILQKLDYMVTCAVCTRADGGDIHIHKKKSQQVFASPSKHPMDSKGEESKISYPNIFFMIDSFEEVFSDMTVGEGEMVCVELVASDKTNTFQGVIFQGSIRYEALKKVYDNRVSVAARMAQKMSFGFYKYSNMEFVRMKGPQGKGHAEMAVSRVSTGDTSPCGTEEDSSPASPMHERVTSFSTPPTPERNNRPAFFSPSLKRKVPRNRIAEMKKSHSANDSEEFFREDDGGADLHNATNLRSRSLSGTGRSLVGSWLKLNRADGNFLLYAHLTYVTLPLHRILTDILEVRQKPILMT

SEQ ID NO: 1365 - protein, 703 aa, Homo sapiens
MAAPVGPVKFWRPGTEGPGVSISEERQSLAENSGTTVVYNPYAALSIEQQRQKLPVFKLRNHILYLIENYQTVVIVGETGCGKSTQIPQYLAEAGWTAEGRVVGVTQPRRVAAVTVAGRVAEERGAVLGHEVGYCIRFDDCTDQLATRIKFLTDGMLVREMMVDPLLTKYSVIMLDEAHERTLYTDIAIGLLKKIQKKRGDLRLIVASATLDADKFRDFFNQNETSDPARDTCVILTVEGRTFPVDIFYLQSPVPDYIKSTVETVVKIHQTEGDGDVLAFLTGQEEVETVVSMLIEQARALARTGMKRHLRVLPMYAGLPSFEQMKVFERVSRSVRKVIVATNVAETSITISGIVYVIDCGFVKLRAYNPRTAIECLVVVPVSQASANQRAGRGGRSRSGKCYRLYTEEAFDKLPQSTVPEMQRSNLAPVILQLKALGIDNVLRFHFMSPPPAQSMVQALELLYALGGLDKDCRLTEPLGMRIAEFPLNPMFAKMLLESGNFGCSQEILSIAAMMQIQNIFVVPPNQKSHAIRVHRKFAVEEGDHLTMLNIYEAFIKHNKDSKWCQEHFLNYKGLVRAATVREQLKKLLVKFQVPRKSSEGDPDLVLRCIVSGFFANAARFHSTGAYRTIRDDHELHIHPASVLYAEKPPRWVIYNEVIQTSKYYMRDVTAIESAWLLELAPHFYQQGTHLSLKAKRAKVQDP

SEQ ID NO: 1366 - protein, 797 aa, Homo sapiens
MAAAPVAAGSGAGRGRRSAATVAAWGGWGGRPRPGNILLQLRQGQLTGRGLVRAVQFTETFLTERDKQSKWSGIPQLLLKLHTTSHLHSDFVECQNILKEISPLLSMEAMAFVTEERKLTQETTYPNTYIFDLFGGVDLLVEILMRPTISIRGQKLKISDEMSKDCLSILYNTCVCTEGVTKRLAEKNDFVIFLFTLMTSKKTFLQTATLIEDILGVKKEMIRLDEVPNLSSLVSNFDQQQLANFCRILAVTISEMDTGNDDKHTLLAKNAQQKKSLSLGPSAAEINQAALLSIPGFVERLCKLATRKVSESTGTASFLQELEEWYTWLDNALVLDALMRVANEESEHNQASIVFPPPGASEENGLPHTSARTQLPQSMKIMHEIMYKLEVLYVLCVLLMGRQRNQVHRMIAEFKLIPGLNNLFDKLIWRKHSASALVLHGHNQNCDCSPDITLKIQFLRLLQSFSDHHENKYLLLNNQELNELSAISLKANIPEVEAVLNTDRSLVCDGKRGLLTRLLQVMKKEPAESSFRFWQARAVESFLRGTTSYADQMFLLKRGLLEHILYCIVDSECKSRDVLQSYFDLLGELMKFNVDAFKRFNKYINTDAKFQVFLKQINSSLVDSNMLVRCVTLSLDRFENQVDMKVAEVLSECRLLAYISQVPTQMSFLFRLINIIHVQTLTQENVSCLNTSLVILMLARRKERLPLYLRLLQRMEHSKKYPGFLLNNFHNLLRFWQQHYLHKDKDSTCLENSSCISFSYWKETVSILLNPDRQSPSALVSYIEEPYMDIDRDFTEE

SEQ ID NO: 1367 - protein, 1868 aa, Homo sapiens
MARLADYFVLVAFGPHPRGSGEGQGQILQRFPEKDWEDNPFPQGIELFCQPSGWQLCPERNPPTFFVAVLTDINSERHYCACLTFWEPAEPSQQETTRVEDATEREEEGDEGGQTHLSPTAPAPSAQLFAPKTLVLVSRLDHTEVFRNSLGLIYAIHVEGLNVCLENVIGNLLTCTVPLAGGSQRTISLGAGDRQVIQTPLADSLPVSRCSVALLFRQLGITNVLSLFCAALTEHKVLFLSRSYQRLADACRGLLALLFPLRYSFTYVPILPAQLLEVLSTPTPFIIGVNAAFQAETQELLDVIVADLDGGTVTIPECVHIPPLPEPLQSQTHSVLSMVLDPELELADLAFPPPTTSTSSLKMQDKELRAVFLRLFAQLLQGYRWCLHVVRIHPEPVIRFHKAAFLGQRGLVEDDFLMKVLEGMAFAGFVSERGVPYRPTDLFDELVAHEVARMRADENHPQRVLRHVQELAEQLYKNENPYPAVAMHKVQRPGESSHLRRVPRPFPRLDEGTVQWIVDQAAAKMQGAPPAVKAERRTTVPSGPPMTAILERCSGLHVNSARRLEVVRNCISYVFEGKMLEAKKLLPAVLRALKGRAARRCLAQELHLHVQQNRAVLDHQQFDFVVRMMNCCLQDCTSLDEHGIAAALLPLVTAFCRKLSPGVTQFAYSCVQEHVVWSTPQFWEAMFYGDVQTHIRALYLEPTEDLAPAQEVGEAPSQEDERSALDVASEQRRLWPTLSREKQQELVQKEESTVFSQAIHYANRMSYLLLPLDSSKSRLLRERAGLGDLESASNSLVTNSMAGSVAESYDTESGFEDAETCDVAGAVVRFINRFVDKVCTESGVTSDHLKGLHVMVPDIVQMHIETLEAVQRESRRLPPIQKPKLLRPRLLPGEECVLDGLRVYLLPDGREEGAGGSAGGPALLPAEGAVFLTTYRVIFTGMPTDPLVGEQVVVRSFPVAALTKEKRISVQTPVDQLLQDGLQLRSCTFQLLKMAFDEEVGSDSAELFRKQLHKLRYPPDIRATFAFTLGSAHTPGRPPRVTKDKGPSLRTLSRNLVKNAKKTIGRQHVTRKKYNPPSWEHRGQPPPEDQEDEISVSEELEPSTLTPSSALKPSDRMTMSSLVERACCRDYQRLGLGTLSSSLSRAKSEPFRISPVNRMYAICRSYPGLLIVPQSVQDNALQRVSRCYRQNRFPVVCWRSGRSKAVLLRSGGLHGKGVVGLFKAQNAPSPGQSQADSSSLEQEKYLQAVVSSMPRYADASGRNTLSGFSSAHMGSHGKWGSVRTSGRSSGLGTDVGSRLAGRDALAPPQANGGPPDPGFLRPQRAALYILGDKAQLKGVRSDPLQQWELVPIEVFEARQVKASFKKLLKACVPGCPAAEPSPASFLRSLEDSEWLIQIHKLLQVSVLVVELLDSGSSVLVGLEDGWDITTQVVSLVQLLSDPFYRTLEGFRLLVEKEWLSFGHRFSHRGAHTLAGQSSGFTPVFLQFLDCVHQVHLQFPMEFEFSQFYLKFLGYHHVSRRFRTFLLDSDYERIELGLLYEEKGERRGQVPCRSVWEYVDRLSKRTPVFHNYMYAPEDAEVLRPYSNVSNLKVWDFYTEETLAEGPPYDWELAQGPPEPPEEERSDGGAPQSRRRVVWPCYDSCPRAQPDAISRLLEELQRLETELGQPAERWKDTWDRVKAAQRLEGRPDGRGTPSSLLVSTAPHHRRSLGVYLQEGPVGSTLSLSLDSDQSSGSTTSGSRQAARRSTSTLYSQFQTAESENRSYEGTLYKKGAFMKPWKARWFVLDKTKHQLRYYDHRVDTECKGVIDLAEVEAVAPGTPTMGAPKTVDEKAFFDVKTTRRVYNFCAQDVPSAQQWVDRIQSCLSDA

SEQ ID NO: 1368 - protein, 482 aa, Homo sapiens
MAALMTPGTGAPPAPGDFSGEGSQGLPDPSPEPKQLPELIRMKRDGGRLSEADIRGFVAAVVNGSAQGAQIGAMLMAIRLRGMDLEETSVLTQALAQSGQQLEWPEAWRQQLVDKHSTGGVGDKVSLVLAPALAACGCKVPMISGRGLGHTGGTLDKLESIPGFNVIQSPEQMQVLLDQAGCCIVGQSEQLVPADGILYAARDVTATVDSLPLITASILSKKLVEGLSALVVDVKFGGAAVFPNQEQARELAKTLVGVGASLGLRVAAALTAMDKPLGRCVGHALEVEEALLCMDGAGPPDLRDLVTTLGGALLWLSGHAGTQAQGAARVAAALDDGSALGRFERMLAAQGVDPGLARALCSGSPAERRQLLPRAREQEELLAPADGTVELVRALPLALVLHELGAGRSRAGEPLRLGVGAELLVDVGQRLRRGTPWLRVHRDGPALSGPQSRALQEALVLSDRAPFAAPSPFAELVLPPQQ

SEQ ID NO: 1369 - protein, 1177 aa, Homo sapiens
MDVYPPRRQGLPRARSPGGSSRGSPSVSCSRLRQVQSILTQSSKSRPDGILCILGIDSRYNEGCRELANYLLFGLYNQNTSDFEKTGFSEEVLDDVIILIKSDSVHLYCNPVNFRYLLPYVAHWRNLHFHCMTENEYEDEEAAEEFKITSFVDMVRDCSRIGIPYSSQGHLQIFDMFVVEKWPIVQAFALEGIGGDGFFTMKYELQDVSLNLWNVYSKMDPMSLESLLSDDLVAFEHQWTSFFANFDTEIPFLLELSESQAGEPFRSYFSHGMISSHITENSPNRQPFVLFGNHSTRENLNAGNFNFPSEGHLVRSTGPGGSFAKHMVAQCVSPKGPLACSRTYFFGATHVPYLGGDSKLPKKTEQIRLLSQIYAAVIEAVLAGIACYAKTSSLTKAKEVAEQTLGSGLDSFELIPFKAALRSKMTFHIHAVNNQGRIVPLDSEDSLSFVKTACMAVYDIPDLLGGNGCLGSVVFSESFLTSQILVKEKDGTVTTETSSVVLTAAVPRFCSWLVEDNEVKLSEKTQQAVRGDESFLGTYLTGGEGAYLYSSNLQSWPEEGNVHFFSSGLLFSHCRHRSIIISKDHMNSISFYDGDSTSTVAALLIDFKSSLLPHLPVHFHGSSNFLMIALFPKSKIYQAFYSEVFSLWKQQDNSGISLKVIQEDGLSVEQKRLHSSAQKLFSALSQPAGEKRSSLKLLSAKLPELDWFLQHFAISSISQEPVMRTHLPVLLQQAEINTTHRIESDKVIISIVTGLPGCHASELCAFLVTLHKECGRWMVYRQIMDSSECFHAAHFQRYLSSALEAQQNRSARQSAYIRKKTRLLVVLQGYTDVIDVVQALQTHPDSNVKASFTIGAITACVEPMSCYMEHRFLFPKCLDQCSQGLVSNVVFTSHTTEQRHPLLVQLQSLIRAANPAAAFILAENGIVTRNEDIELILSENSFSSPEMLRSRYLMYPGWYEGKLNAGSVYPLMVQICVWFGRPLEKTRFVAKCKAIQSSIKPSPFSGNIYHILGKVKFSDSERTMEVCYNTLANSLSIMPVLEGPTPPPDSKSVSQDSSGQQECYLVFIGCSLKEDSIKDWLRQSAKQKPQRKALKTRGMLTQQEIRSIHVKRHLEPLPAGYFYNGTQFVNFFGDKTDFHPLMDQFMNDYVEEANREIEKYNQELEQQEYHDLFELKP

SEQ ID NO: 1370 - protein, 724 aa, Homo sapiens
MAGLTAAAPRPGVLLLLLSILHPSRPGGVPGAIPGGVPGGVFYPGAGLGALGGGALGPGGKPLKPVPGGLAGAGLGAGLGAFPAVTFPGALVPGGVADAAAAYKAAKAGAGLGGVPGVGGLGVSAGAVVPQPGAGVKPGKVPGVGLPGVYPGGVLPGARFPGVGVLPGVPTGAGVKPKAPGVGGAFAGIPGVGPFGGPQPGVPLGYPIKAPKLPGGYGLPYTTGKLPYGYGPGGVAGAAGKAGYPTGTGVGPQAAAAAAAKAAAKFGAGAAGVLPGVGGAGVPGVPGAIPGIGGIAGVGTPAAAAAAAAAAKAAKYGAAAGLVPGGPGFGPGVVGVPGAGVPGVGVPGAGIPVVPGAGIPGAAVPGVVSPEAAAKAAAKAAKYGARPGVGVGGIPTYGVGAGGFPGFGVGVGGIPGVAGVPGVGGVPGVGGVPGVGISPEAQAAAAAKAAKYGVGTPAAAAAKAAAKAAQFGLVPGVGVAPGVGVAPGVGVAPGVGLAPGVGVAPGVGVAPGVGVAPGIGPGGVAAAAKSAAKVAAKAQLRAAAGLGAGIPGLGVGVGVPGLGVGAGVPGLGVGAGVPGFGAVPGALAAAKAAKYGAAVPGVLGGLGALGGVGIPGGVVGAGPAAAAAAAKAAAKAAQFGLVGAAGLGGLGVGGLGVPGVGGLGGIPPAAAAKAAKYGAAGLGGVLGGAGQFPLGGVAARPGFGLSPIFPGGACLGKACGRKRK

SEQ ID NO: 1371 - protein, 210 aa, Homo sapiens
MFESFNVPGLYIAVQAVLALAASWTSRQVGERTLTGIVIDSGDGVTHVIPVAEGYVIGSCIKHIPIAGRDITYFIQQLLREREVGIPPEQSLETAKAIKEKYCYICPDIVKEFAKYDVDPQKWIKQYTGINAINQKKFVIDVGYERFLGPEIFFHPEFANPDSMESISDVVDEVIQNCPIDVRRPLYKMEQIPLSYPQGHGFHPLSPPFH

SEQ ID NO: 1372 - protein, 932 aa, Homo sapiens
MIPARLHRDYKGLVLLGILLGTLWETGCTQIRYSVPEELEKGSRVGDISRDLGLEPRELAERGVRIIPRGRTQLFALNPRSGSLVTAGRIDREELCMGAIKCQLNLDILMEDKVKIYGVEVEVRDINDNAPYFRESELEIKISENAATEMRFPLPHAWDPDIGKNSLQSYELSPNTHFSLIVQNGADGSKYPELVLKRALDREEKAAHHLVLTASDGGDPVRTGTARIRVMVLDANDNAPAFAQPEYRASVPENLALGTQLLVVNATDPDEGVNAEVRYSFRYVDDKAAQVFKLDCNSGTISTIGELDHEESGFYQMEVQAMDNAGYSARAKVLITVLDVNDNAPEVVLTSLASSVPENSPRGTLIALLNVNDQDSEENGQVICFIQGNLPFKLEKSYGNYYSLVTDIVLDREQVPSYNITVTATDRGTPPLSTETHISLNVADTNDNPPVFPQASYSAYIPENNPRGVSLVSVTAHDPDCEENAQITYSLAENTIQGASLSSYVSINSDTGVLYALSSFDYEQFRDLQVKVMARDNGHPPLSSNVSLSLFVLDQNDNAPEILYPALPTDGSTGVELAPRSAEPGYLVTKVVAVDRDSGQNAWLSYRLLKASEPGLFSVGLHTGEVRTARALLDRDALKQSLVVAVQDHGQPPLSATVTLTVAVADSIPQVLADLGSLESPANSETSDLTLYLVVAVAAVSCVFLAFVILLLALRLRRWHKSRLLQASGGGLTGAPASHFVGVDGVQAFLQTYSHEVSLTTDSRKSHLIFPQPNYADMLVSQESFEKSEPLLLSGDSVFSKDSHGLIEQAPPNTDWRFSQAQRPGTSGSQNGDDTGTWPNNQFDTEMLQAMILASASEAADGSSTLGGGAGTMGLSARYGPQFTLQHVPDYRQNVYIPGSNATLTNAAGKRDGKAPAGGNGNKKKSGKKEKK

SEQ ID NO: 1373 - protein, 944 aa, Homo sapiens
MGPKTLPQLAGKWQVLCMLSLCCWGWVSGQLRYSVVEESEPGTLVGNVAQDLGLKMTDLLSRRLQLGSEENGRYFSLSLMSGALAVNQKIDRESLCGASTSCLLPVQVVTEHPLELIRVEVEILDLNDNSPSFATPEREMRISESAASGARFPLDSAQDPDVGTNTVSFYTLSPNSHFSLNVKTLKDGKPFPELVLEQQLDREAQARHQLVLTAVDGGTPARSGTTLISVIVLDINDNAPTFQSSVLRVGIPENAPIGTLLLRLNATDPDEGTNGQLDYSFGDHTSEAVRNLFGLDPSSGAIHVLGPIDFEESRFYEIHARARDQGQPAMEGHCVIQVDVGDVNDNAPEVLLASLANPVLESTPVGTVVGLFNVRDRDSGRNGEVSLDISPDLPFQIKPSENHYSLLTSQPLDREATSHYIIELLASDAGSPSLHKHLTIRLNISDVNDNAPRFNQQLYTAYILENRPPGSLLCTVAASDPDTGDNARLTYSIVGNQVQGAPASSFVYVNPEDGRIFAQRTFDYELLQMLQIVVGVRDSGSPPLHANTSLHVFVLDENDNAPAVLHPRPDWEHSAPQRLPRSAPPGSLVTKVTAVDADAGHNAWLSYSLLPQSTAPGLFLVSTHTGEVRTARALLEDDSDTQQVVVLVRDNGDPSLSSTATVLLVLEDEDPEEMPKSSDFLIHPPERSDLTLYLIVALATVSLLSLVTFTFLSAKCLQGNADGDGGGGQCCRRQDSPSPDFYKQSSPNLQVSSDGTLKYMEVTLRPTDSQSHCYRTCFSPASDGSDFTFLRPLSVQQPTALALEPDAIRSRSNTLRERSQQAPPNTDWRFSQAQRPGTSGSQNGDDTGTWPNNQFDTEMLQAMILASASEAADGSSTLGGGAGTMGLSARYGPQFTLQHVPDYRQNVYIPGSNATLTNAAGKRDGKAPAGGNGNKKKSGKKEKK

SEQ ID NO: 1374 - protein, 99 aa, Homo sapiens
MAAAAASRGVGAKLGLREIRIHLCQRSPGSQGVRDFIEKRYVELKKANPDLPILIRECSDVQPKLWARYAFGQETNVPLNNFSADQVTRALENVLSGKA

SEQ ID NO: 1375 - protein, 1066 aa, Homo sapiens
MTDQENNNNISSNPFAALFGSLADAKQFAAIQKEQLKQQSDELPASPDDSDNSVSESLDEFDYSVAEISRSFRSQQEICEQLNINHMIQRIFLITLDNSDPSLKSGNGIPSRCVYLEEMAVELEDQDWLDMSNVEQALFARLLLQDPGNHLINMTSSTTLNLSADRDAGERHIFCYLYSCFQRAKEEITKVPENLLPFAVQCRNLTVSNTRTVLLTPEIYVDQNIHEQLVDLMLEAIQGAHFEDVTEFLEEVIEALILDEEVRTFPEVMIPVFDILLGRIKDLELCQILLYAYLDILLYFTRQKDMAKVFVEYIQPKDPTNGQMYQKTLLGVILSISCLLKTPGVVENHGYFLNPSRSSPQEIKVQEANIHQFMAQFHEKIYQMLKNLLQLSPETKHCILSWLGNCLHANAGRTKIWANQMPEIFFQMYASDAFFLNLGAALLKLCQPFCKPRSSRLLTFNPTYCALKELNDEERKIKNVHMRGLDKETCLIPAVQEPKFPQNYNLVTENLALTEYTLYLGFHRLHDQMVKINQNLHRLQVAWRDAQQSSSPAADNLREQFERLMTIYLSTKTAMTEPQMLQNCLNLQVSMAVLLVQLAIGNEGSQPIELTFPLPDGYSSLAYVPEFFADNLGDFLIFLRRFADDILETSADSLEHVLHFITIFTGSIERMKNPHLRAKLAEVLEAVMPHLDQTPNPLVSSVFHRKRVFCNFQYAPQLAEALIKVFVDIEFTGDPHQFEQKFNYRRPMYPILRYMWGTDTYRESIKDLADYASKNLEAMNPPLFLRFLNLLMNDAIFLLDEAIQYLSKIKIQQIEKDRGEWDSLTPEARREKEAGLQMFGQLARFHNIMSNETIGTLAFLTSEIKSLFVHPFLAERIISMLNYFLQHLVGPKMGALKVKDFSEFDFKPQQLVSDICTIYLNLGDEENFCATVPKDGRSYSPTLFAQTVRVLKKINKPGNMIMAFSNLAERIKSLADLQQQEEETYADACDEFLDPIMSTLMCDPVVLPSSRVTVDRSTIARHLLSDQTDPFNRSPLTMDQIRPNTELKEKIQRWLAERKQQKEQLE

SEQ ID NO: 1376 - protein, 625 aa, Homo sapiens
MSENLDNEGPKPMESCGQESSSALSCPTVSVPPAAPAALEEVEKEGAGAATGPGPQPGLYSYIRDDLFTSEIFKLELQNVPRHASFSDVRRFLGRFGLQPHKTKLFGQPPCAFVTFRSAAERDKALRVLHGALWKGRPLSVRLARPKADPMARRRRQEGESEPPVTRVADVVTPLWTVPYAEQLERKQLECEQVLQKLAKEIGSTNRALLPWLLEQRHKHNKACCPLEGVRPSPQQTEYRNKCEFLVGVGVDGEDNTVGCRLGKYKGGTCAVAAPFDTVHIPEATKQVVKAFQEFIRSTPYSAYDPETYTGHWKQLTVRTSRRHQAMAIAYFHPQKLSPEELAELKTSLAQHFTAGPGRASGVTCLYFVEEGQRKTPSQEGLPLEHVAGDRCIHEDLLGLTFRISPHAFFQVNTPAAEVLYTVIQDWAQLDAGSMVLDVCCGTGTIGLALARKVKRVIGVELCPEAVEDARVNAQDNELSNVEFHCGRAEDLVPTLVSRLASQHLVAILDPPRAGLHSKVILAIRRAKNLRRLLYVSCNPRAAMGNFVDLCRAPSNRVKGIPFRPVKAVAVDLFPQTPHCEMLILFERVEHPNGTGVLGPHSPPAQPTPGPPDNTLQETGTFPSS

SEQ ID NO: 1377 - protein, 476 aa, Homo sapiens
METPGASASSLLLPAASRPPRKREAGEAGAATSKQRVLDEEEYIEGLQTVIQRDFFPDVEKLQAQKEYLEAEENGDLERMRQIAIKFGSALGKMSREPPPPYVTPATFETPEVHAGTGVVGNKPRPRGRGLEDGEAGEEEEKEPLPSLDVFLSRYTSEDNASFQEIMEVAKERSRARHAWLYQAEEEFEKRQKDNLELPSAEHQAIESSQASVETWKYKAKNSLMYYPEGVPDEEQLFKKPRQVVHKNTRFLRDPFSQALSRCQLQQAAALNAQHKQGKVGPDGKELIPQESPRVGGFGFVATPSPAPGVNESPMMTWGEVENTPLRVEGSETPYVDRTPGPAFKILEPGRRERLGLKMANEAAAKNRAKKQEALRRVTENLASLTPKGLSPAMSPALQRLVSRTASKYTDRALRASYTPSPARSTHLKTPASGLQTPTSTPAPGSATRTPLTQDPASITDNLLQLPARRKASDFF

SEQ ID NO: 1378 - protein, 383 aa, Homo sapiens
MGLGRVLLFLAVAFPFAPPAAAAEPHSLRYNLMVLSQDGSVQSGFLAEGHLDGQPFLRYDRQKRRAKPQGQWAENVLGAKTWDTETEDLTENGQDLRRTLTHIKDQKGGLHSLQEIRVCEIHEDSSTRGSRHFYYDGELFLSQNLETQESTVPQSSRAQTLAMNVTNFWKEDAMKTKTHYRAMQADCLQKLQRYLKSGVAIRRTVPPMVNVTCSEVSEGNITVTCRASSFYPRNITLTWRQDGVSLSHNTQQWGDVLPDGNGTYQTWVATRIRQGEEQRFTCYMEHSGNHGTHPVPSGKALVLQSQRTDFPYVSAAMPCFVIIIILCVPCCKKKTSAAEGPELVSLQVLDQHPVGTGDHRDAAQLGFQPLMSATGSTGSTEGT

SEQ ID NO: 1379 - protein, 405 aa, Homo sapiens
MAAVVENVVKLLGEQYYKDAMEQCHNYNARLCAERSVRLPFLDSQTGVAQSNCYIWMEKRHRGPGLASGQLYSYPARRWRKKRRAHPPEDPRLSFPSIKPDTDQTLKKEGLISQDGSSLEALLRTDPLEKRGAPDPRVDDDSLGEFPVTNSRARKRILEPDDFLDDLDDEDYEEDTPKRRGKGKSKGKGVGSARKKLDASILEDRDKPYACDNSFKQKHTSKAPQRVCGKRYKNRPGLSYHYAHSHLAEEEGEDKEDSQPPTPVSQRSEEQKSKKGPDGLALPNNYCDFCLGDSKINKKTGQPEELVSCSDCGRSGHPSCLQFTPVMMAAVKTYRWQCIECKCCNICGTSENDDQLLFCDDCDRGYHMYCLTPSMSEPPEGSWSCHLCLDLLKEKASIYQNQNSS

SEQ ID NO: 1380 - protein, 236 aa, Homo sapiens
MSAPSATPIFAPGENCSPAWGAAPAAYDAADTHLRILGKPVMERWETPYMHALAAAASSKGGRVLEVGFGMAIAASKVQEAPIDEHWIIECNDGVFQRLRDWAPRQTHKVIPLKGLWEDVAPTLPDGHFDGILYDTYPLSEETWHTHQFNFIKNHAFRLLKPGGVLTYCNLTSWGELMKSKYSDITIMFEETQVPALLEAGFRRENIRTEVMALVPPADCRYYAFPQMITPLVTKG

SEQ ID NO: 1381 - protein, 122 aa, Homo sapiens
MEDTPLVISKQKTEVVCGVPTQVVCTAFSSHILVVVTQFGKMGTLVSLEPSSVASDVSKPVLTTKVLLGQDEPLIHVFAKNLVAFVSQEAGNRAVLLAVAVKDKSMEGLKALREVIRVCQVW

SEQ ID NO: 1382 - protein, 83 aa, Homo sapiens
MGRRKSKRKPPPKKKMTGTLETQFTCPFCNHEKSCDVKMDRARNTGVISCTVCLEEFQTPITYLSEPVDVYSDWIDACEAANQ

SEQ ID NO: 1383 - protein, 198 aa, Homo sapiens
MPVPALCLLWALAMVTRPASAAPMGGPELAQHEELTLLFHGTLQLGQALNGVYRTTEGRLTKARNSLGLYGRTIELLGQEVSRGRDAAQELRASLLETQMEEDILQLQAEATAEVLGEVAQAQKVLRDSVQRLEVQLRSAWLGPAYREFEVLKAHADKQSHILWALTGHVQRQRREMVAQQHRLRQIQERLHTAALPA

SEQ ID NO: 1384 - protein, 297 aa, Homo sapiens
MSSAHFNRGPAYGLSAEVKNKLAQKYDHQREQELREWIEGVTGRRIGNNFMDGLKDGIILCEFINKLQPGSVKKINESTQNWHQLENIGNFIKAITKYGVKPHDIFEANDLFENTNHTQVQSTLLALASMAKTKGNKVNVGVKYAEKQERKFEPGKLREGRNIIGLQMGTNKFASQQGMTAYGTRRHLYDPKLGTDQPLDQATISLQMGTNKGASQAGMTAPGTKRQIFEPGLGMEHCDTLNVSLQMGSNKGASQRGMTVYGLPRQVYDPKYCLTPEYPELGEPAHNHHAHNYYNSA

SEQ ID NO: 1385 - protein, 619 aa, Homo sapiens
MNLERLRKRVRQYLDQQQYQSALFWADKVASLSREPQDIYWLAQCLYLTAQYHRAAHALRSRKLDKLYEACRYLAARCHYAAKEHQQALDVLDMEEPINKRLFEKYLKDESGFKDPSSDWEMSQSSIKSSICLLRGKIYDALDNRTLATYSYKEALKLDVYCFEAFDLLTSHHMLTAQEEKELLESLPLSKLCNEEQELLRFLFENKLKKYNKPSETVIPESVDGLQENLDVVVSLAERHYYNCDFKMCYKLTSVVMEKDPFHASCLPVHIGTLVELNKANELFYLSHKLVDLYPSNPVSWFAVGCYYLMVGHKNEHARRYLSKATTLEKTYGPAWIAYGHSFAVESEHDQAMAAYFTAAQLMKGCHLPMLYIGLEYGLTNNSKLAERFFSQALSIAPEDPFVMHEVGVVAFQNGEWKTAEKWFLDALEKIKAIGNEVTVDKWEPLLNNLGHVCRKLKKYAEALDYHRQALVLIPQNASTYSAIGYIHSLMGNFENAVDYFHTALGLRRDDTFSVTMLGHCIEMYIGDSEAYIGADIKDKLKCYDFDVHTMKTLKNIISPPWDFREFEVEKQTAEETGLTPLETSRKTPDSRPSLEETFEIEMNESDMMLETSMSDHST

SEQ ID NO: 1386 - protein, 538 aa, Homo sapiens
MARAAALLPSRSPPTPLLWPLLLLLLLETGAQDVRVQVLPEVRGQLGGTVELPCHLLPPVPGLYISLVTWQRPDAPANHQNVAAFHPKMGPSFPSPKPGSERLSFVSAKQSTGQDTEAELQDATLALHGLTVEDEGNYTCEFATFPKGSVRGMTWLRVIAKPKNQAEAQKVTFSQDPTTVALCISKEGRPPARISWLSSLDWEAKETQVSGTLAGTVTVTSRFTLVPSGRADGVTVTCKVEHESFEEPALIPVTLSVRYPPEVSISGYDDNWYLGRTDATLSCDVRSNPEPTGYDWSTTSGTFPTSAVAQGSQLVIHAVDSLFNTTFVCTVTNAVGMGRAEQVIFVRETPNTAGAGATGGIIGGIIAAIIATAVAATGILICRQQRKEQTLQGAEEDEDLEGPPSYKPPTPKAKLEAQEMPSQLFTLGASEHSPLKTPYFDAGASCTEQEMPRYHELPTLEERSGPLHPGATSLGSPIPVPPGPPAVEDVSLDLEDEEGEEEEEYLDKINPIYDALSYSSPSDSYQGKGFVMSRAMYV

SEQ ID NO: 1387 - protein, 479 aa, Homo sapiens
MARAAALLPSRSPPTPLLWPLLLLLLLETGAQDVRVQVLPEVRGQLGGTVELPCHLLPPVPGLYISLVTWQRPDAPANHQNVAAFHPKMGPSFPSPKPGSERLSFVSAKQSTGQDTEAELQDATLALHGLTVEDEGNYTCEFATFPKGSVRGMTWLRVIAKPKNQAEAQKVTFSQDPTTVALCISKEGRPPARISWLSSLDWEAKETQVSGTLAGTVTVTSRFTLVPSGRADGVTVTCKVEHESFEEPALIPVTLSVRYPPEVSISGYDDNWYLGRTDATLSCDVRSNPEPTGYDWSTTSGTFPTSAVAQGSQLVIHAVDSLFNTTFVCTVTNAVGMGRAEQVIFVRETPRASPRDVGPLVWGAVGGTLLVLLLLAGGSLAFILLRVRRRRKSPGGAGGGASGDGGFYDPKAQVLGNGDPVFWTPVVPGPMEPDGKDEEEEEEEEKAEKGLMLPPPPALEDDMESQLDGSLISRRAVYV

SEQ ID NO: 1388 - protein, 317 aa, Homo sapiens [sequence omitted]

SEQ ID NO: 1389 - protein, 361 aa, Homo sapiens
MGNVLAASSPPAGPPPPPAPALVGLPPPPPSPPGFTLPPLGGSLGAGTSTSRSSERTPGAATASASGAAEDGACGCLPNPGTFEECHRKCKELFPIQMEGVKLTVNKGLSNHFQVNHTVALSTIGESNYHFGVTYVGTKQLSPTEAFPVLVGDMDNSGSLNAQVIHQLGPGLRSKMAIQTQQSKFVNWQVDGEYRGSDFTAAVTLGNPDVLVGSGILVAHYLQSITPCLALGGELVYHRRPGEEGTVMSLAGKYTLNNWLATVTLGQAGMHATYYHKASDQLQVGVEFEASTRMQDTSVSFGYQLDLPKANLLFKGSVDSNWIVGATLEKKLPPLPLTLALGAFLNHRKNKFQCGFGLTIG

SEQ ID NO: 1390 - protein, 101 aa, Homo sapiens
MGTRLLPALFLVLLVLGFEVQGTQQPQQDEMPSPTFLTQVKESLSSYWESAKTAAQNLYEKTYLPAVDEKLRDLYSKSTAAMSTYTGIFTDQVLSVLKGEE

SEQ ID NO: 1391 - protein, 1087 aa, Homo sapiens
MADHVQSLAQLENLCKQLYETTDTTTRLQAEKALVEFTNSPDCLSKCQLLLERGSSSYSQLLAATCLTKLVSRTNNPLPLEQRIDIRNYVLNYLATRPKLATFVTQALIQLYARITKLGWFDCQKDDYVFRNAITDVTRFLQDSVEYCIIGVTILSQLTNEINQADTTHPLTKHRKIASSFRDSSLFDIFTLSCNLLKQASGKNLNLNDESQHGLLMQLLKLTHNCLNFDFIGTSTDESSDDLCTVQIPTSWRSAFLDSSTLQLFFDLYHSIPPSFSPLVLSCLVQIASVRRSLFNNAERAKFLSHLVDGVKRILENPQSLSDPNNYHEFCRLLARLKSNYQLGELVKVENYPEVIRLIANFTVTSLQHWEFAPNSVHYLLSLWQRLAASVPYVKATEPHMLETYTPEVTKAYITSRLESVHIILRDGLEDPLEDTGLVQQQLDQLSTIGRCEYEKTCALLVQLFDQSAQSYQELLQSASASPMDIAVQEGRLTWLVYIIGAVIGGRVSFASTDEQDAMDGELVCRVLQLMNLTDSRLAQAGNEKLELAMLSFFEQFRKIYIGDQVQKSSKLYRRLSEVLGLNDETMVLSVFIGKIITNLKYWGRCEPITSKTLQLLNDLSIGYSSVRKLVKLSAVQFMLNNHTSEHFSFLGINNQSNLTDMRCRTTFYTALGRLLMVDLGEDEDQYEQFMLPLTAAFEAVAQMFSTNSFNEQEAKRTLVGLVRDLRGIAFAFNAKTSFMMLFEWIYPSYMPILQRAIELWYHDPACTTPVLKLMAELVHNRSQRLQFDVSSPNGILLFRETSKMITMYGNRILTLGEVPKDQVYALKLKGISICFSMLKAALSGSYVNFGVFRLYGDDALDNALQTFIKLLLSIPHSDLLDYPKLSQSYYSLLEVLTQDHMNFIASLEPHVIMYILSSISEGLTALDTMVCTGCCSCLDHIVTYLFKQLSRSTKKRTTPLNQESDRFLHIMQQHPEMIQQMLSTVLNIIIFEDCRNQWSMSRPLLGLILLNEKYFSDLRNSIVNSQPPEKQQAMHLCFENLMEGIERNLLTKNRDRFTQNLSAFRREVNDSMKNSTYGVNSNDMMS

SEQ ID NO: 1392 - protein, 805 aa, Homo sapiens [sequence omitted]

SEQ ID NO: 1393 - protein, 953 aa, Homo sapiens
MAETLPGSGDSGPGTASLGPGVAETGTRRLSELRVIDLRAELKKRNLDTGGNKSVLMERLKKAVKEEGQDPDEIGIELEATSKKSAKRCVKGLKMEEEGTEDNGLEDDSRDGQEDMEASLENLQNMGMMDMSVLDETEVANSSAPDFGEDGTDGLLDSFCDSKEYVAAQLRQLPAQPPEHAVDGEGFKNTLETSSLNFKVTPDIEESLLEPENEKILDILGETCKSEPVKEESSELEQPFAQDTSSVGPDRKLAEEEDLFDSAHPEEGDLDLASESTAHAQSSKADSLLAVVKREPAEQPGDGERTDCEPVGLEPAVEQSSAASELAEASSEELAEAPTEAPSPEARDSKEDGRKFDFDACNEVPPAPKESSTSEGADQKMSSFKEEKDIKPIIKDEKGRVGSGSGRNLWVSGLSSTTRATDLKNLFSKYGKVVGAKVVTNARSPGARCYGFVTMSTSDEATKCISHLHRTELHGRMISVEKAKNEPAGKKLSDRKECEVKKEKLSSVDRHHSVEIKIEKTVIKKEEKIEKKEEKKPEDIKKEEKDQDELKPGPTNRSRVTKSGSRGMERTVVMDKSKGEPVISVKTTSRSKERSSKSQDRKSESKEKRDILSFDKIKEQRERERQRQREREIRETERRREREQREREQRLEAFHERKEKARLQRERLQLECQRQRLERERMERERLERERMRVERERRKEQERIHREREELRRQQEQLRYEQERRPGRRPYDLDRRDDAYWPEGKRVAMEDRYRADFPRPDHRFHDFDHRDRGQYQDHAIDRREGSRPMMGDHRDGQHYGDDRHGHGGPPERHGRDSRDGWGGYGSDKRLSEGRGLPPPPRGGRDWGEHNQRLEEHQARAWQGAMDAGAASREHARWQGGERGLSGPSGPGHMASRGGVAGRGGFAQGGHSQGHVVPGGGLEGGGVASQDRGSRVPHPHPHPPPYPHFTRRY

SEQ ID NO: 1394 - protein, 105 aa, Homo sapiens [sequence omitted]

SEQ ID NO: 1395 - protein, 1321 aa, Homo sapiens
MGAPFVWALGLLMLQMLLFVAGEQGTQDITDASERGLHMQKLGSGSVQAALAELVALPCLFTLQPRPSAARDAPRIKWTKVRTASGQRQDLPILVAKDNVVRVAKSWQGRVSLPSYPRRRANATLLLGPLRASDSGLYRCQVVRGIEDEQDLVPLEVTGVVFHYRSARDRYALTFAEAQEACRLSSAIIAAPRHLQAAFEDGFDNCDAGWLSDRTVRYPITQSRPGCYGDRSSLPGVRSYGRRNPQELYDVYCFARELGGEVFYVGPARRLTLAGARAQCRRQGAALASVGQLHLAWHEGLDQCDPGWLADGSVRYPIQTPRRRCGGPAPGVRTVYRFANRTGFPSPAERFDAYCFRAHHPTSQHGDLETPSSGDEGEILSAEGPPVRELEPTLEEEEVVTPDFQEPLVSSGEEETLILEEKQESQQTLSPTPGDPMLASWPTGEVWLSTVAPSPSDMGAGTAASSHTEVAPTDPMPRRRGRFKGLNGRYFQQQEPEPGLQGGMEASAQPPTSEAAVNQMEPPLAMAVTEMLGSGQSRSPWADLTNEVDMPGAGSAGGKSSPEPWLWPPTMVPPSISGHSRAPVLELEKAEGPSARPATPDLFWSPLEATVSAPSPAPWEAFPVATSPDLPMMAMLRGPKEWMLPHPTPISTEANRVEAHGEATATAPPSPAAETKVYSLPLSLTPTGQGGEAMPTTPESPRADFRETGETSPAQVNKAEHSSSSPWPSVNRNVAVGFVPTETATEPTGLRGIPGSESGVFDTAESPTSGLQATVDEVQDPWPSVYSKGLDASSPSAPLGSPGVFLVPKVTPNLEPWVATDEGPTVNPMDSTVTPAPSDASGIWEPGSQVFEEAESTTLSPQVALDTSIVTPLTTLEQGDKVGVPAMSTLGSSSSQPHPEPEDQVETQGTSGASVPPHQSSPLGKPAVPPGTPTAASVGESASVSSGEPTVPWDPSSTLLPVTLGIEDFELEVLAGSPGVESFWEEVASGEEPALPGTPMNAGAEEVHSDPCENNPCLHGGTCNANGTMYGCSCDQGFAGENCEIDIDDCLCSPCENGGTCIDEVNGFVCLCLPSYGGSFCEKDTEGCDRGWHKFQGHCYRYFAHRRAWEDAEKDCRRRSGHLTSVHSPEEHSFINSFGHENTWIGLNDRIVERDFQWTDNTGLQFENWRENQPDNFFAGGEDCVVMVAHESGRWNDVPCNYNLPYVCKKGTVLCGPPPAVENASLIGARKAKYNVHATVRYQCNEGFAQHHVATIRCRSNGKWDRPQIVCTKPRRSHRMRRHHHHHQHHHQHHHHKSRKERRKHKKHPTEDWEKDEGNFC

SEQ ID NO: 1396 - protein, 180 aa, Homo sapiens
MASTSYDYCRVPMEDGDKRCKLLLGIGILVLLIIVILGVPLIIFTIKANSEACRDGLRAVMECRNVTHLLQQELTEAQKGFQDVEAQAATCNHTVMALMASLDAEKAQGQKKVEELEGEITTLNHKLQDASAEVERLRRENQVLSVRIADKKYYPSSQDSSSAAAPQLLIVLLGLSALLQ

SEQ ID NO: 1397 - protein, 646 aa, Homo sapiens
MRAPGAGAASVVSLALLWLLGLPWTWSAAAALGVYVGSGGWRFLRIVCKTARRDLFGLSVLIRVRLELRRHQRAGHTIPRIFQAVVQRQPERLALVDAGTGECWTFAQLDAYSNAVANLFRQLGFAPGDVVAIFLEGRPEFVGLWLGLAKAGMEAALLNVNLRREPLAFCLGTSGAKALIFGGEMVAAVAEVSGHLGKSLIKFCSGDLGPEGILPDTHLLDPLLKEASTAPLAQIPSKGMDDRLFYIYTSGTTGLPKAAIVVHSRYYRMAAFGHHAYRMQAADVLYDCLPLYHSAGNIIGVGQCLIYGLTVVLRKKFSASRFWDDCIKYNCTVVQYIGEICRYLLKQPVREAERRHRVRLAVGNGLRPAIWEEFTERFGVRQIGEFYGATECNCSIANMDGKVGSCGFNSRILPHVYPIRLVKVNEDTMELLRDAQGLCIPCQAGEPGLLVGQINQQDPLRRFDGYVSESATSKKIAHSVFSKGDSAYLSGDVLVMDELGYMYFRDRSGDTFRWRGENVSTTEVEGVLSRLLGQTDVAVYGVAVPGVEGKAGMAAVADPHSLLDPNAIYQELQKVLAPYARPIFLRLLPQVDTTGTFKIQKTRLQREGFDPRQTSDRLFFLDLKQGHYLPLNEAVYTRICSGAFAL

SEQ ID NO: 1398 - protein, 622 aa, Homo sapiens
MAAAPRAGRRRGQPLLALLLLLLAPLPPGAPPGADAYFPEERWSPESPLQAPRVLIALLARNAAHALPTTLGALERLRHPRERTALWVATDHNMDNTSTVLREWLVAVKSLYHSVEWRPAEEPRSYPDEEGPKHWSDSRYEHVMKLRQAALKSARDMWADYILFVDADNLILNPDTLSLLIAENKTVVAPMLDSRAAYSNFWCGMTSQGYYKRTPAYIPIRKRDRRGCFAVPMVHSTFLIDLRKAASRNLAFYPPHPDYTWSFDDIIVFAFSCKQAEVQMYVCNKEEYGFLPVPLRAHSTLQDEAESFMHVQLEVMVKHPPAEPSRFISAPTKTPDKMGFDEVFMINLRRRQDRRERMLRALQAQEIECRLVEAVDGKAMNTSQVEALGIQMLPGYRDPYHGRPLTKGELGCFLSHYNIWKEVVDRGLQKSLVFEDDLRFEIFFKRRLMNLMRDVEREGLDWDLIYVGRKRMQVEHPEKAVPRVRNLVEADYSYWTLAYVISLQGARKLLAAEPLSKMLPVDEFLPVMFDKHPVSEYKAHFSLRNLHAFSVEPLLIYPTHYTGDDGYVSDTETSVVWNNEHVKTDWDRAKSQKMREQQALSREAKNSDVLQSPLDSAARDEL

SEQ ID NO: 1399 - protein, 92 aa, Homo sapiens [sequence omitted]

SEQ ID NO: 1400 - protein, 258 aa, Homo sapiens
MAAPAPGLISVFSSSQELGAALAQLVAQRAACCLAGARARFALGLSGGSLVSMLARELPAAVAPAGPASLARWTLGFCDERLVPFDHAESTYGLYRTHLLSRLPIPESQVITINPELPVEEAAEDYAKKLRQAFQGDSIPVFDLLILGVGPDGHTCSLFPDHPLLQEREKIVAPISDSPKPPPQRVTLTLPVLNAARTVIFVATGEGKAAVLKRILEDQEENPLPAALVQPHTGKLCWFLDEAAARLLTVPFEKHSTL

SEQ ID NO: 1401 - protein, 103 aa, Homo sapiens
MADKEKKKKESILDLSKYIDKTIRVKFQGGREASGILKGFDPLLNLVLDGTIEYMRDPDDQYKLTEDTRQLGLVVCRGTSVVLICPQDGMEAIPNPFIQQQDA

SEQ ID NO: 1402 - protein, 560 aa, Homo sapiens
MTVKPAKAASLARNLAKRRRTYLGGAAGRSQEPEVPCAAVLPGKPGDRNCPEFPPPDRTLGCWATDAAPAAGLCGAGSEPSIAPTSCAGNLPSRPPPLLSPLLASRNPCPWHYLHLSGSHNTLAPTCFKAKLHRKRGSQPPDMASALTDRTSRAPSTYTYTSRPRALPCQRSRYRDSLTQPDEEPMHYGNIMYDRRVIRGNTYALQTGPLLGRPDSLELQRQREARKRALARKQAQEQLRPQTPEPVEGRKHVDVQTELYLEEIADRIIEVDMECQTDAFLDRPPTPLFIPAKTGKDVATQILEGELFDFDLEVKPVLEVLVGKTIEQSLLEVMEEEELANLRASQREYEELRNSERAEVQRLEEQERRHREEKERRKKQQWEIMHKHNETSQKIAARAFAQRYLADLLPSVFGSLRDSGYFYDPIERDIEIGFLPWLMNEVEKTMEYSMVGRTVLDMLIREVVEKRLCMYEHGEDTHQSPEPEDEPGGPGAMTESLEASEFLEQSMSQTRELLLDGGYLQRTTYDRRSSQERKFMEERELLGQDEETAMRKSLGEEELS

SEQ ID NO: 1403 - protein, 559 aa, Homo sapiens
MDNQCTVQVRLELGHRAQLRKKPTTEGFTHDWMVFVRGPEQCDIQHFVEKVVFWLHDSFPKPRRVCKEPPYKVEESGYAGFIMPIEVHFKNKEEPRKVCFTYDLFLNLEGNPPVNHLRCEKLTFNNPTTEFRYKLLRAGGVMVMPEGADTVSRPSPDYPMLPTIPLSAFSDPKKTKPSHGSKDANKESSKTSKPHKVTKEHRERPRKDSESKSSSKELEREQAKSSKDTSRKLGEGRLPKEEKAPPPKAAFKEPKMALKETKLESTSPKGGPPPPPPPPPRASSKRPATADSPKPSAKKQKKSSSKGSRSAPGTSPRTSSSSSFSDKKPAKDKSSTRGEKVKAESEPREAKKALEVEESNSEDEASFKSESAQSSPSNSSSSSDSSSDSDFEPSQNHSQGPLRSMVEDLQSEESDEDDSSSGEEAAGKTNPGRDSRLSFSDSESDNSADSSLPSREPPPPQKPPPPNSKVSGRRSPESCSKPEKILKKGTYDKAYTDELVELHRRLMALRERNVLQQIVNLIEETGHFNVTNTTFDFDLFSLDETTVRKLQSCLEAVAT

SEQ ID NO: 1404 - protein, 392 aa, Homo sapiens
MVLLSILRILFLCELVLFMEHRAQMAEGGQSSIALLAEAPTLPLIEELLEESPGEQPRKPRLLGHSLRYMLELYRRSADSHGHPRENRTIGATMVRLVKPLTNVARPHRGTWHIQILGFPLRPNRGLYQLVRATVVYRHHLQLTRFNLSCHVEPWVQKNPTNHFPSSEGDSSKPSLMSNAWKEMDITQLVQQRFWNNKGHRILRLRFMCQQQKDSGGLELWHGTSSLDIAFLLLYFNDTHKSIRKAKFLPRGMEEFMERESLLRRTRQADGISAEVTASSSKHSGPENNQCSLHPFQISFRQLGWDHWIIAPPFYTPNYCKGTCLRVLRDGLNSPNHAIIQNLINQLVDQSVPRPSCVPYKYVPISVLMIEANGSILYKEYEGMIAESCTCR

SEQ ID NO: 1405 - protein, 1831 aa, Homo sapiens
MSAGGRDEERRKLADIIHHWNANRLDLFEISQPTEDLEFHGVMRFYFQDKAAGNFATKCIRVSSTATTQDVIETLAEKFRPDMRMLSSPKYSLYEVHVSGERRLDIDEKPLVVQLNWNKDDREGRFVLKNENDAIPPKKAQSNGPEKQEKEGVIQNFKRTLSKKEKKEKKKREKEALRQASDKDDRPFQGEDVENSRLAAEVYKDMPETSFTRTISNPEVVMKRRRQQKLEKRMQEFRSSDGRPDSGGTLRIYADSLKPNIPYKTILLSTTDPADFAVAEALEKYGLEKENPKDYCIARVMLPPGAQHSDEKGAKEIILDDDECPLQIFREWPSDKGILVFQLKRRPPDHIPKKTKKHLEGKTPKGKERADGSGYGSTLPPEKLPYLVELSPGRRNHFAYYNYHTYEDGSDSRDKPKLYRLQLSVTEVGTEKLDDNSIQLFGPGIQPHHCDLTNMDGVVTVTPRSMDAETYVEGQRISETTMLQSGMKVQFGASHVFKFVDPSQDHALAKRSVDGGLMVKGPRHKPGIVQETTFDLGGDIHSGTALPTSKSTTRLDSDRVSSASSTAERGMVKPMIRVEQQPDYRRQESRTQDASGPELILPASIEFRESSEDSFLSAIINYTNSSTVHFKLSPTYVLYMACRYVLSNQYRPDISPTERTHKVIAVVNKMVSMMEGVIQEVDQVDQKQKNIAGALAFWMANASELLNFIKQDRDLSRITLDAQDVLAHLVQMAFKYLVHCLQSELNNYMPAFLDDPEENSLQRPKIDDVLHTLTGAMSLLRRCRVNAALTIQLFSQLFHFINMWLFNRLVTDPDSGLCSHYWGAIIRQQLGHIEAWAEKQGLELAADCHLSRIVQATTLLTMDKYAPDDIPNINSTCFKLNSLQLQALLQNYHCAPDEPFIPTDLIENVVTVAENTADELARSDGREVQLEEDPDLQLPFLLPEDGYSCDVVRNIPNGLQEFLDPLCQRGFCRLIPHTRSPGTWTIYFEGADYESHLLRENTELAQPLRKEPEIITVTLKKQNGMGLSIVAAKGAGQDKLGIYVKSVVKGGAADVDGRLAAGDQLLSVDGRSLVGLSQERAAELMTRTSSVVTLEVAKQGAIYHGLATLLNQPSPMMQRISDRRGSGKPRPKSEGFELYNNSTQNGSPESPQLPWAEYSEPKKLPGDDRLMKNRADHRSSPNVANQPPSPGGKSAYASGTTAKITSVSTGNLCTEEQTPPPRPEAYPIPTQTYTREYFTFPASKSQDRMAPPQNQWPNYEEKPHMHTDSNHSSIAIQRVTRSQEELREDKAYQLERHRIEAAMDRKSDSDMWINQSSSLDSSTSSQEHLNHSSKSVTPASTLTKSGPGRWKTPAAIPATPVAVSQPIRTDLPPPPPPPPVHYAGDFDGMSMDLPLPPPPSANQIGLPSAQVAAAERRKREEHQRWYEKEKARLEEERERKRREQERKLGQMRTQSLNPAPFSPLTAQQMKPEKPSTLQRPQETVIRELQPQQQPRTIERRDLQYITVSKEELSSGDSLSPDPWKRDAKEKLEKQQQMHIVDMLSKEIQELQSKPDRSAEESDRLRKLMLEWQFQKRLQESKQKDEDDEEEEDDDVDTMLIMQRLEAERRARLQDEERRRQQQLEEMRKREAEDRARQEEERRRQEEERTKRDAEEKRRQEEGYYSRLEAERRRQHDEAARRLLEPEAPGLCRPPLPRDYEPPSPSPAPGAPPPPPQRNASYLKTQVLSPDSLFTAKFVAYNEEEEEEDCSLAGPNSYPGSTGAAVGAHDACRDAKEKRSKSQDADSPGSSGAPENLTFKERQRLFSQGQDVSNKVKASRKLTELENELNTK

SEQ ID NO: 1406 - protein, 911 aa, Homo sapiens
MVDYHAANQSYQYGPSSAGNGAGGGGSMGDYMAQEDDWDRDLLLDPAWEKQQRKTFTAWCNSHLRKAGTQIENIDEDFRDGLKLMLLLEVISGERLPKPERGKMRVHKINNVNKALDFIASKGVKLVSIGAEEIVDGNAKMTLGMIWTIILRFAIQDISVEETSAKEGLLLWCQRKTAPYKNVNVQNFHISWKDGLAFNALIHRHRPELIEYDKLRKDDPVTNLNNAFEVAEKYLDIPKMLDAEDIVNTARPDEKAIMTYVSSFYHAFSGAQKAETAANRICKVLAVNQENEHLMEDYEKLASDLLEWIRRTIPWLEDRVPQKTIQEMQQKLEDFRDYRRVHKPPKVQEKCQLEINFNTLQTKLRLSNRPAFMPSEGKMVSDINNGWQHLEQAEKGYEEWLLNEIRRLERLDHLAEKFRQKASIHEAWTDGKEAMLKHRDYETATLSDIKALIRKHEAFESDLAAHQDRVEQIAAIAQELNELDYYDSHNVNTRCQKICDQWDALGSLTHSRREALEKTEKQLEAIDQLHLEYAKRAAPFNNWMESAMEDLQDMFIVHTIEEIEGLISAHDQFKSTLPDADREREAILAIHKEAQRIAESNHIKLSGSNPYTTVTPQIINSKWEKVQQLVPKRDHALLEEQSKQQSNEHLRRQFASQANVVGPWIQTKMEEIGRISIEMNGTLEDQLSHLKQYERSIVDYKPNLDLLEQQHQLIQEALIFDNKHTNYTMEHIRVGWEQLLTTIARTINEVENQILTRDAKGISQEQMQEFRASFNHFDKDHGGALGPEEFKACLISLGYDVENDRQGEAEFNRIMSLVDPNHSGLVTFQAFIDFMSRETTDTDTADQVIASFKVLAGDKNFITAEELRRELPPDQAEYCIARMAPYQGPDAVPGALDYKSFSTALYGESDL

SEQ ID NO: 1407 - protein, 355 aa, Homo sapiens
MALRLLKLAATSASARVVAAGAQRVRGIHSSVQCKLRYGMWHFLLGDKASKRLTERSRVITVDGNICTGKGKLAKEIAEKLGFKHFPEAGIHYPDSTTGDGKPLATDYNGNCSLEKFYDDPRSNDGNSYRLQSWLYSSRLLQYSDALEHLLTTGQGVVLERSIFSDFVFLEAMYNQGFIRKQCVDHYNEVKSVTICDYLPPHLVIYIDVPVPEVQRRIQKKGDPHEMKITSAYLQDIENAYKKTFLPEMSEKCEVLQYSAREAQDSKKVVEDIEYLKFDKGPWLKQDNRTLYHLRLLVQDKFEVLNYTSIPIFLPEVTIGAHQTDRVLHQFRELPGRKYSPGYNTEVGDKWIWLK

SEQ ID NO: 1408 - protein, 193 aa, Homo sapiens
MGVHECPAWLWLLLSLLSLPLGLPVLGAPPRLICDSRVLERYLLEAKEAENITTGCAEHCSLNENITVPDTKVNFYAWKRMEVGQQAVEVWQGLALLSEAVLRGQALLVNSSQPWEPLQLHVDKAVSGLRSLTTLLRALGAQKEAISPPDAASAAPLRTITADTFRKLFRVYSNFLRGKLKLYTGEACRTGDR

SEQ ID NO: 1409 - protein, 1479 aa, Homo sapiens
MAKRSRGPGRRCLLALVLFCAWGTLAVVAQKPGAGCPSRCLCFRTTVRCMHLLLEAVPAVAPQTSILDLRFNRIREIQPGAFRRLRNLNTLLLNNNQIKRIPSGAFEDLENLKYLYLYKNEIQSIDRQAFKGLASLEQLYLHFNQIETLDPDSFQHLPKLERLFLHNNRITHLVPGTFNHLESMKRLRLDSNTLHCDCEILWLADLLKTYAESGNAQAAAICEYPRRIQGRSVATITPEELNCERPRITSEPQDADVTSGNTVYFTCRAEGNPKPEIIWLRNNNELSMKTDSRLNLLDDGTLMIQNTQETDQGIYQCMAKNVAGEVKTQEVTLRYFGSPARPTFVIQPQNTEVLVGESVTLECSATGHPPPRISWTRGDRTPLPVDPRVNITPSGGLYIQNVVQGDSGEYACSATNNIDSVHATAFIIVQALPQFTVTPQDRVVIEGQTVDFQCEAKGNPPPVIAWTKGGSQLSVDRRHLVLSSGTLRISGVALHDQGQYECQAVNIIGSQKVVAHLTVQPRVTPVFASIPSDTTVEVGANVQLPCSSQGEPEPAITWNKDGVQVTESGKFHISPEGFLTINDVGPADAGRYECVARNTIGSASVSMVLSVNVPDVSRNGDPFVATSIVEAIATVDRAINSTRTHLFDSRPRSPNDLLALFRYPRDPYTVEQARAGEIFERTLQLIQEHVQHGLMVDLNGTSYHYNDLVSPQYLNLIANLSGCTAHRRVNNCSDMCFHQKYRTHDGTCNNLQHPMWGASLTAFERLLKSVYENGFNTPRGINPHRLYNGHALPMPRLVSTTLIGTETVTPDEQFTHMLMQWGQFLDHDLDSTVVALSQARFSDGQHCSNVCSNDPPCFSVMIPPNDSRARSGARCMFFVRSSPVCGSGMTSLLMNSVYPREQINQLTSYIDASNVYGSTEHEARSIRDLASHRGLLRQGIVQRSGKPLLPFATGPPTECMRDENESPIPCFLAGDHRANEQLGLTSMHTLWFREHNRIATELLKLNPHWDGDTIYYETRKIVGAEIQHITYQHWLPKILGEVGMRTLGEYHGYDPGINAGIFNAFATAAFRFGHTLVNPLLYRLDENFQPIAQDHLPLHKAFFSPFRIVNEGGIDPLLRGLFGVAGKMRVPSQLLNTELTERLFSMAHTVALDLAAINIQRGRDHGIPPYHDYRVYCNLSAAHTFEDLKNEIKNPEIREKLKRLYGSTLNIDLFPALVVEDLVPGSRLGPTLMCLLSTQFKRLRDGDRLWYENPGVFSPAQLTQIKQTSLARILCDNADNITRVQSDVFRVAEFPHGYGSCDEIPRVDLRVWQDCCEDCRTRGQFNAFSYHFRGRRSLEFSYQEDKPTKKTRPRKIPSVGRQGEHLSNSTSAFSTRSDASGTNDFREFVLEMQKTITDLRTQIKKLESRLSTTECVDAGGESHANNTKWKKDACTICECKDGQVTCFVEACPPATCAVPVNIPGACCPVCLQKRAEEKP

SEQ ID NO: 1410 - protein, 363 aa, Homo sapiens
MYAKGGKGSAVPSDSQAREKLALYVYEYLLHIGAQKSAQTFLSEIRWEKNITLGEPPGFLHSWWCVFWDLYCAAPDRREACEHSGEAKAFQDYSAAAAPSPVMGSMAPGDTMAAGSMAAGFFQPFMSPRFPGGPRPTLRMPSQPPAGLPGSQPLLPGAMEPSPRAQGHPSMGGPMQRVTPPRGMASVGPQSYGGGMRPPPNSLAGPGLPAMNMGPGVRGPWASPSGNSIPYSSSSPGSYTGPPGGGGPPGTPIMPSPGDSTNSSENMYTIMNPIGQGAGRANFPLGPGPEGPMAAMSAMEPHHVNGSLGSGDMDGLPKSSPGAVAGLSNAPGTPRDDGEMAAAGTFLHPFPSESYSPGMTMSV

SEQ ID NO: 1411 - protein, 308 aa, Homo sapiens
MPGQELRTVNGSQMLLVLLVLSWLPHGGALSLAEASRASFPGPSELHSEDSRFRELRKRYEDLLTRLRANQSWEDSNTDLVPAPAVRILTPEVRLGSGGHLHLRISRAALPEGLPEASRLHRALFRLSPTASRSWDVTRPLRRQLSLARPQAPALHLRLSPPPSQSDQLLAESSSARPQLELHLRPQAARGRRRARARNGDHCPLGPGRCCRLHTVRASLEDLGWADWVLSPREVQVTMCIGACPSQFRAANMHAQIKTSLHRLKPDTVPAPCCVPASYNPMVLIQKTDTGVSLQTYDDLLAKDCHCI

SEQ ID NO: 1412 - protein, 132 aa, Homo sapiens
MATTVTLEKCGHNKGYKGLDNCRFCPGSQCCVEDGPESIDSIIDMDAVCKRVTTLGLDVSVTISQDAGRYLCDFTYYTSLYQSHGRSAFVHVPPLGKPYNADQLGRALRAIIEEMLDLLEQSEGKINYCHKH

SEQ ID NO: 1413 - protein, 699 aa, Homo sapiens
MGHHRPWLHASVLWAGVASLLLPPAMTQQLRGDGLGFRNRNNSTGVAGLSEEASAELRHHLHSPRDHPDENKDVSTENGHHFWSHPDREKEDEDVSKEYGHLLPGHRSQDHKVGDEGVSGEEVFAEHGGQARGHRGHGSEDTEDSAEHRHHLPSHRSHSHQDEDEDEVVSSEHHHHILRHGHRGHDGEDDEGEEEEEEEEEEEEASTEYGHQAHRHRGHGSEEDEDVSDGHHHHGPSHRHQGHEEDDDDDDDDDDDDDDDDVSIEYRHQAHRHQGHGIEEDEDVSDGHHHRDPSHRHRSHEEDDNDDDDVSTEYGHQAHRHQDHRKEEVEAVSGEHHHHVPDHRHQGHRDEEEDEDVSTERWHQGPQHVHHGLVDEEEEEEEITVQFGHYVASHQPRGHKSDEEDFQDEYKTEVPHHHHHRVPREEDEEVSAELGHQAPSHRQSHQDEETGHGQRGSIKEMSHHPPGHTVVKDRSHLRKDDSEEEKEKEEDPGSHEEDDESSEQGEKGTHHGSRDQEDEEDEEEGHGLSLNQEEEEEEDKEEEEEEEDEERREERAEVGAPLSPDHSEEEEEEEEGLEEDEPRFTIIPNPLDRREEAGGASSEEESGEDTGPQDAQEYGNYQPGSLCGYCSFCNRCTECESCHCDEENMGEHCDQCQHCQFCYLCPLVCETVCAPGSYVDYFSSSLYQALADMLETPEP

SEQ ID NO: 1414 - protein, 1214 aa, Homo sapiens
MVVPEKEQSWIPKIFKKKTCTTFIVDSTDPGGTLCQCGRPRTAHPAVAMEDAFGAAVVTVWDSDAHTTEKPTDAYGELDFTGAGRKHSNFLRLSDRTDPAAVYSLVTRTWGFRAPNLVVSVLGGSGGPVLQTWLQDLLRRGLVRAAQSTGAWIVTGGLHTGIGRHVGVAVRDHQMASTGGTKVVAMGVAPWGVVRNRDTLINPKGSFPARYRWRGDPEDGVQFPLDYNYSAFFLVDDGTHGCLGGENRFRLRLESYISQQKTGVGGTGIDIPVLLLLIDGDEKMLTRIENATQAQLPCLLVAGSGGAADCLAETLEDTLAPGSGGARQGEARDRIRRFFPKGDLEVLQAQVERIMTRKELLTVYSSEDGSEEFETIVLKALVKACGSSEASAYLDELRLAVAWNRVDIAQSELFRGDIQWRSFHLEASLMDALLNDRPEFVRLLISHGLSLGHFLTPMRLAQLYSAAPSNSLIRNLLDQASHSAGTKAPALKGGAAELRPPDVGHVLRMLLGKMCAPRYPSGGAWDPHPGQGFGESMYLLSDKATSPLSLDAGLGQAPWSDLLLWALLLNRAQMAMYFWEMGSNAVSSALGACLLLRVMARLEPDAEEAARRKDLAFKFEGMGVDLFGECYRSSEVRAARLLLRRCPLWGDATCLQLAMQADARAFFAQDGVQSLLTQKWWGDMASTTPIWALVLAFFCPPLIYTRLITFRKSEEEPTREELEFDMDSVINGEGPVGTADPAEKTPLGVPRQSGRPGCCGGRCGGRRCLRRWFHFWGAPVTIFMGNVVSYLLFLLLFSRVLLVDFQPAPPGSLELLLYFWAFTLLCEELRQGLSGGGGSLASGGPGPGHASLSQRLRLYLADSWNQCDLVALTCFLLGVGCRLTPGLYHLGRTVLCIDFMVFTVRLLHIFTVNKQLGPKIVIVSKMMKDVFFFLFFLGVWLVAYGVATEGLLRPRDSDFPSILRRVFYRPYLQIFGQIPQEDMDVALMEHSNCSSEPGFWAHPPGAQAGTCVSQYANWLVVLLLVIFLLVANILLVNLLIAMFSYTFGKVQGNSDLYWKAQRYRLIREFHSRPALAPPFIVISHLRLLLRQLCRRPRSPQPSSPALEHFRVYLSKEAERKLLTWESVHKENFLLARARDKRESDSERLKRTSQKVDLALKQLGHIREYEQRLKVLEREVQQCSRVLGWVAEALSRSALLPPGGPPPPDLPGSKD

SEQ ID NO: 1415 - protein, 430 aa, Homo sapiens
MAAVVLPPTAALSSLFPASQREGHTEGGELVNELLKSWLKGLVTFEDVAVEFTQEEWALLDPAQRTLYRDVMLENCRNLASLGNQVDKPRLISQLEQEDKVMTEERGILSGTCPDVENPFKAKGLTPKLHVFRKEQSRNMKMERNHLGATLNECNQCFKVFSTKSSLTRHRKIHTGERPYGCSECGKSYSSRSYLAVHKRIHNGEKPYECNDCGKTFSSRSYLTVHKRIHNGEKPYECSDCGKTFSNSSYLRPHLRIHTGEKPYKCNQCFREFRTQSIFTRHKRVHTGEGHYVCNQCGKAFGTRSSLSSHYSIHTGEYPYECHDCGRTFRRRSNLTQHIRTHTGEKPYTCNECGKSFTNSFSLTIHRRIHNGEKSYECSDCGKSFNVLSSVKKHMRTHTGKKPYECNYCGKSFTSNSYLSVHTRMHNRQM

SEQ ID NO: 1416 - protein, 467 aa, Homo sapiens
MPGRWRWQRDMHPARKLLSLLFLILMGTELTQVLPTNPEESWQVYSSAQDSEGRCICTVVAPQQTMCSRDARTKQLRQLLEKVQNMSQSIEVLDRRTQRDLQYVEKMENQMKGLESKFKQVEESHKQHLARQFKAIKAKMDELRPLIPVLEEYKADAKLVLQFKEEVQNLTSVLNELQEEIGAYDYDELQSRVSNLEERLRACMQKLACGKLTGISDPVTVKTSGSRFGSWMTDPLAPEGDNRVWYMDGYHNNRFVREYKSMVDFMNTDNFTSHRLPHPWSGTGQVVYNGSIYFNKFQSHIIIRFDLKTETILKTRSLDYAGYNNMYHYAWGGHSDIDLMVDESGLWAVYATNQNAGNIVVSRLDPVSLQTLQTWNTSYPKRSAGEAFIICGTLYVTNGYSGGTKVHYAYQTNASTYEYIDIPFQNKYSHISMLDYNPKDRALYAWNNGHQILYNVTLFHVIRSDEL

SEQ ID NO: 1417 - protein, 475 aa, Homo sapiens
MAAPRPPPARLSGVMVPAPIQDLEALRALTALFKEQRNRETAPRTIFQRVLDILKKSSHAVELACRDPSQVENLASSLQLITECFRCLRNACIECSVNQNSIRNLDTIGVAVDLILLFRELRVEQESLLTAFRCGLQFLGNIASRNEDSQSIVWVHAFPELFLSCLNHPDKKIVAYSSMILFTSLNHERMKELEENLNIAIDVIDAYQKHPESEWPFLIITDLFLKSPELVQAMFPKLNNQERVTLLDLMIAKITSDEPLTKDDIPVFLRHAELIASTFVDQCKTVLKLASEEPPDDEEALATIRLLDVLCEMTVNTELLGYLQVFPGLLERVIDLLRVIHVAGKETTNIFSNCGCVRAEGDISNVANGFKSHLIRLIGNLCYKNKDNQDKVNELDGIPLILDNCNISDSNPFLTQWVIYAIRNLTEDNSQNQDLIAKMEEQGLADASLLKKVGFEVEKKGEKLILKSTRDTPKP

SEQ ID NO: 1418 - protein, 902 aa, Homo sapiens
MSEFRIHHDVNELLSLLRVHGGDGAEVYIDLLQKNRTPYVTTTVSAHSAKVKIAEFSRTPEDFLKKYDELKSKNTRNLDPLVYLLSKLTEDKETLQYLQQNAKERAELAAAAVGSSTTSINVPAAASKISMQELEELRKQLGSVATGSTLQQSLELKRKMLRDKQNKKNSGQHLPIFPAWVYERPALIGDFLIGAGISTDTALPIGTLPLASQESAVVEDLLYVLVGVDGRYVSAQPLAGRQSRTFLVDPNLDLSIRELVHRILPVAASYSAVTRFIEEKSSFEYGQVNHALAAAMRTLVKEHLILVSQLEQLHRQGLLSLQKLWFYIQPAMRTMDILASLATSVDKGECLGGSTLSLLHDRSFSYTGDSQAQELCLYLTKAASAPYFEVLEKWIYRGIIHDPYSEFMVEEHELRKERIQEDYNDKYWDQRYTIVQQQIPSFLQKMADKILSTGKYLNVVRECGHDVTCPVAKEIIYTLKERAYVEQIEKAFNYASKVLLDFLMEEKELVAHLRSIKRYFLMDQGDFFVHFMDLAEEELRKPVEDITPPRLEALLELALRMSTANTDPFKDDLKIDLMPHDLITQLLRVLAIETKQEKAMAHADPTELALSGLEAFSFDYIVKWPLSLIINRKALTRYQMLFRHMFYCKHVERQLCSVWISNKTAKQHSLHSAQWFAGAFTLRQRMLNFVQNIQYYMMFEVMEPTWHILEKNLKSASNIDDVLGHHTGFLDTCLKDCMLTNPELLKVFSKLMSVCVMFTNCMQKFTQSMKLDGELGGQTLEHSTVLGLPAGAEERARKELARKHLAEHADTVQLVSGFEATINKFDKNFSAHLLDLLARLSIYSTSDCEHGMASVISRLDFNGFYTERLERLSAERSQKATPQVPVLRGPPAPAPRVAVTAQ

SEQ ID NO: 1419 - protein, 751 aa, Homo sapiens
MGPQGARRQAFLAFGDVTVDFTQKEWRLLSPAQRALYREVTLENYSHLVSLGILHSKPELIRRLEQGEVPWGEERRRRPGPCAGIYAEHVLRPKNLGLAHQRQQQLQFSDQSFQSDTAEGQEKEKSTKPMAFSSPPLRHAVSSRRRNSVVEIESSQGQRENPTEIDKVLKGIENSRWGAFKCAERGQDFSRKMMVIIHKKAHSRQKLFTCRECHQGFRDESALLLHQNTHTGEKSYVCSVCGRGFSLKANLLRHQRTHSGEKPFLCKVCGRGYTSKSYLTVHERTHTGEKPYECQECGRRFNDKSSYNKHLKAHSGEKPFVCKECGRGYTNKSYFVVHKRIHSGEKPYRCQECGRGFSNKSHLITHQRTHSGEKPFACRQCKQSFSVKGSLLRHQRTHSGEKPFVCKDCERSFSQKSTLVYHQRTHSGEKPFVCRECGQGFIQKSTLVKHQITHSEEKPFVCKDCGRGFIQKSTFTLHQRTHSEEKPYGCRECGRRFRDKSSYNKHLRAHLGEKRFFCRDCGRGFTLKPNLTIHQRTHSGEKPFMCKQCEKSFSLKANLLRHQWTHSGERPFNCKDCGRGFILKSTLLFHQKTHSGEKPFICSECGQGFIWKSNLVKHQLAHSGKQPFVCKECGRGFNWKGNLLTHQRTHSGEKPFVCNVCGQGFSWKRSLTRHHWRIHSKEKPFVCQECKRGYTSKSDLTVHERIHTGERPYECQECGRKFSNKSYYSKHLKRHLREKRFCTGSVGEASS

SEQ ID NO: 1420 - protein, 1085 aa, Homo sapiens
MAAGSDLLDEVFFNSEVDEKVVSDLVGSLESQLAASAAHHHHLAPRTPEVRAAAAGALGNHVVSGSPAGAAGAGPAAPAEGAPGAAPEPPPAGRARPGGGGPQRPGPPSPRRPLVPAGPAPPAAKLRPPPEGSAGSCAPVPAAAAVAAGPEPAPAGPAKPAGPAALAARAGPGPGPGPGPGPGPGPGKPAGPGAAQTLNGSAALLNSHHAAAPAVSLVNNGPAALLPLPKPAAPGTVIQTPPFVGAAAPPAPAAPSPPAAPAPAAPAAAPPPPPPAPATLARPPGHPAGPPTAAPAVPPPAAAQNGGSAGAAPAPAPAAGGPAGVSGQPGPGAAAAAPAPGVKAESPKRVVQAAPPAAQTLAASGPASTAASMVIGPTMQGALPSPAAVPPPAPGTPTGLPKGAAGAVTQSLSRTPTATTSGIRATLTPTVLAPRLPQPPQNPTNIQNFQLPPGMVLVRSENGQLLMIPQQALAQMQAQAHAQPQTTMAPRPATPTSAPPVQISTVQAPGTPIIARQVTPTTIIKQVSQAQTTVQPSATLQRSPGVQPQLVLGGAAQTASLGTATAVQTGTPQRTVPGATTTSSAATETMENVKKCKNFLSTLIKLASSGKQSTETAANVKELVQNLLDGKIEAEDFTSRLYRELNSSPQPYLVPFLKRSLPALRQLTPDSAAFIQQSQQQPPPPTSQATTALTAVVLSSSVQRTAGKTAATVTSALQPPVLSLTQPTQVGVGKQGQPTPLVIQQPPKPGALIRPPQVTLTQTPMVALRQPHNRIMLTTPQQIQLNPLQPVPVVKPAVLPGTKALSAVSAQAAAAQKNKLKEPGGGSFRDDDDINDVASMAGVNLSEESARILATNSELVGTLTRSCKDETFLLQAPLQRRILEIGKKHGITELHPDVVSYVSHATQQRLQNLVEKISETAQQKNFSYKDDDRYEQASDVRAQLKFFEQLDQIEKQRKDEQEREILMRAAKSRSRQEDPEQLRLKQKAKEMQQQELAQMRQRDANLTALAAIGPRKKRKVDCPGPGSGAEGSGPGSVVPGSSGVGTPRQFTRQRITRVNLRDLIFCLENERETSHSLLLYKAFLK

SEQ ID NO: 1421 - protein, 3695 aa, Homo sapiens
MAKRLCAGSALCVRGPRGPAPLLLVGLALLGAARAREEAGGGFSLHPPYFNLAEGARIAASATCGEEAPARGSPRPTEDLYCKLVGGPVAGGDPNQTIRGQYCDICTAANSNKAHPASNAIDGTERWWQSPPLSRGLEYNEVNVTLDLGQVFHVAYVLIKFANSPRPDLWVLERSMDFGRTYQPWQFFASSKRDCLERFGPQTLERITRDDAAICTTEYSRIVPLENGEIVVSLVNGRPGAMNFSYSPLLREFTKATNVRLRFLRTNTLLGHLMGKALRDPTVTRRYYYSIKDISIGGRCVCHGHADACDAKDPTDPFRLQCTCQHNTCGGTCDRCCPGFNQQPWKPATANSANECQSCNCYGHATDCYYDPEVDRRRASQSLDGTYQGGGVCIDCQHHTTGVNCERCLPGFYRSPNHPLDSPHVCRRCNCESDFTDGTCEDLTGRCYCRPNFSGERCDVCAEGFTGFPSCYPTPSSSNDTREQVLPAGQIVNCDCSAAGTQGNACRKDPRVGRCLCKPNFQGTHCELCAPGFYGPGCQPCQCSSPGVADDRCDPDTGQCRCRVGFEGATCDRCAPGYFHFPLCQLCGCSPAGTLPEGCDEAGRCLCQPEFAGPHCDRCRPGYHGFPNCQACTCDPRGALDQLCGAGGLCRCRPGYTGTACQECSPGFHGFPSCVPCHCSAEGSLHAACDPRSGQCSCRPRVTGLRCDTCVPGAYNFPYCEAGSCHPAGLAPVDPALPEAQVPCMCRAHVEGPSCDRCKPGFWGLSPSNPEGCTRCSCDLRGTLGGVAECQPGTGQCFCKPHVCGQACASCKDGFFGLDQADYFGCRSCRCDIGGALGQSCEPRTGVCRCRPNTQGPTCSEPARDHYLPDLHHLRLELEEAATPEGHAVRFGFNPLEFENFSWRGYAQMAPVQPRIVARLNLTSPDLFWLVFRYVNRGAMSVSGRVSVREEGRSATCANCTAQSQPVAFPPSTEPAFITVPQRGFGEPFVLNPGTWALRVEAEGVLLDYVVLLPSAYYEAALLQLRVTEACTYRPSAQQSGDNCLLYTHLPLDGFPSAAGLEALCRQDNSLPRPCPTEQLSPSHPPLITCTGSDVDVQLQVAVPQPGRYALVVEYANEDARQEVGVAVHTPQRAPQQGLLSLHPCLYSTLCRGTARDTQDHLAVFHLDSEASVRLTAEQARFFLHGVTLVPIEEFSPEFVEPRVSCISSHGAFGPNSAACLPSRFPKPPQPIILRDCQVIPLPPGLPLTHAQDLTPAMSPAGPRPRPPTAVDPDAEPTLLREPQATVVFTTHVPTLGRYAFLLHGYQPAHPTFPVEVLINAGRVWQGHANASFCPHGYGCRTLVVCEGQALLDVTHSELTVTVRVPKGRWLWLDYVLVVPENVYSFGYLREEPLDKSYDFISHCAAQGYHISPSSSSLFCRNAAASLSLFYNNGARPCGCHEVGATGPTCEPFGGQCPCHAHVIGRDCSRCATGYWGFPNCRPCDCGARLCDELTGQCICPPRTIPPDCLLCQPQTFGCHPLVGCEECNCSGPGIQELTDPTCDTDSGQCKCRPNVTGRRCDTCSPGFHGYPRCRPCDCHEAGTAPGVCDPLTGQCYCKENVQGPKCDQCSLGTFSLDAANPKGCTRCFCFGATERCRSSSYTRQEFVDMEGWVLLSTDRQVVPHERQPGTEMLRADLRHVPEAVPEAFPELYWQAPPSYLGDRVSSYGGTLRYELHSETQRGDVFVPMESRPDVVLQGNQMSITFLEPAYPTPGHVHRGQLQLVEGNFRHTETRNTVSREELMMVLASLEQLQIRALFSQISSAVFLRRVALEVASPAGQGALASNVELCLCPASYRGDSCQECAPGFYRDVKGLFLGRCVPCQCHGHSDRCLPGSGVCVDCQHNTEGAHCERCQAGFVSSRDDPSAPCVSCPCPLSVPSNNFAEGCVLRGGRTQCLCKPGYAGASCERCAPGFFGNPLVLGSSCQPCDCSGNGDPNLLFSDCDPLTGACRGCLRHTTGPRCEICAPGFYGNALLPGNCTRCDCTPCGTEACDPHSGHCLCKAGVTGRRCDRCQEGHFGFDGCGGCRPCACGPAAEGSECHPQSGQCHCRPGTMGPQCRECAPGYWGLPEQGCRRCQCPGGRCDPHTGRCNCPPGLSGERCDTCSQQHQVPVPGGPVGHSIHCEVCDHCVVLLLDDLERAGALLPAIHEQLRGINASSMAWARLHRLNASIADLQSQLRSPLGPRHETAQQLEVLEQQSTSLGQDARRLGGQAVGTRDQASQLLAGTEATLGHAKTLLAAIRAVDRTLSELMSQTGHLGLANASAPSGEQLLRTLAEVERLLWEMRARDLGAPQAAAEAELAAAQRLLARVQEQLSSLWEENQALATQTRDRLAQHEAGLMDLREALNRAVDATREAQELNSRNQERLEEALQRKQELSRDNATLQATLHAARDTLASVFRLLHSLDQAKEELERLAASLDGARTPLLQRMQTFSPAGSKLRLVEAAEAHAQQLGQLALNLSSIILDVNQDRLTQRAIEASNAYSRILQAVQAAEDAAGQALQQADHTWATVVRQGLVDRAQQLLANSTALEEAMLQEQQRLGLVWAALQGARTQLRDVRAKKDQLEAHIQAAQAMLAMDTDETSKKIAHAKAVAAEAQDTATRVQSQLQAMQENVERWQGQYEGLRGQDLGQAVLDAGHSVSTLEKTLPQLLAKLSILENRGVHNASLALSASIGRVRELIAQARGAASKVKVPMKFNGRSGVQLRTPRDLADLAAYTALKFYLQGPEPEPGQGTEDRFVMYMGSRQATGDYMGVSLRDKKVHWVYQLGEAGPAVLSIDEDIGEQFAAVSLDRTLQFGHMSVTVERQMIQETKGDTVAPGAEGLLNLRPDDFVFYVGGYPSTFTPPPLLRFPGYRGCIEMDTLNEEVVSLYNFERTFQLDTAVDRPCARSKSTGDPWLTDGSYLDGTGFARISFDSQISTTKRFEQELRLVSYSGVLFFLKQQSQFLCLAVQEGSLVLLYDFGAGLKKAVPLQPPPPLTSASKAIQVFLLGGSRKRVLVRVERATVYSVEQDNDLELADAYYLGGVPPDQLPPSLRRLFPTGGSVRGCVKGIKALGKYVDLKRLNTTGVSAGCTADLLVGRAMTFHGHGFLRLALSNVAPLTGNVYSGFGFHSAQDSALLYYRASPDGLCQVSLQQGRVSLQLLRTEVKTQAGFADGAPHYVAFYSNATGVWLYVDDQLQQMKPHRGPPPELQPQPEGPPRLLLGGLPESGTIYNFSGCISNVFVQRLLGPQRVFDLQQNLGSVNVSTGCAPALQAQTPGLGPRGLQATARKASRRSRQPARHPACMLPPHLRTTRDSYQFGGSLSSHLEFVGILARHRNWPSLSMHVLPRSSRGLLLFTARLRPGSPSLALFLSNGHFVAQMEGLGTRLRAQSRQRSRPGRWHKVSVRWEKNRILLVTDGARAWSQEGPHRQHQGAEHPQPHTLFVGGLPASSHSSKLPVTVGFSGCVKRLRLHGRPLGAPTRMAGVTPCILGPLEAGLFFPGSGGVITLDLPGATLPDVGLELEVRPLAVTGLIFHLGQARTPPYLQLQVTEKQVLLRADDGAGEFSTSVTRPSVLCDGQWHRLAVMKSGNVLRLEVDAQSNHTVGPLLAAAAGAPAPLYLGGLPEPMAVQPWPPAYCGCMRRLAVNRSPVAMTRSVEVHGAVGASGCPAA

SEQ ID NO: 1422 - protein, 407 aa, Homo sapiens
MTTSGALFPSLVPGSRGASNKYLVEFRAGKMSLKGTTVTPDKRKGLVYIQQTDDSLIHFCWKDRTSGNVEDDLIIFPDDCEFKRVPQCPSGRVYVLKFKAGSKRLFFWMQEPKTDQDEEHCRKVNEYLNNPPMPGALGASGSSGHELSALGGEGGLQSLLGNMSHSQLMQLIGPAGLGGLGGLGALTGPGLASLLGSSGPPGSSSSSSSRSQSAAVTPSSTTSSTRATPAPSAPAAASATSPSPAPSSGNGASTAASPTQPIQLSDLQSILATMNVPAGPAGGQQVDLASVLTPEIMAPILANADVQERLLPYLPSGESLPQTADEIQNTLTSPQFQQALGMFSAALASGQLGPLMCQFGLPAEAVEAANKGDVEAFAKAMQNNAKPEQKEGDTKDKKDEEEDMSLD

SEQ ID NO: 1423 - protein, 412 aa, Homo sapiens
MSSKGSVVLAYSGGLDTSCILVWLKEQGYDVIAYLANIGQKEDFEEARKKALKLGAKKVFIEDVSREFVEEFIWPAIQSSALYEDRYLLGTSLARPCIARKQVEIAQREGAKYVSHGATGKGNDQVRFELSCYSLAPQIKVIAPWRMPEFYNRFKGRNDLMEYAKQHGIPIPVTPKNPWSMDENLMHISYEAGILENPKNQAPPGLYTKTQDPAKAPNTPDILEIEFKKGVPVKVTNVKDGTTHQTSLELFMYLNEVAGKHGVGRIDIVENRFIGMKSRGIYETPAGTILYHAHLDIEAFTMDREVRKIKQGLGLKFAELVYTGFWHSPECEFVRHCIAKSQERVEGKVQVSVLKGQVYILGRESPLSLYNEELVSMNVQGDYEPTDATGFININSLRLKEYHRLQSKVTAK

SEQ ID NO: 1424 - protein, 183 aa, Homo sapiens
MIKLFSLKQQKKEEESAGGTKGSSKKASAAQLRIQKDINELNLPKTCDISFSDPDDLLNFKLVICPDEGFYKSGKFVFSFKVGQGYPHDPPKVKCETMVYHPNIDLEGNVCLNILREDWKPVLTINSIIYGLQYLFLEPNPEDPLNKEAAEVLQNNRRLFEQNVQRSMRGGYIGSTYFERCLK

SEQ ID NO: 1425 - protein, 316 aa, Homo sapiens
MASADELTFHEFEEATNLLADTPDAATTSRSDQLTPQGHVAVAVGSGGSYGAEDEVEEESDKAALLQEQQQQQQPGFWTFSYYQSFFDVDTSQVLDRIKGSLLPRPGHNFVRHHLRNRPDLYGPFWICATLAFVLAVTGNLTLVLAQRRDPSIHYSPQFHKVTVAGISIYCYAWLVPLALWGFLRWRKGVQERMGPYTFLETVCIYGYSLFVFIPMVVLWLIPVPWLQWLFGALALGLSAAGLVFTLWPVVREDTRLVATVLLSVVVLLHALLAMGCKLYFFQSLPPENVAPPPQITSLPSNIALSPTLPQSLAPS

SEQ ID NO: 1426 - protein, 472 aa, Homo sapiens
MAGGEAGVTLGQPHLSRQDLTTLDVTKLTPLSHEVISRQATINIGTIGHVAHGKSTVVKAISGVHTVRFKNELERNITIKLGYANAKIYKLDDPSCPRPECYRSCGSSTPDEFPTDIPGTKGNFKLVRHVSFVDCPGHDILMATMLNGAAVMDAALLLIAGNESCPQPQTSEHLAAIEIMKLKHILILQNKIDLVKESQAKEQYEQILAFVQGTVAEGAPIIPISAQLKYNIEVVCEYIVKKIPVPPRDFTSEPRLIVIRSFDVNKPGCEVDDLKGGVAGGSILKGVLKVGQEIEVRPGIVSKDSEGKLMCKPIFSKIVSLFAEHNDLQYAAPGGLIGVGTKIDPTLCRADRMVGQVLGAVGALPEIFTELEISYFLLRRLLGVRTEGDKKAAKVQKLSKNEVLMVNIGSLSTGGRVSAVKADLGKIVLTNPVCTEVGEKIALSRRVEKHWRLIGWGQIRRGVTIKPTVDDD

SEQ ID NO: 1427 - protein, 1303 aa, Homo sapiens
MEAAPGTPPPPPSESPPPPSPPPPSTPSPPPCSPDARPATPHLLHHRLPLPDDREDGELEEGELEDDGAEETQDTSGGPERSRKEKGEKHHSDSDEEKSHRRLKRKRKKEREKEKRRSKKRRKSKHKRHASSSDDFSDFSDDSDFSPSEKGHRKYREYSPPYAPSHQQYPPSHATPLPKKAYSKMDSKSYGMYEDYENEQYGEYEGDEEEDMGKEDYDDFTKELNQYRRAKEGSSRGRGSRGRGRGYRGRGSRGGSRGRGMGRGSRGRGRGSMGGDHPEDEEDFYEEEMDYGESEEPMGDDDYDEYSKELNQYRRSKDSRGRGLSRGRGRGSRGRGKGMGRGRGRGGSRGGMNKGGMNDDEDFYDEDMGDGGGGSYRSRDHDKPHQQSDKKGKVICKYFVEGRCTWGDHCNFSHDIELPKKRELCKFYITGFCARAENCPYMHGDFPCKLYHTTGNCINGDDCMFSHDPLTEETRELLDKMLADDAEAGAEDEKEVEELKKQGINPLPKPPPGVGLLPTPPRPPGPQAPTSPNGRPMQGGPPPPPPPPPPPPGPPQMPMPVHEPLSPQQLQQQDMYNKKIPSLFEIVVRPTGQLAEKLGVRFPGPGGPPGPMGPGPNMGPPGPMGGPMHPDMHPDMHPDMHPDMHADMHADMPMGPGMNPGPPMGPGGPPMMPYGPGDSPHSGMMPPIPPAQNFYENFYQQQEGMEMEPGLLGDAEDYGHYEELPGEPGEHLFPEHPLEPDSFSEGGPPGRPKPGAGVPDFLPSAQRALYLRIQQKQQEEEERARRLAESSKQDRENEEGDTGNWYSSDEDEGGSSVTSILKTLRQQTSSRPPASVGELSSSGLGDPRLQKGHPTGSRLADPRLSRDPRLTRHVEASGGSGPGDSGPSDPRLARALPTSKPEGSLHSSPVGPSSSKGSGPPPTEEEEGERALREKAVNIPLDPLPGHPLRDPRSQLQQFSHIKKDVTLSKPSFARTVLWNPEDLIPLPIPKQDAVPPVPAALQSMPTLDPRLHRAATAGPPNARQRPGASTDSSTQGANLPDFELLSRILKTVNATGSSAAPGSSDKPSDPRVRKAPTDPRLQKPTDSTASSRAAKPGPAEAPSPTASPSGDASPPATAPYDPRVLAAGGLGQGGGGGQSSVLSGISLYDPRTPNAGGKATEPAADTGAQPKGAEGNGKSSASKAKEPPFVRKSALEQPETGKAGADGGTPTDRYNSYNRPRPKAAAAPAATTATPPPEGAPPQPGVHNLPVPTLFGTVKQTPKTGSGSPFAGNSPAREGEQDAASLKDVFKGFDPTASPFCQ

SEQ ID NO: 1428 - protein, 480 aa, Homo sapiens
MIVADSECRAELKDYLRFAPGGVGDSGPGEEQRESRARRGPRGPSAFIPVEEVLREGAESLEQHLGLEALMSSGRVDNLAVVMGLHPDYFTSFWRLHYLLLHTDGPLASSWRHYIAIMAAARHQCSYLVGSHMAEFLQTGGDPEWLLGLHRAPEKLRKLSEINKLLAHRPWLITKEHIQALLKTGEHTWSLAELIQALVLLTHCHSLSSFVFGCGILPEGDADGSPAPQAPTPPSEQSSPPSRDPLNNSGGFESARDVEALMERMQQLQESLLRDEGTSQEEMESRFELEKSESLLVTPSADILEPSPHPDMLCFVEDPTFGYEDFTRRGAQAPPTFRAQDYTWEDHGYSLIQRLYPEGGQLLDEKFQAAYSLTYNTIAMHSGVDTSVLRRAIWNYIHCVFGIRYDDYDYGEVNQLLERNLKVYIKTVACYPEKTTRRMYNLFWRHFRHSEKVHVNLLLLEARMQAALLYALRAITRYMT

SEQ ID NO: 1429 - protein, 1068 aa, Homo sapiens
MNSIKNVPARVLSRRPGHSLEAEREQFDKTQAISISKAINTQEAPVKEKHARRIILGTHHEKGAFTFWSYAIGLPLPSSSILSWKFCHVLHKVLRDGHPNVLHDCQRYRSNIREIGDLWGHLHDRYGQLVNVYTKLLLTKISFHLKHPQFPAGLEVTDEVLEKAAGTDVNNIFQLTVEMFDYMDCELKLSESVFRQLNTAIAVSQMSSGQCRLAPLIQVIQDCSHLYHYTVKLLFKLHSCLPADTLQGHRDRFHEQFHSLRNFFRRASDMLYFKRLIQIPRLPEGPPNFLRASALAEHIKPVVVIPEEAPEDEEPENLIEISTGPPAGEPVVVADLFDQTFGPPNGSVKDDRDLQIESLKREVEMLRSELEKIKLEAQRYIAQLKSQVNALEGELEEQRKQKQKALVDNEQLRHELAQLRAAQLEGERSQGLREEAERKASATEARYNKLKEKHSELVHVHAELLRKNADTAKQLTVTQQSQEEVARVKEQLAFQVEQVKRESELKLEEKSDQLEKLKRELEAKAGELARAQEALSHTEQSKSELSSRLDTLSAEKDALSGAVRQREADLLAAQSLVRETEAALSREQQRSSQEQGELQGRLAERESQEQGLRQRLLDEQFAVLRGAAAEAAGILQDAVSKLDDPLHLRCTSSPDYLVSRAQEALDAVSTLEEGHAQYLTSLADASALVAALTRFSHLAADTIINGGATSHLAPTDPADRLIDTCRECGARALELMGQLQDQQALRHMQASLVRTPLQGILQLGQELKPKSLDVRQEELGAVVDKEMAATSAAIEDAVRRIEDMMNQARHASSGVKLEVNERILNSCTDLMKAIRLLVTTSTSLQKEIVESGRGAATQQEFYAKNSRWTEGLISASKAVGWGATQLVEAADKVVLHTGKYEELIVCSHEIAASTAQLVAASKVKANKHSPHLSRLQECSRTVNERAANVVASTKSGQEQIEDRDTMDFSGLSLIKLKKQEMETQVRVLELEKTLEAERMRLGELRKQHYVLAGASGSPGEEVAIRPSTAPRSVTTKKPPLAQKPSVAPRQDHQLDKKDGIYPAQLVNY

SEQ ID NO: 1430 - protein, 311 aa, Homo sapiens [sequence omitted]

SEQ ID NO: 1431 - protein, 473 aa, Homo sapiens
MGQSGRSRHQKRARAQAQLRNLEAYAANPHSFVFTRGCTGRNIRQLSLDVRRVMEPLTASRLQVRKKNSLKDCVAVAGPLGVTHFLILSKTETNVYFKLMRLPGGPTLTFQVKKYSLVRDVVSSLRRHRMHEQQFAHPPLLVLNSFGPHGMHVKLMATMFQNLFPSINVHKVNLNTIKRCLLIDYNPDSQELDFRHYSIKVVPVGASRGMKKLLQEKFPNMSRLQDISELLATGAGLSESEAEPDGDHNITELPQAVAGRGNMRAQQSAVRLTEIGPRMTLQLIKVQEGVGEGKVMFHSFVSKTEEELQAILEAKEKKLRLKAQRQAQQAQNVQRKQEQREAHRKKSLEGMKKARVGGSDEEASGIPSRTASLELGEDDDEQEDDDIEYFCQAVGEAPSEDLFPEAKQKRLAKSPGRKRKRWEMDRGRGRLCDQKFPKTKDKSQGAQARRGPRGASRDGGRGRGRGRPGKRVA

SEQ ID NO: 1432 - protein, 320 aa, Homo sapiens
MPTGDFDSKPSWADQVEEEGEDDKCVTSELLKGIPLATGDTSPEPELLPGAPLPPPKEVINGNIKTVTEYKIDEDGKKFKIVRTFRIETRKASKAVARRKNWKKFGNSEFDPPGPNVATTTVSDDVSMTFITSKEDLNCQEEEDPMNKLKGQKIVSCRICKGDHWTTRCPYKDTLGPMQKELAEQLGLSTGEKEKLPGELEPVQATQNKTGKYVPPSLRDGASRRGESMQPNRRADDNATIRVTNLSEDTRETDLQELFRPFGSISRIYLAKDKTTGQSKGFAFISFHRREDAARAIAGVSGFGYDHLILNVEWAKPSTN

SEQ ID NO: 1433 - protein, 470 aa, Homo sapiens
MGKPWLRALQLLLLLGASWARAGAPRCTYTFVLPPQKFTGAVCWSGPASTRATPEAANASELAALRMRVGRHEELLRELQRLAAADGAVAGEVRALRKESRGLSARLGQLRAQLQHEAGPGAGPGADLGAEPAAALALLGERVLNASAEAQRAAARFHQLDVKFRELAQLVTQQSSLIARLERLCPGGAGGQQQVLPPPPLVPVVPVRLVGSTSDTSRMLDPAPEPQRDQTQRQQEPMASPMPAGHPAVPTKPVGPWQDCAEARQAGHEQSGVYELRVGRHVVSVWCEQQLEGGGWTVIQRRQDGSVNFFTTWQHYKAGFGRPDGEYWLGLEPVYQLTSRGDHELLVLLEDWGGRGARAHYDGFSLEPESDHYRLRLGQYHGDAGDSLSWHNDKPFSTVDRDRDSYSGNCALYQRGGWWYHACAHSNLNGVWHHGGHYRSRYQDGVYWAEFRGGAYSLRKAAMLIRPLKL

SEQ ID NO: 1434 - protein, 291 aa, Homo sapiens
MSQEGVELEKSVRRLREKFHGKVSSKKAGALMRKFGSDHTGVGRSIVYGVKQKDGQELSNDLDAQDPPEDMKQDRDIQAVATSLLPLTEANLRMFQRAQDDLIPAVDRQFACSSCDHVWWRRVPQRKEVSRCRKCRKRYEPVPADKMWGLAEFHCPKCRHNFRGWAQMGSPSPCYGCGFPVYPTRILPPRWDRDPDRRSTHTHSCSAADCYNRREPHVPGTSCAHPKSRKQNHLPKVLHPSNPHISSGSTVATCLSQGGLLEDLDNLILEDLKEEEEEEEEVEDEEGGPRE

SEQ ID NO: 1435 - protein, 554 aa, Homo sapiens
MAAADLSHGHYLSGDPVCLHEEKTPAGRIVADCLTDCYQDSVTFDDVAVDFTQEEWTLLDSTQRSLYSDVMLENYKNLATVGGQIIKPSLISWLEQEESRTVQGGVLQGWEMRLETQWSILQQDFLRGQTSIGIQLEGKHNGRELCDCEQCGEVFSEHSCLKTHVRTQSTGNTHDCNQYGKDFLTLCEKTSTGEKLSEFNQSEKIFSLTPNIVYQRTSTQEKSFECSHCGKSFINESYLQAHMRTHNGEKLYEWRNYGPGFIDSTSLSVLIETLNAKKPYKCKECGKGYRYPAYLSIHMRTHTGEKPYECKECGKAFNYSNSFQIHGRTHTGEKPYVCKECGKAFTQYSGLSMHVRSHSGDKPYECKECGKSFLTSSRLIQHIRTHTGEKPFVCVECGKAFAVSSNLSGHLRTHTEEKACECKICGKVFGYPSCLNNHMRTHSAQKPYTCKECGKAFNYSTHLKIHMRIHTGEKPYECKQCGKAFSHSSSFQIHERTHTGEKPYECKECGKAFTCSSSFRIHEKTHTEEKPYKCQQCGKAYSHPRSLRRHEQIH

SEQ ID NO: 1436 - protein, 635 aa, Homo sapiens
MAKKSAENGIYSVSGDEKKGPLIAPGPDGAPAKGDGPVGLGTPGGRLAVPPRETWTRQMDFIMSCVGFAVGLGNVWRFPYLCYKNGGGVFLIPYVLIALVGGIPIFFLEISLGQFMKAGSINVWNICPLFKGLGYASMVIVFYCNTYYIMVLAWGFYYLVKSFTTTLPWATCGHTWNTPDCVEIFRHEDCANASLANLTCDQLADRRSPVIEFWENKVLRLSGGLEVPGALNWEVTLCLLACWVLVYFCVWKGVKSTGKIVYFTATFPYVVLVVLLVRGVLLPGALDGIIYYLKPDWSKLGSPQVWIDAGTQIFFSYAIGLGALTALGSYNRFNNNCYKDAIILALINSGTSFFAGFVVFSILGFMAAEQGVHISKVAESGPGLAFIAYPRAVTLMPVAPLWAALFFFMLLLLGLDSQFVGVEGFITGLLDLLPASYYFRFQREISVALCCALCFVIDLSMVTDGGMYVFQLFDYYSASGTTLLWQAFWECVVVAWVYGADRFMDDIACMIGYRPCPWMKWCWSFFTPLVCMGIFIFNVVYYEPLVYNNTYVYPWWGEAMGWAFALSSMLCVPLHLLGCLLRAKGTMAERWQHLTQPIWGLHHLEYRAQDADVRGLTTLTPVSESSKVVVVESVM

SEQ ID NO: 1437 - protein, 463 aa, Homo sapiens
MAQGLVTFADVAIDFSQEEWACLNSAQRDLYWDVMLENYSNLVSLDLESAYENKSLPTEKNIHEIRASKRNSDRRSKSLGRNWICEGTLERPQRSRGRYVNQMIINYVKRPATREGTPPRTHQRHHKENSFECKDCGKAFSRGYQLSQHQKIHTGEKPYECKECKKAFRWGNQLTQHQKIHTGEKPYECKDCGKAFRWGSSLVIHKRIHTGEKPYECKDCGKAFRRGDELTQHQRFHTGEKDYECKDCGKTFSRVYKLIQHKRIHSGEKPYECKDCGKAFICGSSLIQHKRIHTGEKPYECQECGKAFTRVNYLTQHQKIHTGEKPHECKECGKAFRWGSSLVKHERIHTGEKPYKCTECGKAFNCGYHLTQHERIHTGETPYKCKECGKAFIYGSSLVKHERIHTGVKPYGCTECGKSFSHGHQLTQHQKTHSGAKSYECKECGKACNHLNHLREHQRIHNS

SEQ ID NO: 1438 - protein, 770 aa, Homo sapiens
MEKRAAAGLEGAPGARAQLAVVCLVNIFLTGRLSSAVPALAACSGKLEQHTERRGVIYSPAWPLNYPPGTNCSWYIQGDRGDMITISFRNFDVEESHQCSLDWLLLGPAAPPRQEAFRLCGSAIPPAFISARDHVWIFFHSDASSSGQAQGFRLSYIRGKLGQASCQADEFRCDNGKCLPGPWQCNTVDECGDGSDEGNCSAPASEPPGSLCPGGTFPCSGARSTRCLPVERRCDGLQDCGDGSDEAGCPDLACGRRLGSFYGSFASPDLFGAARGPSDLHCTWLVDTQDSRRVLLQLELRLGYDDYVQVYEGLGERGDRLLQTLSYRSNHRPVSLEAAQGRLTVAYHARARSAGHGFNATYQVKGYCLPWEQPCGSSSDSDGGSLGDQGCFSEPQRCDGWWHCASGRDEQGCPACPPDQYPCEGGSGLCYTPADRCNNQKSCPDGADEKNCFSCQPGTFHCGTNLCIFETWRCDGQEDCQDGSDEHGCLAAVPRKVITAALIGSLVCGLLLVIALGCAFKLYSLRTQEYRAFETQMTRLEAEFVRREAPPSYGQLIAQGLIPPVEDFPVYSASQASVLQNLRTAMRRQMRRHASRRGPSRRRLGRLWNRLFHRPRAPRGQIPLLTAARPSQTVLGDGFLQPAPGAAPDPPAPLMDTGSTRAAGDRPPSAPGRAPEVGPSGPPLPSGLRDPECRPVDKDRKVCREPLVDGPAPADAPREPCSAQDPHPQVSTASSTLGPHSPEPLGVCRNPPPPCSPMLEASDDEALLVC

SEQ ID NO: 1439 - protein, 166 aa, Homo sapiens
MSTVGLFHFPTPLTRICPAPWGLRLWEKLTLLSPGIAVTPVQMAGKKDYPALLSLDENELEEQFVKGHGPGGQATNKTSNCVVLKHIPSGIVVKCHQTRSVDQNRKLARKILQEKVDVFYNGENSPVHKEKREAAKKKQERKKRAKETLEKKKLLKELWESSKKVH

SEQ ID NO: 1440 - protein, 446 aa, Homo sapiens
MAARKGRRRTCETGEPMEAESGDTSSEGPAQVYLPGRGPPLREGEELVMDEEAYVLYHRAQTGAPCLSFDIVRDHLGDNRTELPLTLYLCAGTQAESAQSNRLMMLRMHNLHGTKPPPSEGSDEEEEEEDEEDEEERKPQLELAMVPHYGGINRVRVSWLGEEPVAGVWSEKGQVEVFALRRLLQVVEEPQALAAFLRDEQAQMKPIFSFAGHMGEGFALDWSPRVTGRLLTGDCQKNIHLWTPTDGGSWHVDQRPFVGHTRSVEDLQWSPTENTVFASCSADASIRIWDIRAAPSKACMLTTATAHDGDVNVISWSRREPFLLSGGDDGALKIWDLRQFKSGSPVATFKQHVAPVTSVEWHPQDSGVFAASGADHQITQWDLAVERDPEAGDVEADPGLADLPQQLLFVHQGETELKELHWHPQCPGLLVSTALSGFTIFRTISV

SEQ ID NO: 1441 - protein, 719 aa, Homo sapiens
MAALEEEFTLSSVVLSAGPEGLLGVEQSDKTDQFLVTDSGRTVILYKVSDQKPLGSWSVKQGQIITCPAVCNFQTGEYVVVHDNKVLRIWNNEDVNLDKVFKATLSAEVYRILSVQGTEPLVLFKEGAVRGLEALLADPQQKIETVISDEEVIKWTKFFVVFRHPVLIFITEKHGNYFAYVQMFNSRILTKYTLLLGQDENSVIKSFTASVDRKFISLMSLSSDGCIYETLIPIRPADPEKNQSLVKSLLLKAVVSGNARNGVALTALDQDHVAVLGSPLAASKECLSVWNIKFQTLQTSKELPQGTSGQLWYYGEHLFMLHGKSLTVIPYKCEVSSLAGALGKLKHSQDPGTHVVSHFVNWETPQGCGLGFQNSEQSRRILRRRKIEVSLQPEVPPSKQLLSTIMKDSEKHIEVEVRKFLALKQTPDFHTVIGDTVTGLLERCKAEPSFYPRNCLMQLIQTHVLSYSLCPDLMEIALKKKDVQLLQLCLQQFPDIPESVTCACLKIFLSIGDDSLQETDVNMESVFDYSINSVHDEKMEEQTEILQNGFNPEEDKCNNCDQELNKKPQDETKESTSCPVVQKRAALLNAILHSAYSETFLLPHLKDIPAQHITLFLKYLYFLYLKCSENATMTLPGIHPPTLNQIMDWICLLLDANFTVVVMMPEAKRLLINLYKLVKSQISVYSELNKIEVSFRELQKLNQEKNNRGLYSIEVLELF

SEQ ID NO: 1442 - protein, 1173 aa, Homo sapiens
MEELSADEIRRRRLARLAGGQTSQPTTPLTSPQRENPPGPPIAASAPGPSQSLGLNVHNMTPATSPIGASGVAHRSQSSEGVSSLSSSPSNSLETQSQSLSRSQSMDIDGVSCEKSMSQVDVDSGIENMEVDENDRREKRSLSDKEPSSGPEVSEEQALQLVCKIFRVSWKDRDRDVIFLSSLSAQFKQNPKEVFSDFKDLIGQILMEVLMMSTQTRDENPFASLTATSQPIAAAARSPDRNLLLNTGSNPGTSPMFCSVASFGASSLSSLGASGGASNWDSYSDHFTIETCKETDMLNYLIECFDRVGIEEKKAPKMCSQPAVSQLLSNIRSQCISHTALVLQGSLTQPRSLQQPSFLVPYMLCRNLPYGFIQELVRTTHQDEEVFKQIFIPILQGLALAAKECSLDSDYFKYPLMALGELCETKFGKTHPVCNLVASLRLWLPKSLSPGCGRELQRLSYLGAFFSFSVFAEDDVKVVEKYFSGPAITLENTRVVSQSLQHYLELGRQELFKILHSILLNGETREAALSYMAAVVNANMKKAQMQTDDRLVSTDGFMLNFLWVLQQLSTKIKLETVDPTYIFHPRCRITLPNDETRVNATMEDVNDWLTELYGDQPPFSEPKFPTECFFLTLHAHHLSILPSCRRYIRRLRAIRELNRTVEDLKNNESQWKDSPLATRHREMLKRCKTQLKKLVRCKACADAGLLDESFLRRCLNFYGLLIQLLLRILDPAYPDITLPLNSDVPKVFAALPEFYVEDVAEFLFFIVQYSPQALYEPCTQDIVMFLVVMLCNQNYIRNPYLVAKLVEVMFMTNPAVQPRTQKFFEMIENHPLSTKLLVPSLMKFYTDVEHTGATSEFYDKFTIRYHISTIFKSLWQNIAHHGTFMEEFNSGKQFVRYINMLINDTTFLLDESLESLKRIHEVQEEMKNKEQWDQLPRDQQQARQSQLAQDERVSRSYLALATETVDMFHILTKQVQKPFLRPELGPRLAAMLNFNLQQLCGPKCRDLKVENPEKYGFEPKKLLDQLTDIYLQLDCARFAKAIADDQRSYSKELFEEVISKMRKAGIKSTIAIEKFKLLAEKVEEIVAKNARAEIDYSDAPDEFRDPLMDTLMTDPVRLPSGTIMDRSIILRHLLNSPTDPFNRQTLTESMLEPVPELKEQIQAWMREKQNSDH

SEQ ID NO: 1443 - protein, 2253 aa, Homo sapiens
MRPGPALLLLGVGLSLSVGRLPLPPVPRGAQAAVSGAPGGLLRGAPGLGVRGGRALLSLRPSAVRAGGAVLSGRGSLCFPHGGTGRRWYCLDLRVLLSAQRLPWPAAPALALVDLQLSARGGRLSLTWSVRLPRSPGRLAWAFRLRLLGPGAARPASPAARVSPRSAAPGPRPQQGFVARTECPTDGPARVMLQAVNSSSHRAVESSVSCQINACVIQRVRINTDQKGAPVRLSMQAEATINASVQLDCPAARAIAQYWQVFSVPAVGQAPDWTQPLDLPQLEIRNSPLFIHIPNNSLQWGVYVFNFTVSITTGNPKMPEVKDSDAVYVWIVRSSLQAVMLGDANITANFTEQLILDGSTSSDPDADSPLQGLQFFWYCTTDPRNYGGDRIILGSKEVCHPEQANLKWPWASGPVLTLLPETLKGDHVYFFRMVIRKDSRTAFSDKRVHVLQGPKAIAHITCIENCERNFIVSDRFSLFLNCTNCASRDFYKWSILSSSGGEMLFDWMGETVTGRNGAYLSIKAFAFRHFLEAEFSISLYLACWSGVTSVFRHSFIINHGPQIGECKINPAKGIALITKFVVQCSNFRDKHVPLTYKIIVSDLHSVGEISSVKENTLGTILYLGPQSTVPPSFLPVGMLASQYGLKIYAQVYDSLGAFSQVTLHATAQAPTDKNSSKTVLNQLLSFTVGPSSLLSTLIQKKDFLPAGYLLYIVASVLNNMKTELPLRDDRVNLRKHLIDQSFLLPVSTLVEIGQVVMTITKLTQKPSEFTWDAQKRATMRVWQANQALQEYQQKDKRFRSEQIEIVSTGILMSLSNILKMTSPHQVVKDPFYVIESLSDTILANKVPGNKTTSMRTPNFNMYVKKVEKWGINQLFRNEKHCRNCFYPTLNVSSVPGLSANGPISTMFCDFTNDLFPWLNDQENTSVEVSGFRMTGVADNGSVLEITPDVAEVYLVRKNLTFAAFNLTVGPNSEVDGSLKKTTGGFSFQVDSTVLREVLVHIVTEVMVLFTVLVYTGSQITPTALVATFLVPHDIPPFASQSALFDPACTVKKARVVCLPVSLLQLIAQHSHSPHCTVSIVLQAPRFVMKLNDKLVRISIFSVQCLDMYGIQSEWREGYCILGEKTSWYEVHCICKNVVRARRQLGTIGLTGIHLHTHYVMAKVIVIPNPVDLRLNIIKSLHQNPVTLFTVLFIILLYVGLAFWALYRDEMDQHLRGHVIVLPDNDPYDNLCYLVTIFTGSRWGSGTRANVFVQLRGTVSTSDVHCLSHPHFTTLYRGSINTFLLTTKSDLGDIHSIRVWHNNEGRSPSWYLSRIKVENLFSRHIWLFICQKWLSVDTTLDRTFHVTHPDERLTRKDFFFIDVSSNLRKNHMWFSIFASVVAKTFNRLQRLSCCLAMLLSSLLCNIMFFNLNRQEQTESRERKYMRSMMIGIESVLITIPVQLLITFLFTCSQRKPQADLKEVSPQKHPLMSEASEHWEEYLRKWHAYETAKVHPREVAKPASKGKPRLPKASPKATSKPKHRHRKAQIKTPETLGPNTNSNNNIEDDQDVHSEQHPSQKDLQQLKKKPRIVLPWWCVYVAWFLVFATSSISSFFIVFYGLTYGYDKSIEWLFASFCSFCQSVLLVQPSKIILLSGFRTNKPKYCKNLSWSTKYKYTEIRLDGMRMHPEEMQRIHDQIVRIRGTRMYQPLTEDEIRIFKRKKRIKRRALLFLSYILTHFIFLALLLILIVLLRHTDCFYYNQFIRDRFSMDLATVTKLEDIYRWLNSVLLPLLHNDLNPTFLPESSSKILGLPLMRQVRAKSSEKMCLPAEKFVQNSIRREIHCHPKYGIDPEDTKNYSGFWNEVDKQAIDESTNGFTYKPQGTQWLYYSYGLLHTYGSGGYALYFFPEQQRFNSTLRLKELQESNWLDEKTWAVVLELTTFNPDINLFCSISVIFEVSQLGVVNTSISLHSFSLADFDRKASAEIYLYVAILIFFLAYVVDEGCIIMQERASYVRSVYNLLNFALKCIFTVLIVLFLRKHFLATGIIRFYLSNPEDFIPFHAVSQVDHIMRIILGFLLFLTILKTLRYSRFFYDVRLAQRAIQAALPGICHMAFVVSVYFFVYMAFGYLVFGQHEWNYSNLIHSTQTVFSYCVSAFQNTEFSNNRILGVLFLSSFMLVMICVLINLFQAVILSAYEEMKQPVYEEPSDEVEAMTYLCRKLRTMFSFLTSQSKAKDEPEFFIDMLYGQPEKNSHRYLGLKTRNINGKKMVYLVV

SEQ ID NO: 1444 - protein, 337 aa, Homo sapiens
MTAGGQAEAEGAGGEPGAARLPSRVARLLSALFYGTCSFLIVLVNKALLTTYGFPSPIFLGIGQMAATIMILYVSKLNKIIHFPDFDKKIPVKLFPLPLLYVGNHISGLSSTSKLSLPMFTVLRKFTIPLTLLLETIILGKQYSLNIILSVFAIILGAFIAAGSDLAFNLEGYIFVFLNDIFTAANGVYTKQKMDPKELGKYGVLFYNACFMIIPTLIISVSTGDLQQATEFNQWKNVVFILQFLLSCFLGFLLMYSTVLCSYYNSALTTAVVGAIKNVSVAYIGILIGGDYIFSLLNFVGLNICMAGGLRYSFLTLSSQLKPKPVGEENICLDLKS

SEQ ID NO: 1445 - protein, 492 aa, Homo sapiens
MAVLLETTLGDVVIDLYTEERPRACLNFLKLCKIKYYNYCLIHNVQRDFIIQTGDPTGTGRGGESIFGQLYGDQASFFEAEKVPRIKHKKKGTVSMVNNGSDQHGSQFLITTGENLDYLDGVHTVFGEVTEGMDIIKKINETFVDKDFVPYQDIRINHTVILDDPFDDPPDLLIPDRSPEPTREQLDSGRIGADEEIDDFKGRSAEEVEEIKAEKEAKTQAILLEMVGDLPDADIKPPENVLFVCKLNPVTTDEDLEIIFSRFGPIRSCEVIRDWKTGESLCYAFIEFEKEEDCEKAFFKMDNVLIDDRRIHVDFSQSVAKVKWKGKGGKYTKSDFKEYEKEQDKPPNLVLKDKVKPKQDTKYDLILDEQAEDSKSSHSHTSKKHKKKTHHCSEEKEDEDYMPIKNTNQDIYREMGFGHYEEEESCWEKQKSEKRDRTQNRSRSRSRERDGHYSNSHKSKYQTDLYERERSKKRDRSRSPKKSKDKEKSKYR

SEQ ID NO: 1446 - protein, 1782 aa, Homo sapiens
MGAGSSTEQRSPEQPPEGSSTPAEPEPSGGGPSAEAAPDTTADPAIAASDPATKLLQKNGQLSTINGVAEQDELSLQEGDLNGQKGALNGQGALNSQEEEEVIVTEVGQRDSEDVSKRDSDKEMATKSAVVHDITDDGQEETPEIIEQIPSSESNLEELTQPTESQANDIGFKKVFKFVGFKFTVKKDKTEKPDTVQLLTVKKDEGEGAAGAGDHKDPSLGAGEAASKESEPKQSTEKPEETLKREQSHAEISPPAESGQAVEECKEEGEEKQEKEPSKSAESPTSPVTSETGSTFKKFFTQGWAGWRKKTSFRKPKEDEVEASEKKKEQEPEKVDTEEDGKAEVASEKLTASEQAHPQEPAESAHEPRLSAEYEKVELPSEEQVSGSQGPSEEKPAPLATEVFDEKIEVHQEEVVAEVHVSTVEERTEEQKTEVEETAGSVPAEELVEMDAEPQEAEPAKELVKLKETCVSGEDPTQGADLSPDEKVLSKPPEGVVSEVEMLSSQERMKVQGSPLKKLFTSTGLKKLSGKKQKGKRGGGDEESGEHTQVPADSPDSQEEQKGESSASSPEEPEEITCLEKGLAEVQQDGEAEEGATSDGEKKREGVTPWASFKKMVTPKKRVRRPSESDKEDELDKVKSATLSSTESTASEMQEEMKGSVEEPKPEEPKRKVDTSVSWEALICVGSSKKRARRGSSSDEEGGPKAMGGDHQKADEAGKDKETGTDGILAGSQEHDPGQGSSSPEQAGSPTEGEGVSTWESFKRLVTPRKKSKSKLEEKSEDSIAGSGVEHSTPDTEPGKEESWVSIKKFIPGRRKKRPDGKQEQAPVEDAGPTGANEDDSDVPAVVPLSEYDAVEREKMEAQQAQKSAEQPEQKAATEVSKELSESQVHMMAAAVADGTRAATIIEERSPSWISASVTEPLEQVEAEAALLTEEVLEREVIAEEEPPTVTEPLPENREARGDTVVSEAELTPEAVTAAETAGPLGAEEGTEASAAEETTEMVSAVSQLTDSPDTTEEATPVQEVEGGVPDIEEQERRTQEVLQAVAEKVKEESQLPGTGGPEDVLQPVQRAEAERPEEQAEASGLKKETDVVLKVDAQEAKTEPFTQGKVVGQTTPESFEKAPQVTESIESSELVTTCQAETLAGVKSQEMVMEQAIPPDSVETPTDSETDGSTPVADFDAPGTTQKDEIVEIHEENEVASGTQSGGTEAEAVPAQKERPPAPSSFVFQEETKEQSKMEDTLEHTDKEVSVETVSILSKTEGTQEADQYADEKTKDVPFFEGLEGSIDTGITVSREKVTEVALKGEGTEEAECKKDDALELQSHAKSPPSPVEREMVVQVEREKTEAEPTHVNEEKLEHETAVTVSEEVSKQLLQTVNVPIIDGAKEVSSLEGSPPPCLGQEEAVCTKIQVQSSEASFTLTAAAEEEKVLGETANILETGETLEPAGAHLVLEEKSSEKNEDFAAHPGEDAVPTGPDCQAKSTPVIVSATTKKGLSSDLEGEKTTSLKWKSDEVDEQVACQEVKVSVAIEDLEPENGILELETKSSKLVQNIIQTAVDQFVRTEETATEMLTSELQTQAHVIKADSQDAGQETEKEGEEPQASAQDETPITSAKEESESTAVGQAHSDISKDMSEASEKTMTVEVEGSTVNDQQLEEVVLPSEEEGGGAGTKSVPEDDGHALLAERIEKSLVEPKEDEKGDDVDDPENQNSALADTDASGGLTKESPDTNGPKQKEKEDAQEVELQEGKVHSESDKAITPQAQEELQKQERESAKSELTES

SEQ ID NO: 1447 - protein, 1130 aa, Homo sapiens
MKRSEKPEGYRQMRPKTFPASNYTVSSRQMLQEIRESLRNLSKPSDAAKAEHNMSKMSTEDPRQVRNPPKFGTHHKALQEIRNSLLPFANETNSSRSTSEVNPQMLQDLQAAGFDEDMVIQALQKTNNRSIEAAIEFISKMSYQDPRREQMAAAAARPINASMKPGNVQQSVNRKQSWKGSKESLVPQRHGPPLGESVAYHSESPNSQTDVGRPLSGSGISAFVQAHPSNGQRVNPPPPPQVRSVTPPPPPRGQTPPPRGTTPPPPSWEPNSQTKRYSGNMEYVISRISPVPPGAWQEGYPPPPLNTSPMNPPNQGQRGISSVPVGRQPIIMQSSSKFNFPSGRPGMQNGTGQTDFMIHQNVVPAGTVNRQPPPPYPLTAANGQSPSALQTGGSAAPSSYTNGSIPQSMMVPNRNSHNMELYNISVPGLQTNWPQSSSAPAQSSPSSGHEIPTWQPNIPVRSNSFNNPLGNRASHSANSQPSATTVTAITPAPIQQPVKSMRVLKPELQTALAPTHPSWIPQPIQTVQPSPFPEGTASNVTVMPPVAEAPNYQGPPPPYPKHLLHQNPSVPPYESISKPSKEDQPSLPKEDESEKSYENVDSGDKEKKQITTSPITVRKNKKDEERRESRIQSYSPQAFKFFMEQHVENVLKSHQQRLHRKKQLENEMMRVGLSQDAQDQMRKMLCQKESNYIRLKRAKMDKSMFVKIKTLGIGAFGEVCLARKVDTKALYATKTLRKKDVLLRNQVAHVKAERDILAEADNEWVVRLYYSFQDKDNLYFVMDYIPGGDMMSLLIRMGIFPESLARFYIAELTCAVESVHKMGFIHRDIKPDNILIDRDGHIKLTDFGLCTGFRWTHDSKYYQSGDHPRQDSMDFSNEWGDPSSCRCGDRLKPLERRAARQHQRCLAHSLVGTPNYIAPEVLLRTGYTQLCDWWSVGVILFEMLVGQPPFLAQTPLETQMKVINWQTSLHIPPQAKLSPEASDLIIKLCRGPEDRLGKNGADEIKAHPFFKTIDFSSDLRQQSASYIPKITHPTDTSNFDPVDPDKLWSDDNEEENVNDTLNGWYKNGKHPEHAFYEFTFRRFFDDNGYPYNYPKPIEYEYINSQGSEQQSDEDDQNTGSEIKNRDLVYV

SEQ ID NO: 1448 - protein, 249 aa, Homo sapiens
MLQLWKLVLLCGVLTGTSESLLDNLGNDLSNVVDKLEPVLHEGLETVDNTLKGILEKLKVDLGVLQKSSAWQLAKQKAQEAEKLLNNVISKLLPTNTDIFGLKISNSLILDVKAEPIDDGKGLNLSFPVTANVTVAGPIIGQIINLKASLDLLTAVTIETDPQTHQPVAVLGECASDPTSISLSLLDKHSQIINKFVNSVINTLKSTVSSLLQKEICPLIRIFIHSLDVNVIQQVVDNPQHKTQLQTLI

SEQ ID NO: 1449 - protein, 530 aa, Homo sapiens
MADDIDIEAMLEAPYKKDENKLSSANGHEERSKKRKKSKSRSRSHERKRSKSKERKRSRDRERKKSKSRERKRSRSKERRRSRSRSRDRRFRGRYRSPYSGPKFNSAIRGKIGLPHSIKLSRRRSRSKSPFRKDKSPVREPIDNLTPEERDARTVFCMQLAARIRPRDLEEFFSTVGKVRDVRMISDRNSRRSKGIAYVEFVDVSSVPLAIGLTGQRVLGVPIIVQASQAEKNRAAAMANNLQKGSAGPMRLYVGSLHFNITEDMLRGIFEPFGRIESIQLMMDSETGRSKGYGFITFSDSECAKKALEQLNGFELAGRPMKVGHVTERTDASSASSFLDSDELERTGIDLGTTGRLQLMARLAEGTGLQIPPAAQQALQMSGSLAFGAVAEFSFVIDLQTRLSQQTEASALAAAASVQPLATQCFQLSNMFNPQTEEEVGWDTEIKDDVIEECNKHGGVIHIYVDKNSAQGNVYVKCPSIAAAIAAVNALHGRWFAGKMITAAYVPLPTYHNLFPDSMTATQLLVPSRR

SEQ ID NO: 1450 - protein, 123 aa, Homo sapiens
MKLLLLALPMLVLLPQVIPAYSGEKKCWNRSGHCRKQCKDGEAVKDTCKNLRACCIPSNEDHRRVPATSPTPLSDSTPGIIDDILTVRFTTDYFEVSSKKDMVEESEAGRGTETSLPNVHHSS

SEQ ID NO: 1451 - protein, 516 aa, Homo sapiens
MTLLITGDSIVSAEAVWDHVTMANRELAFKAGDVIKVLDASNKDWWWGQIDDEEGWFPASFVRLWVNQEDEVEEGPSDVQNGHLDPNSDCLCLGRPLQNRDQMRANVINEIMSTERHYIKHLKDICEGYLKQCRKRRDMFSDEQLKVIFGNIEDIYRFQMGFVRDLEKQYNNDDPHLSEIGPCFLEHQDGFWIYSEYCNNHLDACMELSKLMKDSRYQHFFEACRLLQQMIDIAIDGFLLTPVQKICKYPLQLAELLKYTAQDHSDYRYVAAALAVMRNVTQQINERKRRLENIDKIAQWQASVLDWEGEDILDRSSELIYTGEMAWIYQPYGRNQQRVFFLFDHQMVLCKKDLIRRDILYYKGRIDMDKYEVVDIEDGRDDDFNVSMKNAFKLHNKETEEIHLFFAKKLEEKIRWLRAFREERKMVQEDEKIGFEISENQKRQAAMTVRKVPKQKGVNSARSVPPSYPPPQDPLNHGQYLVPDGIAQSQVFEFTEPKRSQSPFWQNFSRLTPFKK

SEQ ID NO: 1452 - protein, 258 aa, Homo sapiens
MLLVLVVLIPVLVSSGGPEGHYEMLGTCRMVCDPYPARGPGAGARTDGGDALSEQSGAPPPSTLVQGPQGKPGRTGKPGPPGPPGDPGPPGPVGPPGEKGEPGKPGPPGLPGAGGSGAISTATYTTVPRVAFYAGLKNPHEGYEVLKFDDVVTNLGNNYDAASGKFTCNIPGTYFFTYHVLMRGGDGTSMWADLCKNGQVRASAIAQDADQNYDYASNSVILHLDAGDEVFIKLDGGKAHGGNSNKYSTFSGFIIYSD

SEQ ID NO: 1453 - protein, 226 aa, Homo sapiens
MALSDADVQKQIKHMMAFIEQEANEKAEEIDAKAEEEFNIEKGRLVQTQRLKIMEYYEKKEKQIEQQKKIQMSNLMNQARLKVLRARDDLITDLLNEAKQRLSKVVKDTTRYQVLLDGLVLQGLYQLLEPRMIVRCRKQDFPLVKAAVQKAIPMYKIATKNDVDVQIDQESYLPEDIAGGVEIYNGDRKIKVSNTLESRLDLIAQQMMPEVRGALFGANANRKFLD

SEQ ID NO: 1454 - protein, 149 aa, Homo sapiens
MNLWLLACLVAGFLGAWAPAVHTQGVFEDCCLAYHYPIGWAVLRRAWTYRIQEVSGSCNLPAAIFYLPKRHRKVCGNPKSREVQRAMKLLDARNKVFAKLHHNTQTFQGPHAVKKLSSGNSKLSSSKFSNPISSSKRNVSLLISANSGL

SEQ ID NO: 1455 - protein, 169 aa, Homo sapiens
MLATRVFSLVGKRAISTSVCVRAHESVVKSEDFSLPAYMDRRDHPLPEVAHVKHLSASQKALKEKEKASWSSLSMDEKVELYRIKFKESFAEMNRGSNEWKTVVGGAMFFIGFTALVIMWQKHYVYGPLPQSFDKEWVAKQTKRMLDMKVNPIQGLASKWDYEKNEWKK

SEQ ID NO: 1456 - protein, 210 aa, Homo sapiens
MPGVKLTTQAYCKMVLHGAKYPHCAVNGLLVAEKQKPRKEHLPLGGPGAHHTLFVDCIPLFHGTLALAPMLEVALTLIDSWCKDHSYVIAGYYQANERVKDASPNQVAEKVASRIAEGFSDTALIMVDNTKFTMDCVAPTIHVYEHHENRWRCRDPHHDYCEDWPEAQRISASLLDSRSYETLVDFDNHLDDIRNDWTNPEINKAVLHLC

SEQ ID NO: 1457 - protein, 185 aa, Homo sapiens
MDAAEVEFLAEKELVTIIPNFSLDKIYLIGGDLGPFNPGLPVEVPLWLAINLKQRQKCRLLPPEWMDVEKLEKMRDHERKEETFTPMPSPYYMELTKLLLNHASDNIPKADEIRTLVKDMWDTRIAKLRVSADSFVRQQEAHAKLDNLTLMEINTSGTFLTQALNHMYKLRTNLQPLESTQSQDF

SEQ ID NO: 1458 - protein, 615 aa, Homo sapiens
MRALLLLGFLLVSLESTLSIPPWEAPKEHKYKAEEHTVVLTVTGEPCHFPFQYHRQLYHKCTHKGRPGPQPWCATTPNFDQDQRWGYCLEPKKVKDHCSKHSPCQKGGTCVNMPSGPHCLCPQHLTGNHCQKEKCFEPQLLRFFHKNEIWYRTEQAAVARCQCKGPDAHCQRLASQACRTNPCLHGGRCLEVEGHRLCHCPVGYTGAFCDVDTKASCYDGRGLSYRGLARTTLSGAPCQPWASEATYRNVTAEQARNWGLGGHAFCRNPDNDIRPWCFVLNRDRLSWEYCDLAQCQTPTQAAPPTPVSPRLHVPLMPAQPAPPKPQPTTRTPPQSQTPGALPAKREQPPSLTRNGPLSCGQRLRKSLSSMTRVVGGLVALRGAHPYIAALYWGHSFCAGSLIAPCWVLTAAHCLQDRPAPEDLTVVLGQERRNHSCEPCQTLAVRSYRLHEAFSPVSYQHDLALLRLQEDADGSCALLSPYVQPVCLPSGAARPSETTLCQVAGWGHQFEGAEEYASFLQEAQVPFLSLERCSAPDVHGSSILPGMLCAGFLEGGTDACQGDSGGPLVCEDQAAERRLTLQGIISWGSGCGDRNKPGVYTDVAYYLAWIREHTVS

SEQ ID NO: 1459 - protein, 624 aa, Homo sapiens
MENSDSNDKGSGDQSAAQRRSQMDRLDREEAFYQFVNNLSEEDYRLMRDNNLLGTPGESTEEELLRRLQQIKEGPPPQNSDENRGGDSSDDVSNGDSIIDWLNSVRQTGNTTRSGQRGNQSWRAVSRTNPNSGDFRFSLEINVNRNNGSQNSENENEPSARRSSGENVENNSQRQVENPRSESTSARPSRSERNSTEALTEVPPTRGQRRARSRSPDHRRTRARAERSRSPLHPMSEIPRRSHHSISSQTFEHPLVNETEGSSRTRHHVTLRQQISGPELLSRGLFAASGTRNASQGAGSSDTAASGESTGSGQRPPTIVLDLQVRRVRPGEYRQRDSIASRTRSRSQTPNNTVTYESERGGFRRTFSRSERAGVRTYVSTIRIPIRRILNTGLSETTSVAIQTMLRQIMTGFGELSYFMYSDSDSEPTGSVSNRNMERAESRSGRGGSGGGSSSGSSSSSSSSSSSSSSSSSSSSPSSSSGGESSETSSDLFEGSNEGSSSSGSSGARREGRHRAPVTFDESGSLPFLSLAQFFLLNEDDDDQPRGLTKEQIDNLAMRSFGENDALKTCSVCITEYTEGNKLRKLPCSHEYHVHCIDRWLSENSTCPICRRAVLASGNRESVV

SEQ ID NO: 1460 - protein, 753 aa, Homo sapiens
MALLAMHSWRWAAAAAAFEKRRHSAILIRPLVSVSGSGPQWRPHQLGALGTARAYQQIPESLKSITWQRLGKGNSGQFLDAAKALQVWPLIEKRTCWHGHAGGGLHTDPKEGLKDVDTRKIIKAMLSYVWPKDRPDLRARVAISLGFLGGAKAMNIVVPFMFKYAVDSLNQMSGNMLNLSDAPNTVATMATAVLIGYGVSRAGAAFFNEVRNAVFGKVAQNSIRRIAKNVFLHLHNLDLGFHLSRQTGALSKAIDRGTRGISFVLSALVFNLLPIMFEVMLVSGVLYYKCGAQFALVTLGTLGTYTAFTVAVTRWRTRFRIEMNKADNDAGNAAIDSLLNYETVKYFNNERYEAQRYDGFLKTYETASLKSTSTLAMLNFGQSAIFSVGLTAIMVLASQGIVAGTLTVGDLVMVNGLLFQLSLPLNFLGTVYRETRQALIDMNTLFTLLKVDTQIKDKVMASPLQITPQTATVAFDNVHFEYIEGQKVLSGISFEVPAGKKVAIVGGSGSGKSTIVRLLFRFYEPQKGSIYLAGQNIQDVSLESLRRAVGVVPQDAVLFHNTIYYNLLYGNISASPEEVYAVAKLAGLHDAILRMPHGYDTQVGERGLKLSGGEKQRVAIARAILKDPPVILYDEATSSLDSITEETILGAMKDVVKHRTSIFIAHRLSTVVDADEIIVLDQGKVAERGTHHGLLANPHSIYSEMWHTQSSRVQNHDNPKWEAKKENISKEEERKKLQEEIVNSVKGCGNCSC

SEQ ID NO: 1461 - protein, 652 aa, Homo sapiens
MQGPLLLPGLCFLLSLFGAVTQKTKTSCAKCPPNASCVNNTHCTCNHGYTSGSGQKLFTFPLETCNDINECTPPYSVYCGFNAVCYNVEGSFYCQCVPGYRLHSGNEQFSNSNENTCQDTTSSKTTEGRKELQKIVDKFESLLTNQTLWRTEGRQEISSTATTILRDVESKVLETALKDPEQKVLKIQNDSVAIETQAITDNCSEERKTFNLNVQMNSMDIRCSDIIQGDTQGPSAIAFISYSSLGNIINATFFEEMDKKDQVYLNSQVVSAAIGPKRNVSLSKSVTLTFQHVKMTPSTKKVFCVYWKSTGQGSQWSRDGCFLIHVNKSHTMCNCSHLSSFAVLMALTSQEEDPVLTVITYVGLSVSLLCLLLAALTFLLCKAIRNTSTSLHLQLSLCLFLAHLLFLVGIDRTEPKVLCSIIAGALHYLYLAAFTWMLLEGVHLFLTARNLTVVNYSSINRLMKWIMFPVGYGVPAVTVAISAASWPHLYGTADRCWLHLDQGFMWSFLGPVCAIFSANLVLFILVFWILKRKLSSLNSEVSTIQNTRMLAFKATAQLFILGCTWCLGLLQVGPAAQVMAYLFTIINSLQGFFIFLVYCLLSQQVQKQYQKWFREIVKSKSESETYTLSSKMGPDSKPSEGDVFPGQVKRKY

SEQ ID NO: 1462 - protein, 173 aa, Homo sapiens
MPMKGRFPIRRTLQYLSQGNVVFKDSVKVMTVNYNTHGELGEGARKFVFFNIPQIQYKNPWVQIMMFKNMTPSPFLRFYLDSGEQVLVDVETKSNKEIMEHIRKILGKNEETLREEEEEKKQLSHPANFGPRKYCLRECICEVEGQVPCPSLVPLPKEMRGKYKAALKADAQD

SEQ ID NO: 1463 - protein, 795 aa, Homo sapiens
MYHSLSETRHPLQPEEQEVGIDPLSSYSNKSGGDSNKNGRRTSSTLDSEGTFNSYRKEWEELFVNNNYLATIRQKGINGQLRSSRFRSICWKLFLCVLPQDKSQWISRIEELRAWYSNIKEIHITNPRKVVGQQDLMINNPLSQDEGSLWNKFFQDKELRSMIEQDVKRTFPEMQFFQQENVRKILTDVLFCYARENEQLLYKQGMHELLAPIVFVLHCDHQAFLHASESAQPSEEMKTVLNPEYLEHDAYAVFSQLMETAEPWFSTFEHDGQKGKETLMTPIPFARPQDLGPTIAIVTKVNQIQDHLLKKHDIELYMHLNRLEIAPQIYGLRWVRLLFGREFPLQDLLVVWDALFADGLSLGLVDYIFVAMLLYIRDALISSNYQTCLGLLMHYPFIGDVHSLILKALFLRDPKRNPRPVTYQFHPNLDYYKARGADLMNKSRTNAKGAPLNINKVSNSLINFGRKLISPAMAPGSAGGPVPGGNSSSSSSVVIPTRTSAEAPSHHLQQQQQQQRLMKSESMPVQLNKGLSSKNISSSPSVESLPGGREFTGSPPSSATKKDSFFSNISRSRSHSKTMGRKESEEELEAQISFLQGQLNDLDAMCKYCAKVMDTHLVNIQDVILQENLEKEDQILVSLAGLKQIKDILKGSLRFNQSQLEAEENEQITIADNHYCSSGQGQGRGQGQSVQMSGAIKQASSETPGCTDRGNSDDFILISKDDDGSSARGSFSGQAQPLRTLRSTSGKSQAPVCSPLVFSDPLMGPASASSSNPSSSPDDDSSKDSGFTIVSPLDI

SEQ ID NO: 1464 - protein, 784 aa, Homo sapiens
MASLDDPGEVREGFLCPLCLKDLQSFYQLHSHYEEEHSGEDRDVKGQIKSLVQKAKKAKDRLLKREGDDRAESGTQGYESFSYGGVDPYMWEPQELGAVRSHLSDFKKHRAARIDHYVVEVNKLIIRLEKLTAFDRTNTESAKIRAIEKSVVPWVNDQDVPFCPDCGNKFSIRNRRHHCRLCGSIMCKKCMELISLPLANKLTSASKESLSTHTSPSQSPNSVHGSRRGSISSMSSVSSVLDEKDDDRIRCCTHCKDTLLKREQQIDEKEHTPDIVKLYEKLRLCMEKVDQKAPEYIRMAASLNAGETTYSLEHASDLRVEVQKVYELIDALSKKILTLGLNQDPPPHPSNLRLQRMIRYSATLFVQEKLLGLMSLPTKEQFEELKKKRKEEMERKRAVERQAALESQRRLEERQSGLASRAANGEVASLRRGPAPLRKAEGWLPLSGGQGQSEDSDPLLQQIHNITSFIRQAKAAGRMDEVRTLQENLRQLQDEYDQQQTEKAIELSRRQAEEEDLQREQLQMLRERELEREREQFRVASLHTRTRSLDFREIGPFQLEPSREPRTHLAYALDLGSSPVPSSTAPKTPSLSSTQPTRVWSGPPAVGQERLPQSSMPQQHEGPSLNPFDEEDLSSPMEEATTGPPAAGVSLDPSARILKEYNPFEEEDEEEEAVAGNPFIQPDSPAPNPFSEEDEHPQQRLSSPLVPGNPFEEPTCINPFEMDSDSGPEAEEPIEEELLLQQIDNIKAYIFDAKQCGRLDEVEVLTENLRELKHTLAKQKGGTD

SEQ ID NO: 1465 - protein, 420 aa, Homo sapiens
MSPPPLLQPLLLLLPLLNVEPSGATLIRIPLHRVQPGRRILNLLRGWREPAELPKLGAPSPGDKPIFVPLSNYRDVQYFGEIGLGTPPQNFTVAFDTGSSNLWVPSRRCHFFSVPCWLHHRFDPKASSSFQANGTKFAIQYGTGRVDGILSEDKLTIGGIKGASVIFGEALWEPSLVFAFAHFDGILGLGFPILSVEGVRPPMDVLVEQGLLDKPVFSFYLNRDPEEPDGGELVLGGSDPAHYIPPLTFVPVTVPAYWQIHMERVKVGPGLTLCAKGCAAILDTGTSLITGPTEEIRALHAAIGGIPLLAGEYIILCSEIPKLPAVSFLLGGVWFNLTAHDYVIQTTRNGVRLCLSGFQALDVPPPAGPFWILGDVFLGTYVAVFDRGDMKSSARVGLARARTRGADLGWGETAQAQFPG

SEQ ID NO: 1466 - protein, 460 aa, Homo sapiens
MSSPTTSSLDTPLPGNGPPQPGAPSSSPTVKEEGPEPWPGGPDPDVPGTDEASSACSTDWVIPDPEEEPERKRKKGPAPKMLGHELCRVCGDKASGFHYNVLSCEGCKGFFRRSVVRGGARRYACRGGGTCQMDAFMRRKCQQCRLRKCKEAGMREQCVLSEEQIRKKKIRKQQQESQSQSQSPVGPQGSSSSASGPGASPGGSEAGSQGSGEGEGVQLTAAQELMIQQLVAAQLQCNKRSFSDQPKVTPWPLGADPQSRDARQQRFAHFTELAIISVQEIVDFAKQVPGFLQLGREDQIALLKASTIEIMLLETARRYNHETECITFLKDFTYSKDDFHRAGLQVEFINPIFEFSRAMRRLGLDDAEYALLIAINIFSADRPNVQEPGRVEALQQPYVEALLSYTRIKRPQDQLRFPRMLMKLVSLRTLSSVHSEQVFALRLQDKKLPPLLSEIWDVHE

SEQ ID NO: 1467 - protein, 330 aa, Homo sapiens
MPHSVTLRGPSPWGFRLVGGRDFSAPLTISRVHAGSKAALAALCPGDLIQAINGESTELMTHLEAQNRIKGCHDHLTLSVSRPEGRSWPSAPDDSKAQAHRIHIDPEIQDGSPTTSRRPSGTGTGPEDGRPSLGSPYGQPPRFPVPHNGSSEATLPAQMSTLHVSPPPSADPARGLPRSRDCRVDLGSEVYRMLREPAEPVAAEPKQSGSFRYLQGMLEAGEGGDWPGPGGPRNLKPTASKLGAPLSGLQGLPECTRCGHGIVGTIVKARDKLYHPECFMCSDCGLNLKQRGYFFLDERLYCESHAKARVKPPEGYDVVAVYPNAKVELV

SEQ ID NO: 1468 - protein, 682 aa, Homo sapiens
MCGIFAYMNYRVPRTRKEIFETLIKGLQRLEYRGYDSAGVAIDGNNHEVKERHIQLVKKRGKVKALDEELYKQDSMDLKVEFETHFGIAHTRWATHGVPSAVNSHPQRSDKGNEFVVIHNGIITNYKDLRKFLESKGYEFESETDTETIAKLIKYVFDNRETEDITFSTLVERVIQQLEGAFALVFKSVHYPGEAVATRRGSPLLIGVRSKYKLSTEQIPILYRTCTLENVKNICKTRMKRLDSSACLHAVGDKAVEFFFASDASAIIEHTNRVIFLEDDDIAAVADGKLSIHRVKRSASDDPSRAIQTLQMELQQIMKGNFSAFMQKEIFEQPESVFNTMRGRVNFETNTVLLGGLKDHLKEIRRCRRLIVIGCGTSYHAAVATRQVLEELTELPVMVELASDFLDRNTPVFRDDVCFFISQSGETADTLLALRYCKDRGALTVGVTNTVGSSISRETDCGVHINAGPEIGVASTKAYTSQFISLVMFGLMMSEDRISLQNRRQEIIRGLRSLPELIKEVLSLEEKIHDLALELYTQRSLLVMGRGYNYATCLEGALKIKEITYMHSEGILAGELKHGPLALIDKQMPVIMVIMKDPCFAKCQNALQQVTARQGRPIILCSKDDTESSKFAYKTIELPHTVDCLQGILSVIPLQLLSFHLAVLRGYDVDFPRNLAKSVTVE

SEQ ID NO: 1469 - protein, 136 aa, Homo sapiens [sequence omitted]

SEQ ID NO: 1470 - protein, 1101 aa, Homo sapiens
MSAKAISEQTGKELLYKFICTTSAIQNRFKYARVTPDTDWARLLQDHPWLLSQNLVVKPDQLIKRRGKLGLVGVNLTLDGVKSWLKPRLGQEATVGKATGFLKNFLIEPFVPHSQAEEFYVCIYATREGDYVLFHHEGGVDVGDVDAKAQKLLVGVDEKLNPEDIKKHLLVHAPEDKKEILASFISGLFNFYEDLYFTYLEINPLVVTKDGVYVLDLAAKVDATADYICKVKWGDIEFPPPFGREAYPEEAYIADLDAKSGASLKLTLLNPKGRIWTMVAGGGASVVYSDTICDLGGVNELANYGEYSGAPSEQQTYDYAKTILSLMTREKHPDGKILIIGGSIANFTNVAATFKGIVRAIRDYQGPLKEHEVTIFVRRGGPNYQEGLRVMGEVGKTTGIPIHVFGTETHMTAIVGMALGHRPIPNQPPTAAHTANFLLNASGSTSTPAPSRTASFSESRADEVAPAKKAKPAMPQDSVPSPRSLQGKSTTLFSRHTKAIVWGMQTRAVQGMLDFDYVCSRDEPSVAAMVYPFTGDHKQKFYWGHKEILIPVFKNMADAMRKHPEVDVLINFASLRSAYDSTMETMNYAQIRTIAIIAEGIPEALTRKLIKKADQKGVTIIGPATVGGIKPGCFKIGNTGGMLDNILASKLYRPGSVAYVSRSGGMSNELNNIISRTTDGVYEGVAIGGDRYPGSTFMDHVLRYQDTPGVKMIVVLGEIGGTEEYKICRGIKEGRLTKPIVCWCIGTCATMFSSEVQFGHAGACANQASETAVAKNQALKEAGVFVPRSFDELGEIIQSVYEDLVANGVIVPAQEVPPPTVPMDYSWARELGLIRKPASFMTSICDERGQELIYAGMPITEVFKEEMGIGGVLGLLWFQKRLPKYSCQFIEMCLMVTADHGPAVSGAHNTIICARAGKDLVSSLTSGLLTIGDRFGGALDAAAKMFSKAFDSGIIPMEFVNKMKKEGKLIMGIGHRVKSINNPDMRVQILKDYVRQHFPATPLLDYALEVEKITTSKKPNLILNVDGLIGVAFVDMLRNCGSFTREEADEYIDIGALNGIFVLGRSMGFIGHYLDQKRLKQGLYRHPWDDISYVLPEHMSM

SEQ ID NO: 1471 - protein, 175 aa, Homo sapiens
MASLRVERAGGPRLPRTRVGRPAALRLLLLLGAVLNPHEALAQPLPTTGTPGSEGGTVKNYETAVQFCWNHYKDQMDPIEKDWCDWAMISRPYSTLRDCLEHFAELFDLGFPNPLAERIIFETHQIHFANCSLVQPTFSDPPEDVLLAMIIAPICLIPFLITLVVWRSKDSEAQA

SEQ ID NO: 1472 - protein, 963 aa, Homo sapiens
MVGCGVAVLCLWVSCGAAAGQLEYSVPEETERGVAVGNLSADLRLPAAAMSSRNFRFLSSHRELYFGVDLPSGNLVVREPADREQLCRAKAACVLTYDLVLEDPLELHKIRIHVLDTNDNSPLFPAGDVQLHIPEFLTPGARFTLPNAQDDDEGSNGILSYSLSPSQHFRLDMGSRVDGSEYPELVLEKALDREQRATHLLVLTARDGGLPARSGDAQVTIIVVDTNDNAPVFERSVYRTKVPETAPNGTVLFRVQALDPDEGSNGEVQYSLSNSTQAELRHRFHVHPKSGEVQVAASLGPPETLLEAYIEARDEGVFGLASTAKLLVEVTDVNDHAPELDFLTLSNPVPEDAAPGTVIALFSVKDEDLDSNGRVICGMSSAGPFQLTASFDNYYSLLIDGPLDREQISEYQVLITASDSGSPPLSTRRTITVSVADVNDNTPNFPQPQQELFVAENNGPGASLGRVFAQDPDLGKNGLVSYELLDVISEGPSASSLLAVESSSGAITAKTSFDFEQLRGFHFQVEGRDGGIPPRSATVTINLFVVDRNDNYPVILFPLPRNGSVPVEIVPRSARTGHLVTKVVAEDADSGSNAWLSYHISRASDSSLFRISANIGELRTARLVLPTDAVKQRVVVVVRDHGDPPLSSSVTLGVLLSNSVPQLLPDFEDVWEPGGQLSAQNLYLVIALACISFLFLGCLLFFVCTKLHQSPGCCAQSCCRSTEDLRYGSKMVSNPCMTSATIDVTTVERLSQTYLYRASLGLGSDNNSLLLRGEYNAADLRNLATGVGLNLPISCIQIRNRKGDHANVNAMPRQPNPDWRYSASLRAGMHSSVHLEEAGILRAGPGGPDQQWPTVSSATPEPEAGEVSPPVGAGVNSNSWTFKYGPGNPKQSGPGELPDKFIIPGSPAIISIRQEPTNSQIDKSDFITFGKKEETKKKKKKKKGNKTQEKKEKGNSTTDNSDQ

SEQ ID NO: 1473 - protein, 932 aa, Homo sapiens
MTNCLSFRNGRGLALLCALLGTLCETGSGQIRYSVSEELDKGSFVGNIANDLGLEPRELAERGVRIVSRGRTQLFSLNPQSGSLVTAERIDREELCAQIPLCLVKINILVEDKLKIFEVEIEIKDINDNAPNFPTEELEIKIGELTVPGTRFPIKTAFDPDVGINSLQNYKLSPNDYFSLAVNSVSEGAKYPELVLERALDREKKEIHQLVLVASDGGDPVHSGNLHIQVIVLDANDNPPMFTQPEYRVSVWENVPVGTRLLTVNATDPDEGFNAQVSYILDKMPGKIAEIFHLNSVSGEVSILKSLDYEDAMFYEIKIEAQDGPGLLSRAKILVTVLDVNDNAPEITITSLTSSVPEEGTVGREIALIDVHDRDSGQNGQVEVFVLGNLPFKLEKSIDQYYRLVTATSLDREQISEYNISLRASDGGSPPLSTETHITLHVIDINDNPPTFPHLSYSAYIPENNPRGASIFSVTAQDPDSNNNARITYALTEDTLQGAPLSSFVSINSNTGVLYALRSFDYEQFRDLKLLVTASDSGNPPLSSNVSLNLFVLDQNDNAPEILYPALPTDGSTGVELAPRSAEPGYLVTKVVAVDRDSGQNAWLSYRLLKASEPGLFSVGLHTGEVRTARALLDRDALKQSLVVAVQDHGQPPLSATVTLTVAVADRIPDILADLGSLEPSAKPNDSDLTLYLVVAVAAVSCVFLAFVIVLLALRLRRWHKSRLLQASGGGLASTPGSHFVGADGVRAFLQTYSHEVSLTADSRKSHLIFPQPNYADTLISQESCEKSEPLLITQDLLEMKGDSNLLQQAPPNTDWRFSQAQRPGTSGSQNGDDTGTWPNNQFDTEMLQAMILASASEAADGSSTLGGGAGTMGLSARYGPQFTLQHVPDYRQNVYIPGSNATLTNAAGKRDGKAPAGGNGNKKKSGKKEKK

SEQ ID NO: 1474 - protein, 221 aa, Homo sapiens
MALALAALAAVEPACGSRYQQLQNEEESGEPEQAAGDAPPPYSSISAESAAYFDYKDESGFPKPPSYNVATTLPSYDEAERTKAEATIPLVPGRDEDFVGRDDFDDADQLRIGNDGIFMLTFFMAFLFNWIGFFLSFCLTTSAAGRYGAISGFGLSLIKWILIVRFSTYFPGYFDGQYWLWWVFLVLGFLLFLRGFINYAKVRKMPETFSNLPRTRVLFIY

SEQ ID NO: 1475 - protein, 974 aa, Homo sapiens [sequence omitted]

SEQ ID NO: 1476 - protein, 1202 aa, Homo sapiens
MMCEVMPTISEAEGPPGGGGGHGSGSPSQPDADSHFEQLMVSMLEERDRLLDTLRETQETLALTQGKLHEVGHERDSLQRQLNTALPQEFAALTKELNVCREQLLEREEEIAELKAERNNTRLLLEHLECLVSRHERSLRMTVVKRQAQSPAGVSSEVEVLKALKSLFEHHKALDEKVRERLRVALERCSLLEEELGATHKELMILKEQNNQKKTLTDGVLDINHEQENTPSTSGKRSSDGSLSHEEDLAKVIELQEIISKQSREQSQMKERLASLSSHVTELEEDLDTARKDLIKSEEMNTKLQRDVREAMAQKEDMEERITTLEKRYLAAQREATSVHDLNDKLENEIANKDSMHRQTEDKNRQLQERLELAEQKLQQTLRKAETLPEVEAELAQRVAALSKAEERHGNIEERLRQMEAQLEEKNQELQRARQREKMNEEHNKRLSDTVDKLLSESNERLQLHLKERMAALEDKNSLLREVESAKKQLEETQHDKDQLVLNIEALRAELDHMRLRGASLHHGRPHLGSVPDFRFPMADGHTDSYSTSAVLRRPQKGRLAALRDEPSKVQTLNEQDWERAQQASVLANVAQAFESDADVSDGEDDRDTLLSSVDLLSPSGQADAHTLAMMLQEQLDAINKEIRLIQEEKENTEQRAEEIESRVGSGSLDNLGRFRSMSSIPPYPASSLASSSPPGSGRSTPRRIPHSPAREVDRLGVMTLLPPSREEVRDDKTTIKCETSPPSSPRALRLDRLHKGALHTVSHEDIRDIRNSTGSQDGPVSNPSSSNSSQDSLHKAPKKKGIKSSIGRLFGKKEKGRPGQTGKEALGQAGVSETDNSSQDALGLSKLGGQAEKNRKLQKKHELLEEARRQGLPFAQWDGPTVVVWLELWVGMPAWYVAACRANVKSGAIMSALSDTEIQREIGISNPLHRLKLRLAIQEIMSLTSPSAPPTSRTTLAYGDMNHEWIGNEWLPSLGLPQYRSYFMECLVDARMLDHLTKKDLRGQLKMVDSFHRNSFQCGIMCLRRLNYDRKELERKREESQSEIKDVLVWSNDRVIRWILSIGLKEYANNLIESGVHGALLALDETFDFSALALLLQIPTQNTQARAVLEREFNNLLVMGTDRRFDEDDDKSFRRAPSWRKKFRPKDIRGLAAGSAETLPANFRVTSSMSSPSMQPKKMQMDGNVSGTQRLDSATVRTYSC

SEQ ID NO: 1477 - protein, 716 aa, Homo sapiens
MPLPEPSEQEGESVKAGQEPSPKPGTDVIPAAPRKPREFSKLVLLTASDQDEDGVGSKPQEVHCVLSLEMAGPATLASTLQILPVEEQGGVVQPALEMPEQKCSKLDAAAPQSLEFLRTPFGGRLLVLESFLYKQEKAVGDKVYWKCRQHAELGCRGRAITRGLRATVMRGHCHAPDEQGLEARRQREKLPSLALPEGLGEPQGPEGPGGRVEEPLEGVGPWQCPEEPEPTPGLVLSKPALEEEEAPRALSLLSLPPKKRSILGLGQARPLEFLRTCYGGSFLVHESFLYKREKAVGDKVYWTCRDHALHGCRSRAITQGQRVTVMRGHCHQPDMEGLEARRQQEKAVETLQAGQDGPGSQVDTLLRGVDSLLYRRGPGPLTLTRPRPRKRAKVEDQELPTQPEAPDEHQDMDADPGGPEFLKTPLGGSFLVYESFLYRREKAAGEKVYWTCRDQARMGCRSRAITQGRRVTVMRGHCHPPDLGGLEALRQREKRPNTAQRGSPGGPEFLKTPLGGSFLVYESFLYRREKAAGEKVYWTCRDQARMGCRSRAITQGRRVMVMRRHCHPPDLGGLEALRQREHFPNLAQWDSPDPLRPLEFLRTSLGGRFLVHESFLYRKEKAAGEKVYWMCRDQARLGCRSRAITQGHRIMVMRSHCHQPDLAGLEALRQRERLPTTAQQEDPEKIQVQLCFKTCSPESQQIYGDIKDVRLDGESQ

SEQ ID NO: 1478 - protein, 913 aa, Homo sapiens
MASESDTEEFYDAPEDVHLGGGYPVGSPGKVGLSTFKETENTAYKVGNESPVQELKQDVSKKIIESIIEESQKVLQLEDDSLDSKGKELSDQATASPIVARTDLSNIPGLLAIDQVLPEESQKAESQNTFEETELELKKCFPSDETCEKPVDETTKLTQTSSTEQLNVLETETEVLNKEAVEVKGGGDVLEPVSSDSLSTKDFAAVEEVAPAKPPRHLTPEPDIVASTKKPVPARPPPPTNFPPPRPPPPSRPAPPPRKRKSELEFETLKTPDIDVPKENITSDSLLTASMASESTVKDSQPSLDLASATSGDKIVTAQENGKAPDGQTVAGEVMGPQRPRSNSGRELTDEEILASVMIKNLDTGEEIPLSLAEEKLPTGINPLTLHIMRRTKEYVSNDAAQSDDEEKLQSQPTDTDGGRLKQKTTQLKKFLGKSVKRAKHLAEEYGERAINKVKSVRDEVFHTDQDDPSSSDDEGMPYTRPVKFKAAHGFKGPYDFDQIKVVQDLSGEHMGAVWTMKFSHCGRLLASAGQDNVVRIWALKNAFDYFNNMRMKYNTEGRVSPSPSQESLSSSKSDTDTGVCSGTDEDPDDKNAPFRQRPFCKYKGHTADLLDLSWSKNYFLLSSSMDKTVRLWHISRRECLCCFQHIDFVTAIAFHPRDDRYFLSGSLDGKLRLWNIPDKKVALWNEVDGQTKLITAANFCQNGKYAVIGTYDGRCIFYDTEHLKYHTQIHVRSTRGRNKVGRKITGIEPLPGENKILVTSNDSRIRLYDLRDLSLSMKYKGYVNSSSQIKASFSHDFTYLVSGSEDKYVYIWSTYHDLSKFTSVRRDRNDFWEGIKAHNAVVTSAIFAPNPSLMLSLDVQSEKSEGNEKSEDAEVLDATPSGIMKTDNTEVLLSADFTGAIKVFVNKRKNVS

SEQ ID NO: 1479 - protein, 271 aa, Homo sapiens
MTRWARVSTTYNKRPLPATSWEDMKKGSFEGTSQNLPKRKQLEANRLSLKNDAPQAKHKKNKKKKEYLNEDVNGFMEYLRQNSQMVHNGQIIATDSEEVREEIAVALKKDSRREGRRLKRQAAKKNAMVCFHCRKPGHGIADCPAALENQDMGTGICYRCGSTEHEITKCKAKVDPALGEFPFAKCFVCGEMGHLSRSCPDNPKGLYADGGGCKLCGSVEHLKKDCPESQNSERMVTVGRWAKGMSADYEEILDVPKPQKPKTKIPKVVNF

SEQ ID NO: 1480 - protein, 462 aa, Homo sapiens
MASNSSSCPTPGGGHLNGYPVPPYAFFFPPMLGGLSPPGALTTLQHQLPVSGYSTPSPATIETQSSSSEEIVPSPPSPPPLPRIYKPCFVCQDKSSGYHYGVSACEGCKGFFRRSIQKNMVYTCHRDKNCIINKVTRNRCQYCRLQKCFEVGMSKESVRNDRNKKKKEVPKPECSESYTLTPEVGELIEKVRKAHQETFPALCQLGKYTTNNSSEQRVSLDIDLWDKFSELSTKCIIKTVEFAKQLPGFTTLTIADQITLLKAACLDILILRICTRYTPEQDTMTFSDGLTLNRTQMHNAGFGPLTDLVFAFANQLLPLEMDDAETGLLSAICLICGDRQDLEQPDRVDMLQEPLLEALKVYVRKRRPSRPHMFPKMLMKITDLRSISAKGAERVITLKMEIPGSMPPLIQEMLENSEGLDTLSGQPGGGGRDGGGLAPPPGSCSPSLSPSSNRSSPATHSP

SEQ ID NO: 1481 - protein, 533 aa, Homo sapiens
MTKKRIAVIGGGVSGLSSIKCCVEEGLEPVCFERTDDIGGLWRFQENPEEGRASIYKSVIINTSKEMMCFSDYPIPDHYPNFMHNAQVLEYFRMYAKEFDLLKYIRFKTTVCSVKKQPDFATSGQWEVVTESEGKKEMNVFDGVMVCTGHHTNAHLPLESFPGIEKFKGQYFHSRDYKNPEGFTGKRVIIIGIGNSGGDLAVEISQTAKQVFLSTRRGAWILNRVGDYGYPADVLFSSRLTHFIWKICGQSLANKYLEKKINQRFDHEMFGLKPKHRALSQHPTLNDDLPNRIISGLVKVKGNVKEFTETAAIFEDGSREDDIDAVIFATGYSFDFPFLEDSVKVVKNKISLYKKVFPPNLERPTLAIIGLIQPLGAIMPISELQGRWATQVFKGLKTLPSQSEMMAEISKAQEEIDKRYVESQRHTIQGDYIDTMEELADLVGVRPNLLSLAFTDPKLALHLLLGPCTPIHYRVQGPGKWDGARKAILTTDDRIRKPLMTRVVERSSSMTSTMTIGKFMLALAFFAIIIAYF

SEQ ID NO: 1482 - protein, 272 aa, Homo sapiens
MGNTTSDRVSGERHGAKAARSEGAGGHAPGKEHKIMVGSTDDPSVFSLPDSKLPGDKEFVSWQQDLEDSVKPTQQARPTVIRWSEGGKEVFISGSFNNWSTKIPLIKSHNDFVAILDLPEGEHQYKFFVDGQWVHDPSEPVVTSQLGTINNLIHVKKSDFEVFDALKLDSMESSETSCRDLSSSPPGPYGQEMYAFRSEERFKSPPILPPHLLQVILNKDTNISCDPALLPEPNHVMLNHLYALSIKDSVMVLSATHRYKKKYVTTLLYKPI

SEQ ID NO: 1483 - protein, 526 aa, Homo sapiens
MASNDYTQQATQSYGAYPTQPGQGYSQQSSQPYGQQSYSGYSQSTDTSGYGQSSYSSYGQSQNTGYGTQSTPQGYGSTGGYGSSQSSQSSYGQQSSYPGYGQQPAPSSTSGSYGSSSQSSSYGQPQSGSYSQQPSYGGQQQSYGQQQSYNPPQGYGQQNQYNSSSGGGGGGGGGGNYGQDQSSMSSGGGSGGGYGNQDQSGGGGSGGYGQQDRGGRGRGGSGGGGGGGGGGYNRSSGGYEPRGRGGGRGGRGGMGGSDRGGFNKFGGPRDQGSRHDSEQDNSDNNTIFVQGLGENVTIESVADYFKQIGIIKTNKKTGQPMINLYTDRETGKLKGEATVSFDDPPSAKAAIDWFDGKEFSGNPIKVSFATRRADFNRGGGNGRGGRGRGGPMGRGGYGGGGSGGGGRGGFPSGGGGGGGQQRAGDWKCPNPTCENMNFSWRNECNQCKAPKPDGPGGGPGGSHMGGNYGDDRRGGRGGYDRGGYRGRGGDRGGFRGGRGGGDRGGFGPGKMDSRGEHRQDRRERPY

SEQ ID NO: 1484 - protein, 129 aa, Homo sapiens
MKTLQFFFLFCCWKAICCNSCELTNITIAIEKEECRFCISINTTWCAGYCYTRDLVYKDPARPKIQKTCTFKELVYETVRVPGCAHHADSLYTYPVATQCHCGKCDSDSTDCTVRGLGPSYCSFGEMKE

SEQ ID NO: 1485 - protein, 802 aa, Homo sapiens
MAARGRRAWLSVLLGLVLGFVLASRLVLPRASELKRAGPRRRASPEGCRSGQAAASQAGGARGDARGAQLWPPGSDPDGGPRDRNFLFVGVMTAQKYLQTRAVAAYRTWSKTIPGKVQFFSSEGSDTSVPIPVVPLRGVDDSYPPQKKSFMMLKYMHDHYLDKYEWFMRADDDVYIKGDRLENFLRSLNSSEPLFLGQTGLGTTEEMGKLALEPGENFCMGGPGVIMSREVLRRMVPHIGKCLREMYTTHEDVEVGRCVRRFAGVQCVWSYEMQQLFYENYEQNKKGYIRDLHNSKIHQAITLHPNKNPPYQYRLHSYMLSRKISELRHRTIQLHREIVLMSKYSNTEIHKEDLQLGIPPSFMRFQPRQREEILEWEFLTGKYLYSAVDGQPPRRGMDSAQREALDDIVMQVMEMINANAKTRGRIIDFKEIQYGYRRVNPMYGAEYILDLLLLYKKHKGKKMTVPVRRHAYLQQTFSKIQFVEHEELDAQELAKRINQESGSLSFLSNSLKKLVPFQLPGSKSEHKEPKDKKINILIPLSGRFDMFVRFMGNFEKTCLIPNQNVKLVVLLFNSDSNPDKAKQVELMRDYRIKYPKADMQILPVSGEFSRALALEVGSSQFNNESLLFFCDVDLVFTTEFLQRCRANTVLGQQIYFPIIFSQYDPKIVYSGKVPSDNHFAFTQKTGFWRNYGFGITCIYKGDLVRVGGFDVSIQGWGLEDVDLFNKVVQAGLKTFRSQEVGVVHVHHPVFCDPNLDPKQYKMCLGSKASTYGSTQQLAEMWLEKNDPSYSKSSNNNGSVRTA

SEQ ID NO: 1486 - protein, 1080 aa, Homo sapiens
MPAKGRYFLNEGEEGPDQDALYEKYQLTSQHGPLLLTLLLVAATACVALIIIAFSQGDPSRHQAILGMAFLVLAVFAALSVLMYVECLLRRWLRALALLTWACLVALGYVLVFDAWTKAACAWEQVPFFLFIVFVVYTLLPFSMRGAVAVGAVSTASHLLVLGSLMGGFTTPSVRVGLQLLANAVIFLCGNLTGAFHKHQMQDASRDLFTYTVKCIQIRRKLRIEKRQQENLLLSVLPAHISMGMKLAIIERLKEHGDRRCMPDNNFHSLYVKRHQNVSILYADIVGFTQLASDCSPKELVVVLNELFGKFDQIAKANECMRIKILGDCYYCVSGLPVSLPTHARNCVKMGLDMCQAIKQVREATGVDINMRVGIHSGNVLCGVIGLRKWQYDVWSHDVSLANRMEAAGVPGRVHITEATLKHLDKAYEVEDGHGQQRDPYLKEMNIRTYLVIDPRSQQPPPPSQHLPRPKGDAALKMRASVRMTRYLESWGAARPFAHLNHRESVSSGETHVPNGRRPKSVPQRHRRTPDRSMSPKGRSEDDSYDDEMLSAIEGLSSTRPCCSKSDDFYTFGSIFLEKGFEREYRLAPIPRARHDFACASLIFVCILLVHVLLMPRTAALGVSFGLVACVLGLVLGLCFATKFSRCCPARGTLCTISERVETQPLLRLTLAVLTIGSLLTVAIINLPLMPFQVPELPVGNETGLLAASSKTRALCEPLPYYTCSCVLGFIACSVFLRMSLEPKVVLLTVALVAYLVLFNLSPCWQWDCCGQGLGNLTKPNGTTSGTPSCSWKDLKTMTNFYLVLFYITLLTLSRQIDYYCRLDCLWKKKFKKEHEEFETMENVNRLLLENVLPAHVAAHFIGDKLNEDWYHQSYDCVCVMFASVPDFKVFYTECDVNKEGLECLRLLNEIIADFDELLLKPKFSGVEKIKTIGSTYMAAAGLSVASGHENQELERQHAHIGVMVEFSIALMSKLDGINRHSFNSFRLRVGINHGPVIAGVIGARKPQYDIWGNTVNVASRMESTGELGKIQVTEETCTILQGLGYSCECRGLINVKGKGELRTYFVCTDTAKFQGLGLN

SEQ ID NO: 1487 - protein, 417 aa, Homo sapiens
MPLYEGLGSGGEKTAVVIDLGEAFTKCGFAGETGPRCIIPSVIKRAGMPKPVRVVQYNINTEELYSYLKEFIHILYFRHLLVNPRDRRVVIIESVLCPSHFRETLTRVLFKYFEVPSVLLAPSHLMALLTLGINSAMVLDCGYRESLVLPIYEGIPVLNCWGALPLGGKALHKELETQLLEQCTVDTSVAKEQSLPSVMGSVPEGVLEDIKARTCFVSDLKRGLKIQAAKFNIDGNNERPSPPPNVDYPLDGEKILHILGSIRDSVVEILFEQDNEEQSVATLILDSLIQCPIDTRKQLAENLVVIGGTSMLPGFLHRLLAEIRYLVEKPKYKKALGTKTFRIHTPPAKANCVAWLGGAIFGALQDILGSRSVSKEYYNQTGRIPDWCSLNNPPLEMMFDVGKTQPPLMKRAFSTEK

SEQ ID NO: 1488 - protein, 250 aa, Homo sapiens [sequence omitted]

SEQ ID NO: 1489 - protein, 340 aa, Homo sapiens
MGKDYYQTLGLARGASDEEIKRAYRRQALRYHPDKNKEPGAEEKFKEIAEAYDVLSDPRKREIFDRYGEEGLKGSGPSGGSGGGANGTSFSYTFHGDPHAMFAEFFGGRNPFDTFFGQRNGEEGMDIDDPFSGFPMGMGGFTNVNFGRSRSAQEPARKKQDPPVTHDLRVSLEEIYSGCTKKMKISHKRLNPDGKSIRNEDKILTIEVKKGWKEGTKITFPKEGDQTSNNIPADIVFVLKDKPHNIFKRDGSDVIYPARISLREALCGCTVNVPTLDGRTIPVVFKDVIRPGMRRKVPGEGLPLPKTPEKRGDLIIEFEVIFPERIPQTSRTVLEQVLPI

SEQ ID NO: 1490 - protein, 989 aa, Homo sapiens
MEPPAAKRSRGCPAGPEERDAGAGAARGRGRPEALLDLSAKRVAESWAFEQVEERFSRVPEPVQKRIVFWSFPRSEREICMYSSLGYPPPEGEHDARVPFTRGLHLLQSGAVDRVLQVGFHLSGNIREPGSPGEPERLYHVSISFDRCKITSVSCGCDNRDLFYCAHVVALSLYRIRHAHQVELRLPISETLSQMNRDQLQKFVQYLISAHHTEVLPTAQRLADEILLLGSEINLVNGAPDPTAGAGIEDANCWHLDEEQIQEQVKQLLSNGGYYGASQQLRSMFSKVREMLRMRDSNGARMLILMTEQFLQDTRLALWRQQGAGMTDKCRQLWDELGALWVCVVLSPHCKPEERAGWLQLLSRWDKLDVCPLEEGNYSFDGPSLQPTMAPAPELLQKGSTCITNTEGWVGHPLDPIGCLCRALLEACRLEEETLTLYPDSGPEKRKVAYQHVPVPGSPGESYLVLALEVALLGLGQQRALPEGLYAQDKVVRNEEQLLALLEEVELDERLVQVLRKQAGLLLEGGPFSGFGEVLFRESVPMHTCARYLFTALLPHDPDLAYRLALRAMRLPILETAFPAGEPHPSPLDSIMSNRFPRWFILGHLETRQCELASTMLTAAKGDPKWLHTVLGSIQQNIHSPALLFKLAQDACKTATPVSAPPDTTLLGIALELGLQVMRMTLNVMTWRRREMVRWLVSCATEIGPQALMNIMQNWYSLFTPVEAATIVAVTGTTHATLLRLQLDTSRREELWACARTLALQCAMKDPQNCALPALTLCEKNHSAFEAAYQIVLDAAAGGLGHAHLFTVARYMEHRGLPLRAYKLATLALAQLSIAFNQDSHPAVNDVLWACSLSHSLGRHELSAIVPLIIRSIHCAPMLSDILRRWTLSAPGLGPLGARRAAKPLGADRAPLCQLLDAAVTAYITTSHSRLTHISPRHYGDFIEFLGKARETFLLAPDGHLQFSQFLENLKQTYKGKKKLMLLVRERFG

SEQ ID NO: 1491 - protein, 979 aa, Homo sapiens
MATQAYTELQAAPPPSQPPQAPPQAQPQPPPPPPPAAPQPPQPPTAAATPQPQYVTELQSPQPQAQPPGGQKQYVTELPAVPAPSQPTGAPTPSPAPQQYIVVTVSEGAMRASETVSEASPGSTASQTGVPTQVVQQVQGTQQRLLVQTSVQAKPGHVSPLQLTNIQVPQQALPTQRLVVQSAAPGSKGGQVSLTVHGTQQVHSPPEQSPVQANSSSSKTAGAPTGTVPQQLQVHGVQQSVPVTQERSVVQATPQAPKPGPVQPLTVQGLQPVHVAQEVQQLQQVPVPHVYSSQVQYVEGGDASYTASAIRSSTYSYPETPLYTQTASTSYYEAAGTATQVSTPATSQAVASSGSMPMYVSGSQVVASSTSTGAGASNSSGGGGSGGGGGGGGGGGGGGSGSTGGGGSGAGTYVIQGGYMLGSASQSYSHTTRASPATVQWLLDNYETAEGVSLPRSTLYCHYLLHCQEQKLEPVNAASFGKLIRSVFMGLRTRRLGTRGNSKYHYYGLRIKASSPLLRLMEDQQHMAMRGQPFSQKQRLKPIQKMEGMTNGVAVGQQPSTGLSDISAQVQQYQQFLDASRSLPDFTELDLQGKVLPEGVGPGDIKAFQVLYREHCEAIVDVMVNLQFTLVETLWKTFWRYNLSQPSEAPPLAVHDEAEKRLPKAILVLLSKFEPVLQWTKHCDNVLYQGLVEILIPDVLRPIPSALTQAIRNFAKSLESWLTHAMVNIPEEMLRVKVAAAGAFAQTLRRYTSLNHLAQAARAVLQNTAQINQMLSDLNRVDFANVQEQASWVCRCEDRVVQRLEQDFKVTLQQQNSLEQWAAWLDGVVSQVLKPYQGSAGFPKAAKLFLLKWSFYSSMVIRDLTLRSAASFGSFHLIRLLYDEYMYYLIEHRVAQAKGETPIAVMGEFANLATSLNPLDPDKDEEEEEEEESEDELPQDISLAAGGESPALGPETLEPPAKLARTDARGLFVQALPSS

SEQ ID NO: 1492 - protein, 600 aa, Homo sapiens
MAPSSKSERNSGAGSGGGGPGGAGGKRAAGRRREHVLKQLERVKISGQLSPRLFRKLPPRVCVSLKNIVDEDFLYAGHIFLGFSKCGRYVLSYTSSSGDDDFSFYIYHLYWWEFNVHSKLKLVRQVRLFQDEEIYSDLYLTVCEWPSDASKVIVFGFNTRSANGMLMNMMMMSDENHRDIYVSTVAVPPPGRCAACQDASRAHPGDPNAQCLRHGFMLHTKYQVVYPFPTFQPAFQLKKDQVVLLNTSYSLVACAVSVHSAGDRSFCQILYDHSTCPLAPASPPEPQSPELPPALPSFCPEAAPARSSGSPEPSPAIAKAKEFVADIFRRAKEAKGGVPEEARPALCPGPSGSRCRAHSEPLALCGETAPRDSPPASEAPASEPGYVNYTKLYYVLESGEGTEPEDELEDDKISLPFVVTDLRGRNLRPMRERTAVQGQYLTVEQLTLDFEYVINEVIRHDATWGHQFCSFSDYDIVILEVCPETNQVLINIGLLLLAFPSPTEEGQLRPKTYHTSLKVAWDLNTGIFETVSVGDLTEVKGQTSGSVWSSYRKSCVDMVMKWLVPESSGRYVNRMTNEALHKGCSLKVLADSERYTWIVL

SEQ ID NO: 1493 - protein, 310 aa, Homo sapiens
MRRAALWLWLCALALSLQPALPQIVATNLPPEDQDGSGDDSDNFSGSGAGALQDITLSQQTPSTWKDTQLLTAIPTSPEPTGLEATAASTSTLPAGEGPKEGEAVVLPEVEPGLTAREQEATPRPRETTQLPTTHLASTTTATTAQEPATSHPHRDMQPGHHETSTPAGPSQADLHTPHTEDGGPSATERAAEDGASSQLPAAEGSGEQDFTFETSGENTAVVAVEPDRRNQSPVDQGATGASQGLLDRKEVLGGVIAGGLVGLIFAVCLVGFMLYRMKKKDEGSYSLEEPKQANGGAYQKPTKQEEFYA

SEQ ID NO: 1494 - protein, 475 aa, Homo sapiens [sequence omitted]

SEQ ID NO: 1495 - protein, 1105 aa, Homo sapiens
MAAAAGGGGPGTAVGATGSGIAAAAAGLAVYRRKDGGPATKFWESPETVSQLDSVRVWLGKHYKKYVHADAPTNKTLAGLVVQLLQFQEDAFGKHVTNPAFTKLPAKCFMDFKAGGALCHILGAAYKYKNEQGWRRFDLQNPSRMDRNVEMFMNIEKTLVQNNCLTRPNIYLIPDIDLKLANKLKDIIKRHQGTFTDEKSKASHHIYPYSSSQDDEEWLRPVMRKEKQVLVHWGFYPDSYDTWVHSNDVDAEIEDPPIPEKPWKVHVKWILDTDIFNEWMNEEDYEVDENRKPVSFRQRISTKNEEPVRSPERRDRKASANARKRKHSPSPPPPTPTESRKKSGKKGQASLYGKRRSQKEEDEQEDLTKDMEDPTPVPNIEEVVLPKNVNLKKDSENTPVKGGTVADLDEQDEETVTAGGKEDEDPAKGDQSRSVDLGEDNVTEQTNHIIIPSYASWFDYNCIHVIERRALPEFFNGKNKSKTPEIYLAYRNFMIDTYRLNPQEYLTSTACRRNLTGDVCAVMRVHAFLEQWGLVNYQVDPESRPMAMGPPPTPHFNVLADTPSGLVPLHLRSPQVPAAQQMLNFPEKNKEKPVDLQNFGLRTDIYSKKTLAKSKGASAGREWTEQETLLLLEALEMYKDDWNKVSEHVGSRTQDECILHFLRLPIEDPYLENSDASLGPLAYQPVPFSQSGNPVMSTVAFLASVVDPRVASAAAKAALEEFSRVREEVPLELVEAHVKKVQEAARASGKVDPTYGLESSCIAGTGPDEPEKLEGAEEEKMEADPDGQQPEKAENKVENETDEGDKAQDGENEKNSEKEQDSEVSEDTKSEEKETEENKELTDTCKERESDTGKKKVEHEISEGNVATAAAAALASAATKAKHLAAVEERKIKSLVALLVETQMKKLEIKLRHFEELETIMDREKEALEQQRQQLLTERQNFHMEQLKYAELRARQQMEQQQHGQNPQQAHQHSGGPGLAPLGAAGHPGMMPHQQPPPYPLMHHQMPPPHPPQPGQIPGPGSMMPGQHMPGRMIPTVAANIHPSGSGPTPPGMPPMPGNILGPRVPLTAPNGMYPPPPQQQPPPPPPADGVPPPPAPGPPASAAP

SEQ ID NO: 1496 - protein, 1887 aa, Homo sapiens
MAARGRGLLLLTLSVLLAAGPSAAAAKLNIPKVLLPFTRATRVNFTLEASEGCYRWLSTRPEVASIEPLGLDEQQCSQKAVVQARLTQPARLTSIIFAEDITTGQVLRCDAIVDLIHDIQIVSTTRELYLEDSPLELKIQALDSEGNTFSTLAGLVFEWTIVKDSEADRFSDSHNALRILTFLESTYIPPSYISEMEKAAKQGDTILVSGMKTGSSKLKARIQEAVYKNVRPAEVRLLILENILLNPAYDVYLMVGTSIHYKVQKIRQGKITELSMPSDQYELQLQNSIPGPEGDPARPVAVLAQDTSMVTALQLGQSSLVLGHRSIRMQGASRLPNSTIYVVEPGYLGFTVHPGDRWVLETGRLYEITIEVFDKFSNKVYVSDNIRIETVLPAEFFEVLSSSQNGSYHRIRALKRGQTAIDAALTSVVDQDGGVHILQVPVWNQQEVEIHIPITLYPSILTFPWQPKTGAYQYTIRAHGGSGNFSWSSSSHLVATVTVKGVMTTGSDIGFSVIQAHDVQNPLHFGEMKVYVIEPHSMEFAPCQVEARVGQALELPLRISGLMPGGASEVVTLSDCSHFDLAVEVENQGVFQPLPGRLPPGSEHCSGIRVKAEAQGSTTLLVSYRHGHVHLSAKITIAAYLPLKAVDPSSVALVTLGSSKEMLFEGGPRPWILEPSKFFQNVTAEDTDSIGLALFAPHSSRNYQQHWILVTCQALGEQVIALSVGNKPSLTNPFPAVEPAVVKFVCAPPSRLTLAPVYTSPQLDMSCPLLQQNKQVVPVSSHRNPRLDLAAYDQEGRRFDNFSSLSIQWESTRPVLASIEPELPMQLVSQDDESGQKKLHGLQAILVHEASGTTAITATATGYQESHLSSARTKQPHDPLVPLSASIELILVEDVRVSPEEVTIYNHPGIQAELRIREGSGYFFLNTSTADVVKVAYQEARGVAMVHPLLPGSSTIMIHDLCLVFPAPAKAVVYVSDIQELYIRVVDKVEIGKTVKAYVRVLDLHKKPFLAKYFPFMDLKLRAASPIITLVALDEALDNYTITFLIRGVAIGQTSLTASVTNKAGQRINSAPQQIEVFPPFRLMPRKVTLLIGATMQVTSEGGPQPQSNILFSISNESVALVSAAGLVQGLAIGNGTVSGLVQAVDAETGKVVIISQDLVQVEVLLLRAVRIRAPIMRMRTGTQMPIYVTGITNHQNPFSFGNAVPGLTFHWSVTKRDVLDLRGRHHEASIRLPSQYNFAMNVLGRVKGRTGLRVVVKAVDPTSGQLYGLARELSDEIQVQVFEKLQLLNPEIEAEQILMSPNSYIKLQTNRDGAASLSYRVLDGPEKVPVVHVDEKGFLASGSMIGTSTIEVIAQEPFGANQTIIVAVKVSPVSYLRVSMSPVLHTQNKEALVAVPLGMTVTFTVHFHDNSGDVFHAHSSVLNFATNRDDFVQIGKGPTNNTCVVRTVSVGLTLLRVWDAEHPGLSDFMPLPVLQAISPELSGAMVVGDVLCLATVLTSLEGLSGTWSSSANSILHIDPKTGVAVARAVGSVTVYYEVAGHLRTYKEVVVSVPQRIMARHLHPIQTSFQEATASKVIVAVGDRSSNLRGECTPTQREVIQALHPETLISCQSQFKPAVFDFPSQDVFTVEPQFDTALGQYFCSITMHRLTDKQRKHLSMKKTALVVSASLSSSHFSTEQVGAEVPFSPGLFADQAEILLSNHYTSSEIRVFGAPEVLENLEVKSGSPAVLAFAKEKSFGWPSFITYTVGVLDPAAGSQGPLSTTLTFSSPVTNQAIAIPVTVAFVVDRRGPGPYGASLFQHFLDSYQVMFFTLFALLAGTAVMIIAYHTVCTPRDLAVPAALTPRASPGHSPHYFAASSPTSPNALPPARKASPPSGLWSPAYASH

SEQ ID NO: 1497 - protein, 1053 aa, Homo sapiens
MWQPRRPWPRVPWRWALALLALVGAGLCHAGPQPGYPARPSARNKNWCAYIVNKNVSCSVLEGSESFIQAQYNCAWNQMPCPSALVYRVNFRPRYVTRYKTVTQLEWRCCPGFRGGDCQEGPKDPVKTLRPTPARPRNSLKKATDNEPSQFSEPRKTLSPTGTAQPSWGVDPKEGPQELQEKKIQVLEEKVLRLTRTVLDLQSSLAGVSENLKHATQDDASRTRAPGLSSQHPKPDTTVSGDTETGQSPGVFNTKESGMKDIKSELAEVKDTLKNKSDKLEELDGKVKGYEGQLRQLQEAAQGPTVTMTTNELYQAYVDSKIDALREELMEGMDRKLADLKNSCEYKLTGLQQQCDDYGSSYLGVIELIGEKETSLRKEINNLRARLQEPSAQANCCDSEKNGDIGQQIKTLDQKIERVAEATRMLNGRLDNEFDRLIVPEPDVDFDAKWNELDARINVTEKNAEEHCFYIEETLRGAINGEVGDLKQLVDQKIQSLEDRLGSVLLQMTNNTGAELSPPGAAALPGVSGSGDERVMMELNHLKDKVQVVEDICLLNIQGKPHGMEGALPNREDRAVRDSLHLLKSLNDTMHRKFQETEQTIQKLQQDFSFLYSQLNHTENDVTHLQKEMSNCRAGENAGMGRFTKVGEQERTVDTLPSPQHPVAHCCSQLEERWQRLQSQVISELDACKECTQGVQREVSMVEGRVSHMEKTCSKLDSISGNLQRIKEGLNKHVSSLWNCVRQMNGTLRSHSRDISGLKNSVQQFYSHVFQISTDLQDLVKFQPSAKAPSPPPPAEAPKEPLQPEPAPPRPSGPATAEDPGRRPVLPQRPPEERPPQPPGSTGVIAETGQAGPPAGAGVSGRGLPRGVDGQTGSGTVPGAEGFAGAPGYPKSPPVASPGAPVPSLVSFSAGLTQKPFPSDGGVVLFNKVLVNDGDVYNPSTGVFTAPYDGRYLITATLTPERDAYVEAVLSVSNASVAQLHTAGYRREFLEYHRPPGALHTCGGPGAFHLIVHLKAGDAVNVVVTGGKLAHTDFDEMYSTFSGVFLYPFLSHL

SEQ ID NO: 1498 - protein, 341 aa, Homo sapiens
MTDGILGKAATMEIPIHGNGEARQLPEDDGLEQDLQQVMVSGPNLNETSIVSGGYGGSGDGLIPTGSGRHPSHSTTPSGPGDEVARGIAGEKFDIVKKWGINTYKCTKQLLSERFGRGSRTVDLELELQIELLRETKRKYESVLQLGRALTAHLYSLLQTQHALGDAFADLSQKSPELQEEFGYNAETQKLLCKNGETLLGAVNFFVSSINTLVTKTMEDTLMTVKQYEAARLEYDAYRTDLEELSLGPRDAGTRGRLESAQATFQAHRDKYEKLRGDVAIKLKFLEENKIKVMHKQLLLFHNAVSAYFAGNQKQLEQTLQQFNIKLRPPGAEKPSWLEEQ

SEQ ID NO: 1499 - protein, 456 aa, Homo sapiens
MFEEPEWAEAAPVAAGLGPVISRPPPAASSQNKGSKRRQLLATLRALEAASLSQHPPSLCISDSEEEEEERKKKCPKKASFASASAEVGKKGKKKCQKQGPPCSDSEEEVERKKKCHKQALVGSDSAEDEKRKRKCQKHAPINSAQHLDNVDQTGPKAWKGSTTNDPPKQSPGSTSPKPPHTLSRKQWRNRQKNKRRCKNKFQPPQVPDQAPAEAPTEKTEVSPVPRTDSHEARAGALRARMAQRLDGARFRYLNEQLYSGPSSAAQRLFQEDPEAFLLYHRGFQSQVKKWPLQPVDRIARDLRQRPASLVVADFGCGDCRLASSIRNPVHCFDLASLDPRVTVCDMAQVPLEDESVDVAVFCLSLMGTNIRDFLEEANRVLKPGGLLKVAEVSSRFEDVRTFLRAVTKLGFKIVSKDLTNSHFFLFDFQKTGPPLVGPKAQLSGLQLQPCLYKRR

SEQ ID NO: 1500 - protein, 103 aa, Homo sapiens
MERQQQQQQQLRNLRDFLLVYNRMTELCFQRCVPSLHHRALDAEEEACLHSCAGKLIHSNHRLMAAYVQLMPALVQRRIADYEAASAVPGVAAEQPGVSPSGS

SEQ ID NO: 1501 - protein, 821 aa, Homo sapiens
MPTRVCCCCSALRPRYKRLVDNIFPEDPKDGLVKTDMEKLTFYAVSAPEKLDRIGSYLAERLSRDVVRHRSGYVLIAMEALDQLLMACHSQSIKPFVESFLHMVAKLLESGEPKLQVLGTNSFVKFANIEEDTPSYHRRYDFFVSRFSAMCHSCHSDPEIRTEIRIAGIRGIQGVVRKTVNDELRATIWEPQHMDKIVPSLLFNMQKIEEVDSRIGPPSSPSATDKEENPAVLAENCFRELLGRATFGNMNNAVRPVFAHLDHHKLWDPNEFAVHCFKIIMYSIQAQYSHHVIQEILGHLDARKKDAPRVRAGIIQVLLEAVAIAAKGSIGPTVLEVFNTLLKHLRLSVEFEANDLQGGSVGSVNLNTSSKDNDEKIVQNAIIQTIGFFGSNLPDYQRSEIMMFIMGKVPVFGTSTHTLDISQLGDLGTRRIQIMLLRSLLMVTSGYKAKTIVTALPGSFLDPLLSPSLMEDYELRQLVLEVMHNLMDRHDNRAKLRGIRIIPDVADLKIKREKICRQDTSFMKKNGQQLYRHIYLGCKEEDNVQKNYELLYTSLALITIELANEEVVIDLIRLAIALQDSAIINEDNLPMFHRCGIMALVAAYLNFVSQMIAVPAFCQHVSKVIEIRTMEAPYFLPEHIFRDKCMLPKSLEKHEKDLYFLTNKIAESLGGSGYSVERLSVPYVPQVTDEDRLSRRKSIVDTVSIQVDILSNNVPSDDVVSNTEEITFEALKKAIDTSGMEEQEKEKRRLVIEKFQKAPFEEIAAQCESKANLLHDRLAQILELTIRPPPSPSGTLTITSGHAQYQSVPVYEMKFPDLCVY

SEQ ID NO: 1502 - protein, 477 aa, Homo sapiens
MIAFLLTSVLMIPHAGGHPLDTPHLPQELPPGLPNNINITFFSGMFKNVESVAEIFDCLGPHFTWLQAVFTNFPVLIQFVNGMKCVAGLCPRDFEDYGCTCRFEMEGLPVDESDSCCFQHRRCYEEAAEMDCLQDPAKLSTEVNCVSKKIICESKDNCEHLLCTCDKAAIECLARSSLNSSLNLLDTSFCLAQTPETTIKEDLTTLLPRVVPVEPTDTSLTALSGEEAGHDQEGVGAARATSPPGSAEIVATRVTAKIVTLVPAGIKSLGLAVSSVENDPEETTEKACDRFTFLHLGSGDNMQVMPQLGEMLFCLTSRCPEEFESYGCYCGQEGRGEPRDDLDRCCLSHHCCLEQVRRLGCLLERLPWSPVVCVDHTPKCGGQSLCEKLLCACDQTAAECMTSASFNQSLKSPSRLGCPGQPAACEDSLHPVPAAPTLGSSSEEDSEEDPPQEDLGRAKRFLRKSLGPLGIGPLHGR

SEQ ID NO: 1503 - protein, 689 aa, Homo sapiens
MAVVSAVRWLGLRSRLGQPLTGRRAGLCEQARSCRFYSGSATLSKVEGTDVTGIEEVVIPKKKTWDKVAVLQALASTVNRDTTAVPYVFQDDPYLMPASSLESRSFLLAKKSGENVAKFIINSYPKYFQKDIAEPHIPCLMPEYFEPQIKDISEAALKERIELRKVKASVDMFDQLLQAGTTVSLETTNSLLDLLCYYGDQEPSTDYHFQQTGQSEALEEENDETSRRKAGHQFGVTWRAKNNAERIFSLMPEKNEHSYCTMIRGMVKHRAYEQALNLYTELLNNRLHADVYTFNALIEATVCAINEKFEEKWSKILELLRHMVAQKVKPNLQTFNTILKCLRRFHVFARSPALQVLREMKAIGIEPSLATYHHIIRLFDQPGDPLKRSSFIIYDIMNELMGKRFSPKDPDDDKFFQSAMSICSSLRDLELAYQVHGLLKTGDNWKFIGPDQHRNFYYSKFFDLICLMEQIDVTLKWYEDLIPSAYFPHSQTMIHLLQALDVANRLEVIPKIWKDSKEYGHTFRSDLREEILMLMARDKHPPELQVAFADCAADIKSAYESQPIRQTAQDWPATSLNCIAILFLRAGRTQEAWKMLGLFRKHNKIPRSELLNELMDSAKVSNSPSQAIEVVELASAFSLPICEGLTQRVMSDFAINQEQKEALSNLTALTSDSDTDSSSDSDSDTSEGK

SEQ ID NO: 1504 - protein, 659 aa, Homo sapiens
MVLGPAAYNVPLPKKSIQSGPLKISSVSEVMKESKQPASQLQKQKGDTPASATAGDTLSVPAPAVQPEESLKTDHPEIGEGKPTPALSEASSSSIRERPPEEVAARLAQQEKQEQVKIESLAKSLEDALRQTASVTLQAIAAQNAAVQAVNAHSNILKAAMDNSEIAGEKKSAQWRTVEGALKERRKAVDEAADALLKAKEELEKMKSVIENAKKKEVAGAKPHITAAEGKLHNMIVDLDNVVKKVQAAQSEAKVVSQYHELVVQARDDFKRELDSITPEVLPGWKGMSVSDLADKLSTDDLNSLIAHAHRRIDQLNRELAEQKATEKQHITLALEKQKLEEKRAFDSAVAKALEHHRSEIQAEQDRKIEEVRDAMENEMRTQLRRQAAAHTDHLRDVLRVQEQELKSEFEQNLSEKLSEQELQFRRLSQEQVDNFTLDINTAYARLRGIEQAVQSHAVAEEEARKAHQLWLSVEALKYSMKTSSAETPTIPLGSAVEAIKANCSDNEFTQALTAAIPPESLTRGVYSEETLRARFYAVQKLARRVAMIDETRNSLYQYFLSYLQSLLLFPPQQLKPPPELCPEDINTFKLLSYASYCIEHGDLELAAKFVNQLKGESRRVAQDWLKEARMTLETKQIVEILTAYASAVGIGTTQVQPE

SEQ ID NO: 1505 - protein, 392 aa, Homo sapiens
MDLFGDLPEPERSPRPAAGKEAQKGPLLFDDLPPASSTDSGSGGPLLFDDLPPASSGDSGSLATSISQMVKTEGKGAKRKTSEEEKNGSEELVEKKVCKASSVIFGLKGYVAERKGEREEMQDAHVILNDITEECRPPSSLITRVSYFAVFDGHGGIRASKFAAQNLHQNLIRKFPKGDVISVEKTVKRCLLDTFKHTDEEFLKQASSQKPAWKDGSTATCVLAVDNILYIANLGDSRAILCRYNEESQKHAALSLSKEHNPTQYEERMRIQKAGGNVRDGRVLGVLEVSRSIGDGQYKRCGVTSVPDIRRCQLTPNDRFILLACDGLFKVFTPEEAVNFILSCLEDEKIQTREGKSAADARYEAACNRLANKAVQRGSADNVTVMVVRIGH

SEQ ID NO: 1506 - protein, 148 aa, Homo sapiens
MARALCRLPRRGLWLLLAHHLFMTTACQEANYGALLRELCLTQFQVDMEAVGETLWCDWGRTIRSYRELADCTWHMAEKLGCFWPNAEVDRFFLAVHGRYFRSCPISGRAVRDPPGSILYPFIVVPITVTLLVTALVVWQSKRTEGIV

SEQ ID NO: 1507 - protein, 1037 aa, Homo sapiens
MATESTPSEIIERERKKLLEILQHDPDSILDTLTSRRLISEEEYETLENVTDLLKKSRKLLILVQKKGEATCQHFLKCLFSTFPQSAAICGLRHEVLKHENTVPPQSMGASSNSEDAFSPGIKQPEAPEITVFFSEKEHLDLETSEFFRDKKTSYRETALSARKNEKEYDTPEVTLSYSVEKVGCEVPATITYIKDGQRYEELDDSLYLGKEEYLGSVDTPEDAEATVEEEVYDDPEHVGYDGEEDFENSETTEFSGEEPSYEGSETSLSLEEEQEKSIEERKKVFKDVLLCLNMDRSRKVLPDFVKQFSLDRGCKWTPESPGDLAWNFLMKVQARDVTARDSILSHKVLDEDSKEDLLAGVENLEIRDIQTINPLDVLCATMLCSDSSLQRQVMSNMYQCQFALPLLLPDAENNKSILMLGAMKDIVKKQSTQFSGGPTEDTEKFLTLMKMPVISFVRLGYCSFSKSRILNTLLSPAQLKLHKIFLHQDLPLLVLPRQISDGLVEITWCFPDSDDRKENPFFQKPVALANLRGNLESFWTQFGFLMEVSSAVFFFTDCLGEKEWDLLMFLGEAAIERCYFVLSSQARESEEAQIFQRILNLKPAQLLFWERGDAGDRRKNMEGLQAALQEVMFSSCLRCVSVEDMAALARELGIQVDEDFENTQRIQVSSGENMAGTAEGEGQQRHSQLKSSSKSQALMPIQEPGTQCELSQNLQNLYGTPVFRPVLENSWLFPTRIGGNFNHVSLKASWVMGRPFGSEQRPKWFHPLPFQNAGAQGRGKSFGIQSFHPQIFYSGERFMKFSRVARGCHSNGTFGRLPRPICQHVQACPERPQMMGTLERSRAVASKIGHSYSLDSQPARAVGKPWPQQACTRVTELTEATGKLIRTSHIGKPHPQSFQPAAATQKLRPASQQGVQMKTQGGASNPALQIGSHPMCKSSQFKSDQSNPSTVKHSQPKPFHSVPSQPKSSQTKSCQSQPSQTKPSPCKSTQPKPSQPWPPQSKPSQPRPPQPKSSSTNPSQAKAHHSKAGQKRGGKH

SEQ ID NO: 1508 - protein, 1328 aa, Homo sapiens
MESRDPAQPMSPGEATQSGARPADRYGLLKHSREFLDFFWDIAKPEQETRLAATEKLLEYLRGRPKGSEMKYALKRLITGLGVGRETARPCYSLALAQLLQSFEDLPLCSILQQIQEKYDLHQVKKAMLRPALFANLFGVLALFQSGRLVKDQEALMKSVKLLQALAQYQNHLQEQPRKALVDILSEVSKATLQEILPEVLKADLNIILSSPEQLELFLLAQQKVPSKLKKLVGSVNLFSDENVPRLVNVLKMAASSVKKDRKLPAIALDLLRLALKEDKFPRFWKEVVEQGLLKMQFWPASYLCFRLLGAALPLLTKEQLHLVMQGDVIRHYGEHVCTAKLPKQFKFAPEMDDYVGTFLEGCQDDPERQLAVLVAFSSVTNQGLPVTPTFWRVVRFLSPPALQGYVAWLRAMFLQPDLDSLVDFSTNNQKKAQDSSLHMPERAVFRLRKWIIFRLVSIVDSLHLEMEEALTEQVARFCLFHSFFVTKKPTSQIPETKHPFSFPLENQAREAVSSAFFSLLQTLSTQFKQAPGQTQGGQPWTYHLVQFADLLLNHSHNVTTVTPFTAQQRQAWDRMLQTLKELEAHSAEARAAAFQHLLLLVGIHLLKSPAESCDLLGDIQTCIRKSLGEKPRRSRTKTIDPQEPPWVEVLVEILLALLAQPSHLMRQVARSVFGHICSHLTPRALQLILDVLNPETSEDENDRVVVTDDSDERRLKGAEDKSEEGEDNRSSESEEESEGEESEEEERDGDVDQGFREQLMTVLQAGKALGGEDSENEEELGDEAMMALDQSLASLFAEQKLRIQARRDEKNKLQKEKALRRDFQIRVLDLVEVLVTKQPENALVLELLEPLLSIIRRSLRSSSSKQEQDLLHKTARIFTHHLCRARRYCHDLGERAGALHAQVERLVQQAGRQPDSPTALYHFNASLYLLRVLKGNTAEGCVHETQEKQKAGTDPSHMPTGPQAASCLDLNLVTRVYSTALSSFLTKRNSPLTVPMFLSLFSRHPVLCQSLLPILVQHITGPVRPRHQACLLLQKTLSMREVRSCFEDPEWKQLMGQVLAKVTENLRVLGEAQTKAQHQQALSSLELLNVLFRTCKHEKLTLDLTVLLGVLQGQQQSLQQGAHSTGSSRLHDLYWQAMKTLGVQRPKLEKKDAKEIPSATQSPISKKRKKKGFLPETKKRKKRKSEDGTPAEDGTPAATGGSQPPSMGRKKRNRTKAKVPAQANGTPTTKSPAPGAPTRSPSTPAKSPKLQKKNQKPSQVNGAPGSPTEPAGQKQHQKALPKKGVLGKSPLSALARKKARLSLVIRSPSLLQSGAKKKAQVRKAGKP

SEQ ID NO: 1509 - protein, 418 aa, Homo sapiens
MQALVLLLCIGALLGHSSCQNPASPPEEGSPDPDSTGALVEEEDPFFKVPVNKLAAAVSNFGYDLYRVRSSTSPTTNVLLSPLSVATALSALSLGAEQRTESIIHRALYYDLISSPDIHGTYKELLDTVTAPQKNLKSASRIVFEKKLRIKSSFVAPLEKSYGTRPRVLTGNPRLDLQEINNWVQAQMKGKLARSTKEIPDEISILLLGVAHFKGQWVTKFDSRKTSLEDFYLDEERTVRVPMMSDPKAVLRYGLDSDLSCKIAQLPLTGSMSIIFFLPLKVTQNLTLIEESLTSEFIHDIDRELKTVQAVLTVPKLKLSYEGEVTKSLQEMKLQSLFDSPDFSKITGKPIKLTQVEHRAGFEWNEDGAGTTPSPGLQPAHLTFPLDYHLNQPFIFVLRDTDTGALLFIGKILDPRGP

SEQ ID NO: 1510 - protein, 596 aa, Homo sapiens
MAGRRVNVNVGVLGHIDSGKTALARALSTTASTAAFDKQPQSRERGITLDLGFSCFSVPLPARLRSSLPEFQAAPEAEPEPGEPLLQVTLVDCPGHASLIRTIIGGAQIIDLMMLVIDVTKGMQTQSAECLVIGQIACQKLVVVLNKIDLLPEGKRQAAIDKMTKKMQKTLENTKFRGAPIIPVAAKPGGPEAPETEAPQGIPELIELLTSQISIPTRDPSGPFLMSVDHCFSIKGQGTVMTGTILSGSISLGDSVEIPALKVVKKVKSMQMFHMPITSAMQGDRLGICVTQFDPKLLERGLVCAPESLHTVHAALISVEKIPYFRGPLQTKAKFHITVGHETVMGRLMFFSPAPDNFDQEPILDSFNFSQEYLFQEQYLSKDLTPAVTDNDEADKKAGQATEGHCPRQQWALVEFEKPVTCPRLCLVIGSRLDADIHTNTCRLAFHGILLHGLEDRNYADSFLPRLKVYKLKHKHGLVERAMDDYSVIGRSLFKKETNIQLFVGLKVHLSTGELGIIDSAFGQSGKFKIHIPGGLSPESKKILTPALKKRARAGRGEATRQEESAERSEPSQHVVLSLTFKRYVFDTHKRMVQSP

SEQ ID NO: 1511 - protein, 141 aa, Homo sapiens
MPPFGYKTETSTAVEKKEKPLPRLNIHSGFWILASIVVTYYVDFFKTLKENFHTSSWFLCGSALLLVSLSIAFYCIVYLEWYCGIGEYDVKYPALIPITTASFIAAGICFNIALWHVWSFFTPLLLFTQFMGVVMFITLLG

SEQ ID NO: 1512 - protein, 369 aa, Homo sapiens
MWSGRKLGSSGGWFLRVLGPGGCNTKAARPLISSAVYVKNQLSGTLQIKPGVFNEYRTIWFKSYRTIFSCLNRIKSFRYPWARLYSTSQTTVDSGEVKTFLALAHKWWDEQGVYAPLHSMNDLRVPFIRDNLLKTIPNHQPGKPLLGMKILDVGCGGGLLTEPLGRLGASVIGIDPVDENIKTAQCHKSFDPVLDKRIEYRVCSLEEIVEETAETFDAVVASEVVEHVIDLETFLQCCCQVLKPGGSLFITTINKTQLSYALGIVFSEQIASIVPKGTHTWEKFVSPETLESILESNGLSVQTVVGMLYNPFSGYWHWSENTSLNYAAYAVKSRVQEHPASAEFVLKGETEELQANACTNPAVHEKLKK

SEQ ID NO: 1513 - protein, 450 aa, Homo sapiens
MGETMSKRLKLHLGGEAEMEERAFVNPFPDYEAAAGALLASGAAEETGCVRPPATTDEPGLPFHQDGKIIHNFIRRIQTKIKDLLQQMEEGLKTADPHDCSAYTGWTGIALLYLQLYRVTCDQTYLLRSLDYVKRTLRNLNGRRVTFLCGDAGPLAVGAVIYHKLRSDCESQECVTKLLQLQRSVVCQESDLPDELLYGRAGYLYALLYLNTEIGPGTVCESAIKEVVNAIIESGKTLSREERKTERCPLLYQWHRKQYVGAAHGMAGIYYMLMQPAAKVDQETLTEMVKPSIDYVRHKKFRSGNYPSSLSNETDRLVHWCHGAPGVIHMLMQAYKVFKEEKYLKEAMECSDVIWQRGLLRKGYGICHGTAGNGYSFLSLYRLTQDKKYLYRACKFAEWCLDYGAHGCRIPDRPYSLFEGMAGAIHFLSDVLGPETSRFPAFELDSSKRD

SEQ ID NO: 1514 - protein, 480 aa, Homo sapiens
MAGTRWVLGALLRGCGCNCSSCRRTGAACLPFYSAAGSIPSGVSGRRRLLLLLGAAAAAASQTRGLQTGPVPPGRLAGPPAVATSAAAAAAASYSALRASLLPQSLAAAAAVPTRSYSQESKTTYLEDLPPPPEYELAPSKLEEEVDDVFLIRAQGLPWSCTMEDVLNFFSDCRIRNGENGIHFLLNRDGKRRGDALIEMESEQDVQKALEKHRMYMGQRYVEVYEINNEDVDALMKSLQVKSSPVVNDGVVRLRGLPYSCNEKDIVDFFAGLNIVDITFVMDYRGRRKTGEAYVQFEEPEMANQALLKHREEIGNRYIEIFPSRRNEVRTHVGSYKGKKIASFPTAKYITEPEMVFEEHEVNEDIQPMTAFESEKEIELPKEVPEKLPEAADFGTTSSLHFVHMRGLPFQANAQDIINFFAPLKPVRITMEYSSSGKATGEADVHFETHEDAVAAMLKDRSHVHHRYIELFLNSCPKGK

SEQ ID NO: 1515 - protein, 159 aa, Homo sapiens
MKNHLLFWGVLAVFIKAVHVKAQEDERIVLVDNKCKCARITSRIIRSSEDPNEDIVERNIRIIVPLNNRENISDPTSPLRTRFVYHLSDLCKKCDPTEVELDNQIVTATQSNICDEDSATETCYTYDRNKCYTAVVPLVYGGETKMVETALTPDACYPD

SEQ ID NO: 1516 - protein, 479 aa, Homo sapiens
MVGRSRRRGAAKWAAVRAKAGPTLTDENGDDLGLPPSPGDTSYYQDQVDDFHEARSRAALAKGWNEVQSGDEEDGEEEEEEVLALDMDDEDDEDGGNAGEEEEEENADDDGGSSVQSEAEASVDPSLSWGQRKKLYYDTDYGSKSRGRQSQQEAEEEEREEEEEAQIIQRRLAQALQEDDFGVAWVEAFAKPVPQVDEAETRVVKDLAKVSVKEKLKMLRKESPELLELIEDLKVKLTEVKDELEPLLELVEQGIIPPGKGSQYLRTKYNLYLNYCSNISFYLILKARRVPAHGHPVIERLVTYRNLINKLSVVDQKLSSEIRHLLTLKDDAVKKELIPKAKSTKPKPKSVSKTSAAACAVTDLSDDSDFDEKAKLKYYKEIEDRQKLKRKKEENSTEEQALEDQNAKRAITYQIAKNRGLTPRRKKIDRNPRVKHREKFRRAKIRRRGQVREVRKEEQRYSGELSGIRAGVKKSIKLK

SEQ ID NO: 1517 - protein, 261 aa, Homo sapiens
MALNKNHSEGGGVIVNNTESILMSYDHVELTFNDMKNVPEAFKGTKKGTVYLTPYRVIFLSKGKDAMQSFMMPFYLMKDCEIKQPVFGANYIKGTVKAEAGGGWEGSASYKLTFTAGGAIEFGQRMLQVASQASRGEVPSGAYGYSYMPSGAYVYPPPVANGMYPCPPGYPYPPPPPEFYPGPPMMDGAMGYVQPPPPPYPGPMEPPVSGPDVPSTPAAEAKAAEAAASAYYNPGNPHNVYMPTSQPPPPPYYPPEDKKTQ

SEQ ID NO: 1518 - protein, 136 aa, Homo sapiens
MARTKQTARKSTGGKAPRKQLATKAARKSAPSTGGVKKPHRYRPGTVALREIRRYQKSTELLIRKLPFQRLVREIAQDFKTDLRFQSAAIGALQEASEAYLVGLFEDTNLCAIHAKRVTIMPKDIQLARRIRGERA

SEQ ID NO: 1519 - protein, 320 aa, Homo sapiens
MSTKNFRVSDGDWICPDKKCGNVNFARRTSCNRCGREKTTEAKMMKAGGTEIGKTLAEKSRGLFSANDWQCKTCSNVNWARRSECNMCNTPKYAKLEERTGYGGGFNERENVEYIEREESDGEYDEFGRKKKKYRGKAVGPASILKEVEDKESEGEEEDEDEDLSKYKLDEDEDEDDADLSKYNLDASEEEDSNKKKSNRRSRSKSRSSHSRSSSRSSSPSSSRSRSRSRSRSSSSSQSRSRSSSRERSRSRGSKSRSSSRSHRGSSSPRKRSYSSSSSSPERNRKRSRSRSSSSGDRKKRRTRSRSPESQVIGENTKQP

SEQ ID NO: 1520 - protein, 137 aa, Homo sapiens
MSSLIRRVISTAKAPGAIGPYSQAVLVDRTIYISGQIGMDPSSGQLVSGGVAEEAKQALKNMGEILKAAGCDFTNVVKTTVLLADINDFNTVNEIYKQYFKSNFPARAAYQVAALPKGSRIEIEAVAIQGPLTTASL

SEQ ID NO: 1521 - protein, 956 aa, Homo sapiens
MEKMLAGCFLLILGQIVLLPAEARERSRGRSISRGRHARTHPQTALLESSCENKRADLVFIIDSSRSVNTHDYAKVKEFIVDILQFLDIGPDVTRVGLLQYGSTVKNEFSLKTFKRKSEVERAVKRMRHLSTGTMTGLAIQYALNIAFSEAEGARPLRENVPRVIMIVTDGRPQDSVAEVAAKARDTGILIFAIGVGQVDFNTLKSIGSEPHEDHVFLVANFSQIETLTSVFQKKLCTAHMCSTLEHNCAHFCINIPGSYVCRCKQGYILNSDQTTCRIQDLCAMEDHNCEQLCVNVPGSFVCQCYSGYALAEDGKRCVAVDYCASENHGCEHECVNADGSYLCQCHEGFALNPDKKTCTKIDYCASSNHGCQHECVNTDDSYSCHCLKGFTLNPDKKTCRRINYCALNKPGCEHECVNMEESYYCRCHRGYTLDPNGKTCSRVDHCAQQDHGCEQLCLNTEDSFVCQCSEGFLINEDLKTCSRVDYCLLSDHGCEYSCVNMDRSFACQCPEGHVLRSDGKTCAKLDSCALGDHGCEHSCVSSEDSFVCQCFEGYILREDGKTCRRKDVCQAIDHGCEHICVNSDDSYTCECLEGFRLAEDGKRCRRKDVCKSTHHGCEHICVNNGNSYICKCSEGFVLAEDGRRCKKCTEGPIDLVFVIDGSKSLGEENFEVVKQFVTGIIDSLTISPKAARVGLLQYSTQVHTEFTLRNFNSAKDMKKAVAHMKYMGKGSMTGLALKHMFERSFTQGEGARPLSTRVPRAAIVFTDGRAQDDVSEWASKAKANGITMYAVGVGKAIEEELQEIASEPTNKHLFYAEDFSTMDEISEKLKKGICEALEDSDGRQDSPAGELPKTVQQPTESEPVTINIQDLLSCSNFAVQHRYLFEEDNLLRSTQKLSHSTKPSGSPLEEKHDQCKCENLIMFQNLANEEVRKLTQRLEEMTQRMEALENRLRYR

SEQ ID NO: 1522 - protein, 437 aa, Homo sapiens
MAAPSWRGARLVQSVLRVWQVGPHVARERVIPFSSLLGFQRRCVSCVAGSAFSGPRLASASRSNGQGSALDHFLGFSQPDSSVTPCVPAVSMNRDEQDVLLVHHPDMPENSRVLRVVLLGAPNAGKSTLSNQLLGRKVFPVSRKVHTTRCQALGVITEKETQVILLDTPGIISPGKQKRHHLELSLLEDPWKSMESADLVVVLVDVSDKWTRNQLSPQLLRCLTKYSQIPSVLVMNKVDCLKQKSVLLELTAALTEGVVNGKKLKMRQAFHSHPGTHCPSPAVKDPNTQSVGNPQRIGWPHFKEIFMLSALSQEDVKTLKQYLLTQAQPGPWEYHSAVLTSQTPEEICANIIREKLLEHLPQEVPYNVQQKTAVWEEGPGGELVIQQKLLVPKESYVKLLIGPKGHVISQIAQEAGHDLMDIFLCDVDIRLSVKLLK

SEQ ID NO: 1523 - protein, 180 aa, Homo sapiens
MRPLTEEETRVMFEKIAKYIGENLQLLVDRPDGTYCFRLHNDRVYYVSEKIMKLAANISGDKLVSLGTCFGKFTKTHKFRLHVTALDYLAPYAKYKVWIKPGAEQSFLYGNHVLKSGLGRITENTSQYQGVVVYSMADIPLGFGVAAKSTQDCRKVDPMAIVVFHQADIGEYVRHEETLT

SEQ ID NO: 1524 - protein, 437 aa, Homo sapiens
MTTSTLQKAIDLVTKATEEDKAKNYEEALRLYQHAVEYFLHAIKYEAHSDKAKESIRAKCVQYLDRAEKLKDYLRSKEKHGKKPVKENQSEGKGSDSDSEGDNPEKKKLQEQLMGAVVMEKPNIRWNDVAGLEGAKEALKEAVILPIKFPHLFTGKRTPWRGILLFGPPGTGKSYLAKAVATEANNSTFFSVSSSDLMSKWLGESEKLVKNLFELARQHKPSIIFIDEVDSLCGSRNENESEAARRIKTEFLVQMQGVGNNNDGTLVLGATNIPWVLDSAIRRRFEKRIYIPLPEEAARAQMFRLHLGSTPHNLTDANIHELARKTEGYSGADISIIVRDSLMQPVRKVQSATHFKKVCGPSRTNPSMMIDDLLTPCSPGDPGAMEMTWMDVPGDKLLEPVVCMSDMLRSLATTRPTVNADDLLKVKKFSEDFGQES

SEQ ID NO: 1525 - protein, 1218 aa, Homo sapiens
MRSPRTRGRSGRPLSLLLALLCALRAKVCGASGQFELEILSMQNVNGELQNGNCCGGARNPGDRKCTRDECDTYFKVCLKEYQSRVTAGGPCSFGSGSTPVIGGNTFNLKASRGNDRNRIVLPFSFAWPRSYTLLVEAWDSSNDTVQPDSIIEKASHSGMINPSRQWQTLKQNTGVAHFEYQIRVTCDDYYYGFGCNKFCRPRDDFFGHYACDQNGNKTCMEGWMGPECNRAICRQGCSPKHGSCKLPGDCRCQYGWQGLYCDKCIPHPGCVHGICNEPWQCLCETNWGGQLCDKDLNYCGTHQPCLNGGTCSNTGPDKYQCSCPEGYSGPNCEIAEHACLSDPCHNRGSCKETSLGFECECSPGWTGPTCSTNIDDCSPNNCSHGGTCQDLVNGFKCVCPPQWTGKTCQLDANECEAKPCVNAKSCKNLIASYYCDCLPGWMGQNCDININDCLGQCQNDASCRDLVNGYRCICPPGYAGDHCERDIDECASNPCLNGGHCQNEINRFQCLCPTGFSGNLCQLDIDYCEPNPCQNGAQCYNRASDYFCKCPEDYEGKNCSHLKDHCRTTPCEVIDSCTVAMASNDTPEGVRYISSNVCGPHGKCKSQSGGKFTCDCNKGFTGTYCHENINDCESNPCRNGGTCIDGVNSYKCICSDGWEGAYCETNINDCSQNPCHNGGTCRDLVNDFYCDCKNGWKGKTCHSRDSQCDEATCNNGGTCYDEGDAFKCMCPGGWEGTTCNIARNSSCLPNPCHNGGTCVVNGESFTCVCKEGWEGPICAQNTNDCSPHPCYNSGTCVDGDNWYRCECAPGFAGPDCRININECQSSPCAFGATCVDEINGYRCVCPPGHSGAKCQEVSGRPCITMGSVIPDGAKWDDDCNTCQCLNGRIACSKVWCGPRPCLLHKGHSECPSGQSCIPILDDQCFVHPCTGVGECRSSSLQPVKTKCTSDSYYQDNCANITFTFNKEMMSPGLTTEHICSELRNLNILKNVSAEYSIYIACEPSPSANNEIHVAISAEDIRDDGNPIKEITDKIIDLVSKRDGNSSLIAAVAEVRVQRRPLKNRTDFLVPLLSSVLTVAWICCLVTAFYWCLRKRRKPGSHTHSASEDNTTNNVREQLNQIKNPIEKHGANTVPIKDYENKNSKMSKIRTHNSEVEEDDMDKHQQKARFAKQPAYTLVDREEKPPNGTPTKHPNWTNKQDNRDLESAQSLNRMEYIV

SEQ ID NO: 1526 - protein, 468 aa, Homo sapiens
MGTATPDGREDQERLWVSVEDAQMHTVTIWLTVRPDMTVASLKDMVFLDYGFPPVLQQWVIGQRLARDQETLHSHGVRQNGDSAYLYLLSARNTSLNPQELQRERQLRMLEDLGFKDLTLQPRGPLEPGPPKPGVPQEPGRGQPDAVPEPPPVGWQCPGCTFINKPTRPGCEMCCRARPEAYQVPASYQPDEEERARLAGEEEALRQYQQRKQQQQEGNYLQHVQLDQRSLVLNTEPAECPVCYSVLAPGEAVVLRECLHTFCRECLQGTIRNSQEAEVSCPFIDNTYSCSGKLLEREIKALLTPEDYQRFLDLGISIAENRSAFSYHCKTPDCKGWCFFEDDVNEFTCPVCFHVNCLLCKAIHEQMNCKEYQEDLALRAQNDVAARQTTEMLKVMLQQGEAMRCPQCQIVVQKKDGCDWIRCTVCHTEICWVTKGPRWGPGGPGDTSGGCRCRVNGIPCHPSCQNCH

SEQ ID NO: 1527 - protein, 461 aa, Homo sapiens
MAADIFPRKKPANSSSTSVQQYHQQNLSNNNLIPAPNWQGLYPTIRERNAMMFNNDLMADVHFVVGPPGGTQRLPGHKYVLAVGSSVFHAMFYGELAEDKDEIRIPDVEPAAFLAMLKYIYCDEIDLAADTVLATLYAAKKYIVPHLARACVNFLETSLSAKNACVLLSQSCLFEEPDLTQRCWEVIDAQAELALKSEGFCDIDFQTLESILRRETLNAKEIVVFEAALNWAEVECQRQDLALSIENKRKVLGKALYLIRIPTMALDDFANGAAQSGVLTLNETNDIFLWYTAAKKPELQFVSKARKGLVPQRCHRFQSCAYRSNQWRYRGRCDSIQFAVDKRVFIAGFGLYGSSCGSAEYSAKIELKRQGVVLGQNLSKYFSDGSSNTFPVWFEYPVQIEPDTFYTASVILDGNELSYFGQEGMTEVQCGKVTVQFQCSSDSTNGTGVQGGQIPELIFYA

SEQ ID NO: 1528 - protein, 140 aa, Homo sapiens
MASVDFKTYVDQACRAAEEFVNVYYTTMDKRRRLLSRLYMGTATLVWNGNAVSGQESLSEFFEMLPSSEFQISVVDCQPVHDEATPSQTTVLVVICGSVKFEGNKQRDFNQNFILTAQASPSNTVWKIASDCFRFQDWAS

SEQ ID NO: 1529 - protein, 224 aa, Homo sapiens
MEKLLCFLVLTSLSHAFGQTDMSRKAFVFPKESDTSYVSLKAPLTKPLKAFTVCLHFYTELSSTRGYSIFSYATKRQDNEILIFWSKDIGYSFTVGGSEILFEVPEVTVAPVHICTSWESASGIVEFWVDGKPRVRKSLKKGYTVGAEASIILGQEQDSFGGNFEGSQSLVGDIGNVNMWDFVLSPDEINTIYLGGPFSPNVLNWRALKYEVQGEVFTKPQLWP

SEQ ID NO: 1530 - protein, 340 aa, Homo sapiens
MPGWLTLPTLCRFLLWAFTIFHKAQGDPASHPGPHYLLPPIHEVIHSHRGATATLPCVLGTTPPSYKVRWSKVEPGELRETLILITNGLHARGYGPLGGRARMRRGHRLDASLVIAGVRLEDEGRYRCELINGIEDESVALTLSLEGVVFPYQPSRGRYQFNYYEAKQACEEQDGRLATYSQLYQAWTEGLDWCNAGWLLEGSVRYPVLTARAPCGGRGRPGIRSYGPRDRMRDRYDAFCFTSALAGQVFFVPGRLTLSEAHAACRRRGAVVAKVGHLYAAWKFSGLDQCDGGWLADGSVRFPITTPRPRCGGLPDPGVRSFGFPRPQQAAYGTYCYAEN

SEQ ID NO: 1531 - protein, 223 aa, Homo sapiens
MNKPLLWISVLTSLLEAFAHTDLSGKVFVFPRESVTDHVNLITPLEKPLQNFTLCFRAYSDLSRAYSLFSYNTQGRDNELLVYKERVGEYSLYIGRHKVTSKVIEKFPAPVHICVSWESSSGIAEFWINGTPLVKKGLRQGYFVEAQPKIVLGQEQDSYGGKFDRSQSFVGEIGDLYMWDSVLPPENILSAYQGTPLPANILDWQALNYEIRGYVIIKPLVWV

SEQ ID NO: 1532 - protein, 993 aa, Homo sapiens
MASAAVESFVTKQLDLLELERDAEVEERRSWQENISLKELQSRGVCLLKLQVSSQRTGLYGRLLVTFEPRRYGSAAALPSNSFTSGDIVGLYDAANEGSQLATGILTRVTQKSVTVAFDESHDFQLSLDRENSYRLLKLANDVTYRRLKKALIALKKYHSGPASSLIEVLFGRSAPSPASEIHPLTFFNTCLDTSQKEAVLFALSQKELAIIHGPPGTGKTTTVVEIILQAVKQGLKVLCCAPSNIAVDNLVERLALCKQRILRLGHPARLLESIQQHSLDAVLARSDSAQIVADIRKDIDQVFVKNKKTQDKREKSNFRNEIKLLRKELKEREEAAMLESLTSANVVLATNTGASADGPLKLLPESYFDVVVIDECAQALEASCWIPLLKARKCILAGDHKQLPPTTVSHKAALAGLSLSLMERLAEEYGARVVRTLTVQYRMHQAIMRWASDTMYLGQLTAHSSVARHLLRDLPGVAATEETGVPLLLVDTAGCGLFELEEEDEQSKGNPGEVRLVSLHIQALVDAGVPARDIAVVSPYNLQVDLLRQSLVHRHPELEIKSVDGFQGREKEAVILSFVRSNRKGEVGFLAEDRRINVAVTRARRHVAVICDSRTVNNHAFLKTLVEYFTQHGEVRTAFEYLDDIVPENYSHENSQGSSHAATKPQGPATSTRTGSQRQEGGQEAAAPARQGRKKPAGKSLASEAPSQPSLNGGSPEGVESQDGVDHFRAMIVEFMASKKMQLEFPPSLNSHDRLRVHQIAEEHGLRHDSSGEGKRRFITVSKRAPRPRAALGPPAGTGGPAPLQPVPPTPAQTEQPPREQRGPDQPDLRTLHLERLQRVRSAQGQPASKEQQASGQQKLPEKKKKKAKGHPATDLPTEEDFEALVSAAVKADNTCGFAKCTAGVTTLGQFCQLCSRRYCLSHHLPEIHGCGERARAHARQRISREGVLYAGSGTKNGSLDPAKRAQLQRRLDKKLSELSNQRTSRRKERGT

SEQ ID NO: 1533 - protein, 489 aa, Homo sapiens
MESMFSSPAEAALQRETGVPGLLTPLPDLDGVYELERVAGFVRDLGCERVALQFPDQLLGDAVAVAARLEETTGSKMFILGDTAYGSCCVDVLGAEQAGAQALIHFGPACLSPPARPLPVAFVLRQRSVALELCVKAFEAQNPDPKAPVVLLSEPACAHALEALATLLRPRYLDLLVSSPAFPQPVGSLSPEPMPLERFGRRFPLAPGRRLEEYGAFYVGGSKASPDPDLDPDLSRLLLGWAPGQPFSSCCPDTGKTQDEGARAGRLRARRRYLVERARDARVVGLLAGTLGVAQHREALAHLRNLTQAAGKRSYVLALGRPTPAKLANFPEVDVFVLLACPLGALAPQLSGSFFQPILAPCELEAACNPAWPPPGLAPHLTHYADLLPGSPFHVALPPPESELWETPDVSLITGDLRPPPAWKSSNDHGSLALTPRPQLELAESSPAASFLSSRSWQGLEPRLGQTPVTEAVSGRRGIAIAYEDEGSG

SEQ ID NO: 1534 - protein, 614 aa, Homo sapiens
MNASGSGYPLASLYVGDLHPDVTEAMLYEKFSPAGPILSIRVCRDVATRRSLGYAYINFQQPADAERALDTMNFEMLKGQPIRIMWSQRDPGLRKSGVGNIFIKNLEDSIDNKALYDTFSTFGNILSCKVACDEHGSRGFGFVHFETHEAAQQAINTMNGMLLNDRKVFVGHFKSRREREAELGARALEFTNIYVKNLPVDVDEQGLQDLFSQFGKMLSVKVMRDNSGHSRCFGFVNFEKHEEAQKAVVHMNGKEVSGRLLYAGRAQKRVERQNELKRRFEQMKQDRLRRYQGVNLYVKNLDDSIDDDKLRKEFSPYGVITSAKVMTEGGHSKGFGFVCFSSPEEATKAVTEMNGRIVGTKPLYVALAQRKEERKAILTNQYMQRLSTMRTLSNPLLGSFQQPSSYFLPAMPQPPAQAAYYGCGPVTPTQPAPRWTSQPPRPSCASMVRPPVVPRRPPAHISSVRQASTQVPRTVPHTQRVANIGTQTTGPSGVGCCTPGRPLLPCKCSSAAHSTYRVQEPAVHIPGQEPLTASMLAAAPLHEQKQMIGERLYPLIHDVHTQLAGKITGMLLEIDNSELLLMLESPESLHAKIDEAVAVLQAHQAMEQPKAYMH

SEQ ID NO: 1535 - protein, 696 aa, Homo sapiens
MELGSCFKTYEDFKECFSAYKRENRCSFILRDCVSVRFHNLNHGTSIREDILYVQVKFVCIRTQSNRKRTREADMCPAYLLLRYNERLDRLFISELNTQHIHGDSKVASPGGDTTGKSQKTMCLQRLQPVQPTTKKDLDTAEKSLVEPSFCLDKVQVSSKPEQEGITPSDLAKIAKVMKNFLKVDEGSMASFSVGDSQHLDRLSFQSSKMTDLFIRFPENLLLHRVENTQGHILYAFLVENKERESRVVHFAVLKAETVTSVAKMLSIFTEFNSDWPKVKVVFVDPSFHYRAILQEIFPAARILLSIYHTTRLLEKKLHRSSANPSFKRLMKEALREAVFVTSEASLKNLCQMSQAVLDEDLFNFLQAHWFTCELLWYMHVRKGLLACNTYMDSLDIVTSKVSSLFREQQSLLDCILCFVDYIDFFNTKGLKNLPTPPPKLKRARPASMPLKSKKAFGICGESLTSLPAEETKPDAQQVQVQQQSQVPPSQVGMLDTLHQSGSELAYKLCHNEWEVVQNSTHLVDMAGSSVDVQLLEDSHQVSKDGCSCSCSFQQWYHLPCRHILALLHTSQQPVGEAMVCRRWQKKYQYLLGPNGELQDRGMVPNTGQPEKQGRNDMIQDLSRELANLLMQTEGPELEERYSTLRKIVDIWAGPSQPSELFQQPGDFKDVGRLPFLWGKQEEGEGFPPATAVMHY

SEQ ID NO: 1536 - protein, 292 aa, Homo sapiens
MKSEAKDGEEESLQTAFKKLRVDASGSVASLSVGEGTGVRAPVRTATDDTKPKTTCASKDSWHGSTRKSSRGAVRTQRRRRSKSPVLHPPKFIHCSTIASSSSSQLKHKSQTDSPDGSSGLGISSPKEFSAGESSTSLDANHTGAVVEPLRTSVPRLPSESKKEDSSDATQVPQASLKASDLSDFQSVSKLNQGKPCTCIGKECQCKRWHDMEVYSFSGLQSVPPLAPERRSTLEDYSQSLHARTLSGSPRSCSEQARVFVDDVTIEDLSGYMEYYLYIPKKMSHMAEMMYT

SEQ ID NO: 1537 - protein, 473 aa, Homo sapiens
MGAVLGVFSLASWVPCLCSGASCLLCSCCPNSKNSTVTRLIYAFILLLSTVVSYIMQRKEMETYLKKIPGFCEGGFKIHEADINADKDCDVLVGYKAVYRISFAMAIFFFVFSLLMFKVKTSKDLRAAVHNGFWFFKIAALIGIMVGSFYIPGGYFSSVWFVVGMIGAALFILIQLVLLVDFAHSWNESWVNRMEEGNPRLWYAALLSFTSAFYILSIICVGLLYTYYTKPDGCTENKFFISINLILCVVASIISIHPKIQEHQPRSGLLQSSLITLYTMYLTWSAMSNEPDRSCNPNLMSFITRITAPTLAPGNSTAVVPTPTPPSKSGSLLDSDNFIGLFVFVLCLLYSSIRTSTNSQVDKLTLSGSDSVILGDTTTSGASDEEDGQPRRAVDNEKEGVQYSYSLFHLMLCLASLYIMMTLTSWYSPDAKFQSMTSKWPAVWVKISSSWVCLLLYVWTLVAPLVLTSRDFS

SEQ ID NO: 1538 - protein, 866 aa, Homo sapiens
MLRPGAQLLRGLLLRSCPLQGSPGRPRSVCGREGEEKPPLSAETQWKDRAETVIIGGGCVGVSLAYHLAKAGMKDVVLLEKSELTAGSTWHAAGLTTYFHPGINLKKIHYDSIKLYEKLEEETGQVVGFHQPGSIRLATTPVRVDEFKYQMTRTGWHATEQYLIEPEKIQEMFPLLNMNKVLAGLYNPGDGHIDPYSLTMALAAGARKCGALLKYPAPVTSLKARSDGTWDVETPQGSMRANRIVNAAGFWAREVGKMIGLEHPLIPVQHQYVVTSTISEVKALKRELPVLRDLEGSYYLRQERDGLLFGPYESQEKMKVQDSWVTNGVPPGFGKELFESDLDRIMEHIKAAMEMVPVLKKADIINVVNGPITYSPDILPMVGPHQGVRNYWVAIGFGYGIIHAGGVGKYLSDWILHGEPPFDLIELDPNRYGKWTTTQYTEAKARESYGFNNIVGYPKEERFAGRPTQRVSGLYQRLESKCSMGFHAGWEQPHWFYKPGQDTQYRPSFRRTNWFEPVGSEYKQVMQRVAVTDLSPFGKFNIKGQDSIRLLDHLFANVIPKVGFTNISHMLTPKGRVYAELTVSHQSPGEFLLITGSGSELHDLRWIEEEAVKGGYDVEIKNITDELGVLGVAGPQARKVLQKLTSEDLSDDVFKFLQTKSLKVSNIPVTAIRISYTGELGWELYHRREDSVALYDAIMNAGQEEGIDNFGTYAMNALRLEKAFRAWGLEMNCDTNPLEAGLEYFVKLNKPADFIGKQALKQIKAKGLKRRLVCLTLATDDVDPEGNESIWYNGKVVGNTTSGSYSYSIQKSLAFAYVPVQLSEVGQQVEVELLGKNYPAVIIQEPLVLTEPTRNRLQKKGGKDKT

SEQ ID NO: 1539 - protein, 1094 aa, Homo sapiens
MSSNSFPYNEQSGGGEATELGQEATSTISPSGAFGLFSSDLKKNEDLKQMLESNKDSAKLDAMKRIVGMIAKGKNASELFPAVVKNVASKNIEIKKLVYVYLVRYAEEQQDLALLSISTFQRALKDPNQLIRASALRVLSSIRVPIIVPIMMLAIKEASADLSPYVRKNAAHAIQKLYSLDPEQKEMLIEVIEKLLKDKSTLVAGSVVMAFEEVCPDRIDLIHKNYRKLCNLLVDVEEWGQVVIIHMLTRYARTQFVSPWKEGDELEDNGKNFYESDDDQKEKTDKKKKPYTMDPDHRLLIRNTKPLLQSRNAAVVMAVAQLYWHISPKSEAGIISKSLVRLLRSNREVQYIVLQNIATMSIQRKGMFEPYLKSFYVRSTDPTMIKTLKLEILTNLANEANISTLLREFQTYVKSQDKQFAAATIQTIGRCATNILEVTDTCLNGLVCLLSNRDEIVVAESVVVIKKLLQMQPAQHGEIIKHMAKLLDSITVPVARASILWLIGENCERVPKIAPDVLRKMAKSFTSEDDLVKLQILNLGAKLYLTNSKQTKLLTQYILNLGKYDQNYDIRDRTRFIRQLIVPNVKSGALSKYAKKIFLAQKPAPLLESPFKDRDHFQLGTLSHTLNIKATGYLELSNWPEVAPDPSVRNVEVIELAKEWTPAGKAKQENSAKKFYSESEEEEDSSDSSSDSESESGSESGEQGESGEEGDSNEDSSEDSSSEQDSESGRESGLENKRTAKRNSKAKGKSDSEDGEKENEKSKTSDSSNDESSSIEDSSSDSESESEPESESESRRVTKEKEKKTKQDRTPLTKDVSLLDLDDFNPVSTPVALPTPALSPSLMADLEGLHLSTSSSVISVSTPAFVPTKTHVLLHRMSGKGLAAHYFFPRQPCIFGDKMVSIQITLNNTTDRKIENIHIGEKKLPIGMKMHVFNPIDSLEPEGSITVSMGIDFCDSTQTASFQLCTKDDCFNVNIQPPVGELLLPVAMSEKDFKKEQGVLTGMNETSAVIIAAPQNFTPSVIFQKVVNVANVGAVPSGQDNIHRFAAKTVHSGSLMLVTVELKEGSTAQLIINTEKTVIGSVLLRELKPVLSQG

SEQ ID NO: 1540 - protein, 236 aa, Homo sapiens
MKRSGNPGAEVTNSSVAGPDCCGGLGNIDFRQADFCVMTRLLGYVDPLDPSFVAAVITITFNPLYWNVVARWEHKTRKLSRAFGSPYLACYSLSVTILLLNFLRSHCFTQAMLSQPRMESLDTPAAYSLGLALLGLGVVLVLSSFFALGFAGTFLGDYFGILKEARVTVFPFNILDNPMYWGSTANYLGWAIMHASPTGLLLTVLVALTYIVALLYEEPFTAEIYRQKASGSHKRS

SEQ ID NO: 1541 - protein, 301 aa, Homo sapiens
MAMLVLVPGRVMRPLGGQLWRFLPRGLEFWGPAEGTARVLLRQFCARQAEAWRASGRPGYCLGTRPLSTARPPPPWSQKGPGDSTRPSKPGPVSWKSLAITFAIGGALLAGMKHVKKEKAEKLEKERQRHIGKPLLGGPFSLTTHTGERKTDKDYLGQWLLIYFGFTHCPDVCPEELEKMIQVVDEIDSITTLPDLTPLFISIDPERDTKEAIANYVKEFSPKLVGLTGTREEVDQVARAYRVYYSPGPKDEDEDYIVDHTIIMYLIGPDGEFLDYFGQNKRKGEIAASIATHMRPYRKKS

SEQ ID NO: 1542 - protein, 383 aa, Homo sapiens
MGVKASQTGFVVLVLLQCCSAYKLVCYYTSWSQYREGDGSCFPDALDRFLCTHIIYSFANISNDHIDTWEWNDVTLYGMLNTLKNRNPNLKTLLSVGGWNFGSQRFSKIASNTQSRRTFIKSVPPFLRTHGFDGLDLAWLYPGRRDKQHFTTLIKEMKAEFIKEAQPGKKQLLLSAALSAGKVTIDSSYDIAKISQHLDFISIMTYDFHGAWRGTTGHHSPLFRGQEDASPDRFSNTDYAVGYMLRLGAPASKLVMGIPTFGRSFTLASSETGVGAPISGPGIPGRFTKEAGTLAYYEICDFLRGATVHRILGQQVPYATKGNQWVGYDDQESVKSKVQYLKDRQLAGAMVWALDLDDFQGSFCGQDLRFPLTNAIKDALAAT

SEQ ID NO: 1543 - protein, 729 aa, Homo sapiens
MSFGRDMELEHFDERDKAQRYSRGSRVNGLPSPTHSAHCSFYRTRTLQTLSSEKKAKKVRFYRNGDRYFKGIVYAISPDRFRSFEALLADLTRTLSDNVNLPQGVRTIYTIDGLKKISSLDQLVEGESYVCGSIEPFKKLEYTKNVNPNWSVNVKTTSASRAVSSLATAKGSPSEVRENKDFIRPKLVTIIRSGVKPRKAVRILLNKKTAHSFEQVLTDITDAIKLDSGVVKRLYTLDGKQVMCLQDFFGDDDIFIACGPEKFRYQDDFLLDESECRVVKSTSYTKIASSSRRSTTKSPGPSRRSKSPASTSSVNGTPGSQLSTPRSGKSPSPSPTSPGSLRKQRSSQHGGSSTSLASTKVCSSMDENDGPGEEVSEEGFQIPATITERYKVGRTIGDGNFAVVKECVERSTAREYALKIIKKSKCRGKEHMIQNEVSILRRVKHPNIVLLIEEMDVPTELYLVMELVKGGDLFDAITSTNKYTERDASGMLYNLASAIKYLHSLNIVHRDIKPENLLVYEHQDGSKSLKLGDFGLATIVDGPLYTVCGTPTYVAPEIIAETGYGLKVDIWAAGVITYILLCGFPPFRGSGDDQEVLFDQILMGQVDFPSPYWDNVSDSAKELITMMLLVDVDQRFSAVQVLEHPWVNDDGLPENEHQLSVAGKIKKHFNTGPKPNSTAAGVSVIALDHGFTIKRSGSLDYYQQPGMYWIRPPLLIRRGRFSDEDATRM

SEQ ID NO: 1544 - protein, 900 aa, Homo sapiens
MLLYRGAPAGPGAPGCGLARPGGGPQAFGIRLSTMSPRYLQSNSSSHTRPFSAIAELLDNAVDPDVSARTVFIDVEEVKNKSCLTFTDDGCGMTPHKLHRMLSFGFTDKVIKKSQCPIGVFGNGFKSGSMRLGKDALVFTKNGGTLTVGLLSQTYLECVQAQAVIVPIVPFNQQNKKMIITEDSLPSLEAILNYSIFNRENDLLAQFDAIPGKKGTRVLIWNIRRNKNGKSELDFDTDQYDILVSDFDTEEKMTGGVTSELPETEYSLRAFCGILYMKPRMKIFLRQKKVTTQMIAKSLANVEYDTYKPTFTNKQVRITFGFSCKNSNQFGIMMYHNNRLIKSFEKVGCQVKPTRGEGVGVIGVIECNFLKPAYNKQDFEYTKEYRLTINALAQKLNAYWKEKTSQDNFETSTVARPIPKVPDQTWVQCDECLKWRKLPGKIDPSMLPARWFCYYNSHPKYRRCSVPEEQELTDEDLCLSKAKKQEQTVEEKKKMPMENENHQVFSNPPKILTVQEMAGLNNKTIGYEGIHSPSVLPSGGEESRSPSLQLKPLDSSVLQFSSKYKWILGEEPVEKRRRLQNEMTTPSLDYSMPAPYRRVEAPVAYPEGENSHDKSSSERSTPPYLFPEYPEASKNTGQNREVSILYPGAKDQRQGSLLPEELEDQMPRLVAEESNRGSTTINKEEVNKGPFVAVVGVAKGVRDSGAPIQLIPFNREELAERRKAVESWNPVPYSVASAAIPAAAIGEKARGYEESEGHNTPKLKNQRELEELKRTTEKLERVLAERNLFQQKVEELEQERNHWQSEFKKVQHELVIYSTQEAEGLYWSKKHMGYRQAEFQILKAELERTKEEKQELKEKLKETETHLEMLQKAQGFGKAYAATYPRQLSPYFCPPSLGAS

SEQ ID NO: 1545 - protein, 428 aa, Homo sapiens
MGPPPGAGVSCRGGCGFSRLLAWCFLLALSPQAPGSRGAEAVWTAYLNVSWRVPHTGVNRTVWELSEEGVYGQDSPLEPVAGVLVPPDGPGALNACNPHTNFTVPTVWGSTVQVSWLALIQRGGGCTFADKIHLAYERGASGAVIFNFPGTRNEVIPMSHPGAVDIVAIMIGNLKGTKILQSIQRGIQVTMVIEVGKKHGPWVNHYSIFFVSVSFFIITAATVGYFIFYSARRLRNARAQSRKQRQLKADAKKAIGRLQLRTLKQGDKEIGPDGDSCAVCIELYKPNDLVRILTCNHIFHKTCVDPWLLEHRTCPMCKCDILKALGIEVDVEDGSVSLQVPVSNEISNSASSHEEDNRSETASSGYASVQGTDEPPLEEHVQSTNESLQLVNHEANSVAVDVIPHVDNPTFEEDETPNQETAVREIKS

SEQ ID NO: 1546 - protein, 1101 aa, Homo sapiens
MESLLLPVLLLLAILWTQAAALINLKYSVEEEQRAGTVIANVAKDAREAGFALDPRQASAFRVVSNSAPHLVDINPSSGLLVTKQKIDRDLLCRQSPKCIISLEVMSSSMEICVIKVEIKDLNDNAPSFPAAQIELEISEAASPGTRIPLDSAYDPDSGSFGVQTYELTPNELFGLEIKTRGDGSRFAELVVEKSLDRETQSHYSFRITALDGGDPPRLGTVGLSIKVTDSNDNNPVFSESTYAVSVPENSPPNTPVIRLNASDPDEGTNGQVVYSFYGYVNDRTRELFQIDPHSGLVTVTGALDYEEGHVYELDVQAKDLGPNSIPAHCKVTVSVLDTNDNPPVINLLSVNSELVEVSESAPPGYVIALVRVSDRDSGLNGRVQCRLLGNVPFRLQEYESFSTILVDGRLDREQHDQYNLTIQARDGGVPMLQSAKSFTVLITDENDNHPHFSKPYYQVIVQENNTPGAYLLSVSARDPDLGLNGSVSYQIVPSQVRDMPVFTYVSINPNSGDIYALRSFNHEQTKAFEFKVLAKDGGLPSLQSNATVRVIILDVNDNTPVITAPPLINGTAEVYIPRNSGIGYLVTVVKAEDYDEGENGRVTYDMTEGDRGFFEIDQVNGEVRTTRTFGESSKSSYELIVVAHDHGKTSLSASALVLIYLSPALDAQESMGSVNLSLIFIIALGSIAGILFVTMIFVAIKCKRDNKEIRTYNCRIAEYSYGHQKKSSKKKKISKNDIRLVPRDVEETDKMNVVSCSSLTSSLNYFDYHQQTLPLGCRRSESTFLNVENQNTRNTSANHIYHHSFNSQGPQQPDLIINGVPLPETENYSFDSNYVNSRAHLIKSSSTFKDLEGNSLKDSGHEESDQTDSEHDVQRSLYCDTAVNDVLNTSVTSMGSQMPDHDQNEGFHCREECRILGHSDRCWMPRNPMPIRSKSPEHVRNIIALSIEATAADVEAYDDCGPTKRTFATFGKDVSDHPAEERPTLKGKRTVDVTICSPKVNSVIREAGNGCEAISPVTSPLHLKSSLPTKPSVSYTIALAPPARDLEQYVNNVNNGPTRPSEAEPRGADSEKVMHEVSPILKEGRNKESPGVKRLKDIVL

SEQ ID NO: 1547 - protein, 335 aa, Homo sapiens
MLQGHSSVFQALLGTFFTWGMTAAGAALVFVFSSGQRRILDGSLGFAAGVMLAASYWSLLAPAVEMATSSGGFGAFAFFPVAVGFTLGAAFVYLADLLMPHLGAAEDPQTTLALNFGSTLMKKKSDPEGPALLFPESELSIRIDKSENGEAYQRKKAAATGLPEGPAVPVPSRGNLAQPGGSSWRRIALLILAITIHNVPEGLAVGVGFGAIEKTASATFESARNLAIGIGIQNFPEGLAVSLPLRGAGFSTWRAFWYGQLSGMVEPLAGVFGAFAVVLAEPILPYALAFAAGAMVYVVMDDIIPEAQISGNGKLASWASILGFVVMMSLDVGLG

SEQ ID NO: 1548 - protein, 525 aa, Homo sapiens
MAAGGSGGRASCPPGVGVGPGTGGSPGPSANAAATPAPGNAAAAAAAAAAAAAAPGPTPPAPPGPGTDAQAAGAERAEEAAGPGAAALQREAAYNWQASKPTVQERFAFLFNNEVLCDVHFLVGKGLSSQRIPAHRFVLAVGSAVFDAMFNGGMATTSTEIELPDVEPAAFLALLKFLYSDEVQIGPETVMTTLYTAKKYAVPALEAHCVEFLKKNLRADNAFMLLTQARLFDEPQLASLCLENIDKNTADAITAEGFTDIDLDTLVAVLERDTLGIREVRLFNAVVRWSEAECQRQQLQVTPENRRKVLGKALGLIRFPLMTIEEFAAGPAQSGILVDREVVSLFLHFTVNPKPRVEFIDRPRCCLRGKECSINRFQQVESRWGYSGTSDRIRFSVNKRIFVVGFGLYGSIHGPTDYQVNIQIIHTDSNTVLGQNDTGFSCDGSASTFRVMFKEPVEVLPNVNYTACATLKGPDSHYGTKGLRKVTHESPTTGAKTCFTFCYAAGNNNGTSVEDGQIPEVIFYT

SEQ ID NO: 1549 - protein, 312 aa, Homo sapiens
MEEKPSGPIPDMLATAEPSSSETDKEVLSPAVPAAAPSSSMSEEPGPEQAATPPVWERGGAGGMQQGSSPAPDSCQPGPGPSPGLTSIVSGTSEDLRPPRRRPPPGKQIPCSSPGCCLSFPSVRDLAQHLRTHCPPTQSLEGKLFRCSALSCTETFPSMQELVAHSKLHYKPNRYFKCENCLLRFRTHRSLFKHLHVCAEHAQSPAPPPPPALDREPPAPERPPEVDPASAPGLPFPLLEPFTTPAPAPTGPFLPYLNPAPFGLSPPRLRPFLAAAPGPPASSAAVWKKSQGAGSSPRRPQGGSDAPSGACR

SEQ ID NO: 1550 - protein, 359 aa, Homo sapiens
MSDEGSRGSRLPLALPPASQGCSSGGGGGGSSAGGSGNSRPPRNLQGLLQMAITAGSEEPDPPPEPMSEERRQWLQEAMSAAFRGQREEVEQMKSCLRVLSQPMPPTAGEAEQAADQQEREGALELLADLCENMDNAADFCQLSGMHLLVGRYLEAGAAGLRWRAAQLIGTCSQNVAAIQEQVLGLGALRKLLRLLDRDACDTVRVKALFAISCLVREQEAGLLQFLRLDGFSVLMRAMQQQVQKLKVKSAFLLQNLLVGHPEHKGTLCSMGMVQQLVALVRTEHSPFHEHVLGALCSLVTDFPQGVRECREPELGLEELLRHRCQLLQQHEEYQEELEFCEKLLQTCFSSPADDSMDR

SEQ ID NO: 1551 - protein, 415 aa, Homo sapiens
MDFDKKGGKGETEEGRRMSKAGGGRSSHGIRSSGTSSGVLMVGPNFRVGKKIGCGNFGELRLGKNLYTNEYVAIKLEPIKSRAPQLHLEYRFYKQLSATEGVPQVYYFGPCGKYNAMVLELLGPSLEDLFDLCDRTFTLKTVLMIAIQLITRMEYVHTKSLIYRDVKPENFLVGRPGTKRQHAIHIIDFGLAKEYIDPETKKHIPYREHKSLTGTARYMSINTHLGKEQSRRDDLEALGHMFMYFLRGSLPWQGLKADTLKERYQKIGDTKRATPIEVLCENFPEEMATYLRYVRRLDFFEKPDYDYLRKLFTDLFDRSGFVFDYEYDWAGKPLPTPIGTVHTDLPSQPQLRDKTQPHSKNQALNSTNGELNADDPTAGHSNAPITAPAEVEVADETKCCCFFKRRKRKSLQRHK

SEQ ID NO: 1552 - protein, 325 aa, Homo sapiens
MSLQSRLSGRLAQLRAAGQLLVPPRPRPGHLAGATRTRSSTCGPPAFLGVFGRRARTSAGVGAWGAAAVGRTAGVRTWAPLAMAAKVDLSTSTDWKEAKSFLKGLSDKQREEHYFCKDFVRLKKIPTWKEMAKGVAVKVEEPRYKKDKQLNEKISLLRSDITKLEVDAIVNAANSSLLGGGGVDGCIHRAAGPLLTDECRTLQSCKTGKAKITGGYRLPAKYVIHTVGPIAYGEPSASQAAELRSCYLSSLDLLLEHRLRSVAFPCISTGVFGYPCEAAAEIVLATLREWLEQHKDKVDRLIICVFLEKDEDIYRSRLPHYFPVA

SEQ ID NO: 1553 - protein, 164 aa, Homo sapiens
MASPHQEPKPGDLIEIFRLGYEHWALYIGDGYVIHLAPPSEYPGAGSSSVFSVLSNSAEVKRERLEDVVGGCCYRVNNSLDHEYQPRPVEVIISSAKEMVGQKMKYSIVSRNCEHFVTQLRYGKSRCKQVEKAKVEVGVATALGILVVAGCSFAIRRYQKKATA

SEQ ID NO: 1554 - protein, 174 aa, Homo sapiens
MATVAELKAVLKDTLEKKGVLGHLKARIRAEVFNALDDDREPRPSLSHENLLINELIREYLEFNKYKYTASVLIAESGQPVVPLDRQFLIHELNAFEESKDNTIPLLYGILAHFLRGTKDGIQNAFLKGPSLQPSDPSLGRQPSRRKPMDDHLRKEEQKSTNIEDLHVSQAVNR

SEQ ID NO: 1555 - protein, 135 aa, Homo sapiens
MAEKFDHLEEHLEKFVENIRQLGIIVSDFQPSSQAGLNQKLNFIVTGLQDIDKCRQQLHDITVPLEVFEYIDQGRNPQLYTKECLERALAKNEQVKGKIDTMKKFKSLLIQELSKVFPEDMAKYRSIRGEDHPPS

SEQ ID NO: 1556 - protein, 229 aa, Homo sapiens
MDLLQFLAFLFVLLLSGMGATGTLRTSLDPSLEIYKKMFEVKRREQLLALKNLAQLNDIHQQYKILDVMLKGLFKVLEDSRTVLTAADVLPDGPFPQDEKLKDAFSHVVENTAFFGDVVLRFPRIVHYYFDHNSNWNLLIRWGISFCNQTGVFNQGPHSPILSLMAQELGISEKDSNFQNPFKIDRTEFIPSTDPFQKALREEEKRRKKEEKRKEIRKGPRISRSQSEL

SEQ ID NO: 1557 - protein, 2102 aa, Homo sapiens
MAAAPARGGGGGGGGGGGCSGSGSSASRGFYFNTVLSLARSLAVQRPASLEKVQKLLCMCPVDFHGIFQLDERRRDAVIALGIFLIESDLQHKDCVVPYLLRLLKGLPKVYWVEESTARKGRGALPVAESFSFCLVTLLSDVAYRDPSLRDEILEVLLQVLHVLLGMCQALEIQDKEYLCKYAIPCLIGISRAFGRYSNMEESLLSKLFPKIPPHSLRVLEELEGVRRRSFNDFRSILPSNLLTVCQEGTLKRKTSSVSSISQVSPERGMPPPSSPGGSAFHYFEASCLPDGTALEPEYYFSTISSSFSVSPLFNGVTYKEFNIPLEMLRELLNLVKKIVEEAVLKSLDAIVASVMEANPSADLYYTSFSDPLYLTMFKMLRDTLYYMKDLPTSFVKEIHDFVLEQFNTSQGELQKILHDADRIHNELSPLKLRCQANAACVDLMVWAVKDEQGAENLCIKLSEKLQSKTSSKVIIAHLPLLICCLQGLGRLCERFPVVVHSVTPSLRDFLVIPSPVLVKLYKYHSQYHTVAGNDIKISVTNEHSESTLNVMSGKKSQPSMYEQLRDIAIDNICRCLKAGLTVDPVIVEAFLASLSNRLYISQESDKDAHLIPDHTIRALGHIAVALRDTPKVMEPILQILQQKFCQPPSPLDVLIIDQLGCLVITGNQYIYQEVWNLFQQISVKASSVVYSATKDYKDHGYRHCSLAVINALANIAANIQDEHLVDELLMNLLELFVQLGLEGKRASERASEKGPALKASSSAGNLGVLIPVIAVLTRRLPPIKEAKPRLQKLFRDFWLYSVLMGFAVEGSGLWPEEWYEGVCEIATKSPLLTFPSKEPLRSVLQYNSAMKNDTVTPAELSELRSTIINLLDPPPEVSALINKLDFAMSTYLLSVYRLEYMRVLRSTDPDRFQVMFCYFEDKAIQKDKSGMMQCVIAVADKVFDAFLNMMADKAKTKENEEELERHAQFLLVNFNHIHKRIRRVADKYLSGLVDKFPHLLWSGTVLKTMLDILQTLSLSLSADIHKDQPYYDIPDAPYRITVPDTYEARESIVKDFAARCGMILQEAMKWAPTVTKSHLQEYLNKHQNWVSGLSQHTGLAMATESILHFAGYNKQNTTLGATQLSERPACVKKDYSNFMASLNLRNRYAGEVYGMIRFSGTTGQMSDLNKMMVQDLHSALDRSHPQHYTQAMFKLTAMLISSKDCDPQLLHHLCWGPLRMFNEHGMETALACWEWLLAGKDGVEVPFMREMAGAWHMTVEQKFGLFSAEIKEADPLAASEASQPKPCPPEVTPHYIWIDFLVQRFEIAKYCSSDQVEIFSSLLQRSMSLNIGGAKGSMNRHVAAIGPRFKLLTLGLSLLHADVVPNATIRNVLREKIYSTAFDYFSCPPKFPTQGEKRLREDISIMIKFWTAMFSDKKYLTASQLVPPDNQDTRSNLDITVGSRQQATQGWINTYPLSSGMSTISKKSGMSKKTNRGSQLHKYYMKRRTLLLSLLATEIERLITWYNPLSAPELELDQAGENSVANWRSKYISLSEKQWKDNVNLAWSISPYLAVQLPARFKNTEAIGNEVTRLVRLDPGAVSDVPEAIKFLVTWHTIDADAPELSHVLCWAPTDPPTGLSYFSSMYPPHPLTAQYGVKVLRSFPPDAILFYIPQIVQALRYDKMGYVREYILWAASKSQLLAHQFIWNMKTNIYLDEEGHQKDPDIGDLLDQLVEEITGSLSGPAKDFYQREFDFFNKITNVSAIIKPYPKGDERKKACLSALSEVKVQPGCYLPSNPEAIVLDIDYKSGTPMQSAAKAPYLAKFKVKRCGVSELEKEGLRCRSDSEDECSTQEADGQKISWQAAIFKVGDDCRQDMLALQIIDLFKNIFQLVGLDLFVFPYRVVATAPGCGVIECIPDCTSRDQLGRQTDFGMYDYFTRQYGDESTLAFQQARYNFIRSMAAYSLLLFLLQIKDRHNGNIMLDKKGHIIHIDFGFMFESSPGGNLGWEPDIKLTDEMVMIMGGKMEATPFKWFMEMCVRGYLAVRPYMDAVVSLVTLMLDTGLPCFRGQTIKLLKHRFSPNMTEREAANFIMKVIQSCFLSNRSRTYDMIQYYQNDIPY

SEQ ID NO: 1558 - protein, 482 aa, Homo sapiens
MAEAATPGTTATTSGAGAAAATAAAASPTPIPTVTAPSLGAGGGGGGSDGSGGGWTKQVTCRYFMHGVCKEGDNCRYSHDLSDSPYSVVCKYFQRGYCIYGDRCRYEHSKPLKQEEATATELTTKSSLAASSSLSSIVGPLVEMNTGEAESRNSNFATVGAGSEDWVNAIEFVPGQPYCGRTAPSCTEAPLQGSVTKEESEKEQTAVETKKQLCPYAAVGECRYGENCVYLHGDSCDMCGLQVLHPMDAAQRSQHIKSCIEAHEKDMELSFAVQRSKDMVCGICMEVVYEKANPSERRFGILSNCNHTYCLKCIRKWRSAKQFESKIIKSCPECRITSNFVIPSEYWVEEKEEKQKLILKYKEAMSNKACRYFDEGRGSCPFGGNCFYKHAYPDGRREEPQRQKVGTSSRYRAQRRNHFWELIEERENSNPFDNDEEEVVTFELGEMLLMLLAAGGDDELTDSEDEWDLFHDELEDFYDLDL

SEQ ID NO: 1559 - protein, 170 aa, Homo sapiens
MMAGMKIQLVCMLLLAFSSWSLCSDSEEEMKALEADFLTNMHTSKISKAHVPSWKMTLLNVCSLVNNLNSPAEETGEVHEEELVARRKLPTALDGFSLEAMLTIYQLHKICHSRAFQHWELIQEDILDTGNDKNGKEEVIKRKIPYILKRQLYENKPRRPYILKRDSYYY

SEQ ID NO: 1560 - protein, 171 aa, Homo sapiens
MHPFYTRAATMIGEIAAAVSFISKFLRTKGLTSERQLQTFSQSLQELLAEHYKHHWFPEKPCKGSGYRCIRINHKMDPLIGQAAQRIGLSSQELFRLLPSELTLWVDPYEVSYRIGEDGSICVLYEASPAGGSTQNSTNVQMVDSRISCKEELLLGRTSPSKNYNMMTVSG

SEQ ID NO: 1561 - protein, 1037 aa, Homo sapiens
MDLNRIIQALKGTIDPKLRIAAENELNQSYKIINFAPSLLRIIVSDHVEFPVRQAAAIYLKNMVTQYWPDREPPPGEAIFPFNIHENDRQQIRDNIVEGIIRSPDLVRVQLTMCLRAIIKHDFPGHWPGVVDKIDYYLQSQSSASWLGSLLCLYQLVKTYEYKKAEEREPLIIAMQIFLPRIQQQIVQLLPDSSYYSVLLQKQILKIFYALVQYALPLQLVNNQTMTTWMEIFRTIIDRTVPPETLHIDEDDRPELVWWKCKKWALHIVARLFERYGSPGNVTKEYFEFSEFFLKTYAVGIQQVLLKILDQYRQKEYVAPRVLQQAFNYLNQGVVHSITWKQMKPHIQNISEDVIFSVMCYKDEDEELWQEDPYEYIRMKFDIFEDYASPTTAAQTLLYTAAKKRKEVLPKMMAFCYQILTDPNFDPRKKDGALHVIGSLAEILLKKSLFKDQMELFLQNHVFPLLLSNLGYLRARSCWVLHAFSSLKFHNELNLRNAVELAKKSLIEDKEMPVKVEAALALQSLISNQIQAKEYMKPHVRPIMQELLHIVRETENDDVTNVIQKMICEYSQEVASIAVDMTQHLAEIFGKVLQSDEYEEVEDKTVMAMGILHTIDTILTVVEDHKEITQQLENICLRIIDLVLQKHVIEFYEEILSLAYSLTCHSISPQMWQLLGILYEVFQQDCFEYFTDMMPLLHNYVTIDTDTLLSNAKHLEILFTMCRKVLCGDAGEDAECHAAKLLEVIILQCKGRGIDQCIPLFVQLVLERLTRGVKTSELRTMCLQVAIAALYYNPDLLLHTLERIQLPHNPGPITVQFINQWMNDTDCFLGHHDRKMCIIGLSILLELQNRPPAVDAVVGQIVPSILFLFLGLKQVCATRQLVNREDRSKAEKADMEENEEISSDEEETNVTAQAMQSNNGRGEDEEEEDDDWDEEVLEETALEGFSTPLDLDNSVDEYQFFTQALITVQSRDAAWYQLLMAPLSEDQRTALQEVYTLAEHRRTVAEAKKKIEQQGGFTFENKGVLSAFNFGTVPSNN

SEQ ID NO: 1562 - protein, 1064 aa, Homo sapiens
MKIATVSVLLPLALCLIQDAASKNEDQEMCHEFQAFMKNGKLFCPQDKKFFQSLDGIMFINKCATCKMILEKEAKSQKRARHLARAPKATAPTELNCDDFKKGERDGDFICPDYYEAVCGTDGKTYDNRCALCAENAKTGSQIGVKSEGECKSSNPEQDVCSAFRPFVRDGRLGCTRENDPVLGPDGKTHGNKCAMCAELFLKEAENAKREGETRIRRNAEKDFCKEYEKQVRNGRLFCTRESDPVRGPDGRMHGNKCALCAEIFKQRFSEENSKTDQNLGKAEEKTKVKREIVKLCSQYQNQAKNGILFCTRENDPIRGPDGKMHGNLCSMCQAYFQAENEEKKKAEARARNKRESGKATSYAELCSEYRKLVRNGKLACTRENDPIQGPDGKVHGNTCSMCEVFFQAEEEEKKKKEGKSRNKRQSKSTASFEELCSEYRKSRKNGRLFCTRENDPIQGPDGKMHGNTCSMCEAFFQQEERARAKAKREAAKEICSEFRDQVRNGTLICTREHNPVRGPDGKMHGNKCAMCASVFKLEEEEKKNDKEEKGKVEAEKVKREAVQELCSEYRHYVRNGRLPCTRENDPIEGLDGKIHGNTCSMCEAFFQQEAKEKERAEPRAKVKREAEKETCDEFRRLLQNGKLFCTRENDPVRGPDGKTHGNKCAMCKAVFQKENEERKRKEEEDQRNAAGHGSSGGGGGNTQDECAEYREQMKNGRLSCTRESDPVRDADGKSYNNQCTMCKAKLEREAERKNEYSRSRSNGTGSESGKDTCDEFRSQMKNGKLICTRESDPVRGPDGKTHGNKCTMCKEKLEREAAEKKKKEDEDRSNTGERSNTGERSNDKEDLCREFRSMQRNGKLICTRENNPVRGPYGKMHINKCAMCQSIFDREANERKKKDEEKSSSKPSNNAKDECSEFRNYIRNNELICPRENDPVHGADGKFYTNKCYMCRAVFLTEALERAKLQEKPSHVRASQEEDSPDSFSSLDSEMCKDYRVLPRIGYLCPKDLKPVCGDDGQTYNNPCMLCHENLIRQTNTHIRSTGKCEESSTPGTTAASMPPSDE

SEQ ID NO: 1563 - protein, 132 aa, Homo sapiens
MCDAFVGTWKLVSSENFDDYMKEVGVGFATRKVAGMAKPNMIISVNGDVITIKSESTFKNTEISFILGQEFDEVTADDRKVKSTITLDGGVLVHVQKWDGKSTTIKRKREDDKLVVECVMKGVTSTRVYERA

SEQ ID NO: 1564 - protein, 277 aa, Homo sapiens
MADPWQECMDYAVTLARQAGEVVCEAIKNEMNVMLKSSPVDLVTATDQKVEKMLISSIKEKYPSHSFIGEESVAAGEKSILTDNPTWIIDPIDGTTNFVHRFPFVAVSIGFAVNKKIEFGVVYSCVEGKMYTARKGKGAFCNGQKLQVSQQEDITKSLLVTELGSSRTPETVRMVLSNMEKLFCIPVHGIRSVGTAAVNMCLVATGGADAYYEMGIHCWDVAGAGIIVTEAGGVLMDVTGGPFDLMSRRVIAANNRILAERIAKEIQVIPLQRDDED

SEQ ID NO: 1565 - protein, 322 aa, Homo sapiens
MARCFSLVLLLTSIWTTRLLVQGSLRAEELSIQVSCRIMGITLVSKKANQQLNFTEAKEACRLLGLSLAGKDQVETALKASFETCSYGWVGDGFVVISRISPNPKCGKNGVGVLIWKVPVSRQFAAYCYNSSDTWTNSCIPEIITTKDPIFNTQTATQTTEFIVSDSTYSVASPYSTIPAPTTTPPAPASTSIPRRKKLICVTEVFMETSTMSTETEPFVENKAAFKNEAAGFGGVPTALLVLALLFFGAAAGLGFCYVKRYVKAFPFTNKNQQKEMIETKVVKEEKANDSNPNEESKKTDKNPEESKSPSKTTVRCLEAEV

SEQ ID NO: 1566 - protein, 1849 aa, Homo sapiens
MARLADYFIVVGYDHEKPGSGEGLGKIIQRFPQKDWDDTPFPQGIELFCQPGGWQLSRERKQPTFFVVVLTDIDSDRHYCSCLTFYEAEINLQGTKKEEIEGEAKVSGLIQPAEVFAPKSLVLVSRLYYPEIFRACLGLIYTVYVDSLNVSLESLIANLCACLVPAAGGSQKLFSLGAGDRQLIQTPLHDSLPITGTSVALLFQQLGIQNVLSLFCAVLTENKVLFHSASFQRLSDACRALESLMFPLKYSYPYIPILPAQLLEVLSSPTPFIIGVHSVFKTDVHELLDVIIADLDGGTIKIPECIHLSSLPEPLLHQTQSALSLILHPDLEVADHAFPPPRTALSHSKMLDKEVRAVFLRLFAQLFQGYRSCLQLIRIHAEPVIHFHKTAFLGQRGLVENDFLTKVLSGMAFAGFVSERGPPYRSCDLFDELVAFEVERIKVEENNPVKMIKHVRELAEQLFKNENPNPHMAFQKVPRPTEGSHLRVHILPFPEINEARVQELIQENVAKNQNAPPATRIEKKCVVPAGPPVVSIMDKVTTVFNSAQRLEVVRNCISFIFENKILETEKTLPAALRALKGKAARQCLTDELGLHVQQNRAILDHQQFDYIIRMMNCTLQDCSSLEEYNIAAALLPLTSAFYRKLAPGVSQFAYTCVQDHPIWTNQQFWETTFYNAVQEQVRSLYLSAKEDNHAPHLKQKDKLPDDHYQEKTAMDLAAEQLRLWPTLSKSTQQELVQHEESTVFSQAIHFANLMVNLLVPLDTSKNKLLRTSAPGDWESGSNSIVTNSIAGSVAESYDTESGFEDSENTDIANSVVRFITRFIDKVCTESGVTQDHIKSLHCMIPGIVAMHIETLEAVHRESRRLPPIQKPKILRPALLPGEEIVCEGLRVLLDPDGREEATGGLLGGPQLLPAEGALFLTTYRILFRGTPHDQLVGEQTVVRSFPIASITKEKKITMQNQLQQNMQEGLQITSASFQLIKVAFDEEVSPEVVEIFKKQLMKFRYPQSIFSTFAFAAGQTTPQIILPKQKEKNTSFRTFSKTIVKGAKRAGKMTIGRQYLLKKKTGTIVEERVNRPGWNEDDDVSVSDESELPTSTTLKASEKSTMEQLVEKACFRDYQRLGLGTISGSSSRSRPEYFRITASNRMYSLCRSYPGLLVVPQAVQDSSLPRVARCYRHNRLPVVCWKNSRSGTLLLRSGGFHGKGVVGLFKSQNSPQAAPTSSLESSSSIEQEKYLQALLNAVSVHQKLRGNSTLTVRPAFALSPGVWASLRSSTRLISSPTSFIDVGARLAGKDHSASFSNSSYLQNQLLKRQAALYIFGEKSQLRNFKVEFALNCEFVPVEFHEIRQVKASFKKLMRACIPSTIPTDSEVTFLKALGDSEWFPQLHRIMQLAVVVSEVLENGSSVLVCLEEGWDITAQVTSLVQLLSDPFYRTLEGFQMLVEKEWLSFGHKFSQRSSLTLNCQGSGFAPVFLQFLDCVHQVHNQYPTEFEFNLYYLKFLAFHYVSNRFKTFLLDSDYERLEHGTLFDDKGEKHAKKGVCIWECIDRMHKRSPIFFNYLYSPLEIEALKPNVNVSSLKKWDYYIEETLSTGPSYDWMMLTPKHFPSEDSDLAGEAGPRSQRRTVWPCYDDVSCTQPDALTSLFSEIEKLEHKLNQAPEKWQQLWERVTVDLKEEPRTDRSQRHLSRSPGIVSTNLPSYQKRSLLHLPDSSMGEEQNSSISPSNGVERRAATLYSQYTSKNDENRSFEGTLYKRGALLKGWKPRWFVLDVTKHQLRYYDSGEDTSCKGHIDLAEVEMVIPAGPSMGAPKHTSDKAFFDLKTSKRVYNFCAQDGQSAQQWMDKIQSCISDA

SEQ ID NO: 1567 - protein, 204 aa, Homo sapiens
MAAAGWRDGSGQEKYRLVVVGGGGVGKSALTIQFIQSYFVTDYDPTIEDSYTKQCVIDDRAARLDILDTAGQEEFGAMREQYMRTGEGFLLVFSVTDRGSFEEIYKFQRQILRVKDRDEFPMILIGNKADLDHQRQVTQEEGQQLARQLKVTYMEASAKIRMNVDQAFHELVRVIRKFQEQECPPSPEPTRKEKDKKGCHCVIF

SEQ ID NO: 1568 - protein, 339 aa, Homo sapiens
MAAACGPGAAGYCLLLGLHLFLLTAGPALGWNDPDRMLLRDVKALTLHYDRYTTSRRLDPIPQLKCVGGTAGCDSYTPKVIQCQNKGWDGYDVQWECKTDLDIAYKFGKTVVSCEGYESSEDQYVLRGSCGLEYNLDYTELGLQKLKESGKQHGFASFSDYYYKWSSADSCNMSGLITIVVLLGIAFVVYKLFLSDGQYSPPPYSEYPPFSHRYQRFTNSAGPPPPGFKSEFTGPQNTGHGATSGFGSAFTGQQGYENSGPGFWTGLGTGGILGYLFGSNRAATPFSDSWYYPSYPPSYPGTWNRAYSPLHGGSGSYSVCSNSDTKTRTASGYGGTRRR

SEQ ID NO: 1569 - protein, 155 aa, Homo sapiens
MHPFQWCNGCFCGLGLVSTNKSCSMPPISFQDLPLNIYMVIFGTGIFVFMLSLIFCCYFISKLRNQAQSERYGYKEVVLKGDAKKLQLYGQTCAVCLEDFKGKDELGVLPCQHAFHRKCLVKWLEVRCVCPMCNKPIASPSEATQNIGILLDELV

SEQ ID NO: 1570 - protein, 140 aa, Homo sapiens
MSRFLNVLRSWLVMVSIIAMGNTLQSFRDHTFLYEKLYTGKPNLVNGLQARTFGIWTLLSSVIRCLCAIDIHNKTLYHITLWTFLLALGHFLSELFVYGTAAPTIGVLAPLMVASFSILGMLVGLRYLEVEPVSRQKKRN

SEQ ID NO: 1571 - protein, 621 aa, Homo sapiens
MPFTLHLRSRLPSAIRSLILQKKPNIRNTSSMAGELRPASLVVLPRSLAPAFERFCQVNTGPLPLLGQSEPEKWMLPPQGAISETRMGHPQFWKYEFGACTGSLASLEQYSEQLKDMVAFFLGCSFSLEEALEKAGLPRRDPAGHSQAGAYKTTVPCVTHAGFCCPLVVTMRPIPKDKLEGLVRACCSLGGEQGQPVHMGDPELLGIKELSKPAYGDAMVCPPGEVPVFWPSPLTSLGAVSSCETPLAFASIPGCTVMTDLKDAKAPPGCLTPERIPEVHHISQDPLHYSIASVSASQKIRELESMIGIDPGNRGIGHLLCKDELLKASLSLSHARSVLITTGFPTHFNHEPPEETDGPPGAVALVAFLQALEKEVAIIVDQRAWNLHQKIVEDAVEQGVLKTQIPILTYQGGSVEAAQAFLCKNGDPQTPRFDHLVAIERAGRAADGNYYNARKMNIKHLVDPIDDLFLAAKKIPGISSTGVGDGGNELGMGKVKEAVRRHIRHGDVIACDVEADFAVIAGVSNWGGYALACALYILYSCAVHSQYLRKAVGPSRAPGDQAWTQALPSVIKEEKMLGILVQHKVRSGVSGIVGMEVDGLPFHNTHAEMIQKLVDVTTAQV

SEQ ID NO: 1572 - protein, 246 aa, Homo sapiens
MAAVDIRDNLLGISWVDSSWIPILNSGSVLDYFSERSNPFYDRTCNNEVVKMQRLTLEHLNQMVGIEYILLHAQEPILFIIRKQQRQSPAQVIPLADYYIIAGVIYQAPDLGSVINSRVLTAVHGIQSAFDEAMSYCRYHPSKGYWWHFKDHEEQDKVRPKAKRKEEPSSIFQRQRVDALLLDLRQKFPPKFVQLKPGEKPVPVDQTKKEAEPIPETVKPEEKETTKNVQQTVSAKGPPEKRMRLQ

SEQ ID NO: 1573 - protein, 315 aa, Homo sapiens
MPGLSCRFYQHKFPEVEDVVMVNVRSIAEMGAYVSLLEYNNIEGMILLSELSRRRIRSINKLIRIGRNECVVVIRVDKEKGYIDLSKRRVSPEEAIKCEDKFTKSKTVYSILRHVAEVLEYTKDEQLESLFQRTAWVFDDKYKRPGYGAYDAFKHAVSDPSILDSLDLNEDEREVLINNINRRLTPQAVKIRADIEVACYGYEGIDAVKEALRAGLNCSTENMPIKINLIAPPRYVMTTTTLERTEGLSVLSQAMAVIKEKIEEKRGVFNVQMEPKVVTDTDETELARQMERLERENAEVDGDDDAEEMEAKAED

SEQ ID NO: 1574 - protein, 227 aa, Homo sapiens
MGWTMRLVTAALLLGLMMVVTGDEDENSPCAHEALLDEDTLFCQGLEVFYPELGNIGCKVVPDCNNYRQKITSWMEPIVKFPGAVDGATYILVMVDPDAPSRAEPRQRFWRHWLVTDIKGADLKKGKIQGQELSAYQAPSPPAHSGFHRYQFFVYLQEGKVISLLPKENKTRGSWKMDRFLNRFHLGEPEASTQFMTQNYQDSPTLQAPRERASEPKHKNQAEIAAC

SEQ ID NO: 1575 - protein, 470 aa, Homo sapiens
MLRGISQLPAVATMSWVLLPVLWLIVQTQAIAIKQTPELTLHEIVCPKKLHILHKREIKNNQTEKHGKEERYEPEVQYQMILNGEEIILSLQKTKHLLGPDYTETLYSPRGEEITTKPENMEHCYYKGNILNEKNSVASISTCDGLRGYFTHHHQRYQIKPLKSTDEKEHAVFTSNQEEQDPANHTCGVKSTDGKQGPIRISRSLKSPEKEDFLRAQKYIDLYLVLDNAFYKNYNENLTLIRSFVFDVMNLLNVIYNTIDVQVALVGMEIWSDGDKIKVVPSASTTFDNFLRWHSSNLGKKIHDHAQLLSGISFNNRRVGLAASNSLCSPSSVAVIEAKKKNNVALVGVMSHELGHVLGMPDVPFNTKCPSGSCVMNQYLSSKFPKDFSTSCRAHFERYLLSQKPKCLLQAPIPTNIMTTPVCGNHLLEVGEDCDCGSPKECTNLCCEALTCKLKPGTDCGGDAPNHTTE

SEQ ID NO: 1576 - protein, 598 aa, Homo sapiens
MENSSAASASSEAGSSRSQEIEELERFIDSYVLEYQVQGLLADKTEGDGESERTQSHISQWTADCSEPLDSSCSFSRGRAPPQQNGSKDNSLDMLGTDIWAANTFDSFSGATWDLQPEKLDFTQFHRKVRHTPKQPLPHIDREGCGKGKLEDGDGINLNDIEKVLPAWQGYHPMPHEVEIAHTKKLFRRRRNDRRRQQRPPGGNKPQQHGDHQPGSAKHNRDHQKSYQGGSAPHPSGRPTHHGYSQNRRWHHGNMKHPPGDKGEAGAHRNAKETMTIENPKLEDTAGDTGHSSLEAPRSPDTLAPVASERLPPQQSGGPEVETKRKDSILPERIGERPKITLLQSSKDRLRRRLKEKDEVAVETTTPQQNKMDKLIEILNSMRNNSSDVDTKLTTFMEEAQNSTNSEEMLGEIVRTIYQKAVSDRSFAFTAAKLCDKMALFMVEGTKFRSLLLNMLQKDFTVREELQQQDVERWLGFITFLCEVFGTMRSSTGEPFRVLVCPIYTCLRELLQSQDVKEDAVLCCSMELQSTGRLLEEQLPEMMTELLASARDKMLCPSESMLTRSLLLEVIELHANSWNPLTPPITQYYNRTIQKLTA

SEQ ID NO: 1577 - protein, 82 aa, Homo sapiens
MAFTLYSLLQAALLCVNAIAVLHEERFLKNIGWGTDQGIGGFGEEPGIKSQLMNLIRSVRTVMRVPLIIVNSIAIVLLLLFG

SEQ ID NO: 1578 - protein, 103 aa, Homo sapiens
MMGSKMASASRVVQVVKPHTPLIRFPDRRDNPKPNVSEALRSAGLPSHSSVISQHSKGSKSPDLLMYQGPPDTAEIIKTLPQKYRRKLVSQEEMEFIQRGGPE

SEQ ID NO: 1579 - protein, 433 aa, Homo sapiens
MALRVTRNSKINAENKAKINMAGAKRVPTAPAATSKPGLRPRTALGDIGNKVSEQLQAKMPMKKEAKPSATGKVIDKKLPKPLEKVPMLVPVPVSEPVPEPEPEPEPEPVKEEKLSPEPILVDTASPSPMETSGCAPAEEDLCQAFSDVILAVNDVDAEDGADPNLCSEYVKDIYAYLRQLEEEQAVRPKYLLGREVTGNMRAILIDWLVQVQMKFRLLQETMYMTVSIIDRFMQNNCVPKKMLQLVGVTAMFIASKYEEMYPPEIGDFAFVTDNTYTKHQIRQMEMKILRALNFGLGRPLPLHFLRRASKIGEVDVEQHTLAKYLMELTMLDYDMVHFPPSQIAAGAFCLALKILDNGEWTPTLQHYLSYTEESLLPVMQHLAKNVVMVNQGLTKHMTVKNKYATSKHAKISTLPQLNSALVQDLAKAVAKV

SEQ ID NO: 1580 - protein, 346 aa, Homo sapiens
MALDVKSRAKRYEKLDFLGEGQFATVYKARDKNTNQIVAIKKIKLGHRSEAKDGINRTALREIKLLQELSHPNIIGLLDAFGHKSNISLVFDFMETDLEVIIKDNSLVLTPSHIKAYMLMTLQGLEYLHQHWILHRDLKPNNLLLDENGVLKLADFGLAKSFGSPNRAYTHQVVTRWYRAPELLFGARMYGVGVDMWAVGCILAELLLRVPFLPGDSDLDQLTRIFETLGTPTEEQWPDMCSLPDYVTFKSFPGIPLHHIFSAAGDDLLDLIQGLFLFNPCARITATQALKMKYFSNRPGPTPGCQLPRPNCPVETLKEQSNPALAIKRKRTEALEQGGLPKKLIF

SEQ ID NO: 1581 - protein, 661 aa, Homo sapiens
MAFDVSCFFWVVLFSAGCKVITSWDQMCIEKEANKTYNCENLGLSEIPDTLPNTTEFLEFSFNFLPTIHNRTFSRLMNLTFLDLTRCQINWIHEDTFQSHHQLSTLVLTGNPLIFMAETSLNGPKSLKHLFLIQTGISNLEFIPVHNLENLESLYLGSNHISSIKFPKDFPARNLKVLDFQNNAIHYISREDMRSLEQAINLSLNFNGNNVKGIELGAFDSTIFQSLNFGGTPNLSVIFNGLQNSTTQSLWLGTFEDIDDEDISSAMLKGLCEMSVESLNLQEHRFSDISSTTFQCFTQLQELDLTATHLKGLPSGMKGLNLLKKLVLSVNHFDQLCQISAANFPSLTHLYIRGNVKKLHLGVGCLEKLGNLQTLDLSHNDIEASDCCSLQLKNLSHLQTLNLSHNEPLGLQSQAFKECPQLELLDLAFTRLHINAPQSPFQNLHFLQVLNLTYCFLDTSNQHLLAGLPVLRHLNLKGNHFQDGTITKTNLLQTVGSLEVLILSSCGLLSIDQQAFHSLGKMSHVDLSHNSLTCDSIDSLSHLKGIYLNLAANSINIISPRLLPILSQQSTINLSHNPLDCTCSNIHFLTWYKENLHKLEGSEETTCANPPSLRGVKLSDVKLSCGITAIGIFFLIVFLLLLAILLFFAVKYLLRWKYQHI

SEQ ID NO: 1582 - protein, 420 aa, Homo sapiens
MIIVAHVLLILLGATEILQADLLPDEKISLLPPVNFTIKVTGLAQVLLQWKPNPDQEQRNVNLEYQVKINAPKEDDYETRITESKCVTILHKGFSASVRTILQNDHSLLASSWASAELHAPPGSPGTSIVNLTCTTNTTEDNYSRLRSYQVSLHCTWLVGTDAPEDTQYFLYYRYGSWTEECQEYSKDTLGRNIACWFPRTFILSKGRDWLAVLVNGSSKHSAIRPFDQLFALHAIDQINPPLNVTAEIEGTRLSIQWEKPVSAFPIHCFDYEVKIHNTRNGYLQIEKLMTNAFISIIDDLSKYDVQVRAAVSSMCREAGLWSEWSQPIYVGNDEHKPLREWFVIVIMATICFILLILSLICKICHLWIKLFPPIPAPKSNIKDLFVTTNYEKAGSSETEIEVICYIEKPGVETLEDSVF

SEQ ID NO: 1583 - protein, 370 aa, Homo sapiens
MLGAVEGPRWKQAEDIRDIYDFRDVLGTGAFSEVILAEDKRTQKLVAIKCIAKEALEGKEGSMENEIAVLHKIKHPNIVALDDIYESGGHLYLIMQLVSGGELFDRIVEKGFYTERDASRLIFQVLDAVKYLHDLGIVHRDLKPENLLYYSLDEDSKIMISDFGLSKMEDPGSVLSTACGTPGYVAPEVLAQKPYSKAVDCWSIGVIAYILLCGYPPFYDENDAKLFEQILKAEYEFDSPYWDDISDSAKDFIRHLMEKDPEKRFTCEQALQHPWIAGDTALDKNIHQSVSEQIKKNFAKSKWKQAFNATAVVRHMRKLQLGTSQEGQGQTASHGELLTPVAGGPAAGCCCRDCCVEPGTELSPTLPHQL

SEQ ID NO: 1584 - protein, 412 aa, Homo sapiens
MERIPSAQPPPACLPKAPGLEHGDLPGMYPAHMYQVYKSRRGIKRSEDSKETYKLPHRLIEKKRRDRINECIAQLKDLLPEHLKLTTLGHLEKAVVLELTLKHVKALTNLIDQQQQKIIALQSGLQAGELSGRNVETGQEMFCSGFQTCAREVLQYLAKHENTRDLKSSQLVTHLHRVVSELLQGGTSRKPSDPAPKVMDFKEKPSSPAKGSEGPGKNCVPVIQRTFAHSSGEQSGSDTDTDSGYGGESEKGDLRSEQPCFKSDHGRRFTMGERIGAIKQESEEPPTKKNRMQLSDDEGHFTSSDLISSPFLGPHPHQPPFCLPFYLIPPSATAYLPMLEKCWYPTSVPVLYPGLNASAAALSSFMNPDKISAPLLMPQRLPSPLPAHPSVDSSVLLQALKPIPPLNLETKD

SEQ ID NO: 1585 - protein, 186 aa, Homo sapiens
MLALISRLLDWFRSLFWKEEMELTLVGLQYSGKTTFVNVIASGQFSEDMIPTVGFNMRKVTKGNVTIKIWDIGGQPRFRSMWERYCRGVNAIVYMIDAADREKIEASRNELHNLLDKPQLQGIPVLVLGNKRDLPNALDEKQLIEKMNLSAIQDREICCYSISCKEKDNIDITLQWLIQHSKSRRS

SEQ ID NO: 1586 - protein, 1224 aa, Homo sapiens
MEPLLLGRGLIVYLMFLLLKFSKAIEIPSSVQQVPTIIKQSKVQVAFPFDEYFQIECEAKGNPEPTFSWTKDGNPFYFTDHRIIPSNNSGTFRIPNEGHISHFQGKYRCFASNKLGIAMSEEIEFIVPSVPKFPKEKIDPLEVEEGDPIVLPCNPPKGLPPLHIYWMNIELEHIEQDERVYMSQKGDLYFANVEEKDSRNDYCCFAAFPRLRTIVQKMPMKLTVNSLKHANDSSSSTEIGSKANSIKQRKPKLLLPPTESGSESSITILKGEILLLECFAEGLPTPQVDWNKIGGDLPKGRETKENYGKTLKIENVSYQDKGNYRCTASNFLGTATHDFHVIVEEPPRWTKKPQSAVYSTGSNGILLCEAEGEPQPTIKWRVNGSPVDNHPFAGDVVFPREISFTNLQPNHTAVYQCEASNVHGTILANANIDVVDVRPLIQTKDGENYATVVGYSAFLHCEFFASPEAVVSWQKVEEVKPLEGRRYHIYENGTLQINRTTEEDAGSYSCWVENAIGKTAVTANLDIRNATKLRVSPKNPRIPKLHMLELHCESKCDSHLKHSLKLSWSKDGEAFEINGTEDGRIIIDGANLTISNVTLEDQGIYCCSAHTALDSAADITQVTVLDVPDPPENLHLSERQNRSVRLTWEAGADHNSNISEYIVEFEGNKEEPGRWEELTRVQGKKTTVILPLAPFVRYQFRVIAVNEVGRSQPSQPSDHHETPPAAPDRNPQNIRVQASQPKEMIIKWEPLKSMEQNGPGLEYRVTWKPQGAPVEWEEETVTNHTLRVMTPAVYAPYDVKVQAINQLGSGPDPQSVTLYSGEDYPDTAPVIHGVDVINSTLVKVTWSTVPKDRVHGRLKGYQINWWKTKSLLDGRTHPKEVNILRFSGQRNSGMVPSLDAFSEFHLTVLAYNSKGAGPESEPYIFQTPEGVPEQPTFLKVIKVDKDTATLSWGLPKKLNGNLTGYLLQYQIINDTYEIGELNDINITTPSKPSWHLSNLNATTKYKFYLRACTSQGCGKPITEESSTLGEGSKGIGKISGVNLTQKTHPIEVFEPGAEHIVRLMTKNWGDNDSIFQDVIETRGREYAGLYDDISTQGWFIGLMCAIALLTLLLLTVCFVKRNRGGKYSVKEKEDLHPDPEIQSVKDETFGEYSDSDEKPLKGSLRSLNRDMQPTESADSLVEYGEGDHGLFSEDGSFIGAYAGSKEKGSVESNGSSTATFPLRA

SEQ ID NO: 1587 - protein, 267 aa, Homo sapiens
MRVAALISGGKDSCYNMMQCIAAGHQIVALANLRPAENQVGSDELDSYMYQTVGHHAIDLYAEAMALPLYRRTIRGRSLDTRQVYTKCEGDEVEDLYELLKLVKEKEEVEGISVGAILSDYQRIRVENVCKRLNLQPLAYLWQRNQEDLLREMISSNIQAMIIKVAALGLDPDKHLGKTLDQMEPYLIELSKKYGVHVCGEGGEYETFTLDCPLFKKKIIVDSSEVVIHSADAFAPVAYLRFLELHLEDKVSSVPDNYRTSNYIYNF

SEQ ID NO: 1588 - protein, 242 aa, Homo sapiens
MAAALWGFFPVLLLLLLSGDVQSSEVPGAAAEGSGGSGVGIGDRFKIEGRAVVPGVKPQDWISAARVLVDGEEHVGFLKTDGSFVVHDIPSGSYVVEVVSPAYRFDPVRVDITSKGKMRARYVNYIKTSEVVRLPYPLQMKSSGPPSYFIKRESWGWTDFLMNPMVMMMVLPLLIFVLLPKVVNTSDPDMRREMEQSMNMLNSNHELPDVSEFMTRLFSSKSSGKSSSGSSKTGKSGAGKRR

SEQ ID NO: 1589 - protein, 825 aa, Homo sapiens
MASYPSGSGKPKAKYPFKKRASLQASTAAPEARGGLGAPPLQSARSLPGPAPCLKHFPLDLRTSMDGKCKEIAEELFTRSLAESELRSAPYEFPEESPIEQLEERRQRLERQISQDVKLEPDILLRAKQDFLKTDSDSDLQLYKEQGEGQGDRSLRERDVLEREFQRVTISGEEKCGVPFTDLLDAAKSVVRALFIREKYMALSLQSFCPTTRRYLQQLAEKPLETRTYEQGPDTPVSADAPVHPPALEQHPYEHCEPSTMPGDLGLGLRMVRGVVHVYTRREPDEHCSEVELPYPDLQEFVADVNVLMALIINGPIKSFCYRRLQYLSSKFQMHVLLNEMKELAAQKKVPHRDFYNIRKVDTHIHASSCMNQKHLLRFIKRAMKRHLEEIVHVEQGREQTLREVFESMNLTAYDLSVDTLDVHADRNTFHRFDKFNAKYNPIGESVLREIFIKTDNRVSGKYFAHIIKEVMSDLEESKYQNAELRLSIYGRSRDEWDKLARWAVMHRVHSPNVRWLVQVPRLFDVYRTKGQLANFQEMLENIFLPLFEATVHPASHPELHLFLEHVDGFDSVDDESKPENHVFNLESPLPEAWVEEDNPPYAYYLYYTFANMAMLNHLRRQRGFHTFVLRPHCGEAGPIHHLVSAFMLAENISHGLLLRKAPVLQYLYYLAQIGIAMSPLSNNSLFLSYHRNPLPEYLSRGLMVSLSTDDPLQFHFTKEPLMEEYSIATQVWKLSSCDMCELARNSVLMSGFSHKVKSHWLGPNYTKEGPEGNDIRRTNVPDIRVGYRYETLCQELALITQAVQSEMLETIPEEAGITMSPGPQ

SEQ ID NO: 1590 - protein, 158 aa, Homo sapiens
MASRSMRLLLLLSCLAKTGVLGDIIMRPSCAPGWFYHKSNCYGYFRKLRNWSDAELECQSYGNGAHLASILSLKEASTIAEYISGYQRSQPIWIGLHDPQKRQQWQWIDGAMYLYRSWSGKSMGGNKHCAEMSSNNNFLTWSSNECNKRQHFLCKYRP

SEQ ID NO: 1591 - protein, 138 aa, Homo sapiens
MTALFLMSMLFGLTCGQAMSFCIPTEYTMHIERRECAYCLTINTTICAGYCMTRDINGKLFLPKYALSQDVCTYRDFIYRTVEIPGCPLHVAPYFSYPVALSCKCGKCNTDYSDCIHEAIKTNYCTKPQKSYLVGFSV

SEQ ID NO: 1592 - protein, 218 aa, Homo sapiens
MPMTLGYWDIRGLAHAIRLLLEYTDSSYVEKKYTLGDAPDYDRSQWLNEKFKLGLDFPNLPYLIDGAHKITQSNAILRYIARKHNLCGETEEEKIRVDILENQVMDNHMELVRLCYDPDFEKLKPKYLEELPEKLKLYSEFLGKRPWFAGDKITFVDFLAYDVLDMKRIFEPKCLDAFLNLKDFISRFEGLKKISAYMKSSQFLRGLLFGKSATWNSK

SEQ ID NO: 1593 - protein, 225 aa, Homo sapiens
MSCESSMVLGYWDIRGLAHAIRLLLEFTDTSYEEKRYTCGEAPDYDRSQWLDVKFKLDLDFPNLPYLLDGKNKITQSNAILRYIARKHNMCGETEEEKIRVDIIENQVMDFRTQLIRLCYSSDHEKLKPQYLEELPGQLKQFSMFLGKFSWFAGEKLTFVDFLTYDILDQNRIFDPKCLDEFPNLKAFMCRFEALEKIAAYLQSDQFCKMPINNKMAQWGNKPVC

SEQ ID NO: 1594 - protein, 831 aa, Homo sapiens
MERPWGAADGLSRWPHGLGLLLLLQLLPPSTLSQDRLDAPPPPAAPLPRWSGPIGVSWGLRAAAAGGAFPRGGRWRRSAPGEDEECGRVRDFVAKLANNTHQHVFDDLRGSVSLSWVGDSTGVILVLTTFHVPLVIMTFGQSKLYRSEDYGKNFKDITDLINNTFIRTEFGMAIGPENSGKVVLTAEVSGGSRGGRIFRSSDFAKNFVQTDLPFHPLTQMMYSPQNSDYLLALSTENGLWVSKNFGGKWEEIHKAVCLAKWGSDNTIFFTTYANGSCKADLGALELWRTSDLGKSFKTIGVKIYSFGLGGRFLFASVMADKDTTRRIHVSTDQGDTWSMAQLPSVGQEQFYSILAANDDMVFMHVDEPGDTGFGTIFTSDDRGIVYSKSLDRHLYTTTGGETDFTNVTSLRGVYITSVLSEDNSIQTMITFDQGGRWTHLRKPENSECDATAKNKNECSLHIHASYSISQKLNVPMAPLSEPNAVGIVIAHGSVGDAISVMVPDVYISDDGGYSWTKMLEGPHYYTILDSGGIIVAIEHSSRPINVIKFSTDEGQCWQTYTFTRDPIYFTGLASEPGARSMNISIWGFTESFLTSQWVSYTIDFKDILERNCEEKDYTIWLAHSTDPEDYEDGCILGYKEQFLRLRKSSVCQNGRDYVVTKQPSICLCSLEDFLCDFGYYRPENDSKCVEQPELKGHDLEFCLYGREEHLTTNGYRKIPGDKCQGGVNPVREVKDLKKKCTSNFLSPEKQNSKSNSVPIILAIVGLMLVTVVAGVLIVKKYVCGGRFLVHRYSVLQQHAEANGVDGVDALDTASHTNKSGYHDDSDEDLLE

SEQ ID NO: 1595 - protein, 2471 aa, Homo sapiens
MPALRPALLWALLALWLCCAAPAHALQCRDGYEPCVNEGMCVTYHNGTGYCKCPEGFLGEYCQHRDPCEKNRCQNGGTCVAQAMLGKATCRCASGFTGEDCQYSTSHPCFVSRPCLNGGTCHMLSRDTYECTCQVGFTGKECQWTDACLSHPCANGSTCTTVANQFSCKCLTGFTGQKCETDVNECDIPGHCQHGGTCLNLPGSYQCQCPQGFTGQYCDSLYVPCAPSPCVNGGTCRQTGDFTFECNCLPGFEGSTCERNIDDCPNHRCQNGGVCVDGVNTYNCRCPPQWTGQFCTEDVDECLLQPNACQNGGTCANRNGGYGCVCVNGWSGDDCSENIDDCAFASCTPGSTCIDRVASFSCMCPEGKAGLLCHLDDACISNPCHKGALCDTNPLNGQYICTCPQGYKGADCTEDVDECAMANSNPCEHAGKCVNTDGAFHCECLKGYAGPRCEMDINECHSDPCQNDATCLDKIGGFTCLCMPGFKGVHCELEINECQSNPCVNNGQCVDKVNRFQCLCPPGFTGPVCQIDIDDCSSTPCLNGAKCIDHPNGYECQCATGFTGVLCEENIDNCDPDPCHHGQCQDGIDSYTCICNPGYMGAICSDQIDECYSSPCLNDGRCIDLVNGYQCNCQPGTSGVNCEINFDDCASNPCIHGICMDGINRYSCVCSPGFTGQRCNIDIDECASNPCRKGATCINGVNGFRCICPEGPHHPSCYSQVNECLSNPCIHGNCTGGLSGYKCLCDAGWVGINCEVDKNECLSNPCQNGGTCDNLVNGYRCTCKKGFKGYNCQVNIDECASNPCLNQGTCFDDISGYTCHCVLPYTGKNCQTVLAPCSPNPCENAAVCKESPNFESYTCLCAPGWQGQRCTIDIDECISKPCMNHGLCHNTQGSYMCECPPGFSGMDCEEDIDDCLANPCQNGGSCMDGVNTFSCLCLPGFTGDKCQTDMNECLSEPCKNGGTCSDYVNSYTCKCQAGFDGVHCENNINECTESSCFNGGTCVDGINSFSCLCPVGFTGSFCLHEINECSSHPCLNEGTCVDGLGTYRCSCPLGYTGKNCQTLVNLCSRSPCKNKGTCVQKKAESQCLCPSGWAGAYCDVPNVSCDIAASRRGVLVEHLCQHSGVCINAGNTHYCQCPLGYTGSYCEEQLDECASNPCQHGATCSDFIGGYRCECVPGYQGVNCEYEVDECQNQPCQNGGTCIDLVNHFKCSCPPGTRGLLCEENIDDCARGPHCLNGGQCMDRIGGYSCRCLPGFAGERCEGDINECLSNPCSSEGSLDCIQLTNDYLCVCRSAFTGRHCETFVDVCPQMPCLNGGTCAVASNMPDGFICRCPPGFSGARCQSSCGQVKCRKGEQCVHTASGPRCFCPSPRDCESGCASSPCQHGGSCHPQRQPPYYSCQCAPPFSGSRCELYTAPPSTPPATCLSQYCADKARDGVCDEACNSHACQWDGGDCSLTMENPWANCSSPLPCWDYINNQCDELCNTVECLFDNFECQGNSKTCKYDKYCADHFKDNHCDQGCNSEECGWDGLDCAADQPENLAEGTLVIVVLMPPEQLLQDARSFLRALGTLLHTNLRIKRDSQGELMVYPYYGEKSAAMKKQRMTRRSLPGEQEQEVAGSKVFLEIDNRQCVQDSDHCFKNTDAAAALLASHAIQGTLSYPLVSVVSESLTPERTQLLYLLAVAVVIILFIILLGVIMAKRKRKHGSLWLPEGFTLRRDASNHKRREPVGQDAVGLKNLSVQVSEANLIGTGTSEHWVDDEGPQPKKVKAEDEALLSEEDDPIDRRPWTQQHLEAADIRRTPSLALTPPQAEQEVDVLDVNVRGPDGCTPLMLASLRGGSSDLSDEDEDAEDSSANIITDLVYQGASLQAQTDRTGEMALHLAARYSRADAAKRLLDAGADANAQDNMGRCPLHAAVAADAQGVFQILIRNRVTDLDARMNDGTTPLILAARLAVEGMVAELINCQADVNAVDDHGKSALHWAAAVNNVEATLLLLKNGANRDMQDNKEETPLFLAAREGSYEAAKILLDHFANRDITDHMDRLPRDVARDRMHHDIVRLLDEYNVTPSPPGTVLTSALSPVICGPNRSFLSLKHTPMGKKSRRPSAKSTMPTSLPNLAKEAKDAKGSRRKKSLSEKVQLSESSVTLSPVDSLESPHTYVSDTTSSPMITSPGILQASPNPMLATAAPPAPVHAQHALSFSNLHEMQPLAHGASTVLPSVSQLLSHHHIVSPGSGSAGSLSRLHPVPVPADWMNRMEVNETQYNEMFGMVLAPAEGTHPGIAPQSRPPEGKHITTPREPLPPIVTFQLIPKGSIAQPAGAPQPQSTCPPAVAGPLPTMYQIPEMARLPSVAFPTAMMPQQDGQVAQTILPAYHPFPASVGKYPTPPSQHSYASSNAAERTPSHSGHLQGEHPYLTPSPESPDQWSSSSPHSASDWSDVTTSPTPGGAGGGQRGPGTHMSEPPHNNMQVYA

SEQ ID NO: 1596 - protein, 1021 aa, Homo sapiens
MAGISYVASFFLLLTKLSIGQREVTVQKGPLFRAEGYPVSIGCNVTGHQGPSEQHFQWSVYLPTNPTQEVQIISTKDAAFSYAVYTQRVRSGDVYVERVQGNSVLLHISKLQMKDAGEYECHTPNTDEKYYGSYSAKTNLIVIPDTLSATMSSQTLGKEEGEPLALTCEASKATAQHTHLSVTWYLTQDGGGSQATEIISLSKDFILVPGPLYTERFAASDVQLNKLGPTTFRLSIERLQSSDQGQLFCEATEWIQDPDETWMFITKKQTDQTTLRIQPAVKDFQVNITADSLFAEGKPLELVCLVVSSGRDPQLQGIWFFNGTEIAHIDAGGVLGLKNDYKERASQGELQVSKLGPKAFSLKIFSLGPEDEGAYRCVVAEVMKTRTGSWQVLQRKQSPDSHVHLRKPAARSVVMSTKNKQQVVWEGETLAFLCKAGGAESPLSVSWWHIPRDQTQPEFVAGMGQDGIVQLGASYGVPSYHGNTRLEKMDWATFQLEITFTAITDSGTYECRVSEKSRNQARDLSWTQKISVTVKSLESSLQVSLMSRQPQVMLTNTFDLSCVVRAGYSDLKVPLTVTWQFQPASSHIFHQLIRITHNGTIEWGNFLSRFQKKTKVSQSLFRSQLLVHDATEEETGVYQCEVEVYDRNSLYNNRPPRASAISHPLRIAVTLPESKLKVNSRSQVQELSINSNTDIECSILSRSNGNLQLAIIWYFSPVSTNASWLKILEMDQTNVIKTGDEFHTPQRKQKFHTEKVSQDLFQLHILNVEDSDRGKYHCAVEEWLLSTNGTWHKLGEKKSGLTELKLKPTGSKVRVSKVYWTENVTEHREVAIRCSLESVGSSATLYSVMWYWNRENSGSKLLVHLQHDGLLEYGEEGLRRHLHCYRSSSTDFVLKLHQVEMEDAGMYWCRVAEWQLHGHPSKWINQASDESQRMVLTVLPSEPTLPSRICSSAPLLYFLFICPFVLLLLLLISLLCLYWKARKLSTLRSNTRKEKALWVDLKEAGGVTTNRREDEEEDEGN

SEQ ID NO: 1597 - protein, 739 aa, Homo sapiens
MPYLGSEDVVKELKKALCNPHIQADRLRYRNVIQRVIRYMTQGLDMSGVFMEMVKASATVDIVQKKLVYLYMCTYAPLKPDLALLAINTLCKDCSDPNPMVRGLALRSMCSLRMPGVQEYIQQPILNGLRDKASYVRRVAVLGCAKMHNLHGDSEVDGALVNELYSLLRDQDPIVVVNCLRSLEEILKQEGGVVINKPIAHHLLNRMSKLDQWGQAEVLNFLLRYQPRSEEELFDILNLLDSFLKSSSPGVVMGATKLFLILAKMFPHVQTDVLVRVKGPLLAACSSESRELCFVALCHVRQILHSLPGHFSSHYKKFFCSYSEPHYIKLQKVEVLCELVNDENVQQVLEELRGYCTDVSADFAQAAIFAIGGIARTYTDQCVQILTELLGLRQEHITTVVVQTFRDLVWLCPQCTEAVCQALPGCEENIQDSEGKQALIWLLGVHGERIPNAPYVLEDFVENVKSETFPAVKMELLTALLRLFLSRPAECQDMLGRLLYYCIEEEKDMAVRDRGLFYYRLLLVGIDEVKRILCSPKSDPTLGLLEDPAERPVNSWASDFNTLVPVYGKAHWATISKCQGAERCDPELPKTSSFAASGPLIPEENKERVQELPDSGALMLVPNRQLTADYFEKTWLSLKVAHQQVLPWRGEFHPDTLQMALQVVNIQTIAMSRAGSRPWKAYLSAQDDTGCLFLTELLLEPGNSEMQISVKQNEARTETLNSFISVLETVIGTIEEIKS

SEQ ID NO: 1598 - protein, 92 aa, Homo sapiens
MTLRPSLLPLHLLLLLLLSAAVCRAEAGLETESPVRTLQVETLGRERDLWKSIRDPCSPIVGGAPRTMCRARCFWRHASHTLHGKLGRWTYY

SEQ ID NO: 1599 - protein, 181 aa, Homo sapiens
MGNIFGNLLKSLIGKKEMRILMVGLDAAGKTTILYKLKLGEIVTTIPTIGFNVETVEYKNISFTVWDVGGQDKIRPLWRHYFQNTQGLIFVVDSNDRERVNEAREELMRMLAEDELRDAVLLVFANKQDLPNAMNAAEITDKLGLHSLRHRNWYIQATCATSGDGLYEGLDWLANQLKNKK

SEQ ID NO: 1600 - protein, 231 aa, Homo sapiens
MGSQHSAAARPSSCRRKQEDDRDGLLAEREQEEAIAQFPYVEFTGRDSITCLTCQGTGYIPTEQVNELVALIPHSDQRLRPQRTKQYVLLSILLCLLASGLVVFFLFPHSVLVDDDGIKVVKVTFNKQDSLVILTIMATLKIRNSNFYTVAVTSLSSQIQYMNTVVNFTGKAEMGGPFSYVYFFCTVPEILVHNIVIFMRTSVKISYIGLMTQSSLETHHYVDCGGNSTAI

SEQ ID NO: 1601 - protein, 506 aa, Homo sapiens
MKKAEMGRFSISPDEDSSSYSSNSDFNYSYPTKQAALKSHYADVDPENQNFLLESNLGKKKYETEFHPGTTSFGMSVFNLSNAIVGSGILGLSYAMANTGIALFIILLTFVSIFSLYSVHLLLKTANEGGSLLYEQLGYKAFGLVGKLAASGSITMQNIGAMSSYLFIVKYELPLVIQALTNIEDKTGLWYLNGNYLVLLVSLVVILPLSLFRNLGYLGYTSGLSLLCMVFFLIVVICKKFQVPCPVEAALIINETINTTLTQPTALVPALSHNVTENDSCRPHYFIFNSQTVYAVPILIFSFVCHPAVLPIYEELKDRSRRRMMNVSKISFFAMFLMYLLAALFGYLTFYEHVESELLHTYSSILGTDILLLIVRLAVLMAVTLTVPVVIFPIRSSVTHLLCASKDFSWWRHSLITVSILAFTNLLVIFVPTIRDIFGFIGASAASMLIFILPSAFYIKLVKKEPMKSVQKIGALFFLLSGVLVMTGSMALIVLDWVHNAPGGGH

SEQ ID NO: 1602 - protein, 890 aa, Homo sapiens
MNYVGQLAGQVFVTVKELYKGLNPATLSGCIDIIVIRQPNGNLQCSPFHVRFGKMGVLRSREKVVDIEINGESVDLHMKLGDNGEAFFVQETDNDQEVIPMHLATSPILSEGASRMECQLKRGSVDRMRGLDPSTPAQVIAPSETPSSSSVVKKRRKRRRKSQLDSLKRDDNMNTSEDEDMFPIEMSSDEAMELLESSRTLPNDIPPFQDDIPEENLSLAVIYPQSASYPNSDREWSPTPSPSGSRPSTPKSDSELVSKSTERTGQKNPEMLWLWGELPQAAKSSSPHKMKESSPLSSRKICDKSHFQAIHSESSDTFSDQSPTLVGGALLDQNKPQTEMQFVNEEDLETLGAAAPLLPMIEELKPPSASVVQTANKTDSPSRKRDKRSRHLGADGVYLDDLTDMDPEVAALYFPKNGDPSGLAKHASDNGARSANQSPQSVGSSGVDSGVESTSDGLRDLPSIAISLCGGLSDHREITKDAFLEQAVSYQQFVDNPAIIDDPNLVVKIGSKYYNWTTAAPLLLAMQAFQKPLPKATVESIMRDKMPKKGGRWWFSWRGRNTTIKEESKPEQCLAGKAHSTGEQPPQLSLATRVKHESSSSDEERAAAKPSNAGHLPLLPNVSYKKTLRLTSEQLKSLKLKNGPNDVVFSVTTQYQGTCRCEGTIYLWNWDDKVIISDIDGTITRSDTLGHILPTLGKDWTHQGIAKLYHKVSQNGYKFLYCSARAIGMADMTRGYLHWVNERGTVLPQGPLLLSPSSLFSALHREVIEKKPEKFKVQCLTDIKNLFFPNTEPFYAAFGNRPADVYSYKQVGVSLNRIFTVNPKGELVQEHAKTNISSYVRLCEVVDHVFPLLKRSHSSDFPCSDTFSNFTFWREPLPPFENQDIHSASA

SEQ ID NO: 1603 - protein, 122 aa, Homo sapiens
MKLLTGLVFCSLVLSVSSRSFFSFLGEAFDGARDMWRAYSDMREANYIGSDKYFHARGNYDAAKRGPGGAWAAEVISNARENIQRLTGRGAEDSLADQAANKWGRSGRDPNHFRPAGLPEKY

SEQ ID NO: 1604 - protein, 344 aa, Homo sapiens
MVRARHQPGGLCLLLLLLCQFMEDRSAQAGNCWLRQAKNGRCQVLYKTELSKEECCSTGRLSTSWTEEDVNDNTLFKWMIFNGGAPNCIPCKETCENVDCGPGKKCRMNKKNKPRCVCAPDCSNITWKGPVCGLDGKTYRNECALLKARCKEQPELEVQYQGRCKKTCRDVFCPGSSTCVVDQTNNAYCVTCNRICPEPASSEQYLCGNDGVTYSSACHLRKATCLLGRSIGLAYEGKCIKAKSCEDIQCTGGKKCLWDFKVGRGRCSLCDELCPDSKSDEPVCASDNATYASECAMKEAACSSGVLLEVKHSGSCNSISEDTEEEEEDEDQDYSFPISSILEW

SEQ ID NO: 1605 - protein, 569 aa, Homo sapiens
MLLLFSVILISWVSTVGGEGTLCDFPKIHHGFLYDEEDYNPFSQVPTGEVFYYSCEYNFVSPSKSFWTRITCTEEGWSPTPKCLRMCSFPFVKNGHSESSGLIHLEGDTVQIICNTGYSLQNNEKNISCVERGWSTPPICSFTKGECHVPILEANVDAQPKKESYKVGDVLKFSCRKNLIRVGSDSVQCYQFGWSPNFPTCKGQVRSCGPPPQLSNGEVKEIRKEEYGHNEVVEYDCNPNFIINGPKKIQCVDGEWTTLPTCVEQVKTCGYIPELEYGYVQPSVPPYQHGVSVEVNCRNEYAMIGNNMITCINGIWTELPMCVATHQLKRCKIAGVNIKTLLKLSGKEFNHNSRIRYRCSDIFRYRHSVCINGKWNPEVDCTEKREQFCPPPPQIPNAQNMTTTVNYQDGEKVAVLCKENYLLPEAKEIVCKDGRWQSLPRCVESTAYCGPPPSINNGDTTSFPLSVYPPGSTVTYRCQSFYKLQGSVTVTCRNKQWSEPPRCLDPCVVSEENMNKNNIQLKWRNDGKLYAKTGDAVEFQCKFPHKAMISSPPFRAICQEGKFEYPICE

SEQ ID NO: 1606 - protein, 926 aa, Homo sapiens
MASAVRGSRPWPRLGLQLQFAALLLGTLSPQVHTLRPENLLLVSTLDGSLHALSKQTGDLKWTLRDDPVIEGPMYVTEMAFLSDPADGSLYILGTQKQQGLMKLPFTIPELVHASPCRSSDGVFYTGRKQDAWFVVDPESGETQMTLTTEGPSTPRLYIGRTQYTVTMHDPRAPALRWNTTYRRYSAPPMDGSPGKYMSHLASCGMGLLLTVDPGSGTVLWTQDLGVPVMGVYTWHQDGLRQLPHLTLARDTLHFLALRWGHIRLPASGPRDTATLFSTLDTQLLMTLYVGKDETGFYVSKALVHTGVALVPRGLTLAPADGPTTDEVTLQVSGEREGSPSTAVRYPSGSVALPSQWLLIGHHELPPVLHTTMLRVHPTLGSGTAETRPPENTQAPAFFLELLSLSREKLWDSELHPEEKTPDSYLGLGPQDLLAASLTAVLLGGWILFVMRQQQPQVVEKQQETPLAPADFAHISQDAQSLHSGASRRSQKRLQSPSKQAQPLDDPEAEQLTVVGKISFNPKDVLGRGAGGTFVFRGQFEGRAVAVKRLLRECFGLVRREVQLLQESDRHPNVLRYFCTERGPQFHYIALELCRASLQEYVENPDLDRGGLEPEVVLQQLMSGLAHLHSLHIVHRDLKPGNILITGPDSQGLGRVVLSDFGLCKKLPAGRCSFSLHSGIPGTEGWMAPELLQLLPPDSPTSAVDIFSAGCVFYYVLSGGSHPFGDSLYRQANILTGAPCLAHLEEEVHDKVVARDLVGAMLSPLPQPRPSAPQVLAHPFFWSRAKQLQFFQDVSDWLEKESEQEPLVRALEAGGCAVVRDNWHEHISMPLQTDLRKFRSYKGTSVRDLLRAVRNKKHHYRELPVEVRQALGQVPDGFVQYFTNRFPRLLLHTHRAMRSCASESLFLPYYPPDSEARRPCPGATGR

SEQ ID NO: 1607 - protein, 548 aa, Homo sapiens
MVLAELYVSDREGSDATGDGTKEKPFKTGLKALMTVGKEPFPTIYVDSQKENERWNVISKSQLKNIKKMWHREQMKSESREKKEAEDSLRREKNLEEAKKITIKNDPSLPEPKCVKIGALEGYRGQRVKVFGWVHRLRRQGKNLMFLVLRDGTGYLQCVLADELCQCYNGVLLSTESSVAVYGMLNLTPKGKQAPGGHELSCDFWELIGLAPAGGADNLINEESDVDVQLNNRHMMIRGENMSKILKARSMVTRCFRDHFFDRGYYEVTPPTLVQTQVEGGATLFKLDYFGEEAFLTQSSQLYLETCLPALGDVFCIAQSYRAEQSRTRRHLAEYTHVEAECPFLTFDDLLNRLEDLVCDVVDRILKSPAGSIVHELNPNFQPPKRPFKRMNYSDAIVWLKEHDVKKEDGTFYEFGEDIPEAPERLMTDTINEPILLCRFPVEIKSFYMQRCPEDSRLTESVDVLMPNVGEIVGGSMRIFDSEEILAGYKREGIDPTPYYWYTDQRKYGTCPHGGYGLGLERFLTWILNRYHIRDVCLYPRFVQRCTP

SEQ ID NO: 1608 - protein, 148 aa, Homo sapiens
MRGRELPLVLLALVLCLAPRGRAVPLPAGGGTVLTKMYPRGNHWAVGHLMGKKSTGESSSVSERGSLKQQLREYIRWEEAARNLLGLIEAKENRNHQPPQPKALGNQQPSWDSEDSSNFKDVGSKGKVGRLSAPGSQREGRNPQLNQQ

SEQ ID NO: 1609 - protein, 263 aa, Homo sapiens
MDSYLLMWGLLTFIMVPGCQAELCDDDPPEIPHATFKAMAYKEGTMLNCECKRGFRRIKSGSLYMLCTGNSSHSSWDNQCQCTSSATRNTTKQVTPQPEEQKERKTTEMQSPMQPVDQASLPGHCREPPPWENEATERIYHFVVGQMVYYQCVQGYRALHRGPAESVCKMTHGKTRWTQPQLICTGEEKPQASPEGRPESETSCLVTTTDFQIQTEMAATMETSIFTTEYQVAVAGCVFLLISVLLLSGLTWQRRQRKSRRTI

SEQ ID NO: 1610 - protein, 323 aa, Homo sapiens
MYHNSSQKRHWTFSSEEQLARLRADANRKFRCKAVANGKVLPNDPVFLEPHEEMTLCKYYEKRLLEFCSVFKPAMPRSVVGTACMYFKRFYLNNSVMEYHPRIIMLTCAFLACKVDEFNVSSPQFVGNLRESPLGQEKALEQILEYELLLIQQLNFHLIVHNPYRPFEGFLIDLKTRYPILENPEILRKTADDFLNRIALTDAYLLYTPSQIALTAILSSASRAGITMESYLSESLMLKENRTCLSQLLDIMKSMRNLVKKYEPPRSEEVAVLKQKLERCHSAELALNVITKKRKGYEDDDYVSKKSKHEEEEWTDDDLVESL

SEQ ID NO: 1611 - protein, 157 aa, Homo sapiens
MLVLLAGIFVVHIATVIMLFVSTIANVWLVSNTVDASVGLWKNCTNISCSDSLSYASEDALKTVQAFMILSIIFCVIALLVFVFQLFTMEKGNRFFLSGATTLVCWLCILVGVSIYTSHYANRDGTQYHHGYSYILGWICFCFSFIIGVLYLVLRKK

SEQ ID NO: 1612 - protein, 427 aa, Homo sapiens
MAPKKRPETQKTSEIVLRPRNKRSRSPLELEPEAKKLCAKGSGPSRRCDSDCLWVGLAGPQILPPCRSIVRTLHQHKLGRASWPSVQQGLQQSFLHTLDSYRILQKAAPFDRRATSLAWHPTHPSTVAVGSKGGDIMLWNFGIKDKPTFIKGIGAGGSITGLKFNPLNTNQFYASSMEGTTRLQDFKGNILRVFASSDTINIWFCSLDVSASSRMVVTGDNVGNVILLNMDGKELWNLRMHKKKVTHVALNPCCDWFLATASVDQTVKIWDLRQVRGKASFLYSLPHRHPVNAACFSPDGARLLTTDQKSEIRVYSASQWDCPLGLIPHPHRHFQHLTPIKAAWHPRYNLIVVGRYPDPNFKSCTPYELRTIDVFDGNSGKMMCQLYDPESSGISSLNEFNPMGDTLASAMGYHILIWSQEEARTRK

SEQ ID NO: 1613 - protein, 423 aa, Homo sapiens
MAGKRSGWSRAALLQLLLGVNLVVMPPTRARSLRFVTLLYRHGDRSPVKTYPKDPYQEEEWPQGFGQLTKEGMLQHWELGQALRQRYHGFLNTSYHRQEVYVRSTDFDRTLMSAEANLAGLFPPNGMQRFNPNISWQPIPVHTVPITEDRLLKFPLGPCPRYEQLQNETRQTPEYQNESSRNAQFLDMVANETGLTDLTLETVWNVYDTLFCEQTHGLRLPPWASPQTMQRLSRLKDFSFRFLFGIYQQAEKARLQGGVLLAQIRKNLTLMATTSQLPKLLVYSAHDTTLVALQMALDVYNGEQAPYASCHIFELYQEDSGNFSVEMYFRNESDKAPWPLSLPGCPHRCPLQDFLRLTEPVVPKDWQQECQLASGPADTEVIVALAVCGSILFLLIVLLLTVLFRMQAQPPGYRHVADGEDHA

SEQ ID NO: 1614 - protein, 113 aa, Homo sapiens
MDGRVQLIKALLALPIRPATRRWRNPIPFPETFDGDTDRLPEFIVQTGSYMFVDENTFSSDALKVTFLITRLTGPALQWVIPYIKKESPLLNDYRGFLAEMKRVFGWEEDEDF

SEQ ID NO: 1615 - protein, 1186 aa, Homo sapiens
MSVACVLKRKAVLWQDSFSPHLKHHPQEPANPNMPVVLTSGTGSQAQPQPAANQALAAGTHSSPVPGSIGVAGRSQDDAMVDYFFQRQHGEQLGGGGSGGGGYNNSKHRWPTGDNIHAEHQVRSMDELNHDFQALALEGRAMGEQLLPGKKFWETDESSKDGPKGIFLGDQWRDSAWGTSDHSVSQPIMVQRRPGQSFHVNSEVNSVLSPRSESGGLGVSMVEYVLSSSPGDSCLRKGGFGPRDADSDENDKGEKKNKGTFDGDKLGDLKEEGDVMDKTNGLPVQNGIDADVKDFSRTPGNCQNSANEVDLLGPNQNGSEGLAQLTSTNGAKPVEDFSNMESQSVPLDPMEHVGMEPLQFDYSGTQVPVDSAAATVGLFDYNSQQQLFQRPNALAVQQLTAAQQQQYALAAAHQPHIGLAPAAFVPNPYIISAAPPGTDPYTAGLAAAATLGPAVVPHQYYGVTPWGVYPASLFQQQAAAAAAATNSANQQTTPQAQQGQQQVLRGGASQRPLTPNQNQQGQQTDPLVAAAAVNSALAFGQGLAAGMPGYPVLAPAAYYDQTGALVVNAGARNGLGAPVRLVAPAPVIISSSAAQAAVAAAAASANGAAGGLAGTTNGPFRPLGTQQPQPQPQQQPNNNLASSSFYGNNSLNSNSQSSSLFSQGSAQPANTSLGFGSSSSLGATLGSALGGFGTAVANSNTGSGSRRDSLTGSSDLYKRTSSSLTPIGHSFYNGLSFSSSPGPVGMPLPSQGPGHSQTPPPSLSSHGSSSSLNLGGLTNGSGRYISAAPGAEAKYRSASSASSLFSPSSTLFSSSRLRYGMSDVMPSGRSRLLEDFRNNRYPNLQLREIAGHIMEFSQDQHGSRFIQLKLERATPAERQLVFNEILQAAYQLMVDVFGNYVIQKFFEFGSLEQKLALAERIRGHVLSLALQMYGCRVIQKALEFIPSDQQNEMVRELDGHVLKCVKDQNGNHVVQKCIECVQPQSLQFIIDAFKGQVFALSTHPYGCRVIQRILEHCLPDQTLPILEELHQHTEQLVQDQYGNYVIQHVLEHGRPEDKSKIVAEIRGNVLVLSQHKFASNVVEKCVTHASRTERAVLIDEVCTMNDGPHSALYTMMKDQYANYVVQKMIDVAEPGQRKIVMHKIRPHIATLRKYTYGKHILAKLEKYYMKNGVDLGPICGPPNGII

SEQ ID NO: 1616 - protein, 312 aa, Homo sapiens
MANRTVKDAHSIHGTNPQYLVEKIIRTRIYESKYWKEECFGLTAELVVDKAMELRFVGGVYGGNIKPTPFLCLTLKMLQIQPEKDIIVEFIKNEDFKYVRMLGALYMRLTGTAIDCYKYLEPLYNDYRKIKSQNRNGEFELMHVDEFIDELLHSERVCDIILPRLQKRYVLEEAEQLEPRVSALEEDMDDVESSEEEEEEDEKLERVPSPDHRRRSYRDLDKPRRSPTLRYRRSRSRSPRRRSRSPKRRSPSPRRERHRSKSPRRHRSRSRDRRHRSRSKSPGHHRSHRHRSHSKSPERSKKSHKKSRRGNE

SEQ ID NO: 1617 - protein, 999 aa, Homo sapiens
MMGLFPRTTGALAIFVVVILVHGELRIETKGQYDEEEMTMQQAKRRQKREWVKFAKPCREGEDNSKRNPIAKITSDYQATQKITYRISGVGIDQPPFGIFVVDKNTGDINITAIVDREETPSFLITCRALNAQGLDVEKPLILTVKILDINDNPPVFSQQIFMGEIEENSASNSLVMILNATDADEPNHLNSKIAFKIVSQEPAGTPMFLLSRNTGEVRTLTNSLDREQASSYRLVVSGADKDGEGLSTQCECNIKVKDVNDNFPMFRDSQYSARIEENILSSELLRFQVTDLDEEYTDNWLAVYFFTSGNEGNWFEIQTDPRTNEGILKVVKALDYEQLQSVKLSIAVKNKAEFHQSVISRYRVQSTPVTIQVINVREGIAFRPASKTFTVQKGISSKKLVDYILGTYQAIDEDTNKAASNVKYVMGRNDGGYLMIDSKTAEIKFVKNMNRDSTFIVNKTITAEVLAIDEYTGKTSTGTVYVRVPDFNDNCPTAVLEKDAVCSSSPSVVVSARTLNNRYTGPYTFALEDQPVKLPAVWSITTLNATSALLRAQEQIPPGVYHISLVLTDSQNNRCEMPRSLTLEVCQCDNRGICGTSYPTTSPGTRYGRPHSGRLGPAAIGLLLLGLLLLLLAPLLLLTCDCGAGSTGGVTGGFIPVPDGSEGTIHQWGIEGAHPEDKEITNICVPPVTANGADFMESSEVCTNTYARGTAVEGTSGMEMTTKLGAATESGGAAGFATGTVSGAASGFGAATGVGICSSGQSGTMRTRHSTGGTNKDYADGAISMNFLDSYFSQKAFACAEEDDGQEANDCLLIYDNEGADATGSPVGSVGCCSFIADDLDDSFLDSLGPKFKKLAEISLGVDGEGKEVQPPSKDSGYGIESCGHPIEVQQTGFVKCQTLSGSQGASALSTSGSVQPAVSIPDPLQHGNYLVTETYSASGSLVQPSTAGFDPLLTQNVIVTERVICPISSVPGNLAGPTQLRGSHTMLCTEDPCSRLI

SEQ ID NO: 1618 - protein, 800 aa, Homo sapiens
MVAPVLETSHVFCCPNRVRGVLNWSSGPRGLLAFGTSCSVVLYDPLKRVVVTNLNGHTARVNCIQWICKQDGSPSTELVSGGSDNQVIHWEIEDNQLLKAVHLQGHEGPVYAVHAVYQRRTSDPALCTLIVSAAADSAVRLWSKKGPEVPILACGNDDCRIHIFAQQNDQFQKVLSLCGHEDWIRGVEWAAFGRDLFLASCSQDCLIRIWKLYIKSTSLETQDDDNIRLKENTFTIENESVKIAFAVTLETVLAGHENWVNAVHWQPVFYKDGVLQQPVRLLSASMDKTMILWAPDEESGVWLEQVRVGEVGGNTLGFYDCQFNEDGSMIIAHAFHGALHLWKQNTVNPREWTPEIVISGHFDGVQDLVWDPEGEFIITVGTDQTTRLFAPWKRKDQSQVTWHEIARPQIHGYDLKCLAMINRFQFVSGADEKVLRVFSAPRNFVENFCAITGQSLNHVLCNQDSDLPEGATVPALGLSNKAVFQGDIASQPSDEEELLTSTGFEYQQVAFQPSILTEPPTEDHLLQNTLWPEVQKLYGHGYEIFCVTCNSSKTLLASACKAAKKEHAAIILWNTTSWKQVQNLVFHSLTVTQMAFSPNEKFLLAVSRDRTWSLWKKQDTISPEFEPVFSLFAFTNKITSVHSRIIWSCDWSPDSKYFFTGSRDKKVVVWGECDSTDDCIEHNIGPCSSVLDVGGAVTAVSVCPVLHPSQRYVVAVGLECGKICLYTWKKTDQVPEINDWTHCVETSQSQSHTLAIRKLCWKNCSGKTEQKEAEGAEWLHFASCGEDHTVKIHRVNKCAL

SEQ ID NO: 1619 - protein, 1049 aa, Homo sapiens
MDWSFFRVVAMLFIFLVVVEVNSEFRIQVRDYNTKNGTIKWHSIRRQKREWIKFAAACREGEDNSKRNPIAKIHSDCAANQQVTYRISGVGIDQPPYGIFVINQKTGEINITSIVDREVTPFFIIYCRALNSMGQDLERPLELRVRVLDINDNPPVFSMATFAGQIEENSNANTLVMILNATDADEPNNLNSKIAFKIIRQEPSDSPMFIINRNTGEIRTMNNFLDREQYGQYALAVRGSDRDGGADGMSAECECNIKILDVNDNIPYMEQSSYTIEIQENTLNSNLLEIRVIDLDEEFSANWMAVIFFISGNEGNWFEIEMNERTNVGILKVVKPLDYEAMQSLQLSIGVRNKAEFHHSIMSQYKLKASAISVTVLNVIEGPVFRPGSKTYVVTGNMGSNDKVGDFVATDLDTGRPSTTVRYVMGNNPADLLAVDSRTGKLTLKNKVTKEQYNMLGGKYQGTILSIDDNLQRTCTGTININIQSFGNDDRTNTEPNTKITTNTGRQESTSSTNYDTSTTSTDSSQVYSSEPGNGAKDLLSDNVHFGPAGIGLLIMGFLVLGLVPFLMICCDCGGAPRSAAGFEPVPECSDGAIHSWAVEGPQPEPRDITTVIPQIPPDNANIIECIDNSGVYTNEYGGREMQDLGGGERMTGFELTEGVKTSGMPEICQEYSGTLRRNSMRECREGGLNMNFMESYFCQKAYAYADEDEGRPSNDCLLIYDIEGVGSPAGSVGCCSFIGEDLDDSFLDTLGPKFKKLADISLGKESYPDLDPSWPPQSTEPVCLPQETEPVVSGHPPISPHFGTTTVISESTYPSGPGVLHPKPILDPLGYGNVTVTESYTTSDTLKPSVHVHDNRPASNVVVTERVVGPISGADLHGMLEMPDLRDGSNVIVTERVIAPSSSLPTSLTIHHPRESSNVVVTERVIQPTSGMIGSLSMHPELANAHNVIVTERVVSGAGVTGISGTTGISGGIGSSGLVGTSMGAGSGALSGAGISGGGIGLSSLGGTASIGHMRSSSDHHFNQTIGSASPSTARSRITKYSTVQYSK

SEQ ID NO: 1620 - protein, 840 aa, Homo sapiens
MALASAAPGSIFCKQLLFSLLVLTLLCDACQKVYLRVPSHLQAETLVGKVNLEECLKSASLIRSSDPAFRILEDGSIYTTHDLILSSERKSFSIFLSDGQRREQQEIKVVLSARENKSPKKRHTKDTALKRSKRRWAPIPASLMENSLGPFPQHVQQIQSDAAQNYTIFYSISGPGVDKEPFNLFYIEKDTGDIFCTRSIDREKYEQFALYGYATTADGYAPEYPLPLIIKIEDDNDNAPYFEHRVTIFTVPENCRSGTSVGKVTATDLDEPDTLHTRLKYKILQQIPDHPKHFSIHPDTGVITTTTPFLDREKCDTYQLIMEVRDMGGQPFGLFNTGTITISLEDENDNPPSFTETSYVTEVEENRIDVEILRMKVQDQDLPNTPHSKAVYKILQGNENGNFIISTDPNTNEGVLCVVKPLNYEVNRQVILQVGVINEAQFSKAASSQTPTMCTTTVTVKIIDSDEGPECHPPVKVIQSQDGFPAGQELLGYKALDPEISSGEGLRYQKLGDEDNWFEINQHTGDLRTLKVLDRESKFVKNNQYNISVVAVDAVGRSCTGTLVVHLDDYNDHAPQIDKEVTICQNNEDFAVLKPVDPDGPENGPPFQFFLDNSASKNWNIEEKDGKTAILRQRQNLDYNYYSVPIQIKDRHGLVATHMLTVRVCDCSTPSECRMKDKSTRDVRPNVILGRWAILAMVLGSVLLLCILFTCFCVTAKRTVKKCFPEDIAQQNLIVSNTEGPGEEVTEANIRLPMQTSNICDTSMSVGTVGGQGIKTQQSFEMVKGGYTLDSNKGGGHQTLESVKGVGQGDTGRYAYTDWQSFTQPRLGEESIRGHTLIKN

SEQ ID NO: 1621 - protein, 894 aa, Homo sapiens
MALASAAPGSIFCKQLLFSLLVLTLLCDACQKVYLRVPSHLQAETLVGKVNLEECLKSASLIRSSDPAFRILEDGSIYTTHDLILSSERKSFSIFLSDGQRREQQEIKVVLSARENKSPKKRHTKDTALKRSKRRWAPIPASLMENSLGPFPQHVQQIQSDAAQNYTIFYSISGPGVDKEPFNLFYIEKDTGDIFCTRSIDREKYEQFALYGYATTADGYAPEYPLPLIIKIEDDNDNAPYFEHRVTIFTVPENCRSGTSVGKVTATDLDEPDTLHTRLKYKILQQIPDHPKHFSIHPDTGVITTTTPFLDREKCDTYQLIMEVRDMGGQPFGLFNTGTITISLEDENDNPPSFTETSYVTEVEENRIDVEILRMKVQDQDLPNTPHSKAVYKILQGNENGNFIISTDPNTNEGVLCVVKPLNYEVNRQVILQVGVINEAQFSKAASSQTPTMCTTTVTVKIIDSDEGPECHPPVKVIQSQDGFPAGQELLGYKALDPEISSGEGLRYQKLGDEDNWFEINQHTGDLRTLKVLDRESKFVKNNQYNISVVAVDAVGRSCTGTLVVHLDDYNDHAPQIDKEVTICQNNEDFAVLKPVDPDGPENGPPFQFFLDNSASKNWNIEEKDGKTAILRQRQNLDYNYYSVPIQIKDRHGLVATHMLTVRVCDCSTPSECRMKDKSTRDVRPNVILGRWAILAMVLGSVLLLCILFTCFCVTAKRTVKKCFPEDIAQQNLIVSNTEGPGEEVTEANIRLPMQTSNICDTSMSVGTVGGQGIKTQQSFEMVKGGYTLDSNKGGGHQTLESVKGVGQGDTGRYAYTDWQSFTQPRLGEKVYLCGQDEEHKHCEDYVCSYNYEGKGSLAGSVGCCSDRQEEEGLEFLDHLEPKFRTLAKTCIKK

SEQ ID NO: 1622 - protein, 1439 aa, Homo sapiens
MATLACRVQFLDDTDPFNSTNFPEPSRPPLFTFREDLALGTQLAGVHRLLQAPHKLDDCTLQLSHNGAYLDLEATLAEQRDELEGFQDDAGRGKKHSIILRTQLSVRVHACIEKLYNSSGRDLRRALFSLKQIFQDDKDLVHEFVVAEGLTCLIKVGAEADQNYQNYILRALGQIMLYVDGMNGVINRNETIQWLYTLIGSKFRLVVKTALKLLLVFVEYSESNAPLLIQAVTAVDTKRGVKPWSNIMEILEEKDGVDTELLVYAMTLVNKTLSGLPDQDTFYDVVDCLEELGIAAVSQRHLNKKGTDLDLVEQLNIYEVALRHEDGDETTEPPPSGCRDRRRASVCSSGGGEHRGLDRRRSRRHSVQSIKSTLSAPTSPCSQSAPSFKPNQVRDLREKYSNFGNNSYHSSRPSSGSSVPTTPTSSVSPPQEARLERSSPSGLLTSSFRQHQESLAAERERRRQEREERLQRIEREERNKFSRDYLDKREEQRQAREERYKYLEQLAAEEHEKELRSRSVSRGRADLSLDLTSPAAPACLAPLSHSPSSSDSQEALTVSASSPGTPHHPQASAGDPEPESEAEPEAEAGAGQVADEAGQDIASAHEGAETEVEQALEQEPEERASLSEKERQNEGVNERDNCSASSVSSSSSTLEREEKEDKLSRDRTTGLWPAGVQDAGVNGQCGDILTNKRFMLDMLYAHNRKSPDDEEKGDGEAGRTQQEAEAVASLATRISTLQANSQTQDESVRRVDVGCLDNRGSVKAFAEKFNSGDLGRGSISPDAEPNDKVPETAPVQPKTESDYIWDQLMANPRELRIQDMDFTDLGEEDDIDVLDVDLGHREAPGPPPPPPPTFLGLPPPPPPPLLDSIPPPPVPGNLLVPPPPVFNAPQGLGWSQVPRGQPTFTKKKKTIRLFWNEVRPFDWPCKNNRRCREFLWSKLEPIKVDTSRLEHLFESKSKELSVSKKTAADGKRQEIIVLDSKRSNAINIGLTVLPPPRTIKIAILNFDEYALNKEGIEKILTMIPTDEEKQKIQEAQLANPEIPLGSAEQFLLTLSSISELSARLHLWAFKMDYETTEKEVAEPLLDLKEGIDQLENNKTLGFILSTLLAIGNFLNGTNAKAFELSYLEKVPEVKDTVHKQSLLHHVCTMVVENFPDSSDLYSEIGAITRSAKVDFDQLQDNLCQMERRCKASWDHLKAIAKHEMKPVLKQRMSEFLKDCAERIIILKIVHRRIINRFHSFLLFMGHPPYAIREVNINKFCRIISEFALEYRTTRERVLQQKQKRANHRERNKTRGKMITDSGKFSGSSPAPPSQPQGLSYAEDAAEHENMKAVLKTSSPSVEDATPALGVRTRSRASRGSTSSWTMGTDDSPNVTDDAADEIMDRIVKSATQVPSQRVVPRERKRSRANRKSLRRTLKSGLTPEEARALGLVGTSELQL

SEQ ID NO: 1623 - protein, 90 aa, Homo sapiens
MDPLRAQQLAAELEVEMMADMYNRMTSACHRKCVPPHYKEAELSKGESVCLDRCVSKYLDIHERMGKKLTELSMQDEELMKRVQQSSGPA

SEQ ID NO: 1624 - protein, 149 aa, Homo sapiens
MEKEETTRELLLPNWQGSGSHGLTIAQRDDGVFVQEVTQNSPAARTGVVKEGDQIVGATIYFDNLQSGEVTQLLNTMGHHTVGLKLHRKGDRSPEPGQTWTREVFSSCSSEVVLNTPQPSALECKDQNKQKEASSQAGAVSVSTPNAGL

SEQ ID NO: 1625 - protein, 417 aa, Homo sapiens
MAWFALYLLSLLWATAGTSTQTQSSCSVPSAQEPLVNGIQVLMENSVTSSAYPNPSILIAMNLAGAYNLKAQKLLTYQLMSSDNNDLTIGQLGLTIMALTSSCRDPGDKVSILQRQMENWAPSSPNAEASAFYGPSLAILALCQKNSEATLPIAVRFAKTLLANSSPFNVDTGAMATLALTCMYNKIPVGSEEGYRSLFGQVLKDIVEKISMKIKDNGIIGDIYSTGLAMQALSVTPEPSKKEWNCKKTTDMILNEIKQGKFHNPMSIAQILPSLKGKTYLDVPQVTCSPDHEVQPTLPSNPGPGPTSASNITVIYTINNQLRGVELLFNETINVSVKSGSVLLVVLEEAQRKNPMFKFETTMTSWGLVVSSINNIAENVNHKTYWQFLSGVTPLNEGVADYIPFNHEHITANFTQY

SEQ ID NO: 1626 - protein, 79 aa, Homo sapiens
MELEAMSRYTSPVNPAVFPHLTVVLLAIGMFFTAWFFVYEVTSTKYTRDIYKELLISLVASLFMGFGVLFLLLWVGIYV

SEQ ID NO: 1627 - protein, 433 aa, Homo sapiens
MRQSHQLPLVGLLLFSFIPSQLCEICEVSEENYIRLKPLLNTMIQSNYNRGTSAVNVVLSLKLVGIQIQTLMQKMIQQIKYNVKSRLSDVSSGELALIILALGVCRNAEENLIYDYHLIDKLENKFQAEIENMEAHNGTPLTNYYQLSLDVLALCLFNGNYSTAEVVNHFTPENKNYYFGSQFSVDTGAMAVLALTCVKKSLINGQIKADEGSLKNISIYTKSLVEKILSEKKENGLIGNTFSTGEAMQALFVSSDYYNENDWNCQQTLNTVLTEISQGAFSNPNAAAQVLPALMGKTFLDINKDSSCVSASGNFNISADEPITVTPPDSQSYISVNYSVRINETYFTNVTVLNGSVFLSVMEKAQKMNDTIFGFTMEERSWGPYITCIQGLCANNNDRTYWELLSGGEPLSQGAGSYVVRNGENLEVRWSKY

SEQ ID NO: 1628 - protein, 1140 aa, Homo sapiens
MTTAVERKYINIRKRLDQLGYRQTLTVECLPLVEKLFSDLVHTTESLRQSKLSAVKAEKESANFDFVLEPYKLENARLSRENNELYLELMKLREHSDQHVKELKTSLKKCARETADLKFLNNQYAHKLKLLEKESKAKNERIQQLQEKNLHAVVQTPGGKKRSIAFRRQRMQIDEPVPPSEVSSYPVPQPDDPYIADLLQVADNRIQELQQEVHQLQEKLAMMESGVRDYSKQIELREREIERLSVALDGGRSPDVLSLESRNKTNEKLIAHLNIQVDFLQQANKDLEKRIRELMETKETVTSEVVNLSNKNEKLCQELTEIDQLAQQLERHKEEVLETADKELGEAKKEIKRKLSEMQDLEETMAKLQLELNLCQKEKERLSDELLVKSDLETVVHQLEQEKQRLSKKVESFAVTERQLTLEVERMRLEHGIKRRDRSPSRLDTFLKGIEEERDYYKKELERLQHIIQRRSCSTSYSAREKSSIFRTPEKGDYNSEIHQITRERDELQRMLERFEKYMEDIQSNVKLLTAERDKLSVLYNEAQEELSALRKESTQTTAPHNIVSLMEKEKELALSDLRRIMAEKEALREKLEHIEEVSLFGKSELEKTIEHLTCVNHQLESEKYELKSKVLIMKETIESLENKLKVQAQKFSHVAGDSSHQKTEVNSLRIVNEQLQRSVDDYQHRLSIKRGELESAQAQIKILEEKIDELNLKMTSQDEEAHVMKKTIGVIDKEKDFLQETVDEKTEKIANLQENLANKEKAVAQMKIMISECESSVNQLKETLVNRDREINSLRRQLDAAHKELDEVGRSREIAFKENRRLQDDLATMARENQEISLELEAAVQEKEEMKSRVHKYITEVSRWESLMAAKEKENQDLLDRFQMLHNRAEDWEVKAHQAEGESSSVRLELLSIDTERRHLRERVELLEKEIQEHINAHHAYESQISSMAKAMSRLEEELRHQEDEKATVLNDLSSLRELCIKLDSGKDIMTQQLNSKNLEFERVVVELENVKSESDLLKKQLSNERHTVKNLESLLATNRDKEFHSHLTSHEKDTEIQLLKEKLTLSESKLTSQSRENTMLRAKVAQLQTDYDALKRQISTERYERERAIQEMRRHGLATPPLSSTLRSPSHSPEHRNV

SEQ ID NO: 1629 - protein, 1089 aa, Homo sapiens
MGTSHPAFLVLGCLLTGLSLILCQLSLPSILPNENEKVVQLNSSFSLRCFGESEVSWQYPMSEEESSDVEIRNEENNSGLFVTVLEVSSASAAHTGLYTCYYNHTQTEENELEGRHIYIYVPDPDVAFVPLGMTDYLVIVEDDDSAIIPCRTTDPETPVTLHNSEGVVPASYDSRQGFNGTFTVGPYICEATVKGKKFQTIPFNVYALKATSELDLEMEALKTVYKSGETIVVTCAVFNNEVVDLQWTYPGEVKGKGITMLEEIKVPSIKLVYTLTVPEATVKDSGDYECAARQATREVKEMKKVTISVHEKGFIEIKPTFSQLEAVNLHEVKHFVVEVRAYPPPRISWLKNNLTLIENLTEITTDVEKIQEIRYRSKLKLIRAKEEDSGHYTIVAQNEDAVKSYTFELLTQVPSSILDLVDDHHGSTGGQTVRCTAEGTPLPDIEWMICKDIKKCNNETSWTILANNVSNIITEIHSRDRSTVEGRVTFAKVEETIAVRCLAKNLLGAENRELKLVAPTLRSELTVAAAVLVLLVIVIISLIVLVVIWKQKPRYEIRWRVIESISPDGHEYIYVDPMQLPYDSRWEFPRDGLVLGRVLGSGAFGKVVEGTAYGLSRSQPVMKVAVKMLKPTARSSEKQALMSELKIMTHLGPHLNIVNLLGACTKSGPIYIITEYCFYGDLVNYLHKNRDSFLSHHPEKPKKELDIFGLNPADESTRSYVILSFENNGDYMDMKQADTTQYVPMLERKEVSKYSDIQRSLYDRPASYKKKSMLDSEVKNLLSDDNSEGLTLLDLLSFTYQVARGMEFLASKNCVHRDLAARNVLLAQGKIVKICDFGLARDIMHDSNYVSKGSTFLPVKWMAPESIFDNLYTTLSDVWSYGILLWEIFSLGGTPYPGMMVDSTFYNKIKSGYRMAKPDHATSEVYEIMVKCWNSEPEKRPSFYHLSEIVENLLPGQYKKSYEKIHLDFLKSDHPAVARMRVDSDNAYIGVTYKNEEDKLKDWEGGLDEQRLSADSGYIIPLPDIDPVPEEEDLGKRNRHSSQTSEESAIETGSSSSTFIKREDETIEDIDMMDDIGIDSSDLVEDSFL

SEQ ID NO: 1630 - protein, 889 aa, Homo sapiens
MLPAPAAPRWPPLLLLLLLLLPLARGAPARPAAGGQASELVVPTRLPGSAGELALHLSAFGKGFVLRLAPDDSFLAPEFKIERLGGSGRATGGERGLRGCFFSGTVNGEPESLAAVSLCRGLSGSFLLDGEEFTIQPQGAGGSLAQPHRLQRWGPAGARPLPRGPEWEVETGEGQRQERGDHQEDSEEESQEEEAEGASEPPPPLGATSRTKRFVSEARFVETLLVADASMAAFYGADLQNHILTLMSVAARIYKHPSIKNSINLMVVKVLIVEDEKWGPEVSDNGGLTLRNFCNWQRRFNQPSDRHPEHYDTAILLTRQNFCGQEGLCDTLGVADIGTICDPNKSCSVIEDEGLQAAHTLAHELGHVLSMPHDDSKPCTRLFGPMGKHHVMAPLFVHLNQTLPWSPCSAMYLTELLDGGHGDCLLDAPAAALPLPTGLPGRMALYQLDQQCRQIFGPDFRHCPNTSAQDVCAQLWCHTDGAEPLCHTKNGSLPWADGTPCGPGHLCSEGSCLPEEEVERPKPVADGGWAPWGPWGECSRTCGGGVQFSHRECKDPEPQNGGRYCLGRRAKYQSCHTEECPPDGKSFREQQCEKYNAYNYTDMDGNLLQWVPKYAGVSPRDRCKLFCRARGRSEFKVFEAKVIDGTLCGPETLAICVRGQCVKAGCDHVVDSPRKLDKCGVCGGKGNSCRKVSGSLTPTNYGYNDIVTIPAGATNIDVKQRSHPGVQNDGNYLALKTADGQYLLNGNLAISAIEQDILVKGTILKYSGSIATLERLQSFRPLPEPLTVQLLTVPGEVFPPKVKYTFFVPNDVDFSMQSSKERATTNIIQPLLHAQWVLGDWSECSSTCGAGWQRRTVECRDPSGQASATCNKALKPEDAKPCESQLCPL

SEQ ID NO: 1631 - protein, 1047 aa, Homo sapiens
MRSEALLLYFTLLHFAGAGFPEDSEPISISHGNYTKQYPVFVGHKPGRNTTQRHRLDIQMIMIMNGTLYIAARDHIYTVDIDTSHTEEIYCSKKLTWKSRQADVDTCRMKGKHKDECHNFIKVLLKKNDDALFVCGTNAFNPSCRNYKMDTLEPFGDEFSGMARCPYDAKHANVALFADGKLYSATVTDFLAIDAVIYRSLGESPTLRTVKHDSKWLKEPYFVQAVDYGDYIYFFFREIAVEYNTMGKVVFPRVAQVCKNDMGGSQRVLEKQWTSFLKARLNCSVPGDSHFYFNILQAVTDVIRINGRDVVLATFSTPYNSIPGSAVCAYDMLDIASVFTGRFKEQKSPDSTWTPVPDERVPKPRPGCCAGSSSLERYATSNEFPDDTLNFIKTHPLMDEAVPSIFNRPWFLRTMVRYRLTKIAVDTAAGPYQNHTVVFLGSEKGIILKFLARIGNSGFLNDSLFLEEMSVYNSEKCSYDGVEDKRIMGMQLDRASSSLYVAFSTCVIKVPLGRCERHGKCKKTCIASRDPYCGWIKEGGACSHLSPNSRLTFEQDIERGNTDGLGDCHNSFVALNDISTPLPDNEMSYNTVYGHSSSLLPSTTTSDSTAQEGYESRGGMLDWKHLLDSPDSTDPLGAVSSHNHQDKKGVIRESYLKGHDQLVPVTLLAIAVILAFVMGAVFSGITVYCVCDHRRKDVAVVQRKEKELTHSRRGSMSSVTKLSGLFGDTQSKDPKPEAILTPLMHNGKLATPGNTAKMLIKADQHHLDLTALPTPESTPTLQQKRKPSRGSREWERNQNLINACTKDMPPMGSPVIPTDLPLRASPSHIPSVVVLPITQQGYQHEYVDQPKMSEVAQMALEDQAATLEYKTIKEHLSSKSPNHGVNLVENLDSLPPKVPQREASLGPPGASLSQTGLSKRLEMHHSSSYGVDYKRSYPTNSLTRSHQATTLKRNNTNSSNSSHLSRNQSFGRGDNPPPAPQRVDSIQVHSSQPSGQAVTVSRQPSLNAYNSLTRSGLKRTPSLKPDVPPKPSFAPLSTSMKPNDACT

SEQ ID NO: 1632 - protein, 2843 aa, Homo sapiens
MAAASYDQLLKQVEALKMENSNLRQELEDNSNHLTKLETEASNMKEVLKQLQGSIEDEAMASSGQIDLLERLKELNLDSSNFPGVKLRSKMSLRSYGSREGSVSSRSGECSPVPMGSFPRRGFVNGSRESTGYLEELEKERSLLLADLDKEEKEKDWYYAQLQNLTKRIDSLPLTENFSLQTDMTRRQLEYEARQIRVAMEEQLGTCQDMEKRAQRRIARIQQIEKDILRIRQLLQSQATEAERSSQNKHETGSHDAERQNEGQGVGEINMATSGNGQGSTTRMDHETASVLSSSSTHSAPRRLTSHLGTKVEMVYSLLSMLGTHDKDDMSRTLLAMSSSQDSCISMRQSGCLPLLIQLLHGNDKDSVLLGNSRGSKEARARASAALHNIIHSQPDDKRGRREIRVLHLLEQIRAYCETCWEWQEAHEPGMDQDKNPMPAPVEHQICPAVCVLMKLSFDEEHRHAMNELGGLQAIAELLQVDCEMYGLTNDHYSITLRRYAGMALTNLTFGDVANKATLCSMKGCMRALVAQLKSESEDLQQVIASVLRNLSWRADVNSKKTLREVGSVKALMECALEVKKESTLKSVLSALWNLSAHCTENKADICAVDGALAFLVGTLTYRSQTNTLAIIESGGGILRNVSSLIATNEDHRQILRENNCLQTLLQHLKSHSLTIVSNACGTLWNLSARNPKDQEALWDMGAVSMLKNLIHSKHKMIAMGSAAALRNLMANRPAKYKDANIMSPGSSLPSLHVRKQKALEAELDAQHLSETFDNIDNLSPKASHRSKQRHKQSLYGDYVFDTNRHDDNRSDNFNTGNMTVLSPYLNTTVLPSSSSSRGSLDSSRSEKDRSLERERGIGLGNYHPATENPGTSSKRGLQISTTAAQIAKVMEEVSAIHTSQEDRSSGSTTELHCVTDERNALRRSSAAHTHSNTYNFTKSENSNRTCSMPYAKLEYKRSSNDSLNSVSSSDGYGKRGQMKPSIESYSEDDESKFCSYGQYPADLAHKIHSANHMDDNDGELDTPINYSLKYSDEQLNSGRQSPSQNERWARPKHIIEDEIKQSEQRQSRNQSTTYPVYTESTDDKHLKFQPHFGQQECVSPYRSRGANGSETNRVGSNHGINQNVSQSLCQEDDYEDDKPTNYSERYSEEEQHEEEERPTNYSIKYNEEKRHVDQPIDYSLKYATDIPSSQKQSFSFSKSSSGQSSKTEHMSSSSENTSTPSSNAKRQNQLHPSSAQSRSGQPQKAATCKVSSINQETIQTYCVEDTPICFSRCSSLSSLSSAEDEIGCNQTTQEADSANTLQIAEIKEKIGTRSAEDPVSEVPAVSQHPRTKSSRLQGSSLSSESARHKAVEFSSGAKSPSKSGAQTPKSPPEHYVQETPLMFSRCTSVSSLDSFESRSIASSVQSEPCSGMVSGIISPSDLPDSPGQTMPPSRSKTPPPPPQTAQTKREVPKNKAPTAEKRESGPKQAAVNAAVQRVQVLPDADTLLHFATESTPDGFSCSSSLSALSLDEPFIQKDVELRIMPPVQENDNGNETESEQPKESNENQEKEAEKTIDSEKDLLDDSDDDDIEILEECIISAMPTKSSRKAKKPAQTASKLPPPVARKPSQLPVYKLLPSQNRLQPQKHVSFTPGDDMPRVYCVEGTPINFSTATSLSDLTIESPPNELAAGEGVRGGAQSGEFEKRDTIPTEGRSTDEAQGGKTSSVTIPELDDNKAEEGDILAECINSAMPKGKSHKPFRVKKIMDQVQQASASSSAPNKNQLDGKKKKPTSPVKPIPQNTEYRTRVRKNADSKNNLNAERVFSDNKDSKKQNLKNNSKVFNDKLPNNEDRVRGSFAFDSPHHYTPIEGTPYCFSRNDSLSSLDFDDDDVDLSREKAELRKAKENKESEAKVTSHTELTSNQQSANKTQAIAKQPINRGQPKPILQKQSTFPQSSKDIPDRGAATDEKLQNFAIENTPVCFSHNSSLSSLSDIDQENNNKENEPIKETEPPDSQGEPSKPQASGYAPKSFHVEDTPVCFSRNSSLSSLSIDSEDDLLQECISSAMPKKKKPSRLKGDNEKHSPRNMGGILGEDLTLDLKDIQRPDSEHGLSPDSENFDWKAIQEGANSIVSSLHQAAAAACLSRQASSDSDSILSLKSGISLGSPFHLTPDQEEKPFTSNKGPRILKPGEKSTLETKKIESESKGIKGGKKVYKSLITGKVRSNSEISGQMKQPLQANMPSISRGRTMIHIPGVRNSSSSTSPVSKKGPPLKTPASKSPSEGQTATTSPRGAKPSVKSELSPVARQTSQIGGSSKAPSRSGSRDSTPSRPAQQPLSRPIQSPGRNSISPGRNGISPPNKLSQLPRTSSPSTASTKSSGSGKMSYTSPGRQMSQQNLTKQTGLSKNASSIPRSESASKGLNQMNNGNGANKKVELSRMSSTKSSGSESDRSERPVLVRQSTFIKEAPSPTLRRKLEESASFESLSPSSRPASPTRSQAQTPVLSPSLPDMSLSTHSSVQAGGWRKLPPNLSPTIEYNDGRPAKRHDIARSHSESPSRLPINRSGTWKREHSKHSSSLPRVSTWRRTGSSSSILSASSESSEKAKSEDEKHVNSISGTKQSKENQVSAKGTWRKIKENEFSPTNSTSQTVSSGATNGAESKTLIYQMAPAVSKTEDVWVRIEDCPINNPRSGRSPTGNTPPVIDSVSEKANPNIKDSKDNQAKQNVGNGSVPMRTVGLENRLNSFIQVDAPDQKGTEIKPGQNNPVPVSETNESSIVERTPFSSSSSSKHSSPSGTVAARVTPFNYNPSPRKSSADSTSARPSQIPTPVNNNTKKRDSKTDSTESSGTQSPKRHSGSYLVTSV

SEQ ID NO: 1633 - protein, 68 aa, Homo sapiens
MVYYPELFVWVSQEPFPNKDMEGRLPKGRLPVPKEVNRKKNDETNAASLTPLGSSELRSPRISYLHFF

SEQ ID NO: 1634 - protein, 561 aa, Homo sapiens
MAESGESGGPPGSQDSAAGAEGAGAPAAAASAEPKIMKVTVKTPKEKEEFAVPENSSVQQFKEEISKRFKSHTDQLVLIFAGKILKDQDTLSQHGIHDGLTVHLVIKTQNRPQDHSAQQTNTAGSNVTTSSTPNSNSTSGSATSNPFGLGGLGGLAGLSSLGLNTTNFSELQSQMQRQLLSNPEMMVQIMENPFVQSMLSNPDLMRQLIMANPQMQQLIQRNPEISHMLNNPDIMRQTLELARNPAMMQEMMRNQDRALSNLESIPGGYNALRRMYTDIQEPMLSAAQEQFGGNPFASLVSNTSSGEGSQPSRTENRDPLPNPWAPQTSQSSSASSGTASTVGGTTGSTASGTSGQSTTAPNLVPGVGASMFNTPGMQSLLQQITENPQLMQNMLSAPYMRSMMQSLSQNPDLAAQMQNPDTLSAMSNPRAMQALLQIQQGLQTLATEAPGLIPGFTPGLGALGSTGGSSGTNGSNATPSENTSPTAGTTEPGHQQFIQQMLQALAGVNPQLQNPEVRFQQQLEQLSAMGFLNREANLQALIATGGDINAAIERLLGSQPS

SEQ ID NO: 1635 - protein, 346 aa, Homo sapiens
MAMVSEFLKQAWFIENEEQEYVQTVKSSKGGPGSAVSPYPTFNPSSDVAALHKAIMVKGVDEATIIDILTKRNNAQRQQIKAAYLQETGKPLDETLKKALTGHLEEVVLALLKTPAQFDADELRAAMKGLGTDEDTLIEILASRTNKEIRDINRVYREELKRDLAKDITSDTSGDFRNALLSLAKGDRSEDFGVNEDLADSDARALYEAGERRKGTDVNVFNTILTTRSYPQLRRVFQKYTKYSKHDMNKVLDLELKGDIEKCLTAIVKCATSKPAFFAEKLHQAMKGVGTRHKALIRIMVSRSEIDMNDIKAFYQKMYGISLCQAILDETKGDYEKILVALCGGN

SEQ ID NO: 1636 - protein, 918 aa, Homo sapiens
MPGGAGAARLCLLAFALQPLRPRAAREPGWTRGSEEGSPKLQHELIIPQWKTSESPVREKHPLKAELRVMAEGRELILDLEKNEQLFAPSYTETHYTSSGNPQTTTRKLEDHCFYHGTVRETELSSVTLSTCRGIRGLITVSSNLSYVIEPLPDSKGQHLIYRSEHLKPPPGNCGFEHSKPTTRDWALQFTQQTKKRPRRMKREDLNSMKYVELYLVADYLEFQKNRRDQDATKHKLIEIANYVDKFYRSLNIRIALVGLEVWTHGNMCEVSENPYSTLWSFLSWRRKLLAQKYHDNAQLITGMSFHGTTIGLAPLMAMCSVYQSGGVNMDHSENAIGVAATMAHEMGHNFGMTHDSADCCSASAADGGCIMAAATGHPFPKVFNGCNRRELDRYLQSGGGMCLSNMPDTRMLYGGRRCGNGYLEDGEECDCGEEEECNNPCCNASNCTLRPGAECAHGSCCHQCKLLAPGTLCREQARQCDLPEFCTGKSPHCPTNFYQMDGTPCEGGQAYCYNGMCLTYQEQCQQLWGPGARPAPDLCFEKVNVAGDTFGNCGKDMNGEHRKCNMRDAKCGKIQCQSSEARPLESNAVPIDTTIIMNGRQIQCRGTHVYRGPEEEGDMLDPGLVMTGTKCGYNHICFEGQCRNTSFFETEGCGKKCNGHGVCNNNQNCHCLPGWAPPFCNTPGHGGSIDSGPMPPESVGPVVAGVLVAILVLAVLMLMYYCCRQNNKLGQLKPSALPSKLRQQFSCPFRVSQNSGTGHANPTFKLQTPQGKRKVINTPEILRKPSQPPPRPPPDYLRGGSPPAPLPAHLSRAARNSPGPGSQIERTESSRRPPPSRPIPPAPNCIVSQDFSRPRPPQKALPANPVPGRRSLPRPGGASPLRPPGAGPQQSRPLAALAPKFPEYRSQRAGGMISSKI

SEQ ID NO: 1637 - protein, 328 aa, Homo sapiens
MMSGEPLHVKTPIRDSMALSKMAGTSVYLKMDSAQPSGSFKIRGIGHFCKRWAKQGCAHFVCSSAGNAGMAAAYAARQLGVPATIVVPSTTPALTIERLKNEGATVKVVGELLDEAFELAKALAKNNPGWVYIPPFDDPLIWEGHASIVKELKETLWEKPGAIALSVGGGGLLCGVVQGLQEVGWGDVPVIAMETFGAHSFHAATTAGKLVSLPKITSVAKALGVKTVGAQALKLFQEHPIFSEVISDQEAVAAIEKFVDDEKILVEPACGAALAAVYSHVIQKLQLEGNLRTPLPSLVVIVCGGSNISLAQLRALKEQLGMTNRLPK

SEQ ID NO: 1638 - protein, 582 aa, Homo sapiens
MAEFLDDQETRLCDNCKKEIPVFNFTIHEIHCQRNIGMCPTCKEPFPKSDMETHMAAEHCQVTCKCNKKLEKRLLKKHEETECPLRLAVCQHCDLELSILKLKEHEDYCGARTELCGNCGRNVLVKDLKTHPEVCGREGEEKRNEVAIPPNAYDESWGQDGIWIASQLLRQIEALDPPMRLPRRPLRAFESDVFHNRTTNQRNITAQVSIQNNLFEEQERQERNRGQQPPKEGGEESANLDFMLALSLQNEGQASSVAEQDFWRAVCEADQSHGGPRSLSDIKGAADEIMLPCEFCEELYPEELLIDHQTSCNPSRALPSLNTGSSSPRGVEEPDVIFQNFLQQAASNQLDSLMGLSNSHPVEESIIIPCEFCGVQLEEEVLFHHQDQCDQRPATATNHVTEGIPRLDSQPQETSPELPRRRVRHQGDLSSGYLDDTKQETANGPTSCLPPSRPINNMTATYNQLSRSTSGPRPGCQPSSPCVPKLSNSDSQDIQGRNRDSQNGAIAPGHVSVIRPPQNLYPENIVPSFSPGPSGRYGASGRSEGGRNSRVTPAAANYRSRTAKAKPSKQQGAGDAEEEEEE

SEQ ID NO: 1639 - protein, 320 aa, Homo sapiens
MGLPWGQPHLGLQMLLLALNCLRPSLSLGEWGSWMDASSQTQGAGGPAGVIGPWAPAPLRLGEAAPGTPTPVSVAHLLSPVATELVPYTPQITAWDLEGKVTATTFSLEQPRCVFDGLASASDTVWLVVAFSNASRGFQNPETLADIPASPQLLTDGHYMTLPLSPDQLPCGDPMAGSGGAPVLRVGHDHGCHQQPFCNAPLPGPGPYREDPRIHRHLARAAKWQHDRHYLHPLFSGRPPTLGLLGSLYHALLQPVVAGGGPGAAADRLLHGQALHDPPHPTQRGRHTAGGLQAWPGPPPQPQPLAWPLCMGLGEMGRWE

SEQ ID NO: 1640 - protein, 118 aa, Homo sapiens
MEDFATRTYGTSGLDNRPLFGETSAKDRIINLVVGSLTSLLILVTLISAFVFPQLPPKPLNIFFAVCISLSSITACILIYWYRQGDLEPKFRKLIYYIIFSIIMLCICANLYFHDVGR

SEQ ID NO: 1641 - protein, 133 aa, Homo sapiens
MRMSLAQRVLLTWLFTLLFLIMLVLKLDEKAPWNWFLIFIPVWIFDTILLVLLIVKMAGRCKSGFDPRHGSHNIKKKAWYLIAMLLKLAFCLALCAKLEQFTTMNLSYVFIPLWALLAGALTELGYNVFFVRD

SEQ ID NO: 1642 - protein, 63 aa, Homo sapiens
MKHVLNLYLLGVVLTLLSIFVRVMESLEGLLESPSPGTSWTTRSQLANTEPTKGLPDHPSRSM

SEQ ID NO: 1643 - protein, 792 aa, Homo sapiens
MLPAGEIGASPAAPCCSESGDERKNLEEKSDINVTVLIGSKQVSEGTDNGDLPSYVSAFIEKEVGNDLKSLKKLDKLIEQRTVSKMQLEEQVLTISSEIPKRIRSALKNAEESKQFLNQFLEQETHLFSAINSHLLTAQPWMDDLGTMISQIEEIERHLAYLKWISQIEELSDNIQQYLMTNNVPEAASTLVSMAELDIKLQESSCTHLLGFMRATVKFWHKILKDKLTSDFEEILAQLHWPFIAPPQSQTVGLSRPASAPEIYSYLETLFCQLLKLQTSDELLTEPKQLPEKYSLPASPSVILPIQVMLTPLQKRFRYHFRGNRQTNVLSKPEWYLAQVLMWIGNHTEFLDEKIQPILDKVGSLVNARLEFSRGLMMLVLEKLATDIPCLLYDDNLFCHLVDEVLLFERELHSVHGYPGTFASCMHILSEETCFQRWLTVERKFALQKMDSMLSSEAAWVSQYKDITDVDEMKVPDCAETFMTLLLVITDRYKNLPTASRKLQFLELQKDLVDDFRIRLTQVMKEETRASLGFRYCAILNAVNYISTVLADWADNVFFLQLQQAALEVFAENNTLSKLQLGQLASMESSVFDDMINLLERLKHDMLTRQVDHVFREVKDAAKLYKKERWLSLPSQSEQAVMSLSSSACPLLLTLRDHLLQLEQQLCFSLFKIFWQMLVEKLDVYIYQEIILANHFNEGGAAQLQFDMTRNLFPLFSHYCKRPENYFKHIKEACIVLNLNVGSALLLKDVLQSASGQLPATAALNEVGIYKLAQQDVEILLNLRTNWPNTGK

SEQ ID NO: 1644 - protein, 1858 aa, Homo sapiens
MSIVIPLGVDTAETSYLEMAAGSEPESVEASPVVVEKSNSYPHQLYTSSSHHSHSYIGLPYADHNYGARPPPTPPASPPPSVLISKNEVGIFTTPNFDETSSATTISTSEDGSYGTDVTRCICGFTHDDGYMICCDKCSVWQHIDCMGIDRQHIPDTYLCERCQPRNLDKERAVLLQRRKRENMSDGDTSATESGDEVPVELYTAFQHTPTSITLTASRVSKVNDKRRKKSGEKEQHISKCKKAFREGSRKSSRVKGSAPEIDPSSDGSNFGWETKIKAWMDRYEEANNNQYSEGVQREAQRIALRLGNGNDKKEMNKSDLNTNNLLFKPPVESHIQKNKKILKSAKDLPPDALIIEYRGKFMLREQFEANGYFFKRPYPFVLFYSKFHGLEMCVDARTFGNEARFIRRSCTPNAEVRHEIQDGTIHLYIYSIHSIPKGTEITIAFDFDYGNCKYKVDCACLKENPECPVLKRSSESMENINSGYETRRKKGKKDKDISKEKDTQNQNITLDCEGTTNKMKSPETKQRKLSPLRLSVSNNQEPDFIDDIEEKTPISNEVEMESEEQIAERKRKMTREERKMEAILQAFARLEKREKRREQALERISTAKTEVKTECKDTQIVSDAEVIQEQAKEENASKPTPAKVNRTKQRKSFSRSRTHIGQQRRRHRTVSMCSDIQPSSPDIEVTSQQNDIENTVLTIEPETETALAEIITETEVPALNKCPTKYPKTKKHLVNEWLSEKNEKTGKPSDGLSERPLRITTDPEVLATQLNSLPGLTYSPHVYSTPKHYIRFTSPFLSEKRRRKEPTENISGSCKKRWLKQALEEENSAILHRFNSPCQERSRSPAVNGENKSPLLLNDSCSLPDLTTPLKKRRFYQLLDSVYSETSTPTPSPYATPTHTDITPMDPSFATPPRIKSDDETCRNGYKPIYSPVTPVTPGTPGNTMHFENISSPESSPEIKRRTYSQEGYDRSSTMLTLGPFRNSNLTELGLQEIKTIGYTSPRSRTEVNRQCPGEKEPVSDLQLGLDAVEPTALHKTLETPAHDRAEPNSQLDSTHSGRGTMYSSWVKSPDRTGVNFSVNSNLRDLTPSHQLEVGGGFRISESKCLMQDDTRGMFMETTVFCTSEDGLVSGFGRTVNDNLIDGNCTPQNPPQKKKVSLLEYRKRQREARKSGSKTENFPLISVSPHASGSLSNNGDGCASSNDNGEQVDHTASLPLPTPATVYNATSEETSNNCPVKDATASEKNEPEVQWTASTSVEQVRERSYQRALLLSDHRKDKDSGGESPCVSCSPSHVQSSPSSHSNHIPQLQAKGPVPSFSELMEDPDPENPEPTTTNECPSPDTSQNTCKSPPKMSKPGSPGSVIPAQAHGKIFTKPDPQWDSTVSASEAENGVHLKTELQQKQLSNNNQALSKNHPPQTHVRNSSEQLSQKLPSVPTKLHCPPSPHLENPPKSSTPHTPVQHGYLSPKPPSQQLGSPYRPHHSQSPQVGTPQREPQRNFYPAAQNLPANTQQATSGTLFTQTPSGQSSATYSQFNQQSLNSTAPPPPPPPPPSSSYYQNQQPSANFQNYNQLKGSLSQQTVFTSGPNQALPGTTSQQTVPGHHVTPGHFLPSQNPTIHHQTAAAVVPPPPPPPPAPGPHLVQQPNSHQQHSVAHVVGPVHAVTPGSHIHSQTAGHHLPPPPPPPGPAPHHHPPPHPSTGLQGLQAQHQHVVNSAPPPPPPPPPSSVLASGHHTTSAQALHHPPHQGPPLFPSSAHPTVPPYPSQATHHTTLGPGPQHQPSGTGPHCPLPVTGPHLQPQGPNSIPTPTASGFCPHPGSVALPHGVQGPQQASPVPGQIPIHRAQVPPTFQNNYHGSGWH

SEQ ID NO: 1645 - protein, 574 aa, Homo sapiens
MCPRAARAPATLLLALGAVLWPAAGAWELTILHTNDVHSRLEQTSEDSSKCVNASRCMGGVARLFTKVQQIRRAEPNVLLLDAGDQYQGTIWFTVYKGAEVAHFMNALRYDAMALGNHEFDNGVEGLIEPLLKEAKFPILSANIKAKGPLASQISGLYLPYKVLPVGDEVVGIVGYTSKETPFLSNPGTNLVFEDEITALQPEVDKLKTLNVNKIIALGHSGFEMDKLIAQKVRGVDVVVGGHSNTFLYTGNPPSKEVPAGKYPFIVTSDDGRKVPVVQAYAFGKYLGYLKIEFDERGNVISSHGNPILLNSSIPEDPSIKADINKWRIKLDNYSTQELGKTIVYLDGSSQSCRFRECNMGNLICDAMINNNLRHTDEMFWNHVSMCILNGGGIRSPIDERNNGTITWENLAAVLPFGGTFDLVQLKGSTLKKAFEHSVHRYGQSTGEFLQVGGIHVVYDLSRKPGDRVVKLDVLCTKCRVPSYDPLKMDEVYKVILPNFLANGGDGFQMIKDELLRHDSGDQDINVVSTYISKMKVIYPAVEGRIKFSTGSHCHGSFSLIFLSLWAVIFVLYQ

SEQ ID NO: 1646 - protein, 203 aa, Homo sapiens
MACGATLKRTLDFDPLLSPASPKRRRCAPLSAPTSAAASPLSAAAATAASFSAAAASPQKYLRMEPSPFGDVSSRLTTEQILYNIKQEYKRMQKRRHLETSFQQTDPCCTSDAQPHAFLLSGPASPGTSSAASSPLKKEQPLFTLRQVGMICERLLKEREEKVREEYEEILNTKLAEQYDAFVKFTHDQIMRRYGEQPASYVS

SEQ ID NO: 1647 - protein, 712 aa, Homo sapiens
MATSSMSKGCFVFKPNSKKRKISLPIEDYFNKGKNEPEDSKLRFETYQLIWQQMKSENERLQEELNKNLFDNLIEFLQKSHSGFQKNSRDLGGQIKLREIPTAALVLGVNVTDHDLTFGSLTEALQNNVTPYVVSLQAKDCPDMKHFLQKLISQLMDCCVDIKSKEEESVHVTQRKTHYSMDSLSSWYMTVTQKTDPKMLSKKRTTSSQWQSPPVVVILKDMESFATKVLQDFIIISSQHLHEFPLILIFGIATSPIIIHRLLPHAVSSLLCIELFQSLSCKEHLTTVLDKLLLTTQFPFKINEKVLQVLTNIFLYHDFSVQNFIKGLQLSLLEHFYSQPLSVLCCNLPEAKRRINFLSNNQCENIRRLPSFRRYVEKQASEKQVALLTNERYLKEETQLLLENLHVYHMNYFLVLRCLHKFTSSLPKYPLGRQIRELYCTCLEKNIWDSEEYASVLQLLRMLAKDELMTILEKCFKVFKSYCENHLGSTAKRIEEFLAQFQSLDAETKEEEDASGSQPKGLQKTDLYHLQKSLLEMKELRRSKKQTKFEVLRENVVNFIDCLVREYLLPPETQPLHEVVYFSAAHALREHLNAAPRIALHTALNNPYYYLKNEALKSEEGCIPNIAPDICIAYKLHLECSRLINLVDWSEAFATVVTAAEKMDANSATSEEMNEIIHARFIRAVSELELLGFIKPTKQKTDHVARLTWGGC

SEQ ID NO: 1648 - protein, 1025 aa, Homo sapiens
MHRKKVDNRIRILIENGVAERQRSLFVVVGDRGKDQVVILHHMLSKATVKARPSVLWCYKKELGFSSHRKKRMRQLQKKIKNGTLNIKQDDPFELFIAATNIRYCYYNETHKILGNTFGMCVLQDFEALTPNLLARTVETVEGGGLVVILLRTMNSLKQLYTVTMDVHSRYRTEAHQDVVGRFNERFILSLASCKKCLVIDDQLNILPISSHVATMEALPPQTPDESLGPSDLELRELKESLQDTQPVGVLVDCCKTLDQAKAVLKFIEGISEKTLRSTVALTAARGRGKSAALGLAIAGAVAFGYSNIFVTSPSPDNLHTLFEFVFKGFDALQYQEHLDYEIIQSLNPEFNKAVIRVNVFREHRQTIQYIHPADAVKLGQAELVVIDEAAAIPLPLVKSLLGPYLVFMASTINGYEGTGRSLSLKLIQQLRQQSAQSQVSTTAENKTTTTARLASARTLYEVSLQESIRYAPGDAVEKWLNDLLCLDCLNITRIVSGCPLPEACELYYVNRDTLFCYHKASEVFLQRLMALYVASHYKNSPNDLQMLSDAPAHHLFCLLPPVPPTQNALPEVLAVIQVCLEGEISRQSILNSLSRGKKASGDLIPWTVSEQFQDPDFGGLSGGRVVRIAVHPDYQGMGYGSRALQLLQMYYEGRFPCLEEKVLETPQEIHTVSSEAVSLLEEVITPRKDLPPLLLKLNERPAERLDYLGVSYGLTPRLLKFWKRAGFVPVYLRQTPNDLTGEHSCIMLKTLTDEDEADQGGWLAAFWKDFRRRFLALLSYQFSTFSPSLALNIIQNRNMGKPAQPALSREELEALFLPYDLKRLEMYSRNMVDYHLIMDMIPAISRIYFLNQLGDLALSAAQSALLLGIGLQHKSVDQLEKEIELPSGQLMGLFNRIIRKVVKLFNEVQEKAIEEQMVAAKDVVMEPTMKTLSDDLDEAAKEFQEKHKKEVGKLKSMDLSEYIIRGDDEEWNEVLNKAGPNASIISLKSDKKRKLEAKQEPKQSKKLKNRETKNKKDMKLKRKK

SEQ ID NO: 1649 - protein, 226 aa, Homo sapiens
MFTLLVLLSQLPTVTLGFPHCARGPKASKHAGEEVFTSKEEANFFIHRRLLYNRFDLELFTPGNLERECNEELCNYEEAREIFVDEDKTIAFWQEYSAKGPTTKSDGNREKIDVMGLLTGLIAAGVFLVIFGLLGYYLCITKCNRLQHPCSSAVYERGRHTPSIIFRRPEEAALSPLPPSVEDAGLPSYEQAVALTRKHSVSPPPPYPGHTKGFRVFKKSMSLPSH

SEQ ID NO: 1650 - protein, 238 aa, Homo sapiens
MAVEGGMKCVKFLLYVLLLAFCACAVGLIAVGVGAQLVLSQTIIQGATPGSLLPVVIIAVGVFLFLVAFVGCCGACKENYCLMITFAIFLSLIMLVEVAAAIAGYVFRDKVMSEFNNNFRQQMENYPKNNHTASILDRMQADFKCCGAANYTDWEKIPSMSKNRVPDSCCINVTVGCGINFNEKAIHKEGCVEKIGGWLRKNVLVVAAAALGIAFVEVLGIVFACCLVKSIRSGYEVM

SEQ ID NO: 1651 - protein, 573 aa, Homo sapiens
MLGSLGLWALLPTAVEAPPNRRTCVFFEAPGVRGSTKTLGELLDTGTELPRAIRCLYSRCCFGIWNLTQDRAQVEMQGCRDSDEPGCESLHCDPSPRAHPSPGSTLFTCSCGTDFCNANYSHLPPPGSPGTPGSQGPQAAPGESIWMALVLLGLFLLLLLLLGSIILALLQRKNYRVRGEPVPEPRPDSGRDWSVELQELPELCFSQVIREGGHAVVWAGQLQGKLVAIKAFPPRSVAQFQAERALYELPGLQHDHIVRFITASRGGPGRLLSGPLLVLELHPKGSLCHYLTQYTSDWGSSLRMALSLAQGLAFLHEERWQNGQYKPGIAHRDLSSQNVLIREDGSCAIGDLGLALVLPGLTQPPAWTPTQPQGPAAIMEAGTQRYMAPELLDKTLDLQDWGMALRRADIYSLALLLWEILSRCPDLRPDSSPPPFQLAYEAELGNTPTSDELWALAVQERRRPYIPSTWRCFATDPDGLRELLEDCWDADPEARLTAECVQQRLAALAHPQESHPFPESCPRGCPPLCPEDCTSIPAPTILPCRPQRSACHFSVQQGPCSRNPQPACTLSPV

SEQ ID NO: 1652 - protein, 138 aa, Homo sapiens
MKFTTLLFLAAVAGALVYAEDASSDSTGADPAQEAGTSKPNEEISGPAEPASPPETTTTAQETSAAAVQGTAKVTSSRQELNPLKSIVEKSILLTEQALAKAGKGMHGGVPGGKQFIENGSEFAQKLLKKFSLLKPWA

SEQ ID NO: 1653 - protein, 407 aa, Homo sapiens
MVLAAPLLLGFLLLALELRPRGEAAEGPAAAAAAAAAAAAAGVGGERSSRPAPSVAPEPDGCPVCVWRQHSRELRLESIKSQILSKLRLKEAPNISREVVKQLLPKAPPLQQILDLHDFQGDALQPEDFLEEDEYHATTETVISMAQETDPAVQTDGSPLCCHFHFSPKVMFTKVLKAQLWVYLRPVPRPATVYLQILRLKPLTGEGTAGGGGGGRRHIRIRSLKIELHSRSGHWQSIDFKQVLHSWFRQPQSNWGIEINAFDPSGTDLAVTSLGPGAEGLHPFMELRVLENTKRSRRNLGLDCDEHSSESRCCRYPLTVDFEAFGWDWIIAPKRYKANYCSGQCEYMFMQKYPHTHLVQQANPRGSAGPCCTPTKMSPINMLYFNDKQQIIYGKIPGMVVDRCGCS

SEQ ID NO: 1654 - protein, 1137 aa, Homo sapiens
MAGARSRDPWGASGICYLFGSLLVELLFSRAVAFNLDVMGALRKEGEPGSLFGFSVALHRQLQPRPQSWLLVGAPQALALPGQQANRTGGLFACPLSLEETDCYRVDIDQGADMQKESKENQWLGVSVRSQGPGGKIVTCAHRYEARQRVDQILETRDMIGRCFVLSQDLAIRDELDGGEWKFCEGRPQGHEQFGFCQQGTAAAFSPDSHYLLFGAPGTYNWKGLLFVTNIDSSDPDQLVYKTLDPADRLPGPAGDLALNSYLGFSIDSGKGLVRAEELSFVAGAPRANHKGAVVILRKDSASRLVPEVMLSGERLTSGFGYSLAVADLNSDGWPDLIVGAPYFFERQEELGGAVYVYLNQGGHWAGISPLRLCGSPDSMFGISLAVLGDLNQDGFPDIAVGAPFDGDGKVFIYHGSSLGVVAKPSQVLEGEAVGIKSFGYSLSGSLDMDGNQYPDLLVGSLADTAVLFRARPILHVSHEVSIAPRSIDLEQPNCAGGHSVCVDLRVCFSYIAVPSSYSPTVALDYVLDADTDRRLRGQVPRVTFLSRNLEEPKHQASGTVWLKHQHDRVCGDAMFQLQENVKDKLRAIVVTLSYSLQTPRLRRQAPGQGLPPVAPILNAHQPSTQRAEIHFLKQGCGEDKICQSNLQLVRARFCTRVSDTEFQPLPMDVDGTTALFALSGQPVIGLELMVTNLPSDPAQPQADGDDAHEAQLLVMLPDSLHYSGVRALDPAEKPLCLSNENASHVECELGNPMKRGAQVTFYLILSTSGISIETTELEVELLLATISEQELHPVSARARVFIELPLSIAGMAIPQQLFFSGVVRGERAMQSERDVGSKVKYEVTVSNQGQSLRTLGSAFLNIMWPHEIANGKWLLYPMQVELEGGQGPGQKGLCSPRPNILHLDVDSRDRRRRELEPPEQQEPGERQEPSMSWWPVSSAEKKKNITLDCARGTANCVVFSCPLYSFDRAAVLHVWGRLWNSTFLEEYSAVKSLEVIVRANITVKSSIKNLMLRDASTVIPVMVYLDPMAVVAEGVPWWVILLAVLAGLLVLALLVLLLWKMGFFKRAKHPEATVPQYHAVKIPREDRQQFKEEKTGTILRNNWGSPRREGPDAHPILAADGHPELGPDGHPGPGTA

SEQ ID NO: 1655 - protein, 318 aa, Homo sapiens
MWLPLLLGALLWAVLWLLRDRQSLPASNAFVFITGCDSGFGRLLALQLDQRGFRVLASCLTPSGAEDLQRVASSRLHTTLLDITDPQSVQQAAKWVEMHVKEAGLFGLVNNAGVAGIIGPTPWLTRDDFQRVLNVNTMGPIGVTLALLPLLQQARGRVINITSVLGRLAANGGGYCVSKFGLEAFSDSLRRDVAHFGIRVSIVEPGFFRTPVTNLESLEKTLQACWARLPPATQAHYGGAFLTKYLKMQQRIMNLICDPDLTKVSRCLEHALTARHPRTRYSPGWDAKLLWLPASYLPASLVDAVLTWVLPKPAQAVY

SEQ ID NO: 1656 - protein, 303 aa, Homo sapiens
MATSRYEPVAEIGVGAYGTVYKARDPHSGHFVALKSVRVPNGGGGGGGLPISTVREVALLRRLEAFEHPNVVRLMDVCATSRTDREIKVTLVFEHVDQDLRTYLDKAPPPGLPAETIKDLMRQFLRGLDFLHANCIVHRDLKPENILVTSGGTVKLADFGLARIYSYQMALTPVVVTLWYRAPEVLLQSTYATPVDMWSVGCIFAEMFRRKPLFCGNSEADQLGKIFDLIGLPPEDDWPRDVSLPRGAFPPRGPRPVQSVVPEMEESGAQLLLEMLTFNPHKRISAFRALQHSYLHKDEGNPE

SEQ ID NO: 1657 - protein, 210 aa, Homo sapiens
MVCGGFACSKNALCALNVVYMLVSLLLIGVAAWGKGLGLVSSIHIIGGVIAVGVFLLLIAVAGLVGAVNHHQVLLFFYMIILGLVFIFQFVISCSCLAINRSKQTDVINASWWVMSNKTRDELERSFDCCGLFNLTTLYQQDYDFCTAICKSQSPTCQMCGEKFLKHSDEALKILGGVGLFFSFTEILGVWLAMRFRNQKDPRANPSAFL

SEQ ID NO: 1658 - protein, 502 aa, Homo sapiens
MAWALKLPLADEVIESGLVQDFDASLSGIGQELGAGAYSMSDVLALPIFKQEESSLPPDNENKILPFQYVLCAATSPAVKLHDETLTYLNQGQSYEIRMLDNRKLGELPEINGKLVKSIFRVVFHDRRLQYTEHQQLEGWRWNRPGDRILDIDIPMSVGIIDPRANPTQLNTVEFLWDPAKRTSVFIQVHCISTEFTMRKHGGEKGVPFRVQIDTFKENENGEYTEHLHSASCQIKVFKPKGADRKQKTDREKMEKRTPHEKEKYQPSYETTILTECSPWPEITYVNNSPSPGFNSSHSSFSLGEGNGSPNHQPEPPPPVTDNLLPTTTPQEAQQWLHRNRFSTFTRLFTNFSGADLLKLTRDDVIQICGPADGIRLFNALKGRMVRPRLTIYVCQESLQLREQQQQQQQQQQKHEDGDSNGTFFVYHAIYLEELTAVELTEKIAQLFSISPCQISQIYKQGPTGIHVLISDEMIQNFQEEACFILDTMKAETNDSYHIILK

SEQ ID NO: 1659 - protein, 2120 aa, Homo sapiens
MRSFKRVNFGTLLSSQKEAEELLPALKEFLSNPPAGFPSSRSDAERRQACDAILRACNQQLTAKLACPRHLGSLLELAELACDGYLVSTPQRPPLYLERILFVLLRNAAAQGSPEATLRLAQPLHACLVQCSREAAPQDYEAVARGSFSLLWKGAEALLERRAAFAARLKALSFLVLLEDESTPCEVPHFASPTACRAVAAHQLFDASGHGLNEADADFLDDLLSRHVIRALVGERGSSSGLLSPQRALCLLELTLEHCRRFCWSRHHDKAISAVEKAHSYLRNTNLAPSLQLCQLGVKLLQVGEEGPQAVAKLLIKASAVLSKSMEAPSPPLRALYESCQFFLSGLERGTKRRYRLDAILSLFAFLGGYCSLLQQLRDDGVYGGSSKQQQSFLQMYFQGLHLYTVVVYDFAQGCQIVDLADLTQLVDSCKSTVVWMLEALEGLSGQELTDHMGMTASYTSNLAYSFYSHKLYAEACAISEPLCQHLGLVKPGTYPEVPPEKLHRCFRLQVESLKKLGKQAQGCKMVILWLAALQPCSPEHMAEPVTFWVRVKMDAARAGDKELQLKTLRDSLSGWDPETLALLLREELQAYKAVRADTGQERFNIICDLLELSPEETPAGAWARATHLVELAQVLCYHDFTQQTNCSALDAIREALQLLDSVRPEAQARDQLLDDKAQALLWLYICTLEAKMQEGIERDRRAQAPGNLEEFEVNDLNYEDKLQEDRFLYSNIAFNLAADAAQSKCLDQALALWKELLTKGQAPAVRCLQQTAASLQILAALYQLVAKPMQALEVLLLLRIVSERLKDHSKAAGSSCHITQLLLTLGCPSYAQLHLEEAASSLKHLDQTTDTYLLLSLTCDLLRSQLYWTHQKVTKGVSLLLSVLRDPALQKSSKAWYLLRVQVLQLVAAYLSLPSNNLSHSLWEQLCAQGWQTPEIALIDSHKLLRSIILLLMGSDILSTQKAAVETSFLDYGENLVQKWQVLSEVLSCSEKLVCHLGRLGSVSEAKAFCLEALKLTTKLQIPRQCALFLVLKGELELARNDIDLCQSDLQQVLFLLESCTEFGGVTQHLDSVKKVHLQKGKQQAQVPCPPQLPEEELFLRGPALELVATVAKEPGPIAPSTNSSPVLKTKPQPIPNFLSHSPTCDCSLCASPVLTAVCLRWVLVTAGVRLAMGHQAQGLDLLQVVLKGCPEAAERLTQALQASLNHKTPPSLVPSLLDEILAQAYTLLALEGLNQPSNESLQKVLQSGLKFVAARIPHLEPWRASLLLIWALTKLGGLSCCTTQLFASSWGWQPPLIKSVPGSEPSKTQGQKRSGRGRQKLASAPLRLNNTSQKGLEGRGLPCTPKPPDRIRQAGPHVPFTVFEEVCPTESKPEVPQAPRVQQRVQTRLKVNFSDDSDLEDPVSAEAWLAEEPKRRGTASRGRGRARKGLSLKTDAVVAPGSAPGNPGLNGRSRRAKKVASRHCEERRPQRASDQARPGPEIMRTIPEEELTDNWRKMSFEILRGSDGEDSASGGKTPAPGPEAASGEWELLRLDSSKKKLPSPCPDKESDKDLGPRLRLPSAPVATGLSTLDSICDSLSVAFRGISHCPPSGLYAHLCRFLALCLGHRDPYATAFLVTESVSITCRHQLLTHLHRQLSKAQKHRGSLEIADQLQGLSLQEMPGDVPLARIQRLFSFRALESGHFPQPEKESFQERLALIPSGVTVCVLALATLQPGTVGNTLLLTRLEKDSPPVSVQIPTGQNKLHLRSVLNEFDAIQKAQKENSSCTDKREWWTGRLALDHRMEVLIASLEKSVLGCWKGLLLPSSEEPGPAQEASRLQELLQDCGWKYPDRTLLKIMLSGAGALTPQDIQALAYGLCPTQPERAQELLNEAVGRLQGLTVPSNSHLVLVLDKDLQKLPWESMPSLQALPVTRLPSFRFLLSYSIIKEYGASPVLSQGVDPRSTFYVLNPHNNLSSTEEQFRANFSSEAGWRGVVGEVPRPEQVQEALTKHDLYIYAGHGAGARFLDGQAVLRLSCRAVALLFGCSSAALAVRGNLEGAGIVLKYIMAGCPLFLGNLWDVTDRDIDRYTEALLQGWLGAGPGAPLLYYVNQARQAPRLKYLIGAAPIAYGLPVSLR

SEQ ID NO: 1660 - protein, 434 aa, Homo sapiens
MPDRDSYANGTGSSGGGPGGGGSEEASGAGVGSGGASSDAICRDFLRNVCKRGKRCRYRHPDMSEVSNLGVSKNEFIFCHDFQNKECSRPNCRFIHGSKEDEDGYKKTGELPPRLRQKVAAGLGLSPADLPNGKEEVPICRDFLKGDCQRGAKCKFRHLQRDFEFDARGGGGTGGGSTGSVLPGRRHDLYDIYDLPDRGFEDHEPGPKRRRGGCCPPDGPHFESYEYSLAPPRGVECRLLEEENAMLRKRVEELKKQVSNLLATNEVLLEQNAQFRNQAKVITLSSTAPATEQTLAPTVGTVATFNHGIAQTHTTLSSQALQPRPVSQQELVAPAGAPAAPPTNAAPPAAPPPPPPHLTPEITPLSAALAQTIAQGMAPPPVSMAPVAVSVAPVAPVAVSMAQPLAGITMSHTTTPMVTYPIASQSMRITAMPH

SEQ ID NO: 1661 - protein, 505 aa, Homo sapiens
MAESAGASSFFPLVVLLLAGSGGSGPRGVQALLCACTSCLQANYTCETDGACMVSIFNLDGMEHHVRTCIPKVELVPAGKPFYCLSSEDLRNTHCCYTDYCNRIDLRVPSGHLKEPEHPSMWGPVELVGIIAGPVFLLFLIIIIVFLVINYHQRVYHNRQRLDMEDPSCEMCLSKDKTLQDLVYDLSTSGSGSGLPLFVQRTVARTIVLQEIIGKGRFGEVWRGRWRGGDVAVKIFSSREERSWFREAEIYQTVMLRHENILGFIAADNKDNGTWTQLWLVSDYHEHGSLFDYLNRYTVTIEGMIKLALSAASGLAHLHMEIVGTQGKPGIAHRDLKSKNILVKKNGMCAIADLGLAVRHDAVTDTIDIAPNQRVGTKRYMAPEVLDETINMKHFDSFKCADIYALGLVYWEIARRCNSGGVHEEYQLPYYDLVPSDPSIEEMRKVVCDQKLRPNIPNWWQSYEALRVMGKMMRECWYANGAARLTALRIKKTLSQLSVQEDVKI

SEQ ID NO: 1662 - protein, 613 aa, Homo sapiens
MAAETLLSSLLGLLLLGLLLPASLTGGVGSLNLEELSEMRYGIEILPLPVMGGQSQSSDVVIVSSKYKQRYECRLPAGAIHFQREREEETPAYQGPGIPELLSPMRDAPCLLKTKDWWTYEFCYGRHIQQYHMEDSEIKGEVLYLGYYQSAFDWDDETAKASKQHRLKRYHSQTYGNGSKCDLNGRPREAEVRFLCDEGAGISGDYIDRVDEPLSCSYVLTIRTPRLCPHPLLRPPPSAAPQAILCHPSLQPEEYMAYVQRQAVDSKQYGDKIIEELQDLGPQVWSETKSGVAPQKMAGASPTKDDSKDSDFWKMLNEPEDQAPGGEEVPAEEQDPSPEAADSASGAPNDFQNNVQVKVIRSPADLIRFIEELKGGTKKGKPNIGQEQPVDDAAEVPQREPEKERGDPERQREMEEEEDEDEDEDEDEDERQLLGEFEKELEGILLPSDRDRLRSEVKAGMERELENIIQETEKELDPDGLKKESERDRAMLALTSTLNKLIKRLEEKQSPELVKKHKKKRVVPKKPPPSPQPTGKIEIKIVRPWAEGTEEGARWLTDEDTRNLKEIFFNILVPGAEEAQKERQRQKELESNYRRVWGSPGGEGTGDLDEFDF

SEQ ID NO: 1663 - protein, 458 aa, Homo sapiens
MAAPRAGRGAGWSLRAWRALGGIRWGRRPRLTPDLRALLTSGTSDPRARVTYGTPSLWARLSVGVTEPRACLTSGTPGPRAQLTAVTPDTRTREASENSGTRSRAWLAVALGAGGAVLLLLWGGGRGPPAVLAAVPSPPPASPRSQYNFIADVVEKTAPAVVYIEILDRHPFLGREVPISNGSGFVVAADGLIVTNAHVVADRRRVRVRLLSGDTYEAVVTAVDPVADIATLRIQTKEPLPTLPLGRSADVRQGEFVVAMGSPFALQNTITSGIVSSAQRPARDLGLPQTNVEYIQTDAAIDFGNSGGPLVNLDGEVIGVNTMKVTAGISFAIPSDRLREFLHRGEKKNSSSGISGSQRRYIGVMMLTLSPSILAELQLREPSFPDVQHGVLIHKVILGSPAHRAGLRPGDVILAIGEQMVQNAEDVYEAVRTQSQLAVQIRRGRETLTLYVTPEVTE

SEQ ID NO: 1664 - protein, 188 aa, Homo sapiens
MVPGAAGWCCLVLWLPACVAAHGFRIHDYLYFQVLSPGDIRYIFTATPAKDFGGIFHTRYEQIHLVPAEPPEACGELSNGFFIQDQIALVERGGCSFLSKTRVVQEHGGRAVIISDNAVDNDSFYVEMIQDSTQRTADIPALFLLGRDGYMIRRSLEQHGLPWAIISIPVNVTSIPTFELLQPPWTFW

SEQ ID NO: 1665 - protein, 543 aa, Homo sapiens
MMPTPVILLKEGTDSSQGIPQLVSNISACQVIAEAVRTTLGPRGMDKLIVDGRGKATISNDGATILKLLDVVHPAAKTLVDIAKSQDAEVGDGTTSVTLLAAEFLKQVKPYVEEGLHPQIIIRAFRTATQLAVNKIKEIAVTVKKADKVEQRKLLEKCAMTALSSKLISQQKAFFAKMVVDAVMMLDDLLQLKMIGIKKVQGGALEDSQLVAGVAFKKTFSYAGFEMQPKKYHNPKIALLNVELELKAEKDNAEIRVHTVEDYQAIVDAEWNILYDKLEKIHHSGAKVVLSKLPIGDVATQYFADRDMFCAGRVPEEDLKRTMMACGGSIQTSVNALSADVLGRCQVFEETQIGGERYNFFTGCPKAKTCTFILRGGAEQFMEETERSLHDAIMIVRRAIKNDSVVAGGGAIEMELSKYLRDYSRTIPGKQQLLIGAYAKALEIIPRQLCDNAGFDATNILNKLRARHAQGGTWYGVDINNEDIADNFEAFVWEPAMVRINALTAASEAACLIVSVDETIKNPRSTVDAPTAAGRGRGRGRPH

SEQ ID NO: 1666 - protein, 653 aa, Homo sapiens
MALVRGAEPAAGPSRWLPTHVQVTVLRARGLRGKSSGAGSTSDAYTVIQVGREKYSTSVVEKTHGCPEWREECSFELPPGALDGLLRAQEADAGPAPWAASSAAACELVLTTMHRSLIGVDKFLGQATVALDEVFGAGRAQHTQWYKLHSKPGKKEKERGEIEVTIQFTRNNLSASMFDLSMKDKPRSPFSKIRDKMKGKKKYDLESASAILPSSAIEDPDLGSLGKMGKAKGFFLRNKLRKSSLTQSNTSLGSDSTLSSASGSLAYQGPGAELLTRSPSRSSWLSTEGGRDSAQSPKLFTHKRTYSDEANQMRVAPPRALLDLQGHLDAASRSSLCVNGSHIYNEEPQGPVRHRSSISGSLPSSGSLQAVSSRFSEEGPRSTDDTWPRGSRSNSSSEAVLGQEELSAQAKVLAPGASHPGEEEGARLPEGKPVQVATPIVASSEAVAEKEGARKEERKPRMGLFHHHHQGLSRSELGRRSSLGEKGGPILGASPHHSSSGEEKAKSSWFGLREAKDPTQKPSPHPVKPLSAAPVEGSPDRKQSRSSLSIALSSGLEKLKTVTSGSIQPVTQAPQAGQMVDTKRLKDSAVLDQSAKYYHLTHDELISLLLQRERELSQRDEHVQELESYIDRLLVRIMETSPTLLQIPPGPPK

SEQ ID NO: 1667 - protein, 112 aa, Homo sapiens
MAAALARLGLRPVKQVRVQFCPFEKNVESTRTFLQTVSSEKVRSTNLNCSVIADVRHDGSEPCVDVLFGDGHRLIMRGAHLTALEMLTAFASHIRARDAAGSGDKPGADTGR

SEQ ID NO: 1668 - protein, 952 aa, Homo sapiens
MAEGGAADLDTQRSDIATLLKTSLRKGDTWYLVDSRWFKQWKKYVGFDSWDKYQMGDQNVYPGPIDNSGLLKDGDAQSLKEHLIDELDYILLPTEGWNKLVSWYTLMEGQEPIARKVVEQGMFVKHCKVEVYLTELKLCENGNMNNVVTRRFSKADTIDTIEKEIRKIFSIPDEKETRLWNKYMSNTFEPLNKPDSTIQDAGLYQGQVLVIEQKNEDGTWPRGPSTPNVKNSNYCLPSYTAYKNYDYSEPGRNNEQPGLCGLSNLGNTCFMNSAIQCLSNTPPLTEYFLNDKYQEELNFDNPLGMRGEIAKSYAELIKQMWSGKFSYVTPRAFKTQVGRFAPQFSGYQQQDCQELLAFLLDGLHEDLNRIRKKPYIQLKDADGRPDKVVAEEAWENHLKRNDSIIVDIFHGLFKSTLVCPECAKISVTFDPFCYLTLPLPMKKERTLEVYLVRMDPLTKPMQYKVVVPKIGNILDLCTALSALSGIPADKMIVTDIYNHRFHRIFAMDENLSSIMERDDIYVFEININRTEDTEHVIIPVCLREKFRHSSYTHHTGSSLFGQPFLMAVPRNNTEDKLYNLLLLRMCRYVKISTETEETEGSLHCCKDQNINGNGPNGIHEEGSPSEMETDEPDDESSQDQELPSENENSQSEDSVGGDNDSENGLCTEDTCKGQLTGHKKRLFTFQFNNLGNTDINYIKDDTRHIRFDDRQLRLDERSFLALDWDPDLKKRYFDENAAEDFEKHESVEYKPPKKPFVKLKDCIELFTTKEKLGAEDPWYCPNCKEHQQATKKLDLWSLPPVLVVHLKRFSYSRYMRDKLDTLVDFPINDLDMSEFLINPNAGPCRYNLIAVSNHYGGMGGGHYTAFAKNKDDGKWYYFDDSSVSTASEDQIVSKAAYVLFYQRQDTFSGTGFFPLDRETKGASAATGIPLESDEDSNDNDNDIENENCMHTN

SEQ ID NO: 1669 - protein, 552 aa, Homo sapiens
MRLLPLAPGRLRRGSPRHLPSCSPALLLLVLGGCLGVFGVAAGTRRPNVVLLLTDDQDEVLGGMTPLKKTKALIGEMGMTFSSAYVPSALCCPSRASILTGKYPHNHHVVNNTLEGNCSSKSWQKIQEPNTFPAILRSMCGYQTFFAGKYLNEYGAPDAGGLEHVPLGWSYWYALEKNSKYYNYTLSINGKARKHGENYSVDYLTDVLANVSLDFLDYKSNFEPFFMMIATPAPHSPWTAAPQYQKAFQNVFAPRNKNFNIHGTNKHWLIRQAKTPMTNSSIQFLDNAFRKRWQTLLSVDDLVEKLVKRLEFTGELNNTYIFYTSDNGYHTGQFSLPIDKRQLYEFDIKVPLLVRGPGIKPNQTSKMLVANIDLGPTILDIAGYDLNKTQMDGMSLLPILRGASNLTWRSDVLVEYQGEGRNVTDPTCPSLSPGVSQCFPDCVCEDAYNNTYACVRTMSALWNLQYCEFDDQEVFVEVYNLTADPDQITNIAKTIDPELLGKMNYRLMMLQSCSGPTCRTPGVFDPGYRFDPRLMFSNRGSVRTRRFSKHLL

SEQ ID NO: 1670 - protein, 497 aa, Homo sapiens
MVRSRQMCNTNMSVPTDGAVTTSQIPASEQETLVRPKPLLLKLLKSVGAQKDTYTMKEVLFYLGQYIMTKRLYDEKQQHIVYCSNDLLGDLFGVPSFSVKEHRKIYTMIYRNLVVVNQQESSDSGTSVSENRCHLEGGSDQKDLVQELQEEKPSSSHLVSRPSTSSRRRAISETEENSDELSGERQRKRHKSDSISLSFDESLALCVIREICCERSSSSESTGTPSNPDLDAGVSEHSGDWLDQDSVSDQFSVEFEVESLDSEDYSLSEEGQELSDEDDEVYQVTVYQAGESDTDSFEEDPEISLADYWKCTSCNEMNPPLPSHCNRCWALRENWLPEDKGKDKGEISEKAKLENSTQAEEGFDVPDCKKTIVNDSRESCVEENDDKITQASQSQESEDYSQPSTSSSIIYSSQEDVKEFEREETQDKEESVESSLPLNAIEPCVICQGRPKNGCIVHGKTGHLMACFTCAKKLKKRNKPCPVCRQPIQMIVLTYFP

SEQ ID NO: 1671 - protein, 160 aa, Homo sapiens
MAAERKTRLSKNLLRMKFMQRGLDSETKKQLEEEEKKIISEEHWYLDLPELKEKESFIIEEQSFLLCEDLLYGRMSFRGFNPEVEKLMLQMNAKHKAEEVEDETVELDVSDEEMARRYETLVGTIGKKFARKRDHANYEEDENGDITPIKAKKMFLKPQD

SEQ ID NO: 1672 - protein, 316 aa, Homo sapiens
MALYELFSHPVERSYRAGLCSKAALFLLLAAALTYIPPLLVAFRSHGFWLKRSSYEEQPTVRFQHQVLLVALLGPESDGFLAWSTFPAFNRLQGDRLRVPLVSTREEDRNQDGKTDMLHFKLELPLQSTEHVLGVQLILTFSYRLHRMATLVMQSMAFLQSSFPVPGSQLYVNGDLRLQQKQPLSCGGLDARYNISVINGTSPFAYDYDLTHIVAAYQERNVTTVLNDPNPIWLVGRAADAPFVINAIIRYPVEVISYQPGFWEMVKFAWVQYVSILLIFLWVFERIKIFVFQNQVVTTIPVTVTPRGDLCKEHLS

SEQ ID NO: 1673 - protein, 492 aa, Homo sapiens
MAPVGVEKKLLLGPNGPAVAAAGDLTSEEEEGQSLWSSILSEVSTRARSKLPSGKNILVFGEDGSGKTTLMTKLQGAEHGKKGRGLEYLYLSVHDEDRDDHTRCNVWILDGDLYHKGLLKFAVSAESLPETLVIFVADMSRPWTVMESLQKWASVLREHIDKMKIPPEKMRELERKFVKDFQDYMEPEEGCQGSPQRRGPLTSGSDEENVALPLGDNVLTHNLGIPVLVVCTKCDAVSVLEKEHDYRDEHLDFIQSHLRRFCLQYGAALIYTSVKEEKNLDLLYKYIVHKTYGFHFTTPALVVEKDAVFIPAGWDNEKKIAILHENFTTVKPEDAYEDFIVKPPVRKLVHDKELAAEDEQVFLMKQQSLLAKQPATPTRASESPARGPSGSPRTQGRGGPASVPSSSPGTSVKKPDPNIKNNAASEGVLASFFNSLLSKKTGSPGSPGAGGVQSTAKKSGQKTVLSNVQEELDRMTRKPDSMVTNSSTENEA

SEQ ID NO: 1674 - protein, 374 aa, Homo sapiens
MAEPGEGLPEEVLALIFRHLSLRDRAAAARVCRAWAAAATCSAVWHDTKISCECELEGMLPPYLSACLDHIHNLRLEFEPSRKPSRRAAIELLMVLAGRAPGLRGLRLECRGEKPLFDAGRDVLEAVHAVCGAASQLRHLDLRRLSFTLDDALVLQAARSCPELHSLFLDNSTLVGSVGPGSVLELLEACPRLRALGLHLASLSHAILEALAAPDRAPFALLALRCACPEDARASPLPNEAWVALRRRHPGLAVELELEPALPAESVTRVLQPAVPVAALRLNLSGDTVGPVRFAAHHYAATLCALEVRAAASAELNAALEELAARCAALREVHCFCVVSHSVLDAFRAHCPRLRTYTLKLTREPHPWRPTLVA

SEQ ID NO: 1675 - protein, 1164 aa, Homo sapiens
MAGGEDRGDGEPVSVVTVRVQYLEDTDPFACANFPEPRRAPTCSLDGALPLGAQIPAVHRLLGAPLKLEDCALQVSPSGYYLDTELSLEEQREMLEGFYEEISKGRKPTLILRTQLSVRVNAILEKLYSSSGPELRRSLFSLKQIFQEDKDLVPEFVHSEGLSCLIRVGAAADHNYQSYILRALGQLMLFVDGMLGVVAHSDTIQWLYTLCASLSRLVVKTALKLLLVFVEYSENNAPLFIRAVNSVASTTGAPPWANLVSILEEKNGADPELLVYTVTLINKTLAALPDQDSFYDVTDALEQQGMEALVQRHLGTAGTDVDLRTQLVLYENALKLEDGDIEEAPGAGGRRERRKPSSEEGKRSRRSLEGGGCPARAPEPGPTGPASPVGPTSSTGPALLTGPASSPVGPPSGLQASVNLFPTISVAPSADTSSERSIYKARFLENVAAAETEKQVALAQGRAETLAGAMPNEAGGHPDARQLWDSPETAPAARTPQSPAPCVLLRAQRSLAPEPKEPLIPASPKAEPIWELPTRAPRLSIGDLDFSDLGEDEDQDMLNVESVEAGKDIPAPSPPLPLLSGVPPPPPLPPPPPIKGPFPPPPPLPLAAPLPHSVPDSSALPTKRKTVKLFWRELKLAGGHGVSASRFGPCATLWASLDPVSVDTARLEHLFESRAKEVLPSKKAGEGRRTMTTVLDPKRSNAINIGLTTLPPVHVIKAALLNFDEFAVSKDGIEKLLTMMPTEEERQKIEEAQLANPDIPLGPAENFLMTLASIGGLAARLQLWAFKLDYDSMEREIAEPLFDLKVGMEQLVQNATFRCILATLLAVGNFLNGSQSSGFELSYLEKVSEVKDTVRRQSLLHHLCSLVLQTRPESSDLYSEIPALTRCAKVDFEQLTENLGQLERRSRAAEESLRSLAKHELAPALRARLTHFLDQCARRVAMLRIVHRRVCNRFHAFLLYLGYTPQAAREVRIMQFCHTLREFALEYRTCRERVLQQQQKQATYRERNKTRGRMITETEKFSGVAGEAPSNPSVPVAVSSGPGRGDADSHASMKSLLTSRPEDTTHNRRSRGMVQSSSPIMPTVGPSTASPEEPPGSSLPSDTSDEIMDLLVQSVTKSSPRALAARERKRSRGNRKSLRRTLKSGLGDDLVQALGLSKGPGLEV

SEQ ID NO: 1676 - protein, 550 aa, Homo sapiens
MSHGPSPRLAESPQLSKGSLLTILGSPSPERMGPADSLPPTPPSGTPSPGPPPALPLPPAPALLADGDWESREELRLRELEEARARAAQMEKTMRRWSDCTANWREKWSKVRAERNRAREEVRQLRQRLDALTKELAGARRERQEAQGECEARGRELARLRGARGVADQTRDGPEPEAEREPVRDVGSERPPGSQELELVESLLKSMPEESEDCWEARSLGAGGPRGSSGRQERSRLPWEDTAATEEEASKLTALRLRLDESQKVLLKEREDKLALSRNIEKLEGELSQWKIKYEELSKTKQEMLKQLSILKEAHQDELGRMSEDLEDELGARSSMDRKMAELRGEMERLQAENAAEWGRRERLETEKLGLERENKKLRAQVGDLEEALARRRRQTASALDCDLRASQAALFEKNKELADLKHVHGKLKKQFQEKVAELAHANRRVEQHEAEVKKLRLRVEELKKELAQAEDELDEAHNQARKLQRSLDEQTEQSENLQVQLEHLQSRLRRQQQNAPLFGKIRSARFGTEEAEDGTSDLDEDEDLQIQVA

SEQ ID NO: 1677 - protein, 1524 aa, Homo sapiens
MAAVYSGISLKLKSKTTSWEDKLKLAHFAWISHQCFLPNKEQVLLDWARQSLVAFYKKKLELKEDIVERLWIYIDNILHSRKLQNLLKNGKTINLQISLVKIINERVAEFSLSGSQRNICAVLRCCQGILSTPALAVIYTAKQELMVALLSQLCWSACRQPEGAVVAQLFEVIHLALGHYLLILQQQVNPRRAFGDVTAHLLQPCLVLRHLLSGGTWTQAGQGQLRQVLSRDIRSQIEAMFRGGIFQPELLSSYKEGLLDQQQGDVKTGAMKNLLAPMDTVLNRLVDAGYCAASLHTSVVANSVALLYKLFLDSYFKEGNQLLCFQVLPRLFGCLKISHLQEEQSKALSTSDWTTELLVVEQLLNSVANNNIYNIAADRIRHEEAQFRFYRHVAELLINHAQAPIPAWFRCLKTLISLNHLILEPDLDDLLASAWIDAEVTEFRTKKAQEALIRTVFQTYAKLRQVPRLFEEVLGVICRPAAEALRQPVLASGPSTVLSACLLELPPSQILDTWSLVLEKFQSLVLPYLQSDADMALKSLSLSLLLHCIMFNMRSLDSSTPLPIVRRTQCMMERMMRELVQPLLALLPDTPGPEPELWLQKVSDSVLLLSYTWAQVDAMFSLNCSQYHSMSGPLIGVALEISNLPSLLPGVKTQHWKKIEKFTAQFSSLGTYCLEQLYLQKMKRTLMQTSFRSEGAIQSLRCDAAFIIGSGRKSLNQRTTASWDGQVGMVSGLTYPVAHWHLIVSNLTILISYLCPDDVGYLASVLLRTLPMGKAQEVSIDEEAYITLEKISKAFLHSPLFPEMQSLHSAFLTCVTTSCSSILCSGAQRDSGLVSQQLPWLFEKDHMVVGHWENRFAKAGPEGIEPRGEIAQNLLSLVKSDFPIQLEGEQLESILGLLEVISALQLDSLLPPYHVHYFLVLLSMAVTKLGCSCSSSLALKFLTTCYQLLGYLQKGKSARSVFKIMYGSDIFEVVLTSLFRASSRFLIEMDDPAWLEFLQVIGTFLEELMQMLIQMKLSLVLNFRKITAFLSSSKPYTEAASSKQLENQNPQGRQLLLVSLTRLCHVLGPFLKEQKLGQEAPAALSELLQQVVLQTGAVLQLCSVPGARGWRLPSVLISSVSTLLEADLGQHCRDGGADISQGSDRTLLSHVALYQGVYSQILLELPALAGHDQSFQAALQFLTLFFLAPELHPKKDSVFTSMFHSVRRVLADPEIPVQVTQDIEPHLGALFTQMLEVGTTEDLRLVMQCILQGLDVSNMWKADVQAVVSAVTLLRLLLNCPLSGEKASLLWRACPQIVTALTLLNREASQEQPVSLTVVGPVLDVLAALLRQGEEAIGNPHHVSLAFSILLTVPLDHLKPLEYGSVFPRLHNVLFSILQCHPKVMLKAIPSFLNSFNRLVFSVMREGRQKDKGSIDDLPTVLKCARLVERMYSHIAARAEEFAVFSPFMVAQYVLEVQKVTLYPAVKSLLQEGIYLILDLCIEPDVQFLRASLQPGMRDIFKELYNDYLKYHKAKHEGEKRYTA

SEQ ID NO: 1678 - protein, 589 aa, Homo sapiens
MKRVRTEQIQMAVSCYLKRRQYVDSDGPLKQGLRLSQTAEEMAANLTVQSESGCANIVSAAPCQAEPQQYEVQFGRLRNFLTDSDSQHSHEVMPLLYPLFVYLHLNLVQNSPKSTVESFYSRFHGMFLQNASQKDVIEQLQTTQTIQDILSNFKLRAFLDNKYVVRLQEDSYNYLIRYLQSDNNTALCKVLTLHIHLDVQPAKRTDYQLYASGSSSRSENNGLEPPDMPSPILQNEAALEVLQESIKRVKDGPPSLTTICFYAFYNTEQLLNTAEISPDSKLLAAGFDNSCIKLWSLRSKKLKSEPHQVDVSRIHLACDILEEEDDEDDNAGTEMKILRGHCGPVYSTRFLADSSGLLSCSEDMSIRYWDLGSFTNTVLYQGHAYPVWDLDISPYSLYFASGSHDRTARLWSFDRTYPLRIYAGHLADVDCVKFHPNSNYLATGSTDKTVRLWSAQQGNSVRLFTGHRGPVLSLAFSPNGKYLASAGEDQRLKLWDLASGTLYKELRGHTDNITSLTFSPDSGLIASASMDNSVRVWDIRNTYCSAPADGSSSELVGVYTGQMSNVLSVQFMACNLLLVTGITQENQEH

SEQ ID NO: 1679 - protein, 255 aa, Homo sapiens
MSMEDPFFVVKGEVQKAVNTAQGLFQRWTELLQDPSTATREEIDWTTNELRNNLRSIEWDLEDLDETISIVEANPRKFNLDATELSIRKAFITSTRQVVRDMKDQMSTSSVQALAERKNRQALLGDSGSQNWSTGTTDKYGRLDRELQRANSHFIEEQQAQQQLIVEQQDEQLELVSGSIGVLKNMSQRIGGELEEQAVMLEDFSHELESTQSRLDNVMKKLAKVSHMTSDRRQWCAIAILFAVLLVVLILFLVL

SEQ ID NO: 1680 - protein, 1609 aa, Homo sapiens
MRGSHRAAPALRPRGRLWPVLAVLAAAAAAGCAQAAMDECTDEGGRPQRCMPEFVNAAFNVTVVATNTCGTPPEEYCVQTGVTGVTKSCHLCDAGQPHLQHGAAFLTDYNNQADTTWWQSQTMLAGVQYPSSINLTLHLGKAFDITYVRLKFHTSRPESFAIYKRTREDGPWIPYQYYSGSCENTYSKANRGFIRTGGDEQQALCTDEFSDISPLTGGNVAFSTLEGRPSAYNFDNSPVLQEWVTATDIRVTLNRLNTFGDEVFNDPKVLKSYYYAISDFAVGGRCKCNGHASECMKNEFDKLVCNCKHNTYGVDCEKCLPFFNDRPWRRATAESASECLPCDCNGRSQECYFDPELYRSTGHGGHCTNCQDNTDGAHCERCRENFFRLGNNEACSSCHCSPVGSLSTQCDSYGRCSCKPGVMGDKCDRCQPGFHSLTEAGCRPCSCDPSGSIDECNIETGRCVCKDNVEGFNCERCKPGFFNLESSNPRGCTPCFCFGHSSVCTNAVGYSVYSISSTFQIDEDGWRAEQRDGSEASLEWSSERQDIAVISDSYFPRYFIAPAKFLGKQVLSYGQNLSFSFRVDRRDTRLSAEDLVLEGAGLRVSVPLIAQGNSYPSETTVKYVFRLHEATDYPWRPALTPFEFQKLLNNLTSIKIRGTYSERSAGYLDDVTLASARPGPGVPATWVESCTCPVGYGGQFCEMCLSGYRRETPNLGPYSPCVLCACNGHSETCDPETGVCNCRDNTAGPHCEKCSDGYYGDSTAGTSSDCQPCPCPGGSSCAVVPKTKEVVCTNCPTGTTGKRCELCDDGYFGDPLGRNGPVRLCRLCQCSDNIDPNAVGNCNRLTGECLKCIYNTAGFYCDRCKDGFFGNPLAPNPADKCKACNCNLYGTMKQQSSCNPVTGQCECLPHVTGQDCGACDPGFYNLQSGQGCERCDCHALGSTNGQCDIRTGQCECQPGITGQHCERCEVNHFGFGPEGCKPCDCHPEGSLSLQCKDDGRCECREGFVGNRCDQCEENYFYNRSWPGCQECPACYRLVKDKVADHRVKLQELESLIANLGTGDEMVTDQAFEDRLKEAEREVMDLLREAQDVKDVDQNLMDRLQRVNNTLSSQISRLQNIRNTIEETGNLAEQARAHVENTERLIEIASRELEKAKVAAANVSVTQPESTGDPNNMTLLAEEARKLAERHKQEADDIVRVAKTANDTSTEAYNLLLRTLAGENQTAFEIEELNRKYEQAKNISQDLEKQAARVHEEAKRAGDKAVEIYASVAQLSPLDSETLENEANNIKMEAENLEQLIDQKLKDYEDLREDMRGKELEVKNLLEKGKTEQQTADQLLARADAAKALAEEAAKKGRDTLQEANDILNNLKDFDRRVNDNKTAAEEALRKIPAINQTITEANEKTREAQQALGSAAADATEAKNKAHEAERIASAVQKNATSTKAEAERTFAEVTDLDNEVNNMLKQLQEAEKELKRKQDDADQDMMMAGMASQAAQEAEINARKAKNSVTSLLSIINDLLEQLGQLDTVDLNKLNEIEGTLNKAKDEMKVSDLDRKVSDLENEAKKQEAAIMDYNRDIEEIMKDIRNLEDIRKTLPSGCFNTPSIEKP

SEQ ID NO: 1681 - protein, 332 aa, Homo sapiens
MASGLVRLLQQGHRCLLAPVAPKLVPPVRGVKKGFRAAFRFQKELERQRLLRCPPPPVRRSEKPNWDYHAEIQAFGHRLQENFSLDLLKTAFVNSCYIKSEEAKRQQLGIEKEAVLLNLKSNQELSEQGTSFSQTCLTQFLEDEYPDMPTEGIKNLVDFLTGEEVVCHVARNLAVEQLTLSEEFPVPPAVLQQTFFAVIGALLQSSGPERTALFIRDFLITQMTGKELFEMWKIINPMGLLVEELKKRNVSAPESRLTRQSGGTTALPLYFVGLYCDKKLIAEGPGETVLVAEEEAARVALRKLYGFTENRRPWNYSKPKETLRAEKSITAS

SEQ ID NO: 1682 - protein, 517 aa, Homo sapiens
MEGPVLTLGLLAALAVCGSWGLNEEERLIRHLFQEKGYNKELRPVAHKEESVDVALALTLSNLISLKEVEETLTTNVWIEHGWTDNRLKWNAEEFGNISVLRLPPDMVWLPEIVLENNNDGSFQISYSCNVLVYHYGFVYWLPPAIFRSSCPISVTYFPFDWQNCSLKFSSLKYTAKEITLSLKQDAKENRTYPVEWIIIDPEGFTENGEWEIVHRPARVNVDPRAPLDSPSRQDITFYLIIRRKPLFYIINILVPCVLISFMVNLVFYLPADSGEKTSVAISVLLAQSVFLLLISKRLPATSMAIPLIGKFLLFGMVLVTMVVVICVIVLNIHFRTPSTHVLSEGVKKLFLETLPELLHMSRPAEDGPSPGALVRRSSSLGYISKAEEYFLLKSRSDLMFEKQSERHGLARRLTTARRPPASSEQAQQELFNELKPAVDGANFIVNHMRDQNNYNEEKDSWNRVARTVDRLCLFVVTPVMVVGTAWIFLQGVYNQPPPQPFPGDPYSYNVQDKRFI

SEQ ID NO: 1683 - protein, 2186 aa, Homo sapiens
MAGERTRRFTRSLLRPGQAAELRHSAASAAAVAVSSRQQQRQEKPRLLEPLDYETVIEELEKTYRNDPLQDLLFFPSDDFSAATVSWDIRTLYSTVPEDAEHKAENLLVKEACKFYSSQWHVVNYKYEQYSGDIRQLPRAEYKPEKLPSHSFEIDHEDADKDEDTTSHSSSKGGGGAGGTGVFKSGWLYKGNFNSTVNNTVTVRSFKKRYFQLTQLPDNSYIMNFYKDEKISKEPKGCIFLDSCTGVVQNNRLRKYAFELKMNDLTYFVLAAETESDMDEWIHTLNRILQISPEGPLQGRRSTELTDLGLDSLDNSVTCECTPEETDSSENNLHADFAKYLTETEDTVKTTRNMERLNLFSLDPDIDTLKLQKKDLLEPESVIKPFEEKAAKRIMIICKALNSNLQGCVTENENDPITNIEPFFVSVALYDLRDSRKISADFHVDLNHAAVRQMLLGASVALENGNIDTITPRQSEEPHIKGLPEEWLKFPKQAVFSVSNPHSEIVLVAKIEKVLMGNIASGAEPYIKNPDSNKYAQKILKSNRQFCSKLGKYRMPFAWAVRSVFKDNQGNVDRDSRFSPLFRQESSKISTEDLVKLVSDYRRADRISKMQTIPGSLDIAVDNVPLEHPNCVTSSFIPVKPFNMMAQTEPTVEVEEFVYDSTKYCRPYRVYKNQIYIYPKHLKYDSQKCFNKARNITVCIEFKNSDEESAKPLKCIYGKPGGPLFTSAAYTAVLHHSQNPDFSDEVKIELPTQLHEKHHILFSFYHVTCDINAKANAKKKEALETSVGYAWLPLMKHDQIASQEYNIPIATSLPPNYLSFQDSASGKHGGSDIKWVDGGKPLFKVSTFVVSTVNTQDPHVNAFFQECQKREKDMSQSPTSNFIRSCKNLLNVEKIHAIMSFLPIILNQLFKVLVQNEEDEITTTVTRVLTDIVAKCHEEQLDHSVQSYIKFVFKTRACKERTVHEELAKNVTGLLKSNDSTTVKHVLKHSWFFFAIILKSMAQHLIDTNKIQLPRPQRFPESYQNELDNLVMVLSDHVIWKYKDALEETRRANHSVARFLKRCFTFMDRGYVFKMVNNYISMFSSGDLKTLCQYKFDFLQEVCQHEHFIPLCLPIRSANIPDPLTPSESTQELHASDMPEYSVTNEFCRKHFLIGILLREVGFALQEDQDVRHLALAVLKNLMAKHSFDDRYREPRKQAQIASLYMPLYGMLLDNMPRIYLKDLYPFTVNTSNQGSRDDLSTNGGFQSQTAIKHANSVDTSFSKDVLNSIAAFSSIAISTVNHADSRASLASLDSNPSTNEKSSEKTDNCEKIPRPLSLIGSTLRFDKLDQAETRSLLMCFLHIMKTISYETLIAYWQRAPSPEVSDFFSILDVCLQNFRYLGKRNIIRKIAAAFKFVQSTQNNGTLKGSNPSCQTSGLLSQWMHSTSSHEGHKQHRSQTLPIIRGKNALSNPKLLQMLDNTMTSNSNEIDIVHHVDTEANIATEVCLTILDLLSLFTQTHQRQLQQCDCQNSLMKRVFDTYMLFFQVNQSATALKHVFASLRLFVCKFPSAFFQGPADLCGSFCYEVLKCCNHRSRSTQTEASALLYFFMRKNFEFNKQKSIVRSHLQLIKAVSQLIADAGIGGSRFQHSLAITNNFANGDKQMKNSNFPAEVKDLTKRIRTVLMATAQMKEHEKDPEMLVDLQYSLANSYASTPELRRTWLESMAKIHARNGDLSEAAMCYIHIAALIAEYLKRKGYWKVEKICTASLLSEDTHPCDSNSLLTTPSGGSMFSMGWPAFLSITPNIKEEGAMKEDSGMQDTPYNENILVEQLYMCVEFLWKSERYELIADVNKPIIAVFEKQRDFKKLSDLYYDIHRSYLKVAEVVNSEKRLFGRYYRVAFYGQGFFEEEEGKEYIYKEPKLTGLSEISQRLLKLYADKFGADNVKIIQDSNKVNPKDLDPKYAYIQVTYVTPFFEEKEIEDRKTDFEMHHNINRFVFETPFTLSGKKHGGVAEQCKRRTILTTSHLFPYVKKRIQVISQSSTELNPIEVAIDEMSKKVSELNQLCTMEEVDMIRLQLKLQGSVSVKVNAGPMAYARAFLEETNAKKYPDNQVKLLKEIFRQFADACGQALDVNERLIKEDQLEYQEELRSHYKDMLSELSTVMNEQITGRDDLSKRGVDQTCTRVISKATPALPTVSISSSAEV

SEQ ID NO: 1684 - protein, 1199 aa, Homo sapiens
MASAGTQHYSIGLRQKNSFKQSGPSGTVPATPPEKPSEGRVWPQAHQQVKPIWKLEKKQVETLSAGLGPGLLGVPPQPAYFFCPSTLCSSGTTAVIAGHSSSCYLHSLPDLFNSTLLYRRSSYRQKPYQQLESFCLRSSPSEKSPFSLPQKSLPVSLTANKATSSMVFSMAQPMASSSTEPYLCLAAAGENPSGKSLASAISGKIPSPLSSSYKPMLNNNSFMWPNSTPVPLLQTTQGLKPVSPPKIQPVSWHHSGGTGDCAPQPVDHKVPKSIGTVPADASAHIALSTASSHDTSTTSVASSWYNRNNLAMRAEPLSCALDDSSDSQDPTKEIRFTEAVRKLTARGFEKMPRQGCQLEQSSFLNPSFQWNVLNRSRRWKPPAVNQQFPQEDAGSVRRVLPGASDTLGLDNTVFCTKRISIHLLASHASGLNHNPACESVIDSSAFGEGKAPGPPFPQTLGIANVATRLSSIQLGQSEKERPEEARELDSSDRDISSATDLQPDQAETEDTEEELVDGLEDCCSRDENEEEEGDSECSSLSAVSPSESVAMISRSCMEILTKPLSNHEKVVRPALIYSLFPNVPPTIYFGTRDERVEKLPWEQRKLLRWKMSTVTPNIVKQTIGRSHFKISKRNDDWLGCWGHHMKSPSFRSIREHQKLNHFPGSFQIGRKDRLWRNLSRMQSRFGKKEFSFFPQSFILPQDAKLLRKAWESSSRQKWIVKPPASARGIGIQVIHKWSQLPKRRPLLVQRYLHKPYLISGSKFDLRIYVYVTSYDPLRIYLFSDGLVRFASCKYSPSMKSLGNKFMHLTNYSVNKKNAEYQANADEMACQGHKWALKALWNYLSQKGVNSDAIWEKIKDVVVKTIISSEPYVTSLLKMYVRRPYSCHELFGFDIMLDENLKPWVLEVNISPSLHSSSPLDISIKGQMIRDLLNLAGFVLPNAEDIISSPSSCSSSTTSLPTSPGDKCRMAPEHVTAQKMKKAYYLTQKIPDQDFYASVLDVLTPDDVRILVEMEDEFSRRGQFERIFPSHISSRYLRFFEQPRYFNILTTQWEQKYHGNKLKGVDLLRSWCYKGFHMGVVSDSAPVWSLPTSLLTISKDDVILNAFSKSETSKLGKQSSCEVSLLLSEDGTTPKSKKTQAGLSPYPQKPSSSKDSEDTSKEPSLSTQTLPVIKCSGQTSRLSASSTFQSISDSLLAVSP

SEQ ID NO: 1685 - protein, 979 aa, Homo sapiens
MSPLKIHGPIRIRSMQTGITKWKEGSFEIVEKENKVSLVVHYNTGGIPRIFQLSHNIKNVVLRPSGAKQSRLMLTLQDNSFLSIDKVPSKDAEEMRLFLDAVHQNRLPAAMKPSQGSGSFGAILGSRTSQKETSRQLSYSDNQASAKRGSLETKDDIPFRKVLGNPGRGSIKTVAGSGIARTIPSLTSTSTPLRSGLLENRTEKRKRMISTGSELNEDYPKENDSSSNNKAMTDPSRKYLTSSREKQLSLKQSEENRTSGLLPLQSSSFYGSRAGSKEHSSGGTNLDRTNVSSQTPSAKRSLGFLPQPVPLSVKKLRCNQDYTGWNKPRVPLSSHQQQQLQGFSNLGNTCYMNAILQSLFSLQSFANDLLKQGIPWKKIPLNALIRRFAHLLVKKDICNSETKKDLLKKVKNAISATAERFSGYMQNDAHEFLSQCLDQLKEDMEKLNKTWKTEPVSGEENSPDISATRAYTCPVITNLEFEVQHSIICKACGEIIPKREQFNDLSIDLPRRKKPLPPRSIQDSLDLFFRAEELEYSCEKCGGKCALVRHKFNRLPRVLILHLKRYSFNVALSLNNKIGQQVIIPRYLTLSSHCTENTKPPFTLGWSAHMAISRPLKASQMVNSCITSPSTPSKKFTFKSKSSLALCLDSDSEDELKRSVALSQRLCEMLGNEQQQEDLEKDSKLCPIEPDKSELENSGFDRMSEEELLAAVLEISKRDASPSLSHEDDDKPTSSPDTGFAEDDIQEMPENPDTMETEKPKTITELDPASFTEITKDCDENKENKTPEGSQGEVDWLQQYDMEREREEQELQQALAQSLQEQEAWEQKEDDDLKRATELSLQEFNNSFVDALGSDEDSGNEDVFDMEYTEAEAEELKRNAETGNLPHSYRLISVVSHIGSTSSSGHYISDVYDIKKQAWFTYNDLEVSKIQEAAVQSDRDRSGYIFFYMHKEIFDELLETEKNSQSLSTEVGKTTRQAL

SEQ ID NO: 1686 - protein, 398 aa, Homo sapiens
MNWHLPLFLLASVTLPSICSHFNPLSLEELGSNTGIQVFNQIVKSRPHDNIVISPHGIASVLGMLQLGADGRTKKQLAMVMRYGVNGVGKILKKINKAIVSKKNKDIVTVANAVFVKNASEIEVPFVTRNKDVFQCEVRNVNFEDPASACDSINAWVKNETRDMIDNLLSPDLIDGVLTRLVLVNAVYFKGLWKSRFQPENTKKRTFVAADGKSYQVPMLAQLSVFRCGSTSAPNDLWYNFIELPYHGESISMLIALPTESSTPLSAIIPHISTKTIDSWMSIMVPKRVQVILPKFTAVAQTDLKEPLKVLGITDMFDSSKANFAKITTGSENLHVSHILQKAKIEVSEDGTKASAATTAILIARSSPPWFIVDRPFLFFIRHNPTGAVLFMGQINKP

SEQ ID NO: 1687 - protein, 311 aa, Homo sapiens
MSNPSAPPPYEDRNPLYPGPPPPGGYGQPSVLPGGYPAYPGYPQPGYGHPAGYPQPMPPTHPMPMNYGPGHGYDGEERAVSDSFGPGEWDDRKVRHTFIRKVYSIISVQLLITVAIIAIFTFVEPVSAFVRRNVAVYYVSYAVFVVTYLILACCQGPRRRFPWNIILLTLFTFAMGFMTGTISSMYQTKAVIIAMIITAVVSISVTIFCFQTKVDFTSCTGLFCVLGIVLLVTGIVTSIVLYFQYVYWLHMLYAALGAICFTLFLAYDTQLVLGNRKHTISPEDYITGALQIYTDIIYIFTFVLQLMGDRN

SEQ ID NO: 1688 - protein, 531 aa, Homo sapiens
MAALGCARLRWALRGAGRGLCPHGARAKAAIPAALPSDKATGAPGAGPGVRRRQRSLEEIPRLGQLRFFFQLFVQGYALQLHQLQVLYKAKYGPMWMSYLGPQMHVNLASAPLLEQVMRQEGKYPVRNDMELWKEHRDQHDLTYGPFTTEGHHWYQLRQALNQRLLKPAEAALYTDAFNEVIDDFMTRLDQLRAESASGNQVSDMAQLFYYFALEAICYILFEKRIGCLQRSIPEDTVTFVRSIGLMFQNSLYATFLPKWTRPVLPFWKRYLDGWNAIFSFGKKLIDEKLEDMEAQLQAAGPDGIQVSGYLHFLLASGQLSPREAMGSLPELLMAGVDTTSNTLTWALYHLSKDPEIQEALHEEVVGVVPAGQVPQHKDFAHMPLLKAVLKETLRLYPVVPTNSRIIEKEIEVDGFLFPKNTQFVFCHYVVSRDPTAFSEPESFQPHRWLRNSQPATPRIQHPFGSVPFGYGVRACLGRRIAELEMQLLLARLIQKYKVVLAPETGELKSVARIVLVPNKKVGLQFLQRQC

SEQ ID NO: 1689 - protein, 245 aa, Homo sapiens
MNNKFDALKDDDSGDHDQNEENSTQKDGEKEKTERDKNQSSSKRKAVVPGPAEHPLQYNYTFWYSRRTPGRPTSSQSYEQNIKQIGTFASVEQFWRFYSHMVRPGDLTGHSDFHLFKEGIKPMWEDDANKNGGKWIIRLRKGLASRCWENLILAMLGEQFMVGEEICGAVVSVRFQEDIISIWNKTASDQATTARIRDTLRRVLNLPPNTIMEYKTHTDSIKMPGRLGPQRLLFQNLWKPRLNVP

SEQ ID NO: 1690 - protein, 665 aa, Homo sapiens
MGDILAHESELLGLVKEYLDFAEFEDTLKTFSKECKIKGKPLCKTVGGSFRDSKSLTIQKDLVAAFDNGDQKVFFDLWEEHISSSIRDGDSFAQKLEFYLHIHFAIYLLKYSVGRPDKEELDEKISYFKTYLETKGAALSQTTEFLPFYALPFVPNPMVHPSFKELFQDSWTPELKLKLIKFLALISKASNTPKLLTIYKENGQSNKEILQQLHQQLVEAERRSVTYLKRYNKIQADYHNLIGVTAELVDSLEATVSGKMITPEYLQSVCVRLFSNQMRQSLAHSVDFTRPGTASTMLRASLAPVKLKDVPLLPSLDYEKLKKDLILGSDRLKAFLLQALRWRLTTSHPGEQRETVLQAYISNDLLDCYSHNQRSVLQLLHSTSDVVRQYMARLINAFASLAEGRLYLAQNTKVLQMLEGRLKEEDKDIITRENVLGALQKFSLRRPLQTAMIQDGLIFWLVDVLKDPDCLSDYTLEYSVALLMNLCLRSTGKNMCAKVAGLVLKVLSDLLGHENHEIQPYVNGALYSILSVPSIREEARAMGMEDILRCFIKEGNAEMIRQIEFIIKQLNSEELPDGVLESDDDEDEDDEEDHDIMEADLDKDELIQPQLGELSGEKLLTTEYLGIMTNTGKTRRKGLANVQWSGDEPLQRPVTPGGHRNGYPV

SEQ ID NO: 1691 - protein, 341 aa, Homo sapiens
MPFPFGKSHKSPADIVKNLKESMAVLEKQDISDKKAEKATEEVSKNLVAMKEILYGTNEKEPQTEAVAQLAQELYNSGLLSTLVADLQLIDFEGKKDVAQIFNNILRRQIGTRTPTVEYICTQQNILFMLLKGYESPEIALNCGIMLRECIRHEPLAKIILWSEQFYDFFRYVEMSTFDIASDAFATFKDLLTRHKLLSAEFLEQHYDRFFSEYEKLLHSENYVTKRQSLKLLGELLLDRHNFTIMTKYISKPENLKLMMNLLRDKSRNIQFEAFHVFKVFVANPNKTQPILDILLKNQAKLIEFLSKFQNDRTEDEQFNDEKTYLVKQIRDLKRPAQQEA

SEQ ID NO: 1692 - protein, 129 aa, Homo sapiens
MASRLLRGAGTLAAQALRARGPSGAAAMRSMASGGGVPTDEEQATGLEREIMLAAKKGLDPYNVLAPKGASGTREDPNLVPSISNKRIVGCICEEDNTSVVWFWLHKGEAQRCPRCGAHYKLVPQQLAH

SEQ ID NO: 1693 - protein, 238 aa, Homo sapiens
MYAPGGAGLPGGRRRRSPGGSALPKQPERSLASALPGALSITALCTALAEPAWLHIHGGTCSRQELGVSDVLGYVHPDLLKDFCMNPQTVLLLRVIAAFCFLGILCSLSAFLLDVFGPKHPALKITRRYAFAHILTVLQCATVIGFSYWASELILAQQQQHKKYHGSQVYVTFAVSFYLVAGAGGASILATAANLLRHYPTEEEEQALELLSEMEENEPYPAEYEVINQFQPPPAYTP

SEQ ID NO: 1694 - protein, 396 aa, Homo sapiens
MAAPCVSYGGAVSYRLLLWGRGSLARKQGLWKTAAPELQTNVRSQILRLRHTAFVIPKKNVPTSKRETYTEDFIKKQIEEFNIGKRHLANMMGEDPETFTQEDIDRAIAYLFPSGLFEKRARPVMKHPEQIFPRQRAIQWGEDGRPFHYLFYTGKQSYYSLMHDVYGMLLNLEKHQSHLQAKSLLPEKTVTRDVIGSRWLIKEELEEMLVEKLSDLDYMQFIRLLEKLLTSQCGAAEEEFVQRFRRSVTLESKKQLIEPVQYDEQGMAFSKSEGKRKTAKAEAIVYKHGSGRIKVNGIDYQLYFPITQDREQLMFPFHFVDRLGKHDVTCTVSGGGRSAQAGAIRLAMAKALCSFVTEDEVEWMRQAGLLTTDPRVRERKKPGQEGARRKFTWKKR

SEQ ID NO: 1695 - protein, 232 aa, Homo sapiens
MAGDVGGRSCTDSELLLHPELLSQEFLLLTLEQKNIAVETDVRVNKDSLTDLYVQHAIPLPQRDLPKNRWGKMMEKKREQHEIKNETKRSSTVDGLRKRPLIVFDGSSTSTSIKVKKTENGDNDRLKPPPQASFTSNAFRKLSNSSSSVSPLILSSNLPVNNKTEHNNNDAKQNHDLTHRKSPSGPVKSPPLSPVGTTPVKLKRAAPKEEAEAMNNLKPPQAKRKIQHVTWP

SEQ ID NO: 1696 - protein, 807 aa, Homo sapiens
MSKLSFRARALDAAKPLPIYRGKDMPDLNDCVSINRAVPQMPTGMEKEEESEHHLQRAISAQQVFREKKESMVIPVPEAESNVNYYNRLYKGEFKQPKQFIHIQPFNLDNEQPDYDMDSEDETLLNRLNRKMEIKPLQFEIMIDRLEKASSNQLVTLQEAKLLLNEDDYLIKAVYDYWVRKRKNCRGPSLIPQIKQEKRDGSTNNDPYVAFRRRTEKMQTRKNRKNDEASYEKMLKLRREFSRAITILEMIKRREKTKRELLHLTLEVVEKRYHLGDYGGEILNEVKISRSEKELYATPATLHNGNHHKVQECKTKHPHHLSLKEEASDVVRQKKKYPKKPKAEALITSQQPTPETLPVINKSDIKQYDFHSSDEDEFPQVLSPVSEPEEENDPDGPCAFRRRAGCQYYAPRLDQANHSCENSELADLDKLRYRHCLTTLTVPRRCIGFARRRIGRGGRVIMDRISTEHDPVLKQIDPEMLNSFSSSSQTIDFSSNFSRTNASSKHCENRLSLSEILSNIRSCRLQCFQPRLLNLQDSDSEECTSRKPGQTVNNKRVSAASVALLNTSKNGISVTGGITEEQFQTHQQQLVQMQRQQLAQLQQKQQSQHSSQQTHPKAQGSSTSDCMSKTLDSASAHFAASAVVSAPVPSRSEVAKEQNTGHNNINGVVQPSGTSKTLYSTNMALSSSPGISAVQLVRTVGHTTTNHLIPALCTSSPQTLPMNNSCLTNAVHLNNVSVVSPVNVHINTRTSAPSPTALKLATVAASMDRVPKVTPSSAISSIARENHEPERLGLNGIAETTVAMEVT

SEQ ID NO: 1697 - protein, 923 aa, Homo sapiens
MLRRGSQALRRFSTGRVYFKNKLKLALIGQSLFGQEVYSHLRKEGHRVVGVFTVPDKDGKADPLALAAEKDGTPVFKLPKWRVKGKTIKEVAEAYRSVGAELNVLPFCTQFIPMDIIDSPKHGSIIYHPSILPRHRGASAINWTLIMGDKKAGFSVFWADDGLDTGPILLQRSCDVEPNDTVDALYNRFLFPEGIKAMVEAVQLIADGKAPRIPQPEEGATYEGIQKKENAEISWDQSAEVLHNWIRGHDKVPGAWTEINGQMVTFYGSTLLNSSVPPGEPLEIKGAKKPGLVTKNGLVLFGNDGKALTVRNLQFEDGKMIPASQYFSTGETSVVELTAEEVKVAETIKVIWAGILSNVPIIEDSTDFFKSGASSMDVARLVEEIRQKCGGLQLQNEDVYMATKFEGFIQKVVRKLRGEDQEVELVVDYISKEVNEIMVKMPYQCFINGQFTDADDGKTYDTINPTDGSTICKVSYASLADVDKAVAAAKDAFENGEWGRMNARERGRLMYRLADLLEENQEELATIEALDSGAVYTLALKTHIGMSVQTFRYFAGWCDKIQGSTIPINQARPNRNLTFTKKEPLGVCAIIIPWNYPLMMLAWKSAACLAAGNTLVLKPAQVTPLTALKFAELSVKAGFPKGVINIIPGSGGIAGQRLSEHPDIRKLGFTGSTPIGKQIMKSCAVSNLKKVSLELGGKSPLIIFNDCELDKAVRMGMGAVFFNKGENCIAAGRLFVEESIHDEFVTRVVEEIKKMKIGDPLDRSTDHGPQNHKAHLEKLLQYCETGVKEGATLVYGGRQVQRPGFFMEPTVFTDVEDYMYLAKEESFGPIMVISKFQNGDIDGVLQRANSTEYGLASGVFTRDINKAMYVSEKLEAGTVFINTYNKTDVAAPFGGVKQSGFGKDLGEEALNEYLKTKTVTLEY

SEQ ID NO: 1698 - protein, 1568 aa, Homo sapiens
MEVSRRKAPPRPPRPAAPLPLLAYLLALAAPGRGADEPVWRSEQAIGAIAASQEDGVFVASGSCLDQLDYSLEHSLSRLYRDQAGNCTEPVSLAPPARPRPGSSFSKLLLPYREGAAGLGGLLLTGWTFDRGACEVRPLGNLSRNSLRNGTEVVSCHPQGSTAGVVYRAGRNNRWYLAVAATYVLPEPETASRCNPAASDHDTAIALKDTEGRSLATQELGRLKLCEGAGSLHFVDAFLWNGSIYFPYYPYNYTSGAATGWPSMARIAQSTEVLFQGQASLDCGHGHPDGRRLLLSSSLVEALDVWAGVFSAAAGEGQERRSPTTTALCLFRMSEIQARAKRVSWDFKTAESHCKEGDQPERVQPIASSTLIHSDLTSVYGTVVMNRTVLFLGTGDGQLLKVILGENLTSNCPEVIYEIKEETPVFYKLVPDPVKNIYIYLTAGKEVRRIRVANCNKHKSCSECLTATDPHCGWCHSLQRCTFQGDCVHSENLENWLDISSGAKKCPKIQIIRSSKEKTTVTMVGSFSPRHSKCMVKNVDSSRELCQNKSQPNRTCTCSIPTRATYKDVSVVNVMFSFGSWNLSDRFNFTNCSSLKECPACVETGCAWCKSARRCIHPFTACDPSDYERNQEQCPVAVEKTSGGGRPKENKGNRTNQALQVFYIKSIEPQKVSTLGKSNVIVTGANFTRASNITMILKGTSTCDKDVIQVSHVLNDTHMKFSLPSSRKEMKDVCIQFDGGNCSSVGSLSYIALPHCSLIFPATTWISGGQNITMMGRNFDVIDNLIISHELKGNINVSEYCVATYCGFLAPSLKSSKVRTNVTVKLRVQDTYLDCGTLQYREDPRFTGYRVESEVDTELEVKIQKENDNFNISKKDIEITLFHGENGQLNCSFENITRNQDLTTILCKIKGIKTASTIANSSKKVRVKLGNLELYVEQESVPSTWYFLIVLPVLLVIVIFAAVGVTRHKSKELSRKQSQQLELLESELRKEIRDGFAELQMDKLDVVDSFGTVPFLDYKHFALRTFFPESGGFTHIFTEDMHNRDANDKNESLTALDALICNKSFLVTVIHTLEKQKNFSVKDRCLFASFLTIALQTKLVYLTSILEVLTRDLMEQCSNMQPKLMLRRTESVVEKLLTNWMSVCLSGFLRETVGEPFYLLVTTLNQKINKGPVDVITCKALYTLNEDWLLWQVPEFSTVALNVVFEKIPENESADVCRNISVNVLDCDTIGQAKEKIFQAFLSKNGSPYGLQLNEIGLELQMGTRQKELLDIDSSSVILEDGITKLNTIGHYEISNGSTIKVFKKIANFTSDVEYSDDHCHLILPDSEAFQDVQGKRHRGKHKFKVKEMYLTKLLSTKVAIHSVLEKLFRSIWSLPNSRAPFAIKYFFDFLDAQAENKKITDPDVVHIWKTNSLPLRFWVNILKNPQFVFDIKKTPHIDGCLSVIAQAFMDAFSLTEQQLGKEAPTNKLLYAKDIPTYKEEVKSYYKAIRDLPPLSSSEMEEFLTQESKKHENEFNEEVALTEIYKYIVKYFDEILNKLERERGLEEAQKQLLHVKVLFDEKKKCKWM

SEQ ID NO: 1699 - protein, 664 aa, Homo sapiens
MPAVDKLLLEEALQDSPQTRSLLSVFEEDAGTLTDYTNQLLQAMQRVYGAQNEMCLATQQLSKQLLAYEKQNFALGKGDEEVISTLHYFSKVVDELNLLHTELAKQLADTMVLPIIQFREKDLTEVSTLKDLFGLASNEHDLSMAKYSRLPKKKENEKVKTEVGKEVAAARRKQHLSSLQYYCALNALQYRKQMAMMEPMIGFAHGQINFFKKGAEMFSKRMDSFLSSVADMVQSIQVELEAEAEKMRVSQQELLSVDESVYTPDSDVAAPQINRNLIQKAGYLNLRNKTGLVTTTWERLYFFTQGGNLMCQPRGAVAGGLIQDLDNCSVMAVDCEDRRYCFQITTPNGKSGIILQAESRKENEEWICAINNISRQIYLTDNPEAVAIKLNQTALQAVTPITSFGKKQESSCPSQNLKNSEMENENDKIVPKATASLPEAEELIAPGTPIQFDIVLPATEFLDQNRGSRRTNPFGETEDESFPEAEDSLLQQMFIVRFLGSMAVKTDSTTEVIYEAMRQVLAARAIHNIFRMTESHLMVTSQSLRLIDPQTQVSRANFELTSVTQFAAHQENKRLVGFVIRVPESTGEESLSTYIFESNSEGEKICYAINLGKEIIEVQKDPEALAQLMLSIPLTNDGKYVLLNDQPDDDDGNPNEHRGAESEA

SEQ ID NO: 1700 - protein, 238 aa, Homo sapiens
MLCFLRGMAFVPFLLVTWSSAAFIISYVVAVLSGHVNPFLPYISDTGTTPPESGIFGFMINFSAFLGAATMYTRYKIVQKQNQTCYFSTPVFNLVSLVLGLVGCFGMGIVANFQELAVPVVHDGGALLAFVCGVVYTLLQSIISYKSCPQWNSLSTCHIRMVISAVSCAAVIPMIVCASLISITKLEWNPREKDYVYHVVSAICEWTVAFGFIFYFLTFIQDFQSVTLRISTEINGDI

SEQ ID NO: 1701 - protein, 573 aa, Homo sapiens
MTNSKGRSITDKTSGGPSSGGGFVDWTLRLNTIQSDKFLNLLLSMVPVIYQKNQEDRHKKANGIWQDGLSTAVQTFSNRSEQHMEYHSFSEQSFHANNGHASSSCSQKYDDYANYNYCDGRETSETTAMLQDEDISSDGDEDAIVEVTPKLPKESSGIMALQILVPFLLAGFGTVSAGMVLDIVQHWEVFRKVTEVFILVPALLGLKGNLEMTLASRLSTAVNIGKMDSPIEKWNLIIGNLALKQVQATVVGFLAAVAAIILGWIPEGKYYLDHSILLCSSSVATAFIASLLQGIIMVGVIVGSKKTGINPDNVATPIAASFGDLITLAILAWISQGLYSCLETYYYISPLVGVFFLALTPIWIIIAAKHPATRTVLHSGWEPVITAMVISSIGGLILDTTVSDPNLVGIVVYTPVINGIGGNLVAIQASRISTYLHLHSIPGELPDEPKGCYYPFRTFFGPGVNNKSAQVLLLLVIPGHLIFLYTIHLMKSGHTSLTIIFIVVYLFGAVLQVFTLLWIADWMVHHFWRKGKDPDSFSIPYLTALGDLLGTALLALSFHFLWLIGDRDGDVGD

SEQ ID NO: 1702 - protein, 682 aa, Homo sapiens
MSTPAVPQDLQLPPSQRAQSAFKEQRRQKLKEHLLRRKTLFAYKQENEMLSSRDQRVVTSEDQVQEGTKVLKLKTKMADKENMKRPAESKNNTVVGKHCIPLKPSNELTNSTVVIDTHKPKDSNQTPHLLLTEDDPQSQHMTLSQAFHLKNNSKKKQMTTEKQKQDANMPKKPVLGSYRGQIVQSKINSFRKPLQVKDESSAATKKLSATIPKATKPQPVNTSSVTVKSNRSSNMTATTKFVSTTSQNTQLVRPPIRSHHSNTRDTVKQGISRTSANVTIRKGPHEKELLQSKTALSSVKTSSSQGIIRNKTLSRSIASEVIARPASLSNDKLMEKSEPVDQRRHTAGKAIVDSRSAQPKETSEERKARLSEWKAGKGRVLKRPPNSVVTQHEPAGQNEKPVGSFWTTMAEEDEQRLFTEKVNNTFSECLNLINEGCPKEDILVTLNDLIKNIPDAKKLVKYWICLALIEPITSPIENIIAIYEKAILAGAQPIEEMRHTIVDILTMKSQEKANLGENMEKSCASKEEVKEVSIEDTGVDVDPEKLEMESKLHRNLLFQDCEKEQDNKTKDPTHDVKTPNTETRTSCLIKYNVSTTPYLQSVKKKVQFDGTNSAFKELKFLTPVRRSRRLQEKTSKLPDMLKDHYPCVSSLEQLTELGRETDAFVCRPNAALCRVYYEADTT

SEQ ID NO: 1703 - protein, 852 aa, Homo sapiens
MKPMLKDFSNLLLVVLCDYVLGEAEYLLLREPGHVALSNDTVYVDFQYFDGANGTLRNVSVLLLEANTNQTVTTKYLLTNQSQGTLKFECFYFKEAGDYWFTMTPEATDNSTPFPWWEKSAFLKVEWPVFHVDLNRSAKAAEGTFQVGLFTSQPLCPFPVDKPNIVVDVIFTNSLPEARRNSRQPLEIRTSKRTELAQGQWVEFGCAPLGPEAYVTVVLKLLGRDSVITSTGPIDLAQKFGYKLVMVPELTCESGVEVTVLPPPCTFVQGVVTVFKEAPRYPGKRTIHLAENSLPLGERRTIFNCTLFDMGKNKYCFDFGISSRSHFSAKEECMLIQRNTETWGLWQPWSQCSATCGDGVRERRRVCLTSFPSSPVCPGMSLEASLCSLEECAAFQPSSPSPLQPQGPVKSNNIVTVTGISLCLFIIIATVLITLWRRFGRPAKCSTPARHNSIHSPSFRKNSDEENICELSEQRGSFSDGGDGPTGSPGDTGIPLTYRRSGPVPPEDDASGSESFQSNAQKIIPPLFSYRLAQQQLKEMKKKGLTETTKVYHVSQSPLTDTAIDAAPSAPLDLESPEEAAANKFRIKSPFPEQPAVSAGERPPSRLDLNVTQASCAISPSQTLIRKSQARHVGSRGGPSERSHARNAHFRRTASFHEARQARPFRERSMSTLTPRQAPAYSSRTRTCEQAEDRFRPQSRGAHLFPEKLEHFQEASGTRGPLNPLPKSYTLGQPLRKPDLGDHQAGLVAGIERTEPHRARRGPSPSHKSVSRKQSSPISPKDNYQRVSSLSPSQCRKDKCQSFPTHPEFAFYDNTSFGLTEAEQRMLDLPGYFGSNEEDETTSTLSVEKLVI

SEQ ID NO: 1704 - protein, 531 aa, Homo sapiens
MVDVGKWPIFTLLSPQEIASIRKACVFGTSASEALYVTDNDEVFVFGLNYSNCLGTGDNQSTLVPKKLEGLCGKKIKSLSYGSGPHVLLSTEDGVVYAWGHNGYSQLGNGTTNQGIAPVQVCTNLLIKQVVEVACGSHHSMALAADGEVFAWGYNNCGQVGSGSTANQPTPRKVTNCLHIKRVVGIACGQTSSMAVLDNGEVYGWGYNGNGQLGLGNNGNQLTPVRVAALHSVCVNQIVCGYAHTLALTDEGLLYAWGANTYGQLGTGNKNNLLSPAHIMVEKERVVEIAACHSAHTSAAKTQGGHVYMWGQCRGQSVILPHLTHFSCTDDVFACFATPAVSWRLLSVEHEDFLTVAESLKKEFDSPETADLKFRIDGKYIHVHKAVLKIRCEHFRSMFQSYWNEDMKEVIEIDQFSYPVYRAFLQYLYTDTVDLPPEDAIGLLDLATSYCENRLKKLCQHIIKRGITVENAFSLFSAAVRYDAEDLEEFCFKFCINHLTEVTQTAAFWQMDGPLLKEFIAKASKCGAFKN

SEQ ID NO: 1705 - protein, 270 aa, Homo sapiens
MAASSSGEKEKERLGGGLGVAGGNSTRERLLSALEDLEVLSRELIEMLAISRNQKLLQAGEENQVLELLIHRDGEFQELMKLALNQGKIHHEMQVLEKEVEKRDSDIQQLQKQLKEAEQILATAVYQAKEKLKSIEKARKGAISSEEIIKYAHRISASNAVCAPLTWVPGDPRRPYPTDLEMRSGLLGQMNNPSTNGVNGHLPGDALAAGRLPDVLAPQYPWQSNDMSMNMLPPNHSSDFLLEPPGHNKENEDDVEIMSTDSSSSSSESD

SEQ ID NO: 1706 - protein, 828 aa, Homo sapiens
MAEAALLLLPEAAAERDAREKLALWDRRPDTTAPLTDRQTDSVLELKAAAENLPVPAELPIEDLCSLTSQSLPIELTSVVPESTEDILLKGFTSLGMEEERIETAQQFFSWFAKLQTQMDQDEGTKYRQMRDYLSGFQEQCDAILNDVNSALQHLESLQKQYLFVSNKTGTLHEACEQLLKEQSELVDLAENIQQKLSYFNELETINTKLNSPTLSVNSDGFIPMLAKLDDCITYISSHPNFKDYPIYLLKFKQCLSKALHLMKTYTVNTLQTLTSQLLKRDPSSVPNADNAFTLFYVKFRAAAPKVRTLIEQIELRSEKIPEYQQLLNDIHQCYLDQRELLLGPSIACTVAELTSQNNRDHCALVRSGCAFMVHVCQDEHQLYNEFFTKPTSKLDELLEKLCVSLYDVFRPLIIHVIHLETLSELCGILKNEVLEDHVQNNAEQLGAFAAGVKQMLEDVQERLVYRTHIYIQTDITGYKPAPGDLAYPDKLVMMEQIAQSLKDEQKKVPSEASFSDVHLEEGESNSLTKSGSTESLNPRPQTTISPADLHGMWYPTVRRTLVCLSKLYRCIDRAVFQGLSQEALSACIQSLLGASESISKNKTQIDGQLFLIKHLLILREQIAPFHTEFTIKEISLDLKKTRDAAFKILNPMTVPRFFRLNSNNALIEFLLEGTPEIREHYLDSKKDVDRHLKSACEQFIQQQTKLFVEQLEEFMTKVSALKTMASQGGPKYTLSQQPWAQPAKVNDLAATAYKTIKTKLPVTLRSMSLYLSNKDTEFILFKPVRNNIQQVFQKFHALLKEEFSPEDIQIIACPSMEQLSLLLLVSK

SEQ ID NO: 1707 - protein, 548 aa, Homo sapiens
MGEKNGDAKTFWMELEDDGKVDFIFEQVQNVLQSLKQKIKDGSATNKEYIQAMILVNEATIINSSTSIKDPMPVTQKEQENKSNAFPSTSCENSFPEDCTFLTTENKEILSLEDKVVDFREKDSSSNLSYQSHDCSGACLMKMPLNLKGENPLQLPIKCHFQRRHAKTNSHSSALHVSYKTPCGRSLRNVEEVFRYLLETECNFLFTDNFSFNTYVQLARNYPKQKEVVSDVDISNGVESVPISFCNEIDSRKLPQFKYRKTVWPRAYNLTNFSSMFTDSCDCSEGCIDITKCACLQLTARNAKTSPLSSDKITTGYKYKRLQRQIPTGIYECSLLCKCNRQLCQNRVVQHGPQVRLQVFKTEQKGWGVRCLDDIDRGTFVCIYSGRLLSRANTEKSYGIDENGRDENTMKNIFSKKRKLEVACSDCEVEVLPLGLETHPRTAKTEKCPPKFSNNPKELTVETKYDNISRIQYHSVIRDPESKTAIFQHNGKKMEFVSSESVTPEDNDGFKPPREHLNSKTKGAQSRLCFFCECLPLLPVSLSLAQYL

SEQ ID NO: 1708 - protein, 414 aa, Homo sapiens
MTKARLFRLWLVLGSVFMILLIIVYWDSAGAAHFYLHTSFSRPHTGPPLPTPGPDRDRELTADSDVDEFLDKFLSAGVKQSDLPRKETEQPPAPGSMEESVRGYDWSPRDARRSPDQGRQQAERRSVLRGFCANSSLAFPTKERAFDDIPNSELSHLIVDDRHGAIYCYVPKVACTNWKRVMIVLSGSLLHRGAPYRDPLRIPREHVHNASAHLTFNKFWRRYGKLSRHLMKVKLKKYTKFLFVRDPFVRLISAFRSKFELENEEFYRKFAVPMLRLYANHTSLPASAREAFRAGLKVSFANFIQYLLDPHTEKLAPFNEHWRQVYRLCHPCQIDYDFVGKLETLDEDAAQLLQLLQVDRQLRFPPSYRNRTASSWEEDWFAKIPLAWRQQLYKLYEADFVLFGYPKPENLLRD

SEQ ID NO: 1709 - protein, 560 aa, Homo sapiens
MECLYYFLGFLLLAARLPLDAAKRFHDVLGNERPSAYMREHNQLNGWSSDENDWNEKLYPVWKRGDMRWKNSWKGGRVQAVLTSDSPALVGSNITFAVNLIFPRCQKEDANGNIVYEKNCRNEAGLSADPYVYNWTAWSEDSDGENGTGQSHHNVFPDGKPFPHHPGWRRWNFIYVFHTLGQYFQKLGRCSVRVSVNTANVTLGPQLMEVTVYRRHGRAYVPIAQVKDVYVVTDQIPVFVTMFQKNDRNSSDETFLKDLPIMFDVLIHDPSHFLNYSTINYKWSFGDNTGLFVSTNHTVNHTYVLNGTFSLNLTVKAAAPGPCPPPPPPPRPSKPTPSLGPAGDNPLELSRIPDENCQINRYGHFQATITIVEGILEVNIIQMTDVLMPVPWPESSLIDFVVTCQGSIPTEVCTIISDPTCEITQNTVCSPVDVDEMCLLTVRRTFNGSGTYCVNLTLGDDTSLALTSTLISVPDRDPASPLRMANSALISVGCLAIFVTVISLLVYKKHKEYNPIENSPGNVVRSKGLSVFLNRAKAVFFPGNQEKDPLLKNQEFKGVS

SEQ ID NO: 1710 - protein, 212 aa, Homo sapiens
MNIFRLTGDLSHLAAIVILLLKIWKTRSCAGISGKSQLLFALVFTTRYLDLFTSFISLYNTSMKVIYLACSYATVYLIYLKFKATYDGNHDTFRVEFLVVPVGGLSFLVNHDFSPLEILWTFSIYLESVAILPQLFMISKTGEAETITTHYLFFLGLYRALYLVNWIWRFYFEGFFDLIAVVAGVVQTILYCDFFYLYITKVLKGKKLSLPA

SEQ ID NO: 1711 - protein, 212 aa, Homo sapiens
MNSFSTSAFGPVAFSLGLLLVLPAAFPAPVPPGEDSKDVAAPHRQPLTSSERIDKQIRYILDGISALRKETCNKSNMCESSKEALAENNLNLPKMAEKDGCFQSGFNEETCLVKIITGLLEFEVYLEYLQNRFESSEEQARAVQMSTKVLIQFLQKKAKNLDAITTPDPTTNASLLTKLQAQNQWLQDMTTHLILRSFKEFLQSSLRALRQM

SEQ ID NO: 1712 - protein, 419 aa, Homo sapiens
MNKHQKPVLTGQRFKTRKRDEKEKFEPTVFRDTLVQGLNEAGDDLEAVAKFLDSTGSRLDYRRYADTLFDILVAGSMLAPGGTRIDDGDKTKMTNHCVFSANEDHETIRNYAQVFNKLIRRYKYLEKAFEDEMKKLLLFLKAFSETEQTKLAMLSGILLGNGTLPATILTSLFTDSLVKEGIAASFAVKLFKAWMAEKDANSVTSSLRKANLDKRLLELFPVNRQSVDHFAKYFTDAGLKELSDFLRVQQSLGTRKELQKELQERLSQECPIKEVVLYVKEEMKRNDLPETAVIGLLWTCIMNAVEWNKKEELVAEQALKHLKQYAPLLAVFSSQGQSELILLQKVQEYCYDNIHFMKAFQKIVVLFYKADVLSEEAILKWYKEAHVAKGKSVFLDQMKKFVEWLQNAEEESESEGEEN

SEQ ID NO: 1713 - protein, 547 aa, Homo sapiens
MEDSEALGFEHMGLDPRLLQAVTDLGWSRPTLIQEKAIPLALEGKDLLARARTGSGKTAAYAIPMLQLLLHRKATGPVVEQAVRGLVLVPTKELARQAQSMIQQLATYCARDVRVANVSAAEDSVSQRAVLMEKPDVVVGTPSRILSHLQQDSLKLRDSLELLVVDEADLLFSFGFEEELKSLLCHLPRIYQAFLMSATFNEDVQALKELILHNPVTLKLQESQLPGPDQLQQFQVVCETEEDKFLLLYALLKLSLIRGKSLLFVNTLERSYRLRLFLEQFSIPTCVLNGELPLRSRCHIISQFNQGFYDCVIATDAEVLGAPVKGKRRGRGPKGDKASDPEAGVARGIDFHHVSAVLNFDLPPTPEAYIHRAGRTARANNPGIVLTFVLPTEQFHLGKIEELLSGENRGPILLPYQFRMEEIEGFRYRCRDAMRSVTKQAIREARLKEIKEELLHSEKLKTYFEDNPRDLQLLRHDLPLHPAVVKPHLGHVPDYLVPPALRGLVRPHKKRKKLSSSCRKAKRAKSQNPLRSFKHKGKKFRPTAKPS

SEQ ID NO: 1714 - protein, 280 aa, Homo sapiens
MKFRAKIVDGACLNHFTRISNMIAKLAKTCTLRISPDKLNFILCDKLANGGVSMWCELEQENFFNEFQMEGVSAENNEIYLELTSENLSRALKTAQNARALKIKLTNKHFPCLTVSVELLSMSSSSRIVTHDIPIKVIPRKLWKDLQEPVVPDPDVSIYLPVLKTMKSVVEKMKNISNHLVIEANLDGELNLKIETELVCVTTHFKDLGNPPLASESTHEDRNVEHMAEVHIDIRKLLQFLAGQQVNPTKALCNIVNNKMVHFDLLHEDVSLQYFIPALS

SEQ ID NO: 1715 - protein, 444 aa, Homo sapiens
MEEEGKKGKKPGIVSPFKRVFLKGEKSRDKKAHEKVTERRPLHTVVLSLPERVEPDRLLSDYIEKEVKYLGQLTSIPGYLNPSSRTEILHFIDNAKRAHQLPGHLTQEHDAVLSLSAYNVKLAWRDGEDIILRVPIHDIAAVSYVRDDAAHLVVLKTAQDPGISPSQSLCAESSRGLSAGSLSESAVGPVEACCLVILAAESKVAAEELCCLLGQVFQVVYTESTIDFLDRAIFDGASTPTHHLSLHSDDSSTKVDIKETYEVEASTFCFPESVDVGGASPHSKTISESELSASATELLQDYMLTLRTKLSSQEIQQFAALLHEYRNGASIHEFCINLRQLYGDSRKFLLLGLRPFIPEKDSQHFENFLETIGVKDGRGIITDSFGRHRRALSTTSSSTTNGNRATGSSDDRSAPSEGDEWDRMISDISSDIEALGCSMDQDSA

SEQ ID NO: 1716 - protein, 523 aa, Homo sapiens
MAGVSYAAPWWVSLLHRLPHFDLSWEATSSQFRPEDTDYQQALLLLGAAALACLALDLLFLLFYSFWLCCRRRKSEEHLDADCCCTAWCVIIATLVCSAGIAVGFYGNGETSDGIHRATYSLRHANRTVAGVQDRVWDTAVGLNHTAEPSLQTLERQLAGRPEPLRAVQRLQGLLETLLGYTAAIPFWRNTAVSLEVLAEQVDLYDWYRWLGYLGLLLLDVIICLLVLVGLIRSSKGILVGVCLLGVLALVISWGALGLELAVSVGSSDFCVDPDAYVTKMVEEYSVLSGDILQYYLACSPRAANPFQQKLSGSHKALVEMQDVVAELLRTVPWEQPATKDPLLRVQEVLNGTEVNLQHLTALVDCRSLHLDYVQALTGFCYDGVEGLIYLALFSFVTALMFSSIVCSVPHTWQQKRGPDEDGEEEAAPGPRQAHDSLYRVHMPSLYSCGSSYGSETSIPAAAHTVSNAPVTEYMSQNANFQNPRCENTPLIGRESPPPSYTSSMRAKYLATSQPRPDSSGSH

SEQ ID NO: 1717 - protein, 219 aa, Homo sapiens
MEYLSALNPSDLLRSVSNISSEFGRRVWTSAPPPQRPFRVCDHKRTIRKGLTAATRQELLAKALETLLLNGVLTLVLEEDGTAVDSEDFFQLLEDDTCLMVLQSGQSWSPTRSGVLSYGLGRERPKHSKDIARFTFDVYKQNPRDLFGSLNVKATFYGLYSMSCDFQGLGPKKVLRELLRWTSTLLQGLGHMLLGISSTLRHAVEGAEQWQQKGRLHSY

SEQ ID NO: 1718 - protein, 203 aa, Homo sapiens
MAAAAVSSAKRSLRGELKQRLRAMSAEERLRQSRVLSQKVIAHSEYQKSKRISIFLSMQDEIETEEIIKDIFQRGKICFIPRYRFQSNHMDMVRIESPEEISLLPKTSWNIPQPGEGDVREEALSTGGLDLIFMPGLGFDKHGNRLGRGKGYYDAYLKRCLQHQEVKPYTLALAFKEQICLQVPVNENDMKVDEVLYEDSSTA

SEQ ID NO: 1719 - protein, 963 aa, Homo sapiens
MDAPKAGYAFEYLIETLNDSSHKKFFDVSKLGTKYDVLPYSIRVLLEAAVRNCDGFLMKKEDVMNILDWKTKQSNVEVPFFPARVLLQDFTGIPAMVDFAAMREAVKTLGGDPEKVHPACPTDLTVDHSLQIDFSKCAIQNAPNPGGGDLQKAGKLSPLKVQPKKLPCRGQTTCRGSCDSGELGRNSGTFSSQIENTPILCPFHLQPVPEPETVLKNQEVEFGRNRERLQFFKWSSRVFKNVAVIPPGTGMAHQINLEYLSRVVFEEKDLLFPDSVVGTDSHITMVNGLGILGWGVGGIETEAVMLGLPVSLTLPEVVGCELTGSSNPFVTSIDVVLGITKHLRQVGVAGKFVEFFGSGVSQLSIVDRTTIANMCPEYGAILSFFPVDNVTLKHLEHTGFSKAKLESMETYLKAVKLFRNDQNSSGEPEYSQVIQINLNSIVPSVSGPKRPQDRVAVTDMKSDFQACLNEKVGFKGFQIAAEKQKDIVSIHYEGSEYKLSHGSVVIAAVISCTNNCNPSVMLAAGLLAKKAVEAGLRVKPYIRTSLSPGSGMVTHYLSSSGVLPYLSKLGFEIVGYGCSICVGNTAPLSDAVLNAVKQGDLVTCGILSGNKNFEGRLCDCVRANYLASPPLVVAYAIAGTVNIDFQTEPLGTDPTGKNIYLHDIWPSREEVHRVEEEHVILSMFKALKDKIEMGNKRWNSLEAPDSVLFPWDLKSTYIRCPSFFDKLTKEPIALQAIENAHVLLYLGDSVTTDHISPAGSIARNSAAAKYLTNRGLTPREFNSYGARRGNDAVMTRGTFANIKLFNKFIGKPAPKTIHFPSGQTLDVFEAAELYQKEGIPLIILAGKKYGSGNSRDWAAKGPYLLGVKAVLAESYEKIHKDHLIGIGIAPLQFLPGENADSLGLSGRETFSLTFPEELSPGITLNIQTSTGKVFSVIASFEDDVEITLYKHGGLLNFVARKFS

SEQ ID NO: 1720 - protein, 446 aa, Homo sapiens
MEETIKDPPTSAVLLDHCHFSQVIFNSVEKFYIPGGDVTCHYTFTQHFIPRRKDWIGIFRVGWKTTREYYTFMWVTLPIDLNNKSAKQQEVQFKAYYLPKDDEYYQFCYVDEDGVVRGASIPFQFRPENEEDILVVTTQGEVEEIEQHNKELCKENQELKDSCISLQKQNSDMQAELQKKQEELETLQSINKKLELKVKEQKDYWETELLQLKEQNQKMSSENEKMGIRVDQLQAQLSTQEKEMEKLVQGDQDKTEQLEQLKKENDHLFLSLTEQRKDQKKLEQTVEQMKQNETTAMKKQQELMDENFDLSKRLSENEIICNALQRQKERLEGENDLLKRENSRLLSYMGLDFNSLPYQVPTSDEGGARQNPGLAYGNPYSGIQESSSPSPLSIKKCPICKADDICDHTLEQQQMQPLCFNCPICDKIFPATEKQIFEDHVFCHSL

SEQ ID NO: 1721 - protein, 496 aa, Homo sapiens
MADESETAVKPPAPPLPQMMEGNGNGHEHCSDCENEEDNSYNRGGLSPANDTGAKKKKKKQKKKKEKGSETDSAQDQPVKMNSLPAERIQEIQKAIELFSVGQGPAKTMEEASKRSYQFWDTQPVPKLGEVVNTHGPVEPDKDNIRQEPYTLPQGFTWDALDLGDRGVLKELYTLLNENYVEDDDNMFRFDYSPEFLLWALRPPGWLPQWHCGVRVVSSRKLVGFISAIPANIHIYDTEKKMVEINFLCVHKKLRSKRVAPVLIREITRRVHLEGIFQAVYTAGVVLPKPVGTCRYWHRSLNPRKLIEVKFSHLSRNMTMQRTMKLYRLPETPKTAGLRPMETKDIPVVHQLLTRYLKQFHLTPVMSQEEVEHWFYPQENIIDTFVVENANGEVTDFLSFYTLPSTIMNHPTHKSLKAAYSFYNVHTQTPLLDLMSDALVLAKMKGFDVFNALDLMENKTFLEKLKFGIGDGNLQYYLYNWKCPSMGAEKVGLVLQ

SEQ ID NO: 1722 - protein, 248 aa, Homo sapiens
MSGGGVIRGPAGNNDCRIYVGNLPPDIRTKDIEDVFYKYGAIRDIDLKNRRGGPPFAFVEFEDPRDAEDAVYGRDGYDYDGYRLRVEFPRSGRGTGRGGGGGGGGGAPRGRYGPPSRRSENRVVVSGLPPSGSWQDLKDHMREAGDVCYADVYRDGTGVVEFVRKEDMTYAVRKLDNTKFRSHEGETAYIRVKVDGPRSPSYGRSRSRSRSRSRSRSRSNSRSRSYSPRRSRGSPRYSPRHSRSRSRT

SEQ ID NO: 1723 - protein, 359 aa, Homo sapiens
MVRPMLLLSLGLLAGLLPALAACPQNCHCHSDLQHVICDKVGLQKIPKVSEKTKLLNLQRNNFPVLAANSFRAMPNLVSLHLQHCQIREVAAGAFRGLKQLIYLYLSHNDIRVLRAGAFDDLTELTYLYLDHNKVTELPRGLLSPLVNLFILQLNNNKIRELRAGAFQGAKDLRWLYLSENALSSLQPGALDDVENLAKFHVDRNQLSSYPSAALSKLRVVEELKLSHNPLKSIPDNAFQSFGRYLETLWLDNTNLEKFSDGAFLGVTTLKHVHLENNRLNQLPSNFPFDSLETLALTNNPWKCTCQLRGLRRWLEAKASRPDATCASPAKFKGQHIRDTDAFRSCKFPTKRSKKAGRH

SEQ ID NO: 1724 - protein, 297 aa, Homo sapiens
MSAWAAASLSRAAARCLLARGPGVRAAPPRDPRPSHPEPRGCGAAPGRTLHFTAAVPAGHNKWSKVRHIKGPKDVERSRIFSKLCLNIRLAVKEGGPNPEHNSNLANILEVCRSKHMPKSTIETALKMEKSKDTYLLYEGRGPGGSSLLIEALSNSSHKCQADIRHILNKNGGVMAVGARHSFDKKGVIVVEVEDREKKAVNLERALEMAIEAGAEDVKETEDEEERNVFKFICDASSLHQVRKKLDSLGLCSVSCALEFIPNSKVQLAEPDLEQAAHLIQALSNHEDVIHVYDNIE

SEQ ID NO: 1725 - protein, 160 aa, Homo sapiens
MAAGSRTSLLLAFALLCLPWLQEADSIPTSSNMEETQQKSNLELLHISLLLIESRLEPVRFLRSTFTNNLVYDTSDSDDYHLLKDLEEGIQMLMGRLEDGSHLTGQTLKQTYSKFDTNSHNHDALLKNYGLLHCFRKDMDKVETFLRMVQCRSVEGSCGF

SEQ ID NO: 1726 - protein, 1249 aa, Homo sapiens
MSSMWSEYTIGGVKIYFPYKAYPSQLAMMNSILRGLNSKQHCLLESPTGSGKSLALLCSALAWQQSLSGKPADEGVSEKAEVQLSCCCACHSKDFTNNDMNQGTSRHFNYPSTPPSERNGTSSTCQDSPEKTTLAAKLSAKKQASIYRDENDDFQVEKKRIRPLETTQQIRKRHCFGTEVHNLDAKVDSGKTVKLNSPLEKINSFSPQKPPGHCSRCCCSTKQGNSQESSNTIKKDHTGKSKIPKIYFGTRTHKQIAQITRELRRTAYSGVPMTILSSRDHTCVHPEVVGNFNRNEKCMELLDGKNGKSCYFYHGVHKISDQHTLQTFQGMCKAWDIEELVSLGKKLKACPYYTARELIQDADIIFCPYNYLLDAQIRESMDLNLKEQVVILDEAHNIEDCARESASYSVTEVQLRFARDELDSMVNNNIRKKDHEPLRAVCCSLINWLEANAEYLVERDYESACKIWSGNEMLLTLHKMGITTATFPILQGHFSAVLQKEEKISPIYGKEEAREVPVISASTQIMLKGLFMVLDYLFRQNSRFADDYKIAIQQTYSWTNQIDISDKNGLLVLPKNKKRSRQKTAVHVLNFWCLNPAVAFSDINGKVQTIVLTSGTLSPMKSFSSELGVTFTIQLEANHIIKNSQVWVGTIGSGPKGRNLCATFQNTETFEFQDEVGALLLSVCQTVSQGILCFLPSYKLLEKLKERWLSTGLWHNLELVKTVIVEPQGGEKTNFDELLQVYYDAIKYKGEKDGALLVAVCRGKVSEGLDFSDDNARAVITIGIPFPNVKDLQVELKRQYNDHHSKLRGLLPGRQWYEIQAYRALNQALGRCIRHRNDWGALILVDDRFRNNPSRYISGLSKWVRQQIQHHSTFESALESLAEFSKKHQKVLNVSIKDRTNIQDNESTLEVTSLKYSTSPYLLEAASHLSPENFVEDEAKICVQELQCPKIITKNSPLPSSIISRKEKNDPVFLEEAGKAEKIVISRSTSPTFNKQTKRVSWSSFNSLGQYFTGKIPKATPELGSSENSASSPPRFKTEKMESKTVLPFTDKCESSNLTVNTSFGSCPQSETIISSLKIDATLTRKNHSEHPLCSEEALDPDIELSLVSEEDKQSTSNRDFETEAEDESIYFTPELYDPEDTDEEKNDLAETDRGNRLANNSDCILAKDLFEIRTIKEVDSAREVKAEDCIDTKLNGILHIEESKIDDIDGNVKTTWINELELGKTHEIEIKNFKPSPSKNKGMFPGFK

SEQ ID NO: 1727 - protein, 611 aa, Homo sapiens
MPRRKRNAGSSSDGTEDSDFSTDLEHTDSSESDGTSRRSARVTRSSARLSQSSQDSSPVRNLQSFGTEEPAYSTRRVTRSQQQPTPVTPKKYPLRQTRSSGSETEQVVDFSDRETKNTADHDESPPRTPTGNAPSSESDIDISSPNVSHDESIAKDMSLKDSGSDLSHRPKRRRFHESYNFNMKCPTPGCNSLGHLTGKHERHFSISGCPLYHNLSADECKVRAQSRDKQIEERMLSHRQDDNNRHATRHQAPTERQLRYKEKVAELRKKRNSGLSKEQKEKYMEHRQTYGNTREPLLENLTSEYDLDLFRRAQARASEDLEKLRLQGQITEGSNMIKTIAFGRYELDTWYHSPYPEEYARLGRLYMCEFCLKYMKSQTILRRHMAKCVWKHPPGDEIYRKGSISVFEVDGKKNKIYCQNLCLLAKLFLDHKTLYYDVEPFLFYVMTEADNTGCHLIGYFSKEKNSFLNYNVSCILTMPQYMRQGYGKMLIDFSYLLSKVEEKVGSPERPLSDLGLISYRSYWKEVLLRYLHNFQGKEISIKEISQETAVNPVDIVSTLQALQMLKYWKGKHLVLKRQDLIDEWIAKEAKRSNSNKTMDPSCLKWTPPKGT

SEQ ID NO: 1728 - protein, 246 aa, Homo sapiens
MVVDFWTWEQTFQELIQEAKPRATWTLKLDGNLQLDCLAQGWKQYQQRAFGWFRCSSCQRSWASAQVQILCHTYWEHWTSQGQVRMRLFGQRCQKCSWSQYEMPEFSSDSTMRILSNLVQHILKKYYGNGTRKSPEMPVILEVSLEGSHDTANCEACTLGICGQGLKSCMTKPSKSLLPHLKTGNSSPGIGAVYLANQAKNQSAEAKEAKGSGYEKLGPSRDPDPLNICVFILLLVFIVVKCFTSE

SEQ ID NO: 1729 - protein, 189 aa, Homo sapiens
MAAMSLLRRVSVTAVAALSGRPLGTRLGFGGFLTRGFPKAAAPVRHSGDHGKRLFVIRPSRFYDRRFLKLLRFYIALTGIPVAIFITLVNVFIGQAELAEIPEGYVPEHWEYYKHPISRWIARNFYDSPEKIYERTMAVLQIEAEKAELRVKELEVRKLMHVRGDGPWYYYETIDKELIDHSPKATPDN

SEQ ID NO: 1730 - protein, 704 aa, Homo sapiens
MESKPSRIPRRISVQPSSSLSARMMSGSRGSSLNDTYHSRDSSFRLDSEYQSTSASASASPFQSAWYSESEITQGARSRSQNQQRDHDSKRPKLSCTNCTTSAGRNVGNGLNTLSDSSWRHSQVPRSSSMVLGSFGTDLMRERRDLERRTDSSISNLMDYSHRSGDFTTSSYVQDRVPSYSQGARPKENSMSTLQLNTSSTNHQLPSEHQTILSSRDSRNSLRSNFSSRESESSRSNTQPGFSYSSSRDEAPIISNSERVVSSQRPFQESSDNEGRRTTRRLLSRIASSMSSTFFSRRSSQDSLNTRSLNSENSYVSPRILTASQSRSNVPSASEVPDNRASEASQGFRFLRRRWGLSSLSHNHSSESDSENFNQESEGRNTGPWLSSSLRNRCTPLFSRRRREGRDESSRIPTSDTSSRSHIFRRESNEVVHLEAQNDPLGAAANRPQASAASSSATTGGSTSDSAQGGRNTGISGILPGSLFRFAVPPALGSNLTDNVMITVDIIPSGWNSADGKSDKTKSAPSRDPERLQKIKESLLLEDSEEEEGDLCRICQMAAASSSNLLIEPCKCTGSLQYVHQDCMKKWLQAKINSGSSLEAVTTCELCKEKLELNLEDFDIHELHRAHANEQAEYEFISSGLYLVVLLHLCEQSFSDMMGNTNEPSTRVRFINLARTLQAHMEDLETSEDDSEEDGDHNRTFDIA

SEQ ID NO: 1731 - protein, 232 aa, Homo sapiens
MLRAALPALLLPLLGLAAAAVADCPSSTWIQFQDSCYIFLQEAIKVESIEDVRNQCTDHGADMISIHNEEENAFILDTLKKQWKGPDDILLGMFYDTDDASFKWFDNSNMTFDKWTDQDDDEDLVDTCAFLHIKTGEWKKGNCEVSSVEGTLCKTAIPYKRKYLSDNHILISALVIASTVILTVLGAIIWFLYKKHSDSRFTTVFSTAPQSPYNEDCVLVVGEENEYPVQFD

SEQ ID NO: 1732 - protein, 940 aa, Homo sapiens
MNRIRKFFRGSGRVLAFIFVASVIWLLFDMAALRLSFSEINTRVIKEDIVRRERIGFRVQPDQGKIFYSSIKEMKPPLRGHGKGAWGKENVRKTEESVLKVEVDLDQTQRERKMQNALGRGKVVPLWHPAHLQTLPVTPNKQKTDGRGTKPEASSHQGTPKQTTAQGAPKTSFIAAKGTQVVKISVHMGRVSLKQEPRKSHSPSSDTSKLAAERDLNVTISLSTDRPKQRSQAVANERAHPASTAVPKSGEAMALNKTKTQSKEVNANKHKANTSLPFPKFTVNSNRLRKQSINETPLGSLSKDDGARGAHGKKLNFSESHLVIITKEEEQKADPKEVSNSKTKTIFPKVLGKSQSKHISRNRSEMSSSSLAPHRVPLSQTNHALTGGLEPAKINITAKAPSTEYNQSHIKALLPEDSGTHQVLRIDVTLSPRDPKAPGQFGRPVVVPHGKEKEAERRWKEGNFNVYLSDLIPVDRAIEDTRPAGCAEQLVHNNLPTTSVIMCFVDEVWSTLLRSVHSVINRSPPHLIKEILLVDDFSTKDYLKDNLDKYMSQFPKVRILRLKERHGLIRARLAGAQNATGDVLTFLDSHVECNVGWLEPLLERVYLSRKKVACPVIEVINDKDMSYMTVDNFQRGIFVWPMNFGWRTIPPDVIAKNRIKETDTIRCPVMAGGLFSIDKSYFFELGTYDPGLDVWGGENMELSFKVWMCGGEIEIIPCSRVGHIFRNDNPYSFPKDRMKTVERNLVRVAEVWLDEYKELFYGHGDHLIDQGLDVGNLTQQRELRKKLKCKSFKWYLENVFPDLRAPIVRASGVLINVALGKCISIENTTVILEDCDGSKELQQFNYTWLRLIKCGEWCIAPIPDKGAVRLHPCDNRNKGLKWLHKSTSVFHPELVNHIVFENNQQLLCLEGNFSQKILKVAACDPVKPYQKWKFEKYYEA

SEQ ID NO: 1733 - protein, 425 aa, Homo sapiens
MDKNIGEQLNKAYEAFRQACMDRDSAVKELQQKTENYEQRIREQQEQLSLQQTIIDKLKSQLLLVNSTQDNNYGCVPLLEDSETRKNNLTLDQPQDKVISGIAREKLPKVRRQEVSSPRKETSARSLGSPLLHERGNIEKTFWDLKEEFHKICMLAKAQKDHLSKLNIPDTATETQCSVPIQCTDKTDKQEALFKPQAKDDINRGAPSITSVTPRGLCRDEEDTSFESLSKFNVKFPPMDNDSTFLHSTPERPGILSPATSEAVCQEKFNMEFRDNPGNFVKTEETLFEIQGIDPIASAIQNLKTTDKTKPSNLVNTCIRTTLDRAACLPPGDHNALYVNSFPLLDPSDAPFPSLDSPGKAIRGPQQPIWKPFPNQDSDSVVLSGTDSELHIPRVCEFCQAVFPPSITSRGDFLRHLNSHFNGET

SEQ ID NO: 1734 - protein, 684 aa, Homo sapiens
MENLQTNFSLVQGSTKKLNGMGDDGSPPAKKMITDIHANGKTINKVPTVKKEHLDDYGEAPVETDGEHVKRTCTSVPETLHLNPSLKHTLAQFHLSSQSSLGGPAAFSARHSQESMSPTVFLPLPSPQVLPGPLLIPSDSSTELTQTVLEGESISCFQVGGEKRLCLPQVLNSVLREFTLQQINTVCDELYIYCSRCTSDQLHILKVLGILPFNAPSCGLITLTDAQRLCNALLRPRTFPQNGSVLPAKSSLAQLKETGSAFEVEHECLGKCQGLFAPQFYVQPDAPCIQCLECCGMFAPQTFVMHSHRSPDKRTCHWGFESAKWHCYLHVNQKYLGTPEEKKLKIILEEMKEKFSMRSGKRNQSKTDAPSGMELQSWYPVIKQEGDHVSQTHSFLHPSYYLYMCDKVVAPNVSLTSAVSQSKELTKTEASKSISRQSEKAHSSGKLQKTVSYPDVSLEEQEKMDLKTSRELCSRLDASISNNSTSKRKSESATCNLVRDINKVGIGLVAAASSPLLVKDVICEDDKGKIMEEVMRTYLKQQEKLNLILQKKQQLQMEVKMLSSSKSMKELTEEQQNLQKELESLQNEHAQRMEEFYVEQKDLEKKLEQIMKQKCTCDSNLEKDKEAEYAGQLAELRQRLDHAEADRQELQDELRQEREARQKLEMMIKELKLQILKSSKTAKE

SEQ ID NO: 1735 - protein, 815 aa, Homo sapiens
MAGGHCGSFPAAAAGSGEIVQLNVGGTRFSTSRQTLMWIPDSFFSSLLSGRISTLRDETGAIFIDRDPAAFAPILNFLRTKELDLRGVSINVLRHEAEFYGITPLVRRLLLCEELERSSCGSVLFHGYLPPPGIPSRKINNTVRSADSRNGLNSTEGEARGNGTQPVLSGTGEETVRLGFPVDPRKVLIVAGHHNWIVAAYAHFAVCYRIKESSGWQQVFTSPYLDWTIERVALNAKVVGGPHGDKDKMVAVASESSIILWSVQDGGSGSEIGVFSLGVPVDALFFIGNQLVATSHTGKVGVWNAVTQHWQVQDVVPITSYDTAGSFLLLGCNNGSIYYIDMQKFPLRMKDNDLLVTELYHDPSNDAITALSVYLTPKTSVSGNWIEIAYGTSSGAVRVIVQHPETVGSGPQLFQTFTVHRSPVTKIMLSEKHLVSVCADNNHVRTWTVTRFRGMISTQPGSTPLASFKILSLEETESHGSYSSGNDIGPFGERDDQQVFIQKVVPITNKLFVRLSSTGKRICEIQAVDCTTISSFTVRECEGSSRMGSRPRRYLFTGHTNGSIQMWDLTTAMDMVNKSEDKDVGGPTEEELLKLLDQCDLSTSRCATPNISPATSVVQHSHLRESNSSLQLQHHDTTHEAATYGSMRPYRESPLLARARRTESFHSYRDFQTINLNRNVERAVPENGNLGPIQAEVKGATGECNISERKSPGVEIKSLRELDSGLEVHKIAEGFSESKKRSSEDENENKIEFRKKGGFEGGGFLGRKKVPYLASSPSTSDGGTDSPGTASPSPTKTTPSPRHKKSDSSGQEYSL

SEQ ID NO: 1736 - protein, 223 aa, Homo sapiens
MTWRHHVRLLFTVSLALQIINLGNSYQREKHNGGREEVTKVATQKHRQSPLNWTSSHFGEVTGSAEGWGPEEPLPYSRAFGEGASARPRCCRNGGTCVLGSFCVCPAHFTGRYCEHDQRRSECGALEHGAWTLRACHLCRCIFGALHCLPLQTPDRCDPKDFLASHAHGPSAGGAPSLLLLLPCALLHRLLRPDAPAHPRSLVPSVLQRERRPCGRPGLGHRL

SEQ ID NO: 1737 - protein, 1555 aa, Homo sapiens
MGCKGDASGACAAGALPVTGVCYKMGVLVVLTVLWLFSSVKADSKAITTSLTTKWFSTPLLLEASEFLAEDSQEKFWNFVEASQNIGSSDHDGTDYSYYHAILEAAFQFLSPLQQNLFKFCLSLRSYSATIQAFQQIAADEPPPEGCNSFFSVHGKKTCESDTLEALLLTASERPKPLLFKGDHRYPSSNPESPVVIFYSEIGSEEFSNFHRQLISKSNAGKINYVFRHYIFNPRKEPVYLSGYGVELAIKSTEYKAKDDTQVKGTEVNTTVIGENDPIDEVQGFLFGKLRDLHPDLEGQLKELRKHLVESTNEMAPLKVWQLQDLSFQTAARILASPVELALVVMKDLSQNFPTKARAITKTAVSSELRTEVEENQKYFKGTLGLQPGDSALFINGLHMDLDTQDIFSLFDVLRNEARVMEGLHRLGIEGLSLHNVLKLNIQPSEADYAVDIRSPAISWVNNLEVDSRYNSWPSSLQELLRPTFPGVIRQIRKNLHNMVFIVDPAHETTAELMNTAEMFLSNHIPLRIGFIFVVNDSEDVDGMQDAGVAVLRAYNYVAQEVDDYHAFQTLTHIYNKVRTGEKVKVEHVVSVLEKKYPYVEVNSILGIDSAYDRNRKEARGYYEQTGVGPLPVVLFNGMPFEREQLDPDELETITMHKILETTTFFQRAVYLGELPHDQDVVEYIMNQPNVVPRINSRILTAERDYLDLTASNNFFVDDYARFTILDSQGKTAAVANSMNYLTKKGMSSKEIYDDSFIRPVTFWIVGDFDSPSGRQLLYDAIKHQKSSNNVRISMINNPAKEISYENTQISRAIWAALQTQTSNAAKNFITKMAKEGAAEALAAGADIAEFSVGGMDFSLFKEVFESSKMDFILSHAVYCRDVLKLKKGQRAVISNGRIIGPLEDSELFNQDDFHLLENIILKTSGQKIKSHIQQLRVEEDVASDLVMKVDALLSAQPKGDPRIEYQFFEDRHSAIKLRPKEGETYFDVVAVVDPVTREAQRLAPLLLVLAQLINMNLRVFMNCQSKLSDMPLKSFYRYVLEPEISFTSDNSFAKGPIAKFLDMPQSPLFTLNLNTPESWMVESVRTPYDLDNIYLEEVDSVVAAEYELEYLLLEGHCYDITTGQPPRGLQFTLGTSANPVIVDTIVMANLGYFQLKANPGAWILRLRKGRSEDIYRIYSHDGTDSPPDADEVVIVLNNFKSKIIKVKVQKKADMVNEDLLSDGTSENESGFWDSFKWGFTGQKTEEVKQDKDDIINIFSVASGHLYERFLRIMMLSVLKNTKTPVKFWFLKNYLSPTFKEFIPYMANEYNFQYELVQYKWPRWLHQQTEKQRIIWGYKILFLDVLFPLVVDKFLFVDADQIVRTDLKELRDFNLDGAPYGYTPFCDSRREMDGYRFWKSGYWASHLAGRKYHISALYVVDLKKFRKIAAGDRLRGQYQGLSQDPNSLSNLDQDLPNNMIHQVPIKSLPQEWLWCETWCDDASKKRAKTIDLCNNPMTKEPKLEAAVRIVPEWQDYDQEIKQLQIRFQKEKETGALYKEKTKEPSREGPQKREEL

SEQ ID NO: 1738 - protein, 128 aa, Homo sapiens
MWSTRSPNSTAWPLSLEPDPGMASASTTMHTTTIAEPDPGMSGWPDGRMETSTPTIMDIVVIAGVIAAVAIVLVSLLFVMLRYMYRHKGTYHTNEAKGTEFAESADAALQGDPALQDAGDSSRKEYFI

SEQ ID NO: 1739 - protein, 859 aa, Homo sapiens
MEIEVSVAECKSVPGITSTPHPMDHPSAFYSPPHNGLLTDHHESLDNDVAREIRYLDEVLEANCCDSAVDGTYNGTSSPEPGAVVLVGGLSPPVHEATQPEPTERTASRQAPPHIELSNSSPDPMAEAERTNGHSPSQPRDALGDSLQVPVSPSSTTSSRCSSRDGEFTLTTLKKEAKFELRAFHEDKKPSKLFEDDEHEKEQYCIRKVRPSEEMLELEKERRELIRSQAVKKNPGIAAKWWNPPQEKTIEEQLDEEHLESHKKYKERKERRAQQEQLLLQKQLQQQQQQPPSQLCTAPASSHERASMIDKAKEDIVTEQIDFSAARKQFQLMENSRQAVAKGQSTPRLFSIKPFYRPLGSVNSDKPLTNPRPPSVGGPPEDSGASAAKGQKSPGALETPSAAGSQGNTASQGKEGPYSEPSKRGPLSKLWAEDGEFTSARAVLTVVKDDDHGILDQFSRSVNVSLTQEELDSGLDELSVRSQDTTVLETLSNDFSMDNISDSGASNETTNALQENSLADFSLPQTPQTDNPSEGRGEGVSKSFSDHGFYSPSSTLGDSPLVDDPLEYQAGLLVQNAIQQAIAEQVDKAVSKTSRDGAEQQGPEATVEEAEAAAFGSEKPQSMFEPPQVSSPVQEKRDVLPKILPAEDRALRERGPPQPLPAVQPSGPINMEETRPEGSYFSKYSEAAELRSTASLLATQESDVMVGPFKLRSRKQRTLSMIEEEIRAAQEREEELKRQRQVLQSTQSPRTKNAPSLPSRTCYKTAPGKIEKVKPPPSPTTEGPSLQPDLAPEEAAGTQRPKNLMQTLMEDYETHKSKRRERMDDSSVLEATRVNRRKSALALRWEAGIYANQEEEDNE

SEQ ID NO: 1740 - protein, 810 aa, Homo sapiens
MIPVTELRYFADTQPAYRILKPWWDVFTDYISIVMLMIAVFGGTLQVTQDKMICLPCKWVTKDSCNDSFRGWAAPGPEPTYPNSTILPTPDTGPTGIKYDLDRHQYNYVDAVCYENRLHWFAKYFPYLVLLHTLIFLACSNFWFKFPRTSSKLEHFVSILLKCFDSPWTTRALSETVVEESDPKPAFSKMNGSMDKKSSTVSEDVEATVPMLQRTKSRIEQGIVDRSETGVLDKKEGEQAKALFEKVKKFRTHVEEGDIVYRLYMRQTIIKVIKFILIICYTVYYVHNIKFDVDCTVDIESLTGYRTYRCAHPLATLFKILASFYISLVIFYGLICMYTLWWMLRRSLKKYSFESIREESSYSDIPDVKNDFAFMLHLIDQYDPLYSKRFAVFLSEVSENKLRQLNLNNEWTLDKLRQRLTKNAQDKLELHLFMLSGIPDTVFDLVELEVLKLELIPDVTIPPSIAQLTGLKELWLYHTAAKIEAPALAFLRENLRALHIKFTDIKEIPLWIYSLKTLEELHLTGNLSAENNRYIVIDGLRELKRLKVLRLKSNLSKLPQVVTDVGVHLQKLSINNEGTKLIVLNSLKKMANLTELELIRCDLERIPHSIFSLHNLQEIDLKDNNLKTIEEIISFQHLHRLTCLKLWYNHIAYIPIQIGNLTNLERLYLNRNKIEKIPTQLFYCRKLRYLDLSHNNLTFLPADIGLLQNLQNLAITANRIETLPPELFQCRKLRALHLGNNVLQSLPSRVGELTNLTQIELRGNRLECLPVELGECPLLKRSGLVVEEDLFNTLPPEVKERLWRADKEQA

SEQ ID NO: 1741 - protein, 336 aa, Homo sapiens
MLRAGWLRGAAALALLLAARVVAAFEPITVGLAIGAASAITGYLSYNDIYCRFAECCREERPLNASALKLDLEEKLFGQHLATEVIFKALTGFRNNKNPKKPLTLSLHGWAGTGKNFVSQIVAENLHPKGLKSNFVHLFVSTLHFPHEQKIKLYQDQLQKWIRGNVSACANSVFIFDEMDKLHPGIIDAIKPFLDYYEQVDGVSYRKAIFIFLSNAGGDLITKTALDFWRAGRKREDIQLKDLEPVLSVGVFNNKHSGLWHSGLIDKNLIDYFIPFLPLEYRHVKMCVRAEMRARGSAIDEDIVTRVAEEMTFFPRDEKIYSDKGCKTVQSRLDFH

SEQ ID NO: 1742 - protein, 201 aa, Homo sapiens
MALSWVLTVLSLLPLLEAQIPLCANLVPVPITNATLDRITGKWFYIASAFRNEEYNKSVQEIQATFFYFTPNKTEDTIFLREYQTRQDQCIYNTTYLNVQRENGTISRYVGGQEHFAHLLILRDTKTYMLAFDVNDEKNWGLSVYADKPETTKEQLGEFYEALDCLRIPKSDVVYTDWKKDKCEPLEKQHEKERKQEEGES

SEQ ID NO: 1743 - protein, 302 aa, Homo sapiens
MSEDEEKVKLRRLEPAIQKFIKIVIPTDLERLRKHQINIEKYQRCRIWDKLHEEHINAGRTVQQLRSNIREIEKLCLKVRKDDLVLLKRMIDPVKEEASAATAEFLQLHLESVEELKKQFNDEETLLQPPLTRSMTVGGAFHTTEAEASSQSLTQIYALPEIPQDQNAAESWETLEADLIELSQLVTDFSLLVNSQQEKIDSIADHVNSAAVNVEEGTKNLGKAAKYKLAALPVAGALIGGMVGGPIGLLAGFKVAGIAAALGGGVLGFTGGKLIQRKKQKMMEKLTSSCPDLPSQTDKKCS

SEQ ID NO: 1744 - protein, 418 aa, Homo sapiens
MIQLTATPVSALVDEPVHIRATGLIPFQMVSFQASLEDENGDMFYSQAHYRANEFGEVDLNHASSLGGDYMGVHPMGLFWSLKPEKLLTRLLKRDVMNRPFQVQVKLYDLELIVNNKVASAPKASLTLERWYVAPGVTRIKVREGRLRGALFLPPGEGLFPGVIDLFGGLGGLLEFRASLLASRGFASLALAYHNYEDLPRKPEVTDLEYFEEAANFLLRHPKVFGSGVGVVSVCQGVQIGLSMAIYLKQVTATVLINGTNFPFGIPQVYHGQIHQPLPHSAQLISTNALGLLELYRTFETTQVGASQYLFPIEEAQGQFLFIVGEGDKTINSKAHAEQAIGQLKRHGKNNWTLLSYPGAGHLIEPPYSPLCCASTTHDLRLHWGGEVIPHAAAQEHAWKEIQRFLRKHLIPDVTSQL

SEQ ID NO: 1745 - protein, 277 aa, Homo sapiens
MAAVSVYAPPVGGFSFDNCRRNAVLEADFAKRGYKLPKVRKTGTTIAGVVYKDGIVLGADTRATEGMVVADKNCSKIHFISPNIYCCGAGTAADTDMTTQLISSNLELHSLSTGRLPRVVTANRMLKQMLFRYQGYIGAALVLGGVDVTGPHLYSIYPHGSTDKLPYVTMGSGSLAAMAVFEDKFRPDMEEEEAKNLVSEAIAAGIFNDLGSGSNIDLCVISKNKLDFLRPYTVPNKKGTRLGRYRCEKGTTAVLTEKITPLEIEVLEETVQTMDTS

SEQ ID NO: 1746 - protein, 301 aa, Homo sapiens
MTTLDDKLLGEKLQYYYSSSEDEDSDHEDKDRGRCAPASSSVPAEAELAGEGISVNTGPKGVINDWRRFKQLETEQREEQCREMERLIKKLSMTCRSHLDEEEEQQKQKDLQEKISGKMTLKEFAIMNEDQDDEEFLQQYRKQRMEEMRQQLHKGPQFKQVFEISSGEGFLDMIDKEQKSIVIMVHIYEDGIPGTEAMNGCMICLAAEYPAVKFCKVKSSVIGASSQFTRNALPALLIYKGGELIGNFVRVTDQLGDDFFAVDLEAFLQEFGLLPEKEVLVLTSVRNSATCHSEDSDLEID

SEQ ID NO: 1747 - protein, 123 aa, Homo sapiens [sequence omitted]

SEQ ID NO: 1748 - protein, 334 aa, Homo sapiens
MNLSLVLAAFCLGIASAVPKFDQNLDTKWYQWKATHRRLYGANEEGWRRAVWEKNMKMIELHNGEYSQGKHGFTMAMNAFGDMTNEEFRQMMGCFRNQKFRKGKVFREPLFLDLPKSVDWRKKGYVTPVKNQKQCGSCWAFSATGALEGQMFRKTGKLVSLSEQNLVDCSRPQGNQGCNGGFMARAFQYVKENGGLDSEESYPYVAVDEICKYRPENSVANDTGFTVVAPGKEKALMKAVATVGPISVAMDAGHSSFQFYKSGIYFEPDCSSKNLDHGVLVVGYGFEGANSNNSKYWLVKNSWGPEWGSNGYVKIAKDKNNHCGIATAASYPNV

SEQ ID NO: 1749 - protein, 153 aa, Homo sapiens
MARNTLSSRFRRVDIDEFDENKFVDEQEEAAAAAAEPGPDPSEVDGLLRQGDMLRAFHAALRNSPVNTKNQAVKERAQGVVLKVLTNFKSSEIEQAVQSLDRNGVDLLMKYIYKGFEKPTENSSAVLLQWHEKALAVGGLGSIIRVLTARKTV

SEQ ID NO: 1750 - protein, 915 aa, Homo sapiens
MARRSSFQSCQIISLFTFAVGVNICLGFTAHRIKRAEGWEEGPPTVLSDSPWTNISGSCKGRCFELQEAGPPDCRCDNLCKSYTSCCHDFDELCLKTARGWECTKDRCGEVRNEENACHCSEDCLARGDCCTNYQVVCKGESHWVDDDCEEIKAAECPAGFVRPPLIIFSVDGFRASYMKKGSKVMPNIEKLRSCGTHSPYMRPVYPTKTFPNLYTLATGLYPESHGIVGNSMYDPVFDATFHLRGREKFNHRWWGGQPLWITATKQGVKAGTFFWSVVIPHERRILTILQWLTLPDHERPSVYAFYSEQPDFSGHKYGPFGPEESSYGSPFTPAKRPKRKVAPKRRQERPVAPPKKRRRKIHRMDHYAAETRQDKMTNPLREIDKIVGQLMDGLKQLKLHRCVNVIFVGDHGMEDVTCDRTEFLSNYLTNVDDITLVPGTLGRIRSKFSNNAKYDPKAIIANLTCKKPDQHFKPYLKQHLPKRLHYANNRRIEDIHLLVERRWHVARKPLDVYKKPSGKCFFQGDHGFDNKVNSMQTVFVGYGSTFKYKTKVPPFENIELYNVMCDLLGLKPAPNNGTHGSLNHLLRTNTFRPTMPEEVTRPNYPGIMYLQSDFDLGCTCDDKVEPKNKLDELNKRLHTKGSTEERHLLYGRPAVLYRTRYDILYHTDFESGYSEIFLMPLWTSYTVSKQAEVSSVPDHLTSCVRPDVRVSPSFSQNCLAYKNDKQMSYGFLFPPYLSSSPEAKYDAFLVTNMVPMYPAFKRVWNYFQRVLVKKYASERNGVNVISGPIFDYDYDGLHDTEDKIKQYVEGSSIPVPTHYYSIITSCLDFTQPADKCDGPLSVSSFILPHRPDNEESCNSSEDESKWVEELMKMHTARVRDIEHLTSLDFFRKTSRSYPEILTLKTYLHTYESEI

SEQ ID NO: 1751 - protein, 251 aa, Homo sapiens
MSDIGDWFRSIPAITRYWFAATVAVPLVGKLGLISPAYLFLWPEAFLYRFQIWRPITATFYFPVGPGTGFLYLVNLYFLYQYSTRLETGAFDGRPADYLFMLLFNWICIVITGLAMDMQLLMIPLIMSVLYVWAQLNRDMIVSFWFGTRFKACYLPWVILGFNYIIGGSVINELIGNLVGHLYFFLMFRYPMDLGGRNFLSTPQFLYRWLPSRRGGVSGFGVPPASMRRAADQNGGGGRHNWGQGFRLGDQ

SEQ ID NO: 1752 - protein, 357 aa, Homo sapiens
MQSVQSTSFCLRKQCLCLTFLLLHLLGQVAATQRCPPQCPGRCPATPPTCAPGVRAVLDGCSCCLVCARQRGESCSDLEPCDESSGLYCDRSADPSNQTGICTAVEGDNCVFDGVIYRSGEKFQPSCKFQCTCRDGQIGCVPRCQLDVLLPEPNCPAPRKVEVPGECCEKWICGPDEEDSLGGLTLAAYRPEATLGVEVSDSSVNCIEQTTEWTACSKSCGMGFSTRVTNRNRQCEMLKQTRLCMVRPCEQEPEQPTDKKGKKCLRTKKSLKAIHLQFKNCTSLHTYKPRFCGVCSDGRCCTPHNTKTIQAEFQCSPGQIVKKPVMVIGTCTCHTNCPKNNEAFLQELELKTTRGKM

SEQ ID NO: 1753 - protein, 190 aa, Homo sapiens
TMALPFALLMALVVLSCKSSCSLDCDLPQTHSLGHRRTMMLLAQMRRISLFSCLKDRHDFRFPQEEFDGNQFQKAEAISVLHEVIQQTFNLFSTKDSSVAWDERLLDKLYTELYQQLNDLEACVMQEVWVGGTPLMNEDSILAVRKYFQRITLYLTEKKYSPCAWEVVRAEIMRSFSSSRNLQERLRRKE

SEQ ID NO: 1754 - protein, 1105 aa, Homo sapiens
MAATASAGVPATVSEKQEFYQLLKNLINPSCMVRRQAEEIYENIPGLCKTTFLLDAVRNRRAGYEVRQMAAALLRRLLSSGFEEVYPNLPADVQRDVKIELILAVKLETHASMRKKLCDIFAVLARNLIDEDGTNHWPEGLKFLIDSIYSKNVVLWEVALHVFWHFPGIFGTQERHDLDIIKRLLDQCIQDQEHPAIRTLSARAAAAFVLANENNIALFKDFADLLPGILQAVNDSCYQDDDSVLESLVEIADTVPKYLGPYLEDTLQLSLKLCGDSRLSNLQRQLALEVIVTLSETATPMLKKHTNIIAQAVPHILAMMVDLQDDEDWVNADEMEEDDFDSNAVAAESALDRLACGLGGKVVLPMTKEHIMQMLQSPDWKYRHAGLMALSAIGEGCHQQMESILDETVNSVLLFLQDPHPRVRAAACTTLGQMATDFAPNFQKKFHETVIAALLRTMENQGNQRVQSHAASALIIFIEDCPKSLLVLYVDSMVKNLHSVLVIKLQELIRNGTKLALEQLVTTIASVADTIEEKFVPYYDIFMPSLKHIVELAVQKELKLLRGKTIECISHIGLAVGKEKFMQDASNVMQLLLKTQSDLNNMEDDDPQTSYMVSAWARMCKILGKDFQQYLPLVIEPLIKTASAKPDVALLDTQDVENMSDDDGWQFVNLGDQQSFGIKTSGLEAKATACQMLVYYAKELREGFVEYTEQVVKLMVPLLKFYFHDNVRVAAAESMPFLLECARIRGPEYLAQMWQFICDPLIKAIGTEPDTDVLSEIMNSFAKSIEVMGDGCLNDEHLEELGGILKAKLEGHFKNQELRQVKRQEENYDQQVEMSLQDEDECDVYILTKVSDILHSLFSTYKEKILPWFEQLLPLIVNLICSSRPWPDRQWGLCIFDDIIEHCSPTSFKYVEYFRWPMLLNMRDNNPEVRQAAAYGLGVMAQFGGDDYRSLCSEAVPLLVKVIKCANSKTKKNVIATENCISAIGKILKFKPNCVNVDEVLPHWLSWLPLHEDKEEAIQTLSFLCDLIESNHPVVIGPNNSNLPKIISIIAEGKINETINYEDPCAKRLANVVRQVQTSEDLWLECVSQLDDEQQEALQELLNFA

SEQ ID NO: 1755 - protein, 134 aa, Homo sapiens
MAQSLALSLLILVLAFGIPRTQGSDGGAQDCCLKYSQRKIPAKVVRSYRKQEPSLGCSIPAILFLPRKRSQAELCADPKELWVQQLMQHLDKTPSPQKPAQGCRKDRGASKTGKKGKGSKGCKRTERSQTPKGP

SEQ ID NO: 1756 - protein, 112 aa, Homo sapiens
MKGPPTFCSLLLLSLLLSPDPTAAFLLPPSTACCTQLYRKPLSDKLLRKVIQVELQEADGDCHLQAFVLHLAQRSICIHPQNPSLSQWFEHQERKLHGTLPKLNFGMLRKMG

SEQ ID NO: 1757 - protein, 186 aa, Homo sapiens
MAGLTDLQRLQARVEELERWVYGPGGARGSRKVADGLVKVQVALGNISSKRERVKILYKKIEDLIKYLDPEYIDRIAIPDASKLQFILAEEQFILSQVALLEQVNALVPMLDSAHIKAVPEHAARLQRLAQIHIQQQDQCVEITEESKALLEEYNKTTMLLSKQFVQWDELLCQLEAATQVKPAEE

SEQ ID NO: 1758 - protein, 163 aa, Homo sapiens
MAAAVVLAAGLRAARRAVAATGVRGGQVRGAAGVTDGNEVAKAQQATPGGAAPTIFSRILDKSLPADILYEDQQCLVFRDVAPQAPVHFLVIPKKPIPRISQAEEEDQQLLGHLLLVAKQTAKAEGLGDGYRLVINDGKLGAQSVYHLHIHVLGGRQLQWPPG

SEQ ID NO: 1759 - protein, 260 aa, Homo sapiens
MGPRARPALLLLMLLQTAVLQGRLLQSHTLQVILGCEMQEDNSTEGYWKYGYDGQDHLEFCPDTLDWRAAEPRAWPTKLEWERHKIRARQNRAYLERDCPAQLQQLLELGRGVLDQQVPPLVKVTHHVTSSVTTLRCRALNYYPQNITMKWLKDKQPMDAKEFEPKDVLPNGDGTYQGWITLAVPPGEEQRYTCQVEHPGLDQPLIVIWEPSPSGTLVIGVISGIAVFVVILFIGILFIILRKRQGSRGAMGHYVLAERE

SEQ ID NO: 1760 - protein, 1805 aa, Homo sapiens
MSDTKVKVAVRVRPMNRRELELNTKCVVEMEGNQTVLHPPPSNTKQGERKPPKVFAFDYCFWSMDESNTTKYAGQEVVFKCLGEGILEKAFQGYNACIFAYGQTGSGKSFSMMGHAEQLGLIPRLCCALFKRISLEQNESQTFKVEVSYMEIYNEKVRDLLDPKGSRQSLKVREHKVLGPYVDGLSQLAVTSFEDIESLMSEGNKSRTVAATNMNEESSRSHAVFNIIITQTLYDLQSGNSGEKVSKVSLVDLAGSERVSKTGAAGERLKEGSNINKSLTTLGLVISSLADQAAGKGKSKFVPYRDSVLTWLLKDNLGGNSQTSMIATISPAADNYEETLSTLRYADRAKRIVNHAVVNEDPNAKVIRELREEVEKLREQLSQAEAMKAPELKEKLEESEKLIKELTVTWEEKLRKTEEIAQERQRQLESMGISLEMSGIKVGDDKCYLVNLNADPALNELLVYYLKDHTRVGADTSQDIQLFGIGIQPQHCEIDIASDGDVTLTPKENARSCVNGTLVCSTTQLWHGDRILWGNNHFFRINLPKRKRRDWLKDFEKETGPPEHDLDAASEASSEPDYNYEFAQMEVIMKTLNSNDPVQNVVQVLEKQYLEEKRSALEEQRLMYERELEQLRQQLSPDRQPQSSGPDRLAYSSQTAQQKVTQWAEERDELFRQSLAKLREQLVKANTLVREANFLAEEMSKLTDYQVTLQIPAANLSANRKRGAIVSEPAIQVRRKGKSTQVWTIEKLENKLIDMRDLYQEWKEKVPEAKRLYGKRGDPFYEAQENHNLIGVANVFLECLFCDVKLQYAVPIISQQGEVAGRLHVEVMRVTGAVPERVVEDDSSENSSESGSLEVVDSSGEIIHRVKKLTCRVKIKEATGLPLNLSNFVFCQYTFWDQCESTVAAPVVDPEVPSPQSKDAQYTVTFSHCKDYVVNVTEEFLEFISDGALAIEVWGHRCAGNGSSIWEVDSLHAKTRTLHDRWNEVTRRIEMWISILELNELGEYAAVELHQAKDVNTGGIFQLRQGHSRRVQVTVKPVQHSGTLPLMVEAILSVSIGCVTARSTKLQRGLDSYQRDDEDGDDMDSYQEEDLNCVRERWSDALIKRREYLDEQIKKVSNKTEKTEDDVEREAQLVEQWVGLTEERNAVLVPAPGSGIPGAPADWIPPPGMETHIPVLFLDLNADDLSANEQLVGPHASGVNSILPKEHGSQFFYLPIIKHSDDEVSATASWDSSVHDSVHLNRVTPQNERIYLIVKTTVQLSHPAAMELVLRKRIAANIYNKQSFTQSLKRRISLKNIFYSCGVTYEIVSNIPKATEEIEDRETLALLAARSENEGTSDGETYIEKYTRGVLQVENILSLERLRQAVTVKEALSTKARHIRRSLSTPNVHNVSSSRPDLSGFDEDDKGWPENQLDMSDYSSSYQDVACYGTLPRDSPRRNKEGCTSETPHALTVSPFKAFSPQPPKFFKPLMPVKEEHKKRIALEARPLLSQESMPPPQAHNPGCIVPSGSNGSSMPVEHNSKREKKIDSEEEENELEAINRKLISSQPYVPVEFADFSVYNASLENREWFSSKVDLSNSRVLEKEVSRSPTTSSITSGYFSHSASNATLSDMVVPSSDSSDQLAIQTKDADSTEHSTPSLVHDFRPSSNKELTEVEKGLVKDKIIVVPLKENSALAKGSPSSQSIPEKNSKSLCRTGSCSELDACPSKISQPARGFCPREVTVEHTTNILEDHSFTEFMGVSEGKDFDGLTDSSAGELSSRRSLPNKTGGKTVSDGLHHPSQLHSKLENDQVIIPEAAFWVLCCQ

SEQ ID NO: 1761 - protein, 832 aa, Homo sapiens
MLPFLLATLGTTALNNSNPKDYCYSARIRSTVLQGLPFGGVPTVLALDFMCFLALLFLFSILRKVAWDYGRLALVTDADRLRRQERDRVEQEYVASAMHGDSHDRYERLTSVSSSVDFDQRDNGFCSWLTAIFRIKDDEIRDKCGGDAVHYLSFQRHIIGLLVVVGVLSVGIVLPVNFSGDLLENNAYSFGRTTIANLKSGNNLLWLHTSFAFLYLLLTVYSMRRHTSKMRYKEDDLVKRTLFINGISKYAESEKIKKHFEEAYPNCTVLEARPCYNVARLMFLDAERKKAERGKLYFTNLQSKENVPTMINPKPCGHLCCCVVRGCEQVEAIEYYTKLEQKLKEDYKREKEKVNEKPLGMAFVTFHNETITAIILKDFNVCKCQGCTCRGEPRPSSCSESLHISNWTVSYAPDPQNIYWEHLSIRGFIWWLRCLVINVVLFILLFFLTTPAIIITTMDKFNVTKPVEYLNNPIITQFFPTLLLWCFSALLPTIVYYSAFFEAHWTRSGENRTTMHKCYTFLIFMVLLLPSLGLSSLDLFFRWLFDKKFLAEAAIRFECVFLPDNGAFFVNYVIASAFIGNAMDLLRIPGLLMYMIRLCLARSAAERRNVKRHQAYEFQFGAAYAWMMCVFTVVMTYSITCPIIVPFGLMYMLLKHLVDRYNLYYAYLPAKLDKKIHSGAVNQVVAAPILCLFWLLFFSTMRTGFLAPTSMFTFVVLVITIVICLCHVCFGHFKYLSAHNYKIEHTETDTVDPRSNGRPPTAAAVPKSAKYIAQVLQDSEVDGDGDGAPGSSGDEPPSSSSQDEELLMPPDALTDTDFQSCEDSLIENEIHQ

SEQ ID NO: 1762 - protein, 547 aa, Homo sapiens
MTSAAPAKKPYRKAPPEHRELRLEIPGSRLEQEEPLTDAERMKLLQEENEELRRRLASATRRTEALERELEIGQDCLELELGQSREELDKFKDKFRRLQNSYTASQRTNQELEDKLHTLIKKAEMDRKTLDWEIVELTNKLLDAKNTINKLEELNERYRLDCNLAVQLLKCNKSHFRNHKFADLPCELQDMVRKHLHSGQEAASPGPAPSLAPGAVVPTSVIARVLEKPESLLLNSAQSGSAGRPLAEDVFVHVDMSEGVPGDPASPPAPGSPTPQPNGECHSLGTARGSPEEELPLPAFEKLNPYPTPSPPHPLYPGRRVIEFSEDKVRIPRNSPLPNCTYATRQAISLSLVEEGSERARPSPVPSTPASAQASPHHQPSPAPLTLSAPASSASSEEDLLVSWQRAFVDRTPPPAAVAQRTAFGRDALPELQRHFAHSPADRDEVVQAPSARPEESELLLPTEPDSGFPREEEELNLPISPEEERQSLLPINRGTEEGPGTSHTEGRAWPLPSSSRPQRSPKRMGVHHLHRKDSLTQAQEQGNLLN

SEQ ID NO: 1763 - protein, 476 aa, Homo sapiens
MWTGYKILIFSYLTTEIWMEKQYLSQREVDLEAYFTRNHTVLQGTRFKRAIFQGQYCRNFGCCEDRDDGCVTEFYAANALCYCDKFCDRENSDCCPDYKSFCREEKEWPPHTQPWYPEGCFKDGQHYEEGSVIKENCNSCTCSGQQWKCSQHVCLVRSELIEQVNKGDYGWTAQNYSQFWGMTLEDGFKFRLGTLPPSPMLLSMNEMTASLPATTDLPEFFVASYKWPGWTHGPLDQKNCAASWAFSTASVAADRIAIQSKGRYTANLSPQNLISCCAKNRHGCNSGSIDRAWWYLRKRGLVSHACYPLFKDQNATNNGCAMASRSDGRGKRHATKPCPNNVEKSNRIYQCSPPYRVSSNETEIMKEIMQNGPVQAIMQVREDFFHYKTGIYRHVTSTNKESEKYRKLQTHAVKLTGWGTLRGAQGQKEKFWIAANSWGKSWGENGYFRILRGVNESDIEKLIIAAWGQLTSSDEP

SEQ ID NO: 1764 - protein, 671 aa, Homo sapiens
MQPDMSLNVIKMKSSDFLESAELDSGGFGKVSLCFHRTQGLMIMKTVYKGPNCIEHNEALLEEAKMMNRLRHSRVVKLLGVIIEEGKYSLVMEYMEKGNLMHVLKAEMSTPLSVKGRIILEIIEGMCYLHGKGVIHKDLKPENILVDNDFHIKIADLGLASFKMWSKLNNEEHNELREVDGTAKKNGGTLYYMAPEHLNDVNAKPTEKSDVYSFAVVLWAIFANKEPYENAICEQQLIMCIKSGNRPDVDDITEYCPREIISLMKLCWEANPEARPTFPGIEEKFRPFYLSQLEESVEEDVKSLKKEYSNENAVVKRMQSLQLDCVAVPSSRSNSATEQPGSLHSSQGLGMGPVEESWFAPSLEHPQEENEPSLQSKLQDEANYHLYGSRMDRQTKQQPRQNVAYNREEERRRRVSHDPFAQQRPYENFQNTEGKGTAYSSAASHGNAVHQPSGLTSQPQVLYQNNGLYSSHGFGTRPLDPGTAGPRVWYRPIPSHMPSLHNIPVPETNYLGNTPTMPFSSLPPTDESIKYTIYNSTGIQIGAYNYMEIGGTSSSLLDSTNTNFKEEPAAKYQAIFDNTTSLTDKHLDPIRENLGKHWKNCARKLGFTQSQIDEIDHDYERDGLKEKVYQMLQKWVMREGIKGATVGKLAQALHQCSRIDLLSSLIYVSQN

SEQ ID NO: 1765 - protein, 136 aa, Homo sapiens
MILNWKLLGILVLCLHTRGISGSEGHPSHPPAEDREEAGSPTLPQGPPVPGDPWPGAPPLFEDPPPTRPSRPWRDLPETGVWLPEPPRTDPPQPPRPDDPWPAGPQPPENPWPPAPEVDNRPQEEPDLDPPREEYR

SEQ ID NO: 1766 - protein, 325 aa, Homo sapiens
MQGRVAGSCAPLGLLLVCLHLPGLFARSIGVVEEKVSQNLGTNLPQLGQPSSTGPSNSEHPQPALDPRSNDLARVPLKLSVPASDGFPPAGGSAVQRWPPSWGLPAMDSWPPEDPWQMMAAAAEDRLGEALPEELSYLSSAAALAPGSGPLPGESSPDATGLSPKASLLHQDSESRRLPRSNSLGAGGKILSQRPPWSLIHRVLPDHPWGTLNPSVSWGGGGPGTGWGTRPMPHPEGIWGINNQPPGTSWGNINRYPGGSWGNINRYPGGSWGNINRYPGGSWGNIHLYPGINNPFPPGVLRPPGSSWNIPAGFPNPPSPRLQWG

SEQ ID NO: 1767 - protein, 258 aa, Homo sapiens
MAASVLNTVLRRLPMLSLFRGSHRVQVPLQTLCTKAPSEEDSLSSVPISPYKDEPWKYLESEEYQERYGSRPVWADYRRNHKGGVPPQRTRKTCIRRNKVVGNPCPICRDHKLHVDFRNVKLLEQFVCAHTGIIFYAPYTGVCVKQHKRLTQAIQKARDHGLLIYHIPQVEPRDLDFSTSHGAVSATPPAPTLVSGDPWYPWYNWKQPPERELSRLRRLYQGHLQEESGPPPESMPKMPPRTPAEASSTGQTGPQSAL

SEQ ID NO: 1768 - protein, 156 aa, Homo sapiens
MCHSRSCHPTMTILQAPTPAPSTIPGPRRGSGPEIFTFDPLPEPAAAPAGRPSASRGHRKRSRRVLYPRVVRRQLPVEEPNPAKRLLFLLLTIVFCQILMAEEGVPAPLPPEDAPNAASLAPTPVSAVLEPFNLTSEPSDYALDLSTFLQQHPAAF

SEQ ID NO: 1769 - protein, 462 aa, Homo sapiens
MESTPSRGLNRVHLQCRNLQEFLGGLSPGVLDRLYGHPATCLAVFRELPSLAKNWVMRMLFLEQPLPQAAVALWVKKEFSKAQEESTGLLSGLRIWHTQLLPGGLQGLILNPIFRQNLRIALLGGGKAWSDDTSQLGPDKHARDVPSLDKYAEERWEVVLHFMVGSPSAAVSQDLAQLLSQAGLMKSTEPGEPPCITSAGFQFLLLDTPAQLWYFMLQYLQTAQSRGMDLVEILSFLFQLSFSTLGKDYSVEGMSDSLLNFLQHLREFGLVFQRKRKSRRYYPTRLAINLSSGVSGAGGTVHQPGFIVVETNYRLYAYTESELQIALIALFSEMLYRFPNMVVAQVTRESVQQAIASGITAQQIIHFLRTRAHPVMLKQTPVLPPTITDQIRLWELERDRLRFTEGVLYNQFLSQVDFELLLAHARELGVLVFENSAKRLMVVTPAGHSDVKRFWKRQKHSS

SEQ ID NO: 1770 - protein, 112 aa, Homo sapiens
MEKILILLLVALSVAYAAPGPRGIIINLENGELCMNSAQCKSNCCQHSSALGLARCTSMASENSECSVKTLYGIYYKCPCERGLTCEGDKTIVGSITNTNFGICHDAGRSKQ

SEQ ID NO: 1771 - protein, 303 aa, Homo sapiens
MGSAGRLHYLAMTAENPTPGDLAPAPLITCKLCLCEQSLDKMTTLQECQCIFCTACLKQYMQLAIREGCGSPITCPDMVCLNHGTLQEAEIACLVPVDQFQLYQRLKFEREVHLDPYRTWCPVADCQTVCPVASSDPGQPVLVECPSCHLKFCSCCKDAWHAEVSCRDSQPIVLPTEHRALFGTDAEAPIKQCPVCRVYIERNEGCAQMMCKNCKHTFCWYCLQNLDNDIFLRHYDKGPCRNKLGHSRASVMWNRTQVVGILVGLGIIALVTSPLLLLASPCIICCVCKSCRGKKKKHDPSTT

SEQ ID NO: 1772 - protein, 442 aa, Homo sapiens
MAPRSLLLLLSGALALTDTWAGSHSLRYFSTAVSRPGRGEPRYIAVEYVDDTQFLRFDSDAAIPRMEPREPWVEQEGPQYWEWTTGYAKANAQTDRVALRNLLRRYNQSEAGSHTLQGMNGCDMGPDGRLLRGYHQHAYDGKDYISLNEDLRSWTAADTVAQITQRFYEAEEYAEEFRTYLEGECLELLRRYLENGKETLQRADPPKAHVAHHPISDHEATLRCWALGFYPAEITLTWQRDGEEQTQDTELVETRPAGDGTFQKWAAVVVPPGEEQRYTCHVQHEGLPQPLILRWEQSPQPTIPIVGIVAGLVVLGAVVTGAVVAAVMWRKKSSDRNRGSYSQAAAYSVVSGNLMITWWSSLFLLGVLFQGYLGCLRSHSVLGRRKVGDMWILFFLWLWTSFNTAFLALQSLRFGFGFRRGRSFLLRSWHHLMKRVQIKIFD

SEQ ID NO: 1773 - protein, 413 aa, Homo sapiens
MAEGPEEARGHPPGQDDGGGDHEPVPSLRGPPTTAVPCPRDDPQAEPQAPGRPTAPGLAAAAAADKLEPPRELRKRGEAASGSGAELQEQAGCEAPEAAAPRERPARLSAREYSRQVHEWLWQSYCGYLTWHSGLAAFPAYCSPQPSPQSFPSGGAAVPQAAAPPPPQLGYYNPFYFLSPGAAGPDPRTAAGISTPAPVAGLGPRAPHVQASVRATPVTRVGSAAPSRSPSETGRQAGREYVIPSLAHRFMAEMVDFFILFFIKATIVLSIMHLSGIKDISKFAMHYIIEEIDEDTSMEDLQKMMVVALIYRLLVCFYEIICIWGAGGATPGKFLLGLRVVTCDTSVLIAPSRVLVIPSSNVSITTSTIRALIKNFSIASFFPAFITLLFFQHNRTAYDIVAGTIVVKRNGVR

SEQ ID NO: 1774 - protein, 223 aa, Homo sapiens
MKFVPCLLLVTLSCLGTLGQAPRQKQGSTGEEFHFQTGGRDSCTMRPSSLGQGAGEVWLRVDCRNTDQTYWCEYRGQPSMCQAFAADPKPYWNQALQELRRLHHACQGAPVLRPSVCREAGPQAHMQQVTSSLKGSPEPNQQPEAGTPSLRPKATVKLTEATQLGKDSMEELGKAKPTTRPTAKPTQPGPRPGGNEEAKKKAWEHCWKPFQALCAFLISFFRG

SEQ ID NO: 1775 - protein, 784 aa, Homo sapiens
MPHTLWMVWVLGVIISLSKEESSNQASLSCDRNGICKGSSGSLNSIPSGLTEAVKSLDLSNNRITYISNSDLQRCVNLQALVLTSNGINTIEEDSFSSLGSLEHLDLSYNYLSNLSSSWFKPLSSLTFLNLLGNPYKTLGETSLFSHLTKLQILRVGNMDTFTKIQRKDFAGLTFLEELEIDASDLQSYEPKSLKSIQNVSHLILHMKQHILLLEIFVDVTSSVECLELRDTDLDTFHFSELSTGETNSLIKKFTFRNVKITDESLFQVMKLLNQISGLLELEFDDCTLNGVGNFRASDNDRVIDPGKVETLTIRRLHIPRFYLFYDLSTLYSLTERVKRITVENSKVFLVPCLLSQHLKSLEYLDLSENLMVEEYLKNSACEDAWPSLQTLILRQNHLASLEKTGETLLTLKNLTNIDISKNSFHSMPETCQWPEKMKYLNLSSTRIHSVTGCIPKTLEILDVSNNNLNLFSLNLPQLKELYISRNKLMTLPDASLLPMLLVLKISRNAITTFSKEQLDSFHTLKTLEAGGNNFICSCEFLSFTQEQQALAKVLIDWPANYLCDSPSHVRGQQVQDVRLSVSECHRTALVSGMCCALFLLILLTGVLCHRFHGLWYMKMMWAWLQAKRKPRKAPSRNICYDAFVSYSERDAYWVENLMVQELENFNPPFKLCLHKRDFIPGKWIIDNIIDSIEKSHKTVFVLSENFVKSEWCKYELDFSHFRLFDENNDAAILILLEPIEKKAIPQRFCKLRKIMNTKTYLEWPMDEAQREGFWVNLRAAIKS

SEQ ID NO: 1776 - protein, 761 aa, Homo sapiens
MPNFCAAPNCTRKSTQSDLAFFRFPRDPARCQKWVENCRRADLEDKTPDQLNKHYRLCAKHFETSMICRTSPYRTVLRDNAIPTIFDLTSHLNNPHSRHRKRIKELSEDEIRTLKQKKIDETSEQEQKHKETNNSNAQNPSEEEGEGQDEDILPLTLEEKENKEYLKSLFEILILMGKQNIPLDGHEADEIPEGLFTPDNFQALLECRINSGEEVLRKRFETTAVNTLFCSKTQQRQMLEICESCIREETLREVRDSHFFSIITDDVVDIAGEEHLPVLVRFVDESHNLREEFIGFLPYEADAEILAVKFHTMITEKWGLNMEYCRGQAYIVSSGFSSKMKVVASRLLEKYPQAIYTLCSSCALNMWLAKSVPVMGVSVALGTIEEVCSFFHRSPQLLLELDNVISVLFQNSKERGKELKEICHSQWTGRHDAFEILVELLQALVLCLDGINSDTNIRWNNYIAGRAFVLCSAVSDFDFIVTIVVLKNVLSFTRAFGKNLQGQTSDVFFAAGSLTAVLHSLNEVMENIEVYHEFWFEEATNLATKLDIQMKLPGKFRRAHQGNLESQLTSESYYKETLSVPTVEHIIQELKDIFSEQHLKALKCLSLVPSVMGQLKFNTSEEHHADMYRSDLPNPDTLSAELHCWRIKWKHRGKDIELPSTIYEALHLPDIKFFPNVYALLKVLCILPVMKVENERYENGRKRLKAYLRNTLTDQRSSNLALLNINFDIKHDLDLMVDTYIKLYTSKSELPTDNSETVENT

SEQ ID NO: 1777 - protein, 194 aa, Homo sapiens
MTMRHNWTPDLSPLWVLLLCAHVVTLLVRATPVSQTTTAATASVRSTKDPCPSQPPVFPAAKQCPALEVTWPEVEVPLNGTLSLSCVACSRFPNFSILYWLGNGSFIEHLPGRLWEGSTSRERGSTGTQLCKALVLEQLTPALHSTNFSCVLVDPEQVVQRHVVLAQLWAGLRATLPPTQEALPSSHSSPQQQG

SEQ ID NO: 1778 - protein, 203 aa, Homo sapiens
MSMEDYDFLFKIVLIGNAGVGKTCLVRRFTQGLFPPGQGATIGVDFMIKTVEINGEKVKLQIWDTAGQERFRSITQSYYRSANALILTYDITCEESFRCLPEWLREIEQYASNKVITVLVGNKIDLAERREVSQQRAEEFSEAQDMYYLETSAKESDNVEKLFLDLACRLISEARQNTLVNNVSSPLPGEGKSISYLTCCNFN

SEQ ID NO: 1779 - protein, 662 aa, Homo sapiens
MRPQILLLLALLTLGLAAQHQDKVPCKMVDKKVSCQVLGLLQVPSVLPPDTETLDLSGNQLRSILASPLGFYTALRHLDLSTNEISFLQPGAFQALTHLEHLSLAHNRLAMATALSAGGLGPLPRVTSLDLSGNSLYSGLLERLLGEAPSLHTLSLAENSLTRLTRHTFRDMPALEQLDLHSNVLMDIEDGAFEGLPRLTHLNLSRNSLTCISDFSLQQLRVLDLSCNSIEAFQTASQPQAEFQLTWLDLRENKLLHFPDLAALPRLIYLNLSNNLIRLPTGPPQDSKGIHAPSEGWSALPLSAPSGNASGRPLSQLLNLDLSYNEIELIPDSFLEHLTSLCFLNLSRNCLRTFEARRLGSLPCLMLLDLSHNALETLELGARALGSLRTLLLQGNALRDLPPYTFANLASLQRLNLQGNRVSPCGGPDEPGPSGCVAFSGITSLRSLSLVDNEIELLRAGAFLHTPLTELDLSSNPGLEVATGALGGLEASLEVLALQGNGLMVLQVDLPCFICLKRLNLAENRLSHLPAWTQAVSLEVLDLRNNSFSLLPGSAMGGLETSLRRLYLQGNPLSCCGNGWLAAQLHQGRVDVDATQDLICRFSSQEEVSLSHVRPEDCEKGGLKNINLIIILTFILVSAILLTTLAACCCVRRQKFNQQYKA

SEQ ID NO: 1780 - protein, 296 aa, Homo sapiens [sequence omitted]

SEQ ID NO: 1781 - protein, 258 aa, Homo sapiens
MIAISAVSSALLFSLLCEASTVVLLNSTDSSPPTNNFTDIEAALKAQLDSADIPKARRKRYISQNDMIAILDYHNQVRGKVFPPAANMEYMVWDENLAKSAEAWAATCIWDHGPSYLLRFLGQNLSVRTGRYRSILQLVKPWYDEVKDYAFPYPQDCNPRCPMRCFGPMCTHYTQMVWATSNRIGCAIHTCQNMNVWGSVWRRAVYLVCNYAPKGNWIGEAPYKVGVPCSSCPPSYGGSCTDNLCFPGVTSNYLYWFK

SEQ ID NO: 1782 - protein, 318 aa, Homo sapiens
MASPGCLLCVLGLLLCGAASLELSRPHGDTAKKPIIGILMQKCRNKVMKNYGRYYIAASYVKYLESAGARVVPVRLDLTEKDYEILFKSINGILFPGGSVDLRRSDYAKVAKIFYNLSIQSFDDGDYFPVWGTCLGFEELSLLISGECLLTATDTVDVAMPLNFTGGQLHSRMFQNFPTELLLSLAVEPLTANFHKWSLSVKNFTMNEKLKKFFNVLTTNTDGKIEFISTMEGYKYPVYGVQWHPEKAPYEWKNLDGISHAPNAVKTAFYLAEFFVNEARKNNHHFKSESEEEKALIYQFSPIYTGNISSFQQCYIFD

SEQ ID NO: 1783 - protein, 871 aa, Homo sapiens
MKYSCCALVLAVLGTELLGSLCSTVRSPRFRGRIQQERKNIRPNIILVLTDDQDVELGSLQVMNKTRKIMEHGGATFINAFVTTPMCCPSRSSMLTGKYVHNHNVYTNNENCSSPSWQAMHEPRTFAVYLNNTGYRTAFFGKYLNEYNGSYIPPGWREWLGLIKNSRFYNYTVCRNGIKEKHGFDYAKDYFTDLITNESINYFKMSKRMYPHRPVMMVISHAAPHGPEDSAPQFSKLYPNASQHITPSYNYAPNMDKHWIMQYTGPMLPIHMEFTNILQRKRLQTLMSVDDSVERLYNMLVETGELENTYIIYTADHGYHIGQFGLVKGKSMPYDFDIRVPFFIRGPSVEPGSIVPQIVLNIDLAPTILDIAGLDTPPDVDGKSVLKLLDPEKPGNRFRTNKKAKIWRDTFLVERGKFLRKKEESSKNIQQSNHLPKYERVKELCQQARYQTACEQPGQKWQCIEDTSGKLRIHKCKGPSDLLTVRQSTRNLYARGFHDKDKECSCRESGYRASRSQRKSQRQFLRNQGTPKYKPRFVHTRQTRSLSVEFEGEIYDINLEEEEELQVLQPRNIAKRHDEGHKGPRDLQASSGGNRGRMLADSSNAVGPPTTVRVTHKCFILPNDSIHCERELYQSARAWKDHKAYIDKEIEALQDKIKNLREVRGHLKRRKPEECSCSKQSYYNKEKGVKKQEKLKSHLHPFKEAAQEVDSKLQLFKENNRRRKKERKEKRRQRKGEECSLPGLTCFTHDNNHWQTAPFWNLGSFCACTSSNNNTYWCLRTVNETHNFLFCEFATGFLEYFDMNTDPYQLTNTVHTVERGILNQLHVQLMELRSCQGYKQCNPRPKNLDVGNKDGGSYDLHRGQLWDGWEG

SEQ ID NO: 1784 - protein, 298 aa, Homo sapiens
MSLYPSLEDLKVDKVIQAQTAFSANPANPAILSEASAPIPHDGNLYPRLYPELSQYMGLSLNEEEIRANVAVVSGAPLQGQLVARPSSINYMVAPVTGNDVGIRRAEIKQGIREVILCKDQDGKIGLRLKSIDNGIFVQLVQANSPASLVGLRFGDQVLQINGENCAGWSSDKAHKVLKQAFGEKITMTIRDRPFERTITMHKDSTGHVGFIFKNGKITSIVKDSSAARNGLLTEHNICEINGQNVIGLKDSQIADILSTSGTVVTITIMPAFIFEHIIKRMAPSIMKSLMDHTIPEV

SEQ ID NO: 1785 - protein, 441 aa, Homo sapiens
MLSSVMAPLWACILVAAGILATDTHHPQDSALYHLSKQLLQKYHKEVRPVYNWTKATTVYLDLFVHAILDVDAENQILKTSVWYQEVWNDEFLSWNSSMFDEIREISLPLSAIWAPDIIINEFVDIERYPDLPYVYVNSSGTIENYKPIQVVSACSLETYAFPFDVQNCSLTFKSILHTVEDVDLAFLRSPEDIQHDKKAFLNDSEWELLSVSSTYSILQSSAGGFAQIQFNVVMRRHPLVYVVSLLIPSIFLMLVDLGSFYLPPNCRARIVFKTSVLVGYTVFRVNMSNQVPRSVGSTPLIGHFFTICMAFLVLSLAKSIVLVKFLHDEQRGGQEQPFLCLRGDTDADRPRVEPRAQRAVVTESSLYGEHLAQPGTLKEVWSQLQSISNYLQTQDQTDQQEAEWLVLLSRFDRLLFQSYLFMLGIYTITLCSLWALWGGV

SEQ ID NO: 1786 - protein, 2214 aa, Homo sapiens
MATRSSRRESRLPFLFTLVALLPPGALCEVWTQRLHGGSAPLPQDRGFLVVQGDPRELRLWARGDARGASRADEKPLRRKRSAALQPEPIKVYGQVSLNDSHNQMVVHWAGEKSNVIVALARDSLALARPKSSDVYVSYDYGKSFKKISDKLNFGLGNRSEAVIAQFYHSPADNKRYIFADAYAQYLWITFDFCNTLQGFSIPFRAADLLLHSKASNLLLGFDRSHPNKQLWKSDDFGQTWIMIQEHVKSFSWGIDPYDKPNTIYIERHEPSGYSTVFRSTDFFQSRENQEVILEEVRDFQLRDKYMFATKVVHLLGSEQQSSVQLWVSFGRKPMRAAQFVTRHPINEYYIADASEDQVFVCVSHSNNRTNLYISEAEGLKFSLSLENVLYYSPGGAGSDTLVRYFANEPFADFHRVEGLQGVYIATLINGSMNEENMRSVITFDKGGTWEFLQAPAFTGYGEKINCELSQGCSLHLAQRLSQLLNLQLRRMPILSKESAPGLIIATGSVGKNLASKTNVYISSSAGARWREALPGPHYYTWGDHGGIITAIAQGMETNELKYSTNEGETWKTFIFSEKPVFVYGLLTEPGEKSTVFTIFGSNKENVHSWLILQVNATDALGVPCTENDYKLWSPSDERGNECLLGHKTVFKRRTPHATCFNGEDFDRPVVVSNCSCTREDYECDFGFKMSEDLSLEVCVPDPEFSGKSYSPPVPCPVGSTYRRTRGYRKISGDTCSGGDVEARLEGELVPCPLAEENEFILYAVRKSIYRYDLASGATEQLPLTGLRAAVALDFDYEHNCLYWSDLALDVIQRLCLNGSTGQEVIINSGLETVEALAFEPLSQLLYWVDAGFKKIEVANPDGDFRLTIVNSSVLDRPRALVLVPQEGVMFWTDWGDLKPGIYRSNMDGSAAYHLVSEDVKWPNGISVDDQWIYWTDAYLECIERITFSGQQRSVILDNLPHPYAIAVFKNEIYWDDWSQLSIFRASKYSGSQMEILANQLTGLMDMKIFYKGKNTGSNACVPRPCSLLCLPKANNSRSCRCPEDVSSSVLPSGDLMCDCPQGYQLKNNTCVKQENTCLRNQYRCSNGNCINSIWWCDFDNDCGDMSDERNCPTTICDLDTQFRCQESGTCIPLSYKCDLEDDCGDNSDESHCEMHQCRSDEYNCSSGMCIRSSWVCDGDNDCRDWSDEANCTAIYHTCEASNFQCRNGHCIPQRWACDGDTDCQDGSDEDPVNCEKKCNGFRCPNGTCIPSSKHCDGLRDCSDGSDEQHCEPLCTHFMDFVCKNRQQCLFHSMVCDGIIQCRDGSDEDAAFAGCSQDPEFHKVCDEFGFQCQNGVCISLIWKCDGMDDCGDYSDEANCENPTEAPNCSRYFQFRCENGHCIPNRWKCDRENDCGDWSDEKDCGDSHILPFSTPGPSTCLPNYYRCSSGTCVMDTWVCDGYRDCADGSDEEACPLLANVTAASTPTQLGRCDRFEFECHQPKTCIPNWKRCDGHQDCQDGRDEANCPTHSTLTCMSREFQCEDGEACIVLSERCDGFLDCSDESDEKACSDELTVYKVQNLQWTADFSGDVTLTWMRPKKMPSASCVYNVYYRVVGESIWKTLETHSNKTNTVLKVLKPDTTYQVKVQVQCLSKAHNTNDFVTLRTPEGLPDAPRNLQLSLPREAEGVIVGHWAPPIHTHGLIREYIVEYSRSGSKMWASQRAASNFTEIKNLLVNTLYTVRVAAVTSRGIGNWSDSKSITTIKGKVIPPPDIHIDSYGENYLSFTLTMESDIKVNGYVVNLFWAFDTHKQERRTLNFRGSILSHKVGNLTAHTSYEISAWAKTDLGDSPLAFEHVMTRGVRPPAPSLKAKAINQTAVECTWTGPRNVVYGIFYATSFLDLYRNPKSLTTSLHNKTVIVSKDEQYLFLVRVVVPYQGPSSDYVVVKMIPDSRLPPRHLHVVHTGKTSVVIKWESPYDSPDQDLLYAVAVKDLIRKTDRSYKVKSRNSTVEYTLNKLEPGGKYHIIVQLGNMSKDSSIKITTVSLSAPDALKIITENDHVLLFWKSLALKEKHFNESRGYEIHMFDSAMNITAYLGNTTDNFFKISNLKMGHNYTFTVQARCLFGNQICGEPAILLYDELGSGADASATQAARSTDVAAVVVPILFLILLSLGVGFAILYTKHRRLQSSFTAFANSHYSSRLGSAIFSSGDDLGEDDEDAPMITGFSDDVPMVIA

SEQ ID NO: 1787 - protein, 619 aa, Homo sapiens
MAAAPPLSKAEYLKRYLSGADAGVDRGSESGRKRRKKRPKPGGAGGKGMRIVDDDVSWTAISTTKLEKEEEEDDGDLPVVAEFVDERPEEVKQMEAFRSSAKWKLLGGHNEDLPSNRHFRHDTPDSSPRRVRHGTPDPSPRKDRHDTPDPSPRRARHDTPDPSPLRGARHDSDTSPPRRIRHDSSDTSPPRRARHDSPDPSPPRRPQHNSSGASPRRVRHDSPDPSPPRRARHGSSDISSPRRVHNNSPDTSRRTLGSSDTQQLRRARHDSPDLAPNVTYSLPRTKSGKAPERASSKTSPHWKESGASHLSFPKNSKYEYDPDISPPRKKQAKSHFGDKKQLDSKGDCQKATDSDLSSPRHKQSPGHQDSDSDLSPPRNRPRHRSSDSDLSPPRRRQRTKSSDSDLSPPRRSQPPGKKAAHMYSGAKTGLVLTDIQREQQELKEQDQETMAFEAEFQYAETVFRDKSGRKRNLKLERLEQRRKAEKDSERDELYAQWGKGLAQSRQQQQNVEDAMKEMQKPLARYIDDEDLDRMLREQEREGDPMANFIKKNKAKENKNKKVRPRYSGPAPPPNRFNIWPGYRWDGVDRSNGFEQKRFARLASKKAVEELAYKWSVEDM

SEQ ID NO: 1788 - protein, 267 aa, Homo sapiens
MRLTVLCAVCLLPGSLALPLPQEAGGMSELQWEQAQDYLKRFYLYDSETKNANSLEAKLKEMQKFFGLPITGMLNSRVIEIMQKPRCGVPDVAEYSLFPNSPKWTSKVVTYRIVSYTRDLPHITVDRLVSKALNMWGKEIPLHFRKVVWGTADIMIGFARGAHGDSYPFDGPGNTLAHAFAPGTGLGGDAHFDEDERWTDGSSLGINFLYAATHELGHSLGMGHSSDPNAVMYPTYGNGDPQNFKLSQDDIKGIQKLYGKRSNSRKK

SEQ ID NO: 1789 - protein, 483 aa, Homo sapiens
MKVLPASGLAVFLIMALKFSTAAPSLVAASPRTWRNNYRLAQAYLDKYYTNKEGHQIGEMVARGSNSMIRKIKELQAFFGLQVTGKLDQTTMNVIKKPRCGVPDVANYRLFPGEPKWKKNTLTYRISKYTPSMSSVEVDKAVEMALQAWSSAVPLSFVRINSGEADIMISFENGDHGDSYPFDGPRGTLAHAFAPGEGLGGDTHFDNAEKWTMGTNGFNLFTVAAHEFGHALGLAHSTDPSALMYPTYKYKNPYGFHLPKDDVKGIQALYGPRKVFLGKPTLPHAPHHKPSIPDLCDSSSSFDAVTMLGKELLLFKDRIFWRRQVHLRTGIRPSTITSSFPQLMSNVDAAYEVAERGTAYFFKGPHYWITRGFQMQGPPRTIYDFGFPRHVQQIDAAVYLREPQKTLFFVGDEYYSYDERKRKMEKDYPKNTEEEFSGVNGQIDAAVELNGYIYFFSGPKTYKYDTEKEDVVSVVKSSSWIGC

SEQ ID NO: 1790 - protein, 513 aa, Homo sapiens
MKRLLLLFLFFITFSSAFPLVRMTENEENMQLAQAYLNQFYSLEIEGNHLVQSKNRSLIDDKIREMQAFFGLTVTGKLDSNTLEIMKTPRCGVPDVGQYGYTLPGWRKYNLTYRIINYTPDMARAAVDEAIQEGLEVWSKVTPLKFTKISKGIADIMIAFRTRVHGRCPRYFDGPLGVLGHAFPPGPGLGGDTHFDEDENWTKDGAGFNLFLVAAHEFGHALGLSHSNDQTALMFPNYVSLDPRKYPLSQDDINGIQSIYGGLPKEPAKPKEPTIPHACDPDLTFDAITTFRREVMFFKGRHLWRIYYDITDVEFELIASFWPSLPADLQAAYENPRDKILVFKDENFWMIRGYAVLPDYPKSIHTLGFPGRVKKIDAAVCDKTTRKTYFFVGIWCWRFDEMTQTMDKGFPQRVVKHFPGISIRVDAAFQYKGFFFFSRGSKQFEYDIKTKNITRIMRTNTWFQCKEPKNSSFGFDINKEKAHSGGIKILYHKSLSLFIFGIVHLLKNTSIYQ

SEQ ID NO: 1791 - protein, 624 aa, Homo sapiens
MAPRRLLLVGEGNFSFAAALSETLDQSTQLTATCLQRPAELARDPLAWENLQCLRERGIDVRFGVDCTQLADVFELHEREFDQIYFIFPHCGRKAGVAKNRELLAKFFQSCADVLAEEGEVHVALCRGQGGTPADKPQREWHNSWQVVAMAALGGLILSDVYPFSCKAVAGYKCTGYRSQDKSFHVEGALNHIFTRSLPFEGSQPRIFRIKLGNQWFSFPEPEALVGKLNRGFLEAPSCHPIKTINEKLIAELGKVFPLKRLKCSYPLLPQEGTSVLPFWNCDFLSAAFWISLHEDNSNSESLTGGTSQDVEDFLVSFSELSLLKNPGRDGKEEACEGTCGQAKICLRPSLLVHVQDVIEVPDFLSGSLHILSGPVFQKCHILPFTMPAFHETLFILGVNQNLKDGCLQSLLDHLKGILDSLLTQTLPESSKLSSLVKFVLQSNGKDYMIRVKTHNFSPDCTEDLIIGSVITSATSVIHKDQCFVFVSMNLDLLAMLVWCISDWRMLWTFDNRFLKNFVPGKIEPFKSHSLYPPCYVHDVSFWIDQKKGFDELEFHTVARAVSQDTIISIQFLSRFQHPKTQQVSLCYRLTYQTCDKALTQQQVASMQSQFRKEIQQHLYVIPR

SEQ ID NO: 1792 - protein, 184 aa, Homo sapiens
MAAAGGARLLRAASAVLGGPAGRWLHHAGSRAGSSGLLRNRGPGGSAEASRSLSVSARARSSSEDKITVHFINRDGETLTTKGKVGDSLLDVVVENNLDIDGFGACEGTLACSTCHLIFEDHIYEKLDAITDEENDMLDLAYGLTDRSRLGCQICLTKSMDNMTVRVPETVADARQSIDVGKTS

SEQ ID NO: 1793 - protein, 471 aa, Homo sapiens
MHPGVLAAFLFLSWTHCRALPLPSGGDEDDLSEEDLQFAERYLRSYYHPTNLAGILKENAASSMTERLREMQSFFGLEVTGKLDDNTLDVMKKPRCGVPDVGEYNVFPRTLKWSKMNLTYRIVNYTPDMTHSEVEKAFKKAFKVWSDVTPLNFTRLHDGIADIMISFGIKEHGDFYPFDGPSGLLAHAFPPGPNYGGDAHFDDDETWTSSSKGYNLFLVAAHEFGHSLGLDHSKDPGALMFPIYTYTGKSHFMLPDDDVQGIQSLYGPGDEDPNPKHPKTPDKCDPSLSLDAITSLRGETMIFKDRFFWRLHPQQVDAELFLTKSFWPELPNRIDAAYEHPSHDLIFIFRGRKFWALNGYDILEGYPKKISELGLPKEVKKISAAVHFEDTGKTLLFSGNQVWRYDDTNHIMDKDYPRLIEEDFPGIGDKVDAVYEKNGYIYFFNGPIQFEYSIWSNRIVRVMPANSILWC

SEQ ID NO: 1794 - protein, 450 aa, Homo sapiens
MVPLVAVVSGPRAQLFACLLRLGTQQVGPLQLHTGASHAARNHYEVLVLGGGSGGITMAARMKRKVGAENVAIVEPSERHFYQPIWTLVGAGAKQLSSSGRPTASVIPSGVEWIKARVTELNPDKNCIHTDDDEKISYRYLIIALGIQLDYEKIKGLPEGFAHPKIGSNYSVKTVEKTWKALQDFKEGNAIFTFPNTPVKCAGAPQKIMYLSEAYFRKTGKRSKANIIFNTSLGAIFGVKKYADALQEIIQERNLTVNYKKNLIEVRADKQEAVFENLDKPGETQVISYEMLHVTPPMSPPDVLKTSPVADAAGWVDVDKETLQHRRYPNVFGIGDCTNLPTSKTAAAVAAQSGILDRTISVIMKNQTPTKKYDGYTSCPLVTGYNRVILAEFDYKAEPLETFPFDQSKERLSMYLMKADLMPFLYWNMMLRGYWGGPAFLRKLFHLGMS

SEQ ID NO: 1795 - protein, 466 aa, Homo sapiens
MRLRTRKASQQSNQIQTQRTARAKRKYSEVDDSLPSGGEKPSKNETGLLSSIKKFIKGSTPKEERENPSKRSRIERDIDNNLITSTPRAGEKPNKQISRVRRKSQVNGEAGSYEMTNQHVKQNGKLEDNPSSGSPPRTTLLGTIFSPVFNFFSPANKNGTSGSDSPGQAVEAEEIVKQLDMEQVDEITTSTTTSTNGAAYSNQAVQVRPSLNNGLEEAEETVNRDIPPLTAPVTPDSGYSSAHAEATYEEDWEVFDPYYFIKHVPPLTEEQLNRKPALPLKTRSTPEFSLVLDLDETLVHCSLNELEDAALTFPVLFQDVIYQVYVRLRPFFREFLERMSQMYEIILFTASKKVYADKLLNILDPKKQLVRHRLFREHCVCVQGNYIKDLNILGRDLSKTIIIDNSPQAFAYQLSNGIPIESWFMDKNDNELLKLIPFLEKLVELNEDVRPHIRDRFRLHDLLPPD

SEQ ID NO: 1796 - protein, 1170 aa, Homo sapiens
MGLAWGLGVLFLMHVCGTNRIPESGGDNSVFDIFELTGAARKGSGRRLVKGPDPSSPAFRIEDANLIPPVPDDKFQDLVDAVRAEKGFLLLASLRQMKKTRGTLLALERKDHSGQVFSVVSNGKAGTLDLSLTVQGKQHVVSVEEALLATGQWKSITLFVQEDRAQLYIDCEKMENAELDVPIQSVFTRDLASIARLRIAKGGVNDNFQGVLQNVRFVFGTTPEDILRNKGCSSSTSVLLTLDNNVVNGSSPAIRTNYIGHKTKDLQAICGISCDELSSMVLELRGLRTIVTTLQDSIRKVTEENKELANELRRPPLCYHNGVQYRNNEEWTVDSCTECHCQNSVTICKKVSCPIMPCSNATVPDGECCPRCWPSDSADDGWSPWSEWTSCSTSCGNGIQQRGRSCDSLNNRCEGSSVQTRTCHIQECDKRFKQDGGWSHWSPWSSCSVTCGDGVITRIRLCNSPSPQMNGKPCEGEARETKACKKDACPINGGWGPWSPWDICSVTCGGGVQKRSRLCNNPTPQFGGKDCVGDVTENQICNKQDCPIDGCLSNPCFAGVKCTSYPDGSWKCGACPPGYSGNGIQCTDVDECKEVPDACFNHNGEHRCENTDPGYNCLPCPPRFTGSQPFGQGVEHATANKQVCKPRNPCTDGTHDCNKNAKCNYLGHYSDPMYRCECKPGYAGNGIICGEDTDLDGWPNENLVCVANATYHCKKDNCPNLPNSGQEDYDKDGIGDACDDDDDNDKIPDDRDNCPFHYNPAQYDYDRDDVGDRCDNCPYNHNPDQADTDNNGEGDACAADIDGDGILNERDNCQYVYNVDQRDTDMDGVGDQCDNCPLEHNPDQLDSDSDRIGDTCDNNQDIDEDGHQNNLDNCPYVPNANQADHDKDGKGDACDHDDDNDGIPDDKDNCRLVPNPDQKDSDGDGRGDACKDDFDHDSVPDIDDICPENVDISETDFRRFQMIPLDPKGTSQNDPNWVVRHQGKELVQTVNCDPGLAVGYDEFNAVDFSGTFFINTERDDDYAGFVFGYQSSSRFYVVMWKQVTQSYWDTNPTRAQGYSGLSVKVVNSTTGPGEHLRNALWHTGNTPGQVRTLWHDPRHIGWKDFTAYRWRLSHRPKTGFIRVVMYEGKKIMADSGPIYDKTYAGGRLGLFVFSQEMVFFSDLKYECRDP

SEQ ID NO: 1797 - protein, 426 aa, Homo sapiens
MIIPSLEELDSLKYSDLQNLAKSLGLRANLRATKLLKALKGYIKHEARKGNENQDESQTSASSCDETEIQISNQEEAERQPLGHVTKTRRRCKTVRVDPDSQNHEKQESQDLRATAKVPSPPDEHQEAENAVSSGNRDSKVPSEGKKSLYTDESSKPGKNKRTAITTPNFKKLHEAHFKEMESIDQYIERKKKHFEEHNSMNELKQQPINKGGVRTPVPPRGRLSVASTPISQRRSQGRSCGPASQSTLGLKGSLKRSAISAAKTGVRFSAATKDNEHKRSLTKTPARKSAHVTVSGGTPKGEAVLGTHKLKTITGNSAAVITPFKLTTEATQTPVSNKKPVFDLKASLSRPLNYEPHKGKLKPWGQSKENNYLNQHVNRINFYKKTYKQPHLQTKEEQRKKREQERKEKKAKVLGMRRGLILAED

SEQ ID NO: 1798 - protein, 327 aa, Homo sapiens
MALVHKLLRGTYFLRKFSKPTSALYPFLGIRFAEYSSSLQKPVASPGKASSQRKTEGDLQGDHQKEVALDITSSEEKPDVSFDKAIRDEAIYHFRLLKDEIVDHWRGPEGHPLHEVLLEQAKVVWQFRGKEDLDKWTVTSDKTIGGRSEVFLKMGKNNQSALLYGTLSSEAPQDGESTRSGYCAMISRIPRGAFERKMSYDWSQFNTLYLRVRGDGRPWMVNIKEDTDFFQRTNQMYSYFMFTRGGPYWQEVKIPFSKFFFSNRGRIRDVQHELPLDKISSIGFTLADKVDGPFFLEIDFIGVFTDPAHTEEFAYENSPELNPRLFK

SEQ ID NO: 1799 - protein, 960 aa, Homo sapiens
MKSARAKTPRKPTVKKGSQTNLKDPVGVYCRVRPLGFPDQECCIEVINNTTVQLHTPEGYRLNRNGDYKETQYSFKQVFGTHTTQKELFDVVANPLVNDLIHGKNGLLFTYGVTGSGKTHTMTGSPGEGGLLPRCLDMIFNSIGSFQAKRYVFKSNDRNSMDIQCEVDALLERQKREAMPNPKTSSSKRQVDPEFADMITVQEFCKAEEVDEDSVYGVFVSYIEIYNNYIYDLLEEVPFDPIKPKPPQSKLLREDKNHNMYVAGCTEVEVKSTEEAFEVFWRGQKKRRIANTHLNRESSRSHSVFNIKLVQAPLDADGDNVLQEKEQITISQLSLVDLAGSERTNRTRAEGNRLREAGNINQSLMTLRTCMDVLRENQMYGTNKMVPYRDSKLTHLFKNYFDGEGKVRMIVCVNPKAEDYEENLQVMRFAEVTQEVEVARPVDKAICGLTPGRRYRNQPRGPVGNEPLVTDVVLQSFPPLPSCEILDINDEQTLPRLIEALEKRHNLRQMMIDEFNKQSNAFKALLQEFDNAVLSKENHMQGKLNEKEKMISGQKLEIERLEKKNKTLEYKIEILEKTTTIYEEDKRNLQQELETQNQKLQRQFSDKRRLEARLQGMVTETTMKWEKECERRVAAKQLEMQNKLWVKDEKLKQLKAIVTEPKTEKPERPSRERDREKVTQRSVSPSPVPLSSNYIAQISNGQQLMSQPQLHRRSNSCSSISVASCISEWEQKIPTYNTPLKVTSIARRRQQEPGQSKTCIVSDRRRGMYWTEGREVVPTFRNEIEIEEDHCGRLLFQPDQNAPPIRLRHRRSRSAGDRWVDHKPASNMQTETVMQPHVPHAITVSVANEKALAKCEKYMLTHQELASDGEIETKLIKGDIYKTRGGGQSVQFTDIETLKQESPNGSRKRRSSTVAPAQPDGAESEWTDVETRCSVAVEMRAGSQLGPGYQHHAQPKRKKP

SEQ ID NO: 1800 - protein, 235 aa, Homo sapiens
MAAANPWDPASAPNGAGLVLGHFIASGMVNQEMLNMSKKTVSCFVNFTRLQQITNIQAEIYQKNLEIELLKLEKDTADVVHPFFLAQKCHTLQSMNNHLEAVLKEKRSLRQRLLKPMCQENLPIEAVYHRYMVHLLELAVTFIERLETHLETIRNIPHLAANLKKMNQALAKMDILVTETEELAENILKWRKQQNEVSSCIPKILAEESYLYKHDIIMPPLPFTSKVHVQTINAK

SEQ ID NO: 1801 - protein, 686 aa, Homo sapiens
MIPGKYRSVSGRAANNVNCGLHLVIQTSSLPEKNKVEFKLNKDTSSFPGRLLQHDLERNYSSRQGDHINLVSSSLSSFPILQRSSEEKILYSDRLSLERQKLTVCPIINGEDHLRLLNFQHNFITRIQNISNLQKLISLDLYDNQIEEISGLSTLRCLRVLLLGKNRIKKISNLENLKSLDVLDLHGNQITKIENINHLCELRVLNLARNFLSHVDNLNGLDSLTELNLRHNQITFVRDVDNLPCLQHLFLSFNNISSFDSVSCLADSSSLSDITFDGNPIAQESWYKHTVLQNMMQLRQLDMKRITEEERRMASVLAKKEEEKKRESHKQSLLKEKKRLTINNVARQWDLQQQRVANIATNEDRKDSDSPQDPCQIDGSTLSAFPEETGPLDSGLNNALQGLSVIDTYLVEVDGDTLSLYGSGALESLDRNWSVQTAGMITTVSFTFIEFDEIVQVLPKLKIKFPNSLHLKFKETNLVMLQQFNALAQLRRIDQLTIDPQGNPVVNFTLWKYYVLFRLSHFSMQKINGTEVTQNDMIMAERLFGILAHVASSELPQYRLISILGDARKKQFRYLLESKGKKPGIINEENNDSKRLVGENTNRATLNYTTRDFYNEKLEEIKEKKKFCKTYIEDLVKEATEINMKNEALQKLWPQMFIELVRDAVIEIRNKNSYMKLCLQQITDQK

SEQ ID NO: 1802 - protein, 470 aa, Homo sapiens
MSRLGALGGARAGLGLLLGTAAGLGFLCLLYSQRWKRTQRHGRSQSLPNSLDYTQTSDPGRHVMLLRAVPGGAGDASVLPSLPREGQEKVLDRLDFVLTSLVALRREVEELRSSLRGLAGEIVGEVRCHMEENQRVARRRRFPFVRERSDSTGSSSVYFTASSGATFTDAESEGGYTTANAESDNERDSDKESEDGEDEVSCETVKMGRKDSLDLEEEAASGASSALEAGGSSGLEDVLPLLQQADELHRGDEQGKREGFQLLLNNKLVYGSRQDFLWRLARAYSDMCELTEEVSEKKSYALDGKEEAEAALEKGDESADCHLWYAVLCGQLAEHESIQRRIQSGFSFKEHVDKAIALQPENPMAHFLLGRWCYQVSHLSWLEKKTATALLESPLSATVEDALQSFLKAEELQPGFSKAGRVYISKCYRELGKNSEARWWMKLALELPDVTKEDLAIQKDLEELEVILRD

SEQ ID NO: 1803 - protein, 748 aa, Homo sapiens
MVLLRVLILLLSWAAGMGGQYGNPLNKYIRHYEGLSYNVDSLHQKHQRAKRAVSHEDQFLRLDFHAHGRHFNLRMKRDTSLFSDEFKVETSNKVLDYDTSHIYTGHIYGEEGSFSHGSVIDGRFEGFIQTRGGTFYVEPAERYIKDRTLPFHSVIYHEDDINYPHKYGPQGGCADHSVFERMRKYQMTGVEEVTQIPQEEHAANGPELLRKKRTTSAEKNTCQLYIQTDHLFFKYYGTREAVIAQISSHVKAIDTIYQTTDFSGIRNISFMVKRIRINTTADEKDPTNPFRFPNIGVEKFLELNSEQNHDDYCLAYVFTDRDFDDGVLGLAWVGAPSGSSGGICEKSKLYSDGKKKSLNTGIITVQNYGSHVPPKVSHITFAHEVGHNFGSPHDSGTECTPGESKNLGQKENGNYIMYARATSGDKLNNNKFSLCSIRNISQVLEKKRNNCFVESGQPICGNGMVEQGEECDCGYSDQCKDECCFDANQPEGRKCKLKPGKQCSPSQGPCCTAQCAFKSKSEKCRDDSDCAREGICNGFTALCPASDPKPNFTDCNRHTQVCINGQCAGSICEKYGLEECTCASSDGKDDKELCHVCCMKKMDPSTCASTGSVQWSRHFSGRTITLQPGSPCNDFRGYCDVFMRCRLVDADGPLARLKKAIFSPELYENIAEWIVAHWWAVLLMGIALIMLMAGFIKICSVHTPSSNPKLPPPKPLPGTLKRRRPPQPIQQPQRQRPRESYQMGHMRR

SEQ ID NO: 1804 - protein, 163 aa, Homo sapiens
MRIEKCYFCSGPIYPGHGMMFVRNDCKVFRFCKSKCHKNFKKKRNPRKVRWTKAFRKAAGKELTVDNSFEFEKRRNEPIKYQRELWNKTIDAMKRVEEIKQKRQAKFIMNRLKKNKELQKVQDIKEVKQNIHLIRAPLAGKGKQLEEKMVQQLQEDVDMEDAP

SEQ ID NO: 1805 - protein, 495 aa, Homo sapiens
MGSKRRNLSCSERHQKLVDENYCKKLHVQALKNVNSQIRNQMVQNENDNRVQRKQFLRLLQNEQFELDMEEAIQKAEENKRLKELQLKQEEKLAMELAKLKHESLKDEKMRQQVRENSIELRELEKKLKAAYMNKERAAQIAEKDAIKYEQMKRDAEIAKTMMEEHKRIIKEENAAEDKRNKAKAQYYLDLEKQLEEQEKKKQEAYEQLLKEKLMIDEIVRKIYEEDQLEKQQKLEKMNAMRRYIEEFQKEQALWRKKKREEMEEENRKIIEFANMQQQREEDRMAKVQENEEKRLQLQNALTQKLEEMLRQREDLEQVRQELYQEEQAEIYKSKLKEEAEKKLRKQKEMKQDFEEQMALKELVLQAAKEEEENFRKTMLAKFAEDDRIELMNAQKQRMKQLEHRRAVEKLIEERRQQFLADKQRELEEWQLQQRRQGFINAIIEEERLKLLKEHATNLLGYLPKGVFKKEDDIDLLGEEFRKVYQQRSEICEEK

SEQ ID NO: 1806 - protein, 825 aa, Homo sapiens
MAAGKFASLPRNMPVNHQFPLASSMDLLSSRSPLAEHRPDAYQDVSIHGTLPRKKKGPPPIRSCDDFSHMGTLPHSKSPRQNSPVTQDGIQESPWQDRHGETFTFRDPHLLDPTVEYVKFSKERHIMDRTPEKLKKELEEELLLSSEDLRSHAWYHGRIPRQVSENLVQRDGDFLVRDSLSSPGNFVLTCQWKNLAQHFKINRTVLRLSEAYSRVQYQFEMESFDSIPGLVRCYVGNRRPISQQSGAIIFQPINRTVPLRCLEEHYGTSPGQAREGSLTKGRPDVAKRLSLTMGGVQAREQNLPRGNLLRNKEKSGSQPACLDHMQDRRALSLKAHQSESYLPIGCKLPPQSSGVDTSPCPNSPVFRTGSEPALSPAVVRRVSSDARAGEALRGSDSQLCPKPPPKPCKVPFLKVPSSPSAWLNSEANYCELNPAFATGCGRGAKLPSCAQGSHTELLTAKQNEAPGPRNSGVNYLILDDDDRERPWEPAAAQMEKGQWDKGEFVTPLLETVSSFRPNEFESKFLPPENKPLETAMLKRAKELFTNNDPKVIAQHVLSMDCRVARILGVSEEMRRNMGVSSGLELITLPHGHQLRLDIIERHNTMAIGIAVDILGCTGTLEDRAATLSKIIQVAVELKDSMGDLYSFSALMKALEMPQITRLEKTWTALRHQYTQTAILYEKQLKPFSKLLHEGRESTCVPPNNVSVPLLMPLVTLMERQAVTFEGTDMWEKNDQSCEIMLNHLATARFMAEAADSYRMNAERILAGFQPDEEMNEICKTEFQMRLLWGSKGAQVNQTERYEKFNQILTALSRKLEPPPVKQAEL

SEQ ID NO: 1807 - protein, 551 aa, Homo sapiens
MSWGTELWDQFDSLDKHTQWGIDFLERYAKFVKERIEIEQNYAKQLRNLVKKYCPKRSSKDEEPRFTSCVAFFNILNELNDYAGQREVVAEEMAHRVYGELMRYAHDLKTERKMHLQEGRKAQQYLDMCWKQMDNSKKKFERECREAEKAQQSYERLDNDTNATKADVEKAKQQLNLRTHMADENKNEYAAQLQNFNGEQHKHFYVVIPQIYKQLQEMDERRTIKLSECYRGFADSERKVIPIISKCLEGMILAAKSVDERRDSQMVVDSFKSGFEPPGDFPFEDYSQHIYRTISDGTISASKQESGKMDAKTTVGKAKGKLWLFGKKPKGPALEDFSHLPPEQRRKKLQQRIDELNRELQKESDQKDALNKMKDVYEKNPQMGDPGSLQPKLAETMNNIDRLRMEIHKNEAWLSEVEGKTGGRGDRRHSSDINHLVTQGRESPEGSYTDDANQEVRGPPQQHGHHNEFDDEFEDDDPLPAIGHCKAIYPFDGHNEGTLAMKEGEVLYIIEEDKGDGWTRARRQNGEEGYVPTSYIDVTLEKNSKGAVTYI

SEQ ID NO: 1808 - protein, 454 aa, Homo sapiens
MFLAQRSLCSLSGRAKFLKTISSSKILGFSTSAKMSLKFTNAKRIEGLDSNVWIEFTKLAADPSVVNLGQGFPDISPPTYVKEELSKIAAIDSLNQYTRGFGHPSLVKALSYLYEKLYQKQIDSNKEILVTVGAYGSLFNTIQALIDEGDEVILIVPFYDCYEPMVRMAGATPVFIPLRSKPVYGKRWSSSDWTLDPQELESKFNSKTKAIILNTPHNPLGKVYNREELQVIADLCIKYDTLCISDEVYEWLVYSGNKHLKIATFPGMWERTITIGSAGKTFSVTGWKLGWSIGPNHLIKHLQTVQQNTIYTCATPLQEALAQAFWIDIKRMDDPECYFNSLPKELEVKRDRMVRLLESVGLKPIVPDGGYFIIADVSLLDPDLSDMKNNEPYDYKFVKWMTKHKKLSAIPVSAFCNSETKSQFEKFVRFCFIKKDSTLDAAEEIIKAWSVQKS

SEQ ID NO: 1809 - protein, 1261 aa, Homo sapiens
MIAHKQKKTKKKRAWASGQLSTDITTSEMGLKSLSSNSIFDPDYIKELVNDIRKFSHMLLYLKEAIFSDCFKEVIHIRLEELLRVLKSIMNKHQNLNSVDLQNAAEMLTAKVKAVNFTEVNEENKNDLFQEVFSSIETLAFTFGNILTNFLMGDVGNDSLLRLPVSRETKSFENVSVESVDSSSEKGNFSPLELDNVLLKNTDSIELALSYAKTWSKYTKNIVSWVEKKLNLELESTRNMVKLAEATRTNIGIQEFMPLQSLFTNALLNDIESSHLLQQTIAALQANKFVQPLLGRKNEMEKQRKEIKELWKQEQNKMLEAENALKKAKLLCMQRQDEYEKAKSSMFRAEEEHLSSSGGLAKNLNKQLEKKRRLEEEALQKVEEANELYKVCVTNVEERRNDLENTKREILAQLRTLVFQCDLTLKAVTVNLFHMQHLQAASLADSLQSLCDSAKLYDPGQEYSEFVKATNSTEEEKVDGNVNKHLNSSQPSGFGPANSLEDVVRLPDSSNKIEEDRCSNSADITGPSFIRSWTFGMFSDSESTGGSSESRSLDSESISPGDFHRKLPRTPSSGTMSSADDLDEREPPSPSETGPNSLGTFKKTLMSKAALTHKFRKLRSPTKCRDCEGIVVFQGVECEECLLVCHRKCLENLVIICGHQKLPGKIHLFGAEFTQVAKKEPDGIPFILKICASEIENRALCLQGIYRVCGNKIKTEKLCQALENGMHLVDISEFSSHDICDVLKLYLRQLPEPFILFRLYKEFIDLAKEIQHVNEEQETKKNSLEDKKWPNMCIEINRILLKSKDLLRQLPASNFNSLHFLIVHLKRVVDHAEENKMNSKNLGVIFGPSLIRPRPTTAPITISSLAEYSNQARLVEFLITYSQKIFDGSLQPQDVMCSIGVVDQGCFPKPLLSPEERDIERSMKSLFFSSKEDIHTSESESKIFERATSFEESERKQNALGKCDACLSDKAQLLLDQEAESASQKIEDGKTPKPLSLKSDRSTNNVERHTPRTKIRPVSLPVDRLLLASPPNERNGRNMGNVNLDKFCKNPAFEGVNRKDAATTVCSKFNGFDQQTLQKIQDKQYEQNSLTAKTTMIMPSALQEKGVTTSLQISGDHSINATQPSKPYAEPVRSVREASERRSSDSYPLAPVRAPRTLQPQHWTTFYKPHAPIISIRGNEEKPASPSAAVPPGTDHDPHGLVVKSMPDPDKASACPGQATGQPKEDSEELGLPDVNPMCQRPRLKRMQQFEDLEGEIPQFV

SEQ ID NO: 1810 - protein, 1749 aa, Homo sapiens
MHLKHLRTLLSPQDGAAKVTCMAWSQNNAKFAVCTVDRVVLLYDEHGERRDKFSTKPADMKYGRKSYMVKGMAFSPDSTKIAIGQTDNIIYVYKIGEDWGDKKVICNKFIQTSAVTCLQWPAEYIIVFGLAEGKVRLANTKTNKSSTIYGTESYVVSLTTNCSGKGILSGHADGTIVRYFFDDEGSGESQGKLVNHPCPPYALAWATNSIVAAGCDRKIVAYGKEGHMLQTFDYSRDPQEREFTTAVSSPGGQSVVLGSYDRLRVFNWIPRRSIWEEAKPKEITNLYTITALAWKRDGSRLCVGTLCGGVEQFDCCLRRSIYKNKFELTYVGPSQVIVKNLSSGTRVVLKSHYGYEVEEVKILGKERYLVAHTSETLLLGDLNTNRLSEIAWQGSGGNEKYFFENENVCMIFNAGELTLVEYGNNDTLGSVRTEFMNPHLISVRINERCQRGTEDNKKLAYLIDIKTIAIVDLIGGYNIGTVSHESRVDWLELNETGHKLLFRDRKLRLHLYDIESCSKTMILNFCSYMQWVPGSDVLVAQNRNSLCVWYNIEAPERVTMFTIRGDVIGLERGGGKTEVMVMEGVTTVAYTLDEGLIEFGTAIDDGNYIRATAFLETLEMTPETEAMWKTLSKLALEARQLHIAERCFSALGQVAKARFLHETNEIADQVSREYGGEGTDFYQVRARLAMLEKNYKLAEMIFLEQNAVEEAMGMYQELHRWDECIAVAEAKGHPALEKLRRSYYQWLMDTQQEERAGELQESQGDGLAAISLYLKAGLPAKAARLVLTREELLANTELVEHITAALIKGELYERAGDLFEKIHNPQKALECYRKGNAFMKAVELARLAFPVEVVKLEEAWGDHLVQQKQLDAAINHYIEARCSIKAIEAALGARQWKKAIYILDLQDRNTASKYYPLVAQHYASLQEYEIAEELYTKGDRTKDAIDMYTQAGRWEQAHKLAMKCMRPEDVSVLYITQAQEMEKQGKYREAERLYVTVQEPDLAITMYKKHKLYDDMIRLVGKHHPDLLSDTHLHLGKELEAEGRLQEAEYHYLEAQEWKATVNMYRASGLWEEAYRVARTQGGANAHKHVAYLWAKSLGGEAAVRLLNKLGLLEAAVDHAADNCSFEFAFELSRLALKHKTPEVHLKYAMFLEDEGKFEEAEAEFIRAGKPKEAVLMFVHNQDWEAAQRVAEAHDPDSVAEVLVGQARGALEEKDFQKAEGLLLRAQRPGLALNYYKEAGLWSDALRICKDYVPSQLEALQEEYEREATKKGARGVEGFVEQARHWEQAGEYSRAVDCYLKVRDSGNSGLAEKCWMKAAELSIKFLPPQRNMEVVLAVGPQLIGIGKHSAAAELYLNLDLVKEAIDAFIEGEEWNKAKRVAKELDPRYEDYVDQHYKEFLKNQGKVDSLVGVDVIAALDLYVEQGQWDKCIETATKQNYKILHKYVALYATHLIREGSSAQALALYVQHGAPANPQNFNIYKRIFTDMVSSPGTNCAEAYHSWADLRDVLFNLCENLVKSSEANSPAHEEFKTMLLIAHYYATRSAAQSVKQLETVAARLSVSLLRHTQLLPVDKAFYEAGIAAKAVGWDNMAFIFLNRFLDLTDAIEEGTLDGLDHSDFQDTDIPFEVPLPAKQHVPEAEREEVRDWVLTVSMDQRLEQVLPRDERGAYEASLVAASTGVRALPCLITGYPILRNKIEFKRPGKAANKDNWNKFLMAIKTSHSPVCQDVLKFISQWCGGLPSTSFSFQ

SEQ ID NO: 1811 - protein, 301 aa, Homo sapiens
MLPLTMTVLILLLLPTGQAAPKDGVTRPDSEVQHQLLPNPFQPGQEQLGLLQSYLKGLGRTEVQLEHLSREQVLLYLFALHDYDQSGQLDGLELLSMLTAALAPGAANSPTTNPVILIVDKVLETQDLNGDGLMTPAELINFPGVALRHVEPGEPLAPSPQEPQAVGRQSLLAKSPLRQETQEAPGPREEAKGQVEARRESLDPVQEPGGQAEADGDVPGPRGEAEGQAEAKGDAPGPRGEAGGQAEAEGDAPGPRGEAGGQAEARENGEEAKELPGETLESKNTQNDFEVHIVQVENDEI

SEQ ID NO: 1812 - protein, 298 aa, Homo sapiens
MEEKQILCVGLVVLDVISLVDKYPKEDSEIRCLSQRWQRGGNASNSCTVLSLLGAPCAFMGSMAPGHVADFLVADFRRRGVDVSQVAWQSKGDTPSSCCIINNSNGNRTIVLHDTSLPDVSATDFEKVDLTQFKWIHIEGRNASEQVKMLQRIDAHNTRQPPEQKIRVSVEVEKPREELFQLFGYGDVVFVSKDVAKHLGFQSAEEALRGLYGRVRKGAVLVCAWAEEGADALGPDGKLLHSDAFPPPRVVDTLGAGDTFNASVIFSLSQGRSVQEALRFGCQVAGKKCGLQGFDGIV

SEQ ID NO: 1813 - protein, 1144 aa, Homo sapiens
MPRNQGFSEPEYSAEYSAEYSVSLPSDPDRGVGRTHEISVRNSGSCLCLPRFMRLTFVPESLENLYQTYFKRQRHETLLVLVVFAALFDCYVVVMCAVVFSSDKLASLAVAGIGLVLDIILFVLCKKGLLPDRVTRRVLPYVLWLLITAQIFSYLGLNFARAHAASDTVGWQVFFVFSFFITLPLSLSPIVIISVVSCVVHTLVLGVTVAQQQQEELKGMQLLREILANVFLYLCAIAVGIMSYYMADRKHRKAFLEARQSLEVKMNLEEQSQQQENLMLSILPKHVADEMLKDMKKDESQKDQQQFNTMYMYRHENVSILFADIVGFTQLSSACSAQELVKLLNELFARFDKLAAKYHQLRIKILGDCYYCICGLPDYREDHAVCSILMGLAMVEAISYVREKTKTGVDMRVGVHTGTVLGGVLGQKRWQYDVWSTDVTVANKMEAGGIPGRVHISQSTMDCLKGEFDVEPGDGGSRCDYLEEKGIETYLIIASKPEVKKTATQNGLNGSALPNGAPASSKSSSPALIETKEPNGSAHSSGSTSEKPEEQDAQADNPSFPNPRRRLRLQDLADRVVDASEDEHELNQLLNEALLERESAQVVKKRNTFLLSMRFMDPEMETRYSVEKEKQSGAAFSCSCVVLLCTALVEILIDPWLMTNYVTFMVGEILLLILTICSLAAIFPRAFPKKLVAFSTWIDRTRWARNTWAMLAIFILVMANVVDMLSCLQYYTGPSNATAGMETEGSCLENPKYYNYVAVLSLIATIMLVQVSHMVKLTLMLLVAGAVATINLYAWRPVFDEYDHKRFREHDLPMVALEQMQGFNPGLNGTDRLPLVPSKYSMTVMVFLMMLSFYYFSRHVEKLARTLFLWKIEVHDQKERVYEMRRWNEALVTNMLPEHVARHFLGSKKRDEELYSQTYDEIGVMFASLPNFADFYTEESINNGGIECLRFLNEIISDFDSLLDNPKFRVITKIKTIGSTYMAASGVTPDVNTNGFASSNKEDKSERERWQHLADLADFALAMKDTLTNINNQSFNNFMLRIGMNKGGVLAGVIGARKPHYDIWGNTVNVASRMESTGVMGNIQVVEETQVILREYGFRFVRRGPIFVKGKGELLTFFLKGRDKLATFPNGPSVTLPHQVVDNS

SEQ ID NO: 1814 - protein, 351 aa, Homo sapiens
MPSETLWEIAKAEVEKRGINGSEGDGAEIAEKFVFFIGSKNGGKTTIILRCLDRDEPPKPTLALEYTYGRRAKGHNTPKDIAHFWELGGGTSLLDLISIPITGDTLRTFSLVLVLDLSKPNDLWPTMENLLQATKSHVDKVIMKLGKTNAKAVSEMRQKIWNNMPKDHPDHELIDPFPVPLVIIGSKYDVFQDFESEKRKVICKTLRFVAHYYGASLMFTSKSEALLLKIRGVINQLAFGIDKSKSICVDQNKPLFITAGLDSFGQIGSPPVPENDIGKLHAHSPMELWKKVYEKLFPPKSINTLKDIKDPARDPQYAENEVDEMRIQKDLELEQYKRSSSKSWKQIELDS

SEQ ID NO: 1815 - protein, 394 aa, Homo sapiens
MDSQGRKVVVCDNGTGFVKCGYAGSNFPEHIFPALVGRPIIRSTTKVGNIEIKDLMVGDEASELRSMLEVNYPMENGIVRNWDDMKHLWDYTFGPEKLNIDTRNCKILLTEPPMNPTKNREKIVEVMFETYQFSGVYVAIQAVLTLYAQGLLTGVVVDSGDGVTHICPVYEGFSLPHLTRRLDIAGRDITRYLIKLLLLRGYAFNHSADFETVRMIKEKLCYVGYNIEQEQKLALETTVLVESYTLPDGRIIKVGGERFEAPEALFQPHLINVEGVGVAELLFNTIQAADIDTRSEFYKHIVLSGGSTMYPGLPSRLERELKQLYLERVLKGDVEKLSKFKIRIEDPPRRKHMVFLGGAVLADIMKDKDNFWMTRQEYQEKGVRVLEKLGVTVR

SEQ ID NO: 1816 - protein, 417 aa, Homo sapiens
MGRRRAPELYRAPFPLYALQVDPSTGLLIAAGGGGAAKTGIKNGVHFLQLELINGRLSASLLHSHDTETRATMNLALAGDILAAGQDAHCQLLRFQAHQQQGNKAEKAGSKEQGPRQRKGAAPAEKKCGAETQHEGLELRVENLQAVQTDFSSDPLQKVVCFNHDNTLLATGGTDGYVRVWKVPSLEKVLEFKAHEGEIEDLALGPDGKLVTVGRDLKASVWQKDQLVTQLHWQENGPTFSSTPYRYQACRFGQVPDQPAGLRLFTVQIPHKRLRQPPPCYLTAWDGSNFLPLRTKSCGHEVVSCLDVSESGTFLGLGTVTGSVAIYIAFSLQCLYYVREAHGIVVTDVAFLPEKGRGPELLGSHETALFSVAVDSRCQLHLLPSRRSVPVWLLLLLCVGLIIVTILLLQSAFPGFL

SEQ ID NO: 1817 - protein, 1394 aa, Homo sapiens
MAALLRSARWLLRAGAAPRLPLSLRLLPGGPGRLHAASYLPAARAGPVAGGLLSPARLYAIAAKEKDIQEESTFSSRKISNQFDWALMRLDLSVRRTGRIPKKLLQKVFNDTCRSGGLGGSHALLLLRSCGSLLPELKLEERTEFAHRIWDTLQKLGAVYDVSHYNALLKVYLQNEYKFSPTDFLAKMEEANIQPNRVTYQRLIASYCNVGDIEGASKILGFMKTKDLPVTEAVFSALVTGHARAGDMENAENILTVMRDAGIEPGPDTYLALLNAYAEKGDIDHVKQTLEKVEKSELHLMDRDLLQIIFSFSKAGYPQYVSEILEKVTCERRYIPDAMNLILLLVTEKLEDVALQILLACPVSKEDGPSVFGSFFLQHCVTMNTPVEKLTDYCKKLKEVQMHSFPLQFTLHCALLANKTDLAKALMKAVKEEGFPIRPHYFWPLLVGRRKEKNVQGIIEILKGMQELGVHPDQETYTDYVIPCFDSVNSARAILQENGCLSDSDMFSQAGLRSEAANGNLDFVLSFLKSNTLPISLQSIRSSLLLGFRRSMNINLWSEITELLYKDGRYCQEPRGPTEAVGYFLYNLIDSMSDSEVQAKEEHLRQYFHQLEKMNVKIPENIYRGIRNLLESYHVPELIKDAHLLVESKNLDFQKTVQLTSSELESTLETLKAENQPIRDVLKQLILVLCSEENMQKALELKAKYESDMVTGGYAALINLCCRHDKVEDALNLKEEFDRLDSSAVLDTGKYVGLVRVLAKHGKLQDAINILKEMKEKDVLIKDTTALSFFHMLNGAALRGEIETVKQLHEAIVTLGLAEPSTNISFPLVTVHLEKGDLSTALEVAIDCYEKYKVLPRIHDVLCKLVEKGETDLIQKAMDFVSQEQGEMVMLYDLFFAFLQTGNYKEAKKIIETPGIRARSARLQWFCDRCVANNQVETLEKLVELTQKLFECDRDQMYYNLLKLYKINGDWQRADAVWNKIQEENVIPREKTLRLLAEILREGNQEVPFDVPELWYEDEKHSLNSSSASTTEPDFQKDILIACRLNQKKGAYDIFLNAKEQNIVFNAETYSNLIKLLMSEDYFTQAMEVKAFAETHIKGFTLNDAANSRLIITQVRRDYLKEAVTTLKTVLDQQQTPSRLAVTRVIQALAMKGDVENIEVVQKMLNGLEDSIGLSKMVFINNIALAQIKNNNIDAAIENIENMLTSENKVIEPQYFGLAYLFRKVIEEQLEPAVEKISIMAERLANQFAIYKPVTDFFLQLVDAGKVDDARALLQRCGAIAEQTPILLLFLLRNSRKQGKASTVKSVLELIPELNEKEEAYNSLMKSYVSEKDVTSAKALYEHLTAKNTKLDDLFLKRYASLLKYAGEPVPFIEPPESFEFYAQQLRKLRENSS

SEQ ID NO: 1818 - protein, 490 aa, Homo sapiens [sequence omitted]

SEQ ID NO: 1819 - protein, 756 aa, Homo sapiens
MAWSPPATLFLFLLLLGQPPPSRPQSLGTTKLRLVGPESKPEEGRLEVLHQGQWGTVCDDNFAIQEATVACRQLGFEAALTWAHSAKYGQGEGPIWLDNVRCVGTESSLDQCGSNGWGVSDCSHSEDVGVICHPRRHRGYLSETVSNALGPQGRRLEEVRLKPILASAKQHSPVTEGAVEVKYEGHWRQVCDQGWTMNNSRVVCGMLGFPSEVPVDSHYYRKVWDLKMRDPKSRLKSLTNKNSFWIHQVTCLGTEPHMANCQVQVAPARGKLRPACPGGMHAVVSCVAGPHFRPPKTKPQRKGSWAEEPRVRLRSGAQVGEGRVEVLMNRQWGTVCDHRWNLISASVVCRQLGFGSAREALFGARLGQGLGPIHLSEVRCRGYERTLSDCPALEGSQNGCQHENDAAVRCNVPNMGFQNQVRLAGGRIPEEGLLEVQVEVNGVPRWGSVCSENWGLTEAMVACRQLGLGFAIHAYKETWFWSGTPRAQEVVMSGVRCSGTELALQQCQRHGPVHCSHGGGRFLAGVSCMDSAPDLVMNAQLVQETAYLEDRPLSQLYCAHEENCLSKSADHMDWPYGYRRLLRFSTQIYNLGRTDFRPKTGRDSWVWHQCHRHYHSIEVFTHYDLLTLNGSKVAEGHKASFCLEDTNCPTGLQRRYACANFGEQGVTVGCWDTYRHDIDCQWVDITDVGPGNYIFQVIVNPHYEVAESDFSNNMLQCRCKYDGHRVWLHNCHTGNSYPANAELSLEQEQRLRNNLI

SEQ ID NO: 1820 - protein, 1056 aa, Homo sapiens
MASQPNSSAKKKEEKGKNIQVVVRCRPFNLAERKASAHSIVECDPVRKEVSVRTGGLADKSSRKTYTFDMVFGASTKQIDVYRSVVCPILDEVIMGYNCTIFAYGQTGTGKTFTMEGERSPNEEYTWEEDPLAGIIPRTLHQIFEKLTDNGTEFSVKVSLLEIYNEELFDLLNPSSDVSERLQMFDDPRNKRGVIIKGLEEITVHNKDEVYQILEKGAAKRTTAATLMNAYSSRSHSVFSVTIHMKETTIDGEELVKIGKLNLVDLAGSENIGRSGAVDKRAREAGNINQSLLTLGRVITALVERTPHVPYRESKLTRILQDSLGGRTRTSIIATISPASLNLEETLSTLEYAHRAKNILNKPEVNQKLTKKALIKEYTEEIERLKRDLAAAREKNGVYISEENFRVMSGKLTVQEEQIVELIEKIGAVEEELNRVTELFMDNKNELDQCKSDLQNKTQELETTQKHLQETKLQLVKEEYITSALESTEEKLHDAASKLLNTVEETTKDVSGLHSKLDRKKAVDQHNAEAQDIFGKNLNSLFNNMEELIKDGSSKQKAMLEVHKTLFGNLLSSSVSALDTITTVALGSLTSIPENVSTHVSQIFNMILKEQSLAAESKTVLQELINVLKTDLLSSLEMILSPTVVSILKINSQLKHIFKTSLTVADKIEDQKKELDGFLSILCNNLHELQENTICSLVESQKQCGNLTEDLKTIKQTHSQELCKLMNLWTERFCALEEKCENIQKPLSSVQENIQQKSKDIVNKMTFHSQKFCADSDGFSQELRNFNQEGTKLVEESVKHSDKLNGNLEKISQETEQRCESLNTRTVYFSEQWVSSLNEREQELHNLLEVVSQCCEASSSDITEKSDGRKAAHEKQHNIFLDQMTIDEDKLIAQNLELNETIKIGLTKLNCFLEQDLKLDIPTGTTPQRKSYLYPSTLVRTEPREHLLDQLKRKQPELLMMLNCSENNKEETIPDVDVEEAVLGQYTEEPLSQEPSVDAGVDCSSIGGVPFFQHKKSHGKDKENRGINTLERSKVEETTEHLVTKSRLPLRAQINL

SEQ ID NO: 1821 - protein, 323 aa, Homo sapiens
MAALIAENFRFLSLFFKSKDVMIFNGLVALGTVGSQELFSVVAFHCPCSPARNYLYGLAAIGVPALVLFIIGIILNNHTWNLVAECQHRRTKNCSAAPTFLLLSSILGRAAVAPVTWSVISLLRGEAYVCALSEFVDPSSLTAREEHFPSAHATEILARFPCKENPDNLSDFREEVSRRLRYESQLFGWLLIGVVAILVFLTKCLKHYCSPLSYRQEAYWAQYRANEDQLFQRTAEVHSRVLAANNVRRFFGFVALNKDDEELIANFPVEGTQPRPQWNAITGVYLYRENQGLPLYSRLHKWAQGLAGNGAAPDNVEMALLPS

SEQ ID NO: 1822 - protein, 182 aa, Homo sapiens
MGLLSILRKLKSAPDQEVRILLLGLDNAGKTTLLKQLASEDISHITPTQGFNIKSVQSQGFKLNVWDIGGQRKIRPYWKNYFENTDILIYVIDSADRKRFEETGQELAELLEEEKLSCVPVLIFANKQDLLTAAPASEIAEGLNLHTIRDRVWQIQSCSALTGEGVQDGMNWVCKNVNAKKK

SEQ ID NO: 1823 - protein, 1780 aa, Homo sapiens
MESNFNQEGVPRPSYVFSADPIARPSEINFDGIKLDLSHEFSLVAPNTEANSFESKDYLQVCLRIRPFTQSEKELESEGCVHILDSQTVVLKEPQCILGRLSEKSSGQMAQKFSFSKVFGPATTQKEFFQGCIMQPVKDLLKGQSRLIFTYGLTNSGKTYTFQGTEENIGILPRTLNVLFDSLQERLYTKMNLKPHRSREYLRLSSEQEKEEIASKSALLRQIKEVTVHNDSDDTLYGSLTNSLNISEFEESIKDYEQANLNMANSIKFSVWVSFFEIYNEYIYDLFVPVSSKFQKRKMLRLSQDVKGYSFIKDLQWIQVSDSKEAYRLLKLGIKHQSVAFTKLNNASSRSHSIFTVKILQIEDSEMSRVIRVSELSLCDLAGSERTMKTQNEGERLRETGNINTSLLTLGKCINVLKNSEKSKFQQHVPFRESKLTHYFQSFFNGKGKICMIVNISQCYLAYDETLNVLKFSAIAQKVCVPDTLNSSQEKLFGPVKSSQDVSLDSNSNSKILNVKRATISWENSLEDLMEDEDLVEELENAEETQNVETKLLDEDLDKTLEENKAFISHEEKRKLLDLIEDLKKKLINEKKEKLTLEFKIREEVTQEFTQYWAQREADFKETLLQEREILEENAERRLAIFKDLVGKCDTREEAAKDICATKVETEEATACLELKFNQIKAELAKTKGELIKTKEELKKRENESDSLIQELETSNKKIITQNQRIKELINIIDQKEDTINEFQNLKSHMENTFKCNDKADTSSLIINNKLICNETVEVPKDSKSKICSERKRVNENELQQDEPPAKKGSIHVSSAITEDQKKSEEVRPNIAEIEDIRVLQENNEGLRAFLLTIENELKNEKEEKAELNKQIVHFQQELSLSEKKNLTLSKEVQQIQSNYDIAIAELHVQKSKNQEQEEKIMKLSNEIETATRSITNNVSQIKLMHTKIDELRTLDSVSQISNIDLLNLRDLSNGSEEDNLPNTQLDLLGNDYLVSKQVKEYRIQEPNRENSFHSSIEAIWEECKEIVKASSKKSHQIEELEQQIEKLQAEVKGYKDENNRLKEKEHKNQDDLLKEKETLIQQLKEELQEKNVTLDVQIQHVVEGKRALSELTQGVTCYKAKIKELETILETQKVECSHSAKLEQDILEKESIILKLERNLKEFQEHLQDSVKNTKDLNVKELKLKEEITQLTNNLQDMKHLLQLKEEEEETNRQETEKLKEELSASSARTQNLKADLQRKEEDYADLKEKLTDAKKQIKQVQKEVSVMRDEDKLLRIKINELEKKKNQCSQELDMKQRTIQQLKEQLNNQKVEEAIQQYERACKDLNVKEKIIEDMRMTLEEQEQTQVEQDQVLEAKLEEVERLATELEKWKEKCNDLETKNNQRSNKEHENNTDVLGKLTNLQDELQESEQKYNADRKKWLEEKMMLITQAKEAENIRNKEMKKYAEDRERFFKQQNEMEILTAQLTEKDSDLQKWREERDQLVAALEIQLKALISSNVQKDNEIEQLKRIISETSKIETQIMDIKPKRISSADPDKLQTEPLSTSFEISRNKIEDGSVVLDSCEVSTENDQSTRFPKPELEIQFTPLQPNKMAVKHPGCTTPVTVKIPKARKRKSNEMEEDLVKCENKKNATPRTNLKFPISDDRNSSVKKEQKVAIRPSSKKTYSLRSQASIIGVNLATKKKEGTLQKFGDFLQHSPSILQSKAKKIIETMSSSKLSNVEASKENVSQPKRAKRKLYTSEISSPIDISGQVILMDQKMKESDHQIIKRRLRTKTAK

SEQ ID NO: 1824 - protein, 571 aa, Homo sapiens
MVIEEVNFMQNHLEIEKTCRESAEALATKLNKENKTLKRISMLYMAKLGPDVITEEINIDDEDSTTDTDGAAETCVSVQCQKQIKELRDQIVSVQEEKKILAIELENLKSKLVEVIEEVNKVKQEKTVLNSEVLEQRKVLEKCNRVSMLAVEEYEEMQVNLELEKDLRKKAESFAQEMFIEQNKLKRQSHLLLQSSIPDQQLLKALDENAKLTQQLEEERIQHQQKVKELEEQLENETLHKEIHNLKQQLELLEEDKKELELKYQNSEEKARNLKHSVDELQKRVNQSENSVPPPPPPPPPLPPPPPNPIRSLMSMIRKRSHPSGSGAKKEKATQPETTEEVTDLKRQAVEEMMDRIKKGVHLRPVNQTARPKTKPESSKGCESAVDELKGILGTLNKSTSSRSLKSLDPENSETELERILRRRKVTAEADSSSPTGILATSESKSMPVLGSVSSVTKTALNKKTLEAEFNSPSPPTPEPGEGPRKLEGCTSSKVTFQPPSSIGCRKKYIDGEKQAEPVVVLDPVSTHEPQTKDQVAEKDPTQHKEDEGEIQPENKEDSIENVRETDSSNC

SEQ ID NO: 1825 - protein, 364 aa, Homo sapiens
MGAPACALALCVAVAIVAGASSESLGTEQRVVGRAAEVPGPEPGQQEQLVFGSGDAVELSCPPPGGGPMGPTVWVKDGTGLVPSERVLVGPQRLQVLNASHEDSGAYSCRQRLTQRVLCHFSVRVTDAPSSGDDEDGEDEAEDTGVDTGAPYWTRPERMDKKLLAVPAANTVRFRCPAAGNPTPSISWLKNGREFRGEHRIGGIKLRHQQWSLVMESVVPSDRGNYTCVVENKFGSIRQTYTLDVLERSPHRPILQAGLPANQTAVLGSDVEFHCKVYSDAQPHIQWLKHVEVNGSKVGPDGTPYVTVLKSWISESVEADVRLRLANVSERDGGEYLCRATNFIGVAEKAFWLSVHGPRADGGR

SEQ ID NO: 1826 - protein, 544 aa, Homo sapiens
MRVAVAGCCHGELDKIYETLALAERRGPGPVDLLLCCGDFQAVRNEADLRCMAVPPKYRHMQTFYRYYSGEKKAPVLTLFIGGNHEASNHLQELPYGGWVAPNIYYLGLAGVVKYRGVRIGGISGIFKSHDYRKGHFECPPYNSSTIRSIYHVRNIEVYKLKQLKQPIDIFLSHDWPRSIYHYGNKKQLLKTKSFFRQEVENNTLGSPAASELLEHLKPTYWFSAHLHVKFAALMQHQAKDKGQTARATKFLALDKCLPHRDFLQILEIEHDPSAPDYLEYDIEWLTILRATDDLINVTGRLWNMPENNGLHARWDYSATEEGMKEVLEKLNHDLKVPCNFSVTAACYDPSKPQTQMQLIHRINPQTTEFCAQLGIIDINVRLQKSKEEHHVCGEYEEQDDVESNDSGEDQSEYNTDTSALSSINPDEIMLDEEEDEDSIVSAHSGMNTPSVEPSDQASEFSASFSDVRILPGSMIVSSDDTVDSTIDREGKPGGTVESGNGEDLTKVPLKRLSDEHEPEQRKKIKRRNQAIYAAVDDDDDDAA

SEQ ID NO: 1827 - protein, 1522 aa, Homo sapiens
MSRNDKEPFFVKFLKSSDNSKCFFKALESIKEFQSEEYLQIITEEEALKIKENDRSLYICDPFSGVVFDHLKKLGCRIVGPQVVIFCMHHQRCVPRAEHPVYNMVMSDVTISCTSLEKEKREEVHKYVQMMGGRVYRDLNVSVTHLIAGEVGSKKYLVAANLKKPILLPSWIKTLWEKSQEKKITRYTDINMEDFKCPIFLGCIICVTGLCGLDRKEVQQLTVKHGGQYMGQLKMNECTHLIVQEPKGQKYECAKRWNVHCVTTQWFFDSIEKGFCQDESIYKTEPRPEAKTMPNSSTPTSQINTIDSRTLSDVSNISNINASCVSESICNSLNSKLEPTLENLENLDVSAFQAPEDLLDGCRIYLCGFSGRKLDKLRRLINSGGGVRFNQLNEDVTHVIVGDYDDELKQFWNKSAHRPHVVGAKWLLECFSKGYMLSEEPYIHANYQPVEIPVSHKPESKAALLKKKNSSFSKKDFAPSEKHEQADEDLLSQYENGSSTVVEAKTSEARPFNDSTHAEPLNDSTHISLQEENQSSVSHCVPDVSTITEEGLFSQKSFLVLGFSNENESNIANIIKENAGKIMSLLSRTVADYAVVPLLGCEVEATVGEVVTNTWLVTCIDYQTLFDPKSNPLFTPVPVMTGMTPLEDCVISFSQCAGAEKESLTFLANLLGASVQEYFVRKSNAKKGMFASTHLILKERGGSKYEAAKKWNLPAVTIAWLLETARTGKRADESHFLIENSTKEERSLETEITNGINLNSDTAEHPGTRLQTHRKTVVTPLDMNRFQSKAFRAVVSQHARQVAASPAVGQPLQKEPSLHLDTPSKFLSKDKLFKPSFDVKDALAALETPGRPSQQKRKPSTPLSEVIVKNLQLALANSSRNAVALSASPQLKEAQSEKEEAPKPLHKVVVCVSKKLSKKQSELNGIAASLGADYRWSFDETVTHFIYQGRPNDTNREYKSVKERGVHIVSEHWLLDCAQECKHLPESLYPHTYNPKMSLDISAVQDGRLCNSRLLSAVSSTKDDEPDPLILEENDVDNMATNNKESAPSNGSGKNDSKGVLTQTLEMRENFQKQLQEIMSATSIVKPQGQRTSLSRSGCNSASSTPDSTRSARSGRSRVLEALRQSRQTVPDVNTEPSQNEQIIWDDPTAREERARLASNLQWPSCPTQYSELQVDIQNLEDSPFQKPLHDSEIAKQAVCDPGNIRVTEAPKHPISEELETPIKDSHLIPTPQAPSIAFPLANPPVAPHPREKIITIEETHEELKKQYIFQLSSLNPQERIDYCHLIEKLGGLVIEKQCFDPTCTHIVVGHPLRNEKYLASVAAGKWVLHRSYLEACRTAGHFVQEEDYEWGSSSILDVLTGINVQQRRLALAAMRWRKKIQQRQESGIVEGAFSGWKVILHVDQSREAGFKRLLQSGGAKVLPGHSVPLFKEATHLFSDLNKLKPDDSGVNIAEAAAQNVYCLRTEYIADYLMQESPPHVENYCLPEAISFIQNNKELGTGLSQKRKAPTEKNKIKRPRVH

SEQ ID NO: 1828 - protein, 2243 aa, Homo sapiens
MNIIRENKDLACFYTTKHSWRGKYKRVFSVGTHAITTYNPNTLEVTNQWPYGDICSISPVGKGQGTEFNLTFRKGSGKKSETLKFSTEHRTELLTEALRFRTDFSEGKITGRRYNCYKHHWSDSRKPVILEVTPGGFDQINPATNRVLCSYDYRNIEGFVDLSDYQGGFCILYGGFSRLHLFASEQREEIIKSAIDHAGNYIGISLRIRKEPLEFEQYLNLRFGKYSTDESITSLAEFVVQKISPRHSEPVKRVLALTETCLVERDPATYNIATLKPLGEVFALVCDSENPQLFTIEFIKGQVRKYSSTERDSLLASLLDGVRASGNRDVCVKMTPTHKGQRWGLLSMPVDEEVESLHLRFLATPPNGNFADAVFRFNANISYSGVLHAVTQDGLFSENKEKLINNAITALLSQEGDVVASNAELESQFQAVRRLVASKAGFLAFTQLPKFRERLGVKVVKALKRSNNGIIHAAVDMLCALMCPMHDDYDLRQEQLNKASLLSSKKFLENLLEKFNSHVDHGTGALVISSLLDFLTFALCAPYSETTEGQQFDMLLEMVASNGRTLFKLFQHPSMAIIKGAGLVMKAIIEEGDKEIATKMQELALSEGALPRHLHTAMFTISSDQRMLTNRQLSRHLVGLWTADNATATNLLKRILPPGLLAYLESSDLVPEKDADRMHVRDNVKIAMDQYGKFNKVPEWQRLAGKAAKEVEKFAKEKVDLVLMHWRDRMGIAQKENINQKPVVLRKRRQRIKIEANWDLFYYRFGQDHARSNLIWNFKTREELKDTLESEMRAFNIDRELGSANVISWNHHEFEVKYECLAEEIKIGDYYLRLLLEEDENEESGSIKRSYEFFNELYHRFLLTPKVNMKCLCLQALAIVYGRCHEEIGPFTDTRYIIGMLERCTDKLERDRLILFLNKLILNKKNVKDLMDSNGIRILVDLLTLAHLHVSRATVPLQSNVIEAAPDMKRESEKEWYFGNADKERSGPYGFHEMQELWTKGMLNAKTRCWAQGMDGWRPLQSIPQLKWCLLASGQAVLNETDLATLILNMLITMCGYFPSRDQDNAIIRPLPKVKRLLSDSTCLPHIIQLLLTFDPILVEKVAILLYHIMQDNPQLPRLYLSGVFFFIMMYTGSNVLPVARFLKYTHTKQAFKSEETKGQDIFQRSILGHILPEAMVCYLENYEPEKFSEIFLGEFDTPEAIWSSEMRRLMIEKIAAHLADFTPRLQSNTRALYQYCPIPIINYPQLENELFCNIYYLKQLCDTLRFPDWPIKDPVKLLKDTLDAWKKEVEKKPPMMSIDDAYEVLNLPQGQGPHDESKIRKAYFRLAQKYHPDKNPEGRDMFEKVNKAYEFLCTKSAKIVDGPDPENIILILKTQSILFNRHKEDLQPYKYAGYPMLIRTITMETSDDLLFSKESPLLPAATELAFHTVNCSALNAEELRRENGLEVLQEAFSRCVAVLTRASKPSDMSVQVCGYISKCYSVAAQFEECREKITEMPSIIKDLCRVLYFGKSIPRVAALGVECVSSFAVDFWLQTHLFQAGILWYLLGFLFNYDYTLEESGIQKSEETNQQEVANSLAKLSVHALSRLGGYLAEEQATPENPTIRKSLAGMLTPYVARKLAVASVTEILKMLNSNTESPYLIWNNSTRAELLEFLESQQENMIKKGDCDKTYGSEFVYSDHAKELIVGEIFVRVYNEVPTFQLEVPKAFAASLLDYIGSQAQYLHTFMAITHAAKVESEQHGDRLPRVEMALEALRNVIKYNPGSESECIGHFKLIFSLLRVHGAGQVQQLALEVVNIVTSNQDCVNNIAESMVLSSLLALLHSLPSSRQLVLETLYALTSSTKIIKEAMAKGALIYLLDMFCNSTHPQVRAQTAELFAKMTADKLIGPKVRITLMKFLPSVFMDAMRDNPEAAVHIFEGTHENPELIWNDNSRDKVSTTVREMMLEHFKNQQDNPEANWKLPEDFAVVFGEAEGELAVGGVFLRIFIAQPAWVLRKPREFLIALLEKLTELLEKNNPHGETLETLTMATVCLFSAQPQLADQVPPLGHLPKVIQAMNHRNNAIPKSAIRVIHALSENELCVRAMASLETIGPLMNGMKKRADTVGLACEAINRMFQKEQSELVAQALKADLVPYLLKLLEGIGLENLDSPAATKAQIVKALKAMTRSLQYGEQVNEILCRSSVWSAFKDQKHDLFISESQTAGYLTGPGVAGYLTAGTSTSVMSNLPPPVDHEAGDLGYQT

SEQ ID NO: 1829 - protein, 730 aa, Homo sapiens
KPATGLWVWVSLLVAAGTVQPSDSQSVCAGTENKLSSLSDLEQQYRALRKYYENCEVVMGNLEITSIEHNRDLSFLRSVREVTGYVLVALNQFRYLPLENLRIIRGTKLYEDRYALAIFLNYRKDGNFGLQELGLKNLTEILNGGVYVDQNKFLCYADTIHWQDIVRNPWPSNLTLVSTNGSSGCGRCHKSCTGRCWGPTENHCQTLTRTVCAEQCDGRCYGPYVSDCCHRECAGGCSGPKDTDCFACMNFNDSGACVTQCPQTFVYNPTTFQLEHNFNAKYTYGAFCVKKCPHNFVVDSSSCVRACPSSKMEVEENGIKMCKPCTDICPKACDGIGTGSLMSAQTVDSSNIDKFINCTKINGNLIFLVTGIHGDPYNAIEAIDPEKLNVFRTVREITGFLNIQSWPPNMTDFSVFSNLVTIGGRVLYSGLSLLILKQQGITSLQFQSLKEISAGNIYITDNSNLCYYHTINWTTLFSTINQRIVIRDNRKAENCTAEGMVCNHLCSSDGCWGPGPDQCLSCRRFSRGRICIESCNLYDGEFREFENGSICVECDPQCEKMEDGLLTCHGPGPDNCTKCSHFKDGPNCVEKCPDGLQGANSFIFKYADPDRECHPCHPNCTQGCIGSSIEDCIGLMDRTPLIAAGVIGGLFILVIVGLTFAVYVRRKSIKKKRALRRFLETELVEPLTPSGTAPNQAQLRILKETELKRVKVLGSGAFGTVYKGIWVPEG

SEQ ID NO: 1830 - protein, 375 aa, Homo sapiens
MQKLQLCVYIYLFMLIVAGPVDLNENSEQKENVEKEGLCNACTWRQNTKSSRIEAIKIQILSKLRLETAPNISKDVIRQLLPKAPPLRELIDQYDVQRDDSSDGSLEDDDYHATTETIITMPTESDFLMQVDGKPKCCFFKFSSKIQYNKVVKAQLWIYLRPVETPTTVFVQILRLIKPMKDGTRYTGIRSLKLDMNPGTGIWQSIDVKTVLQNWLKQPESNLGIEIKALDENGHDLAVTFPGPGEDGLNPFLEVKVTDTPKRSRRDFGLDCDEHSTESRCCRYPLTVDFEAFGWDWIIAPKRYKANYCSGECEFVFLQKYPHTHLVHQANPRGSAGPCCTPTKMSPINMLYFNGKEQIIYGKIPAMVVDRCGCS

SEQ ID NO: 1831 - protein, 643 aa, Homo sapiens
MCGICCSVNFSAEHFSQDLKEDLLYNLKQRGPNSSKQLLKSDVNYQCLFSAHVLHLRGVLTTQPVEDERGNVFLWNGEIFSGIKVEAEENDTQILFNYLSSCKNESEILSLFSEVQGPWSFIYYQASSHYLWFGRDFFGRRSLLWHFSNLGKSFCLSSVGTQTSGLANQWQEVPASGLFRIDLKSTVISGCIILQLYPWKYISRENIIEENVNSLSQISADLPAFVSVVANEAKLYLEKPVVPLNMMLPQAALETHCSNISNVPPTREILQVFLTDVHMKEVIQQFIDVLSVAVKKRVLCLPRDENLTANEVLKTCDRKANVAILFSGGIDSMVIATLADRHIPLDEPIDLLNVAFIAEEKTMPTTFNREGNKQKNKCEIPSEEFSKDVAAAAADSPNKHVSVPDRITGRAGLKELQAVSPSRIWNFVEINVSMEELQKLRRTRICHLIRPLDTVLDDSIGCAVWFASRGIGWLVAQEGVKSYQSNAKVVLTGIGADEQLAGYSRHRVRFQSHGLEGLNKEIMMELGRISSRNLGRDDRVIGDHGKEARFPFLDENVVSFLNSLPIWEKANLTLPRGIGEKLLLRLAAVELGLTASALLPKRAMQFGSRIAKMEKINEKASDKCGRLQIMSLENLSIEKETKL

SEQ ID NO: 1832 - protein, 209 aa, Homo sapiens
MKKVRLKELESRLQQVDGFEKPKLLLEQYPTRPHIAACMLYTIHNTYDDIENKVVADLGCGCGVLSIGTAMLGAGLCVGFDIDEDALEIFNRNAEEFELTNIDMVQCDVCLLSNRMSKSFDTVIMNPPFGTKNNKGTDMAFLKTALEMARTAVYSLHKSSTREHVQKKAAEWKIKIDIIAELRYDLPASYKFHKKKSVDIEVDLIRFSF

SEQ ID NO: 1833 - protein, 754 aa, Homo sapiens
MGIKVQRPRCFFDIAINNQPAGRVVFELFSDVCPKTCENFRCLCTGEKGTGKSTQKPLHYKSCLFHRVVKDFMVQGGDFSEGNGRGGESIYGGFFEDESFAVKHNKEFLLSMANRGKDTNGSQFFITTKPTPHLDGHHVVFGQVISGQEVVREIENQKTDAASKPFAEVRILSCGELIPKSKVKKEEKKRHKSSSSSSSSSSDSDSSSDSQSSSDSSDSESATEEKSKKRKKKHRKNSRKHKKEKKKRKKSKKSASSESEAENLEAQPQSTVRPEEIPPIPENRFLMRKSPPKADEKERKNRERERERECNPPNSQPASYQRRLLVTRSGRKIKGRGPRRYRTPSRSRSRDRFRRSETPPHWRQEMQRAQRMRVSSGERWIKGDKSELNEIKENQRSPVRVKERKITDHRNVSESPNRKNEKEKKVKDHKSNSKERDIRRNSEKDDKYKNKVKKRAKSKSRSKSKEKSKSKERDSKHNRNEEKRMRSRSKGRDHENVKEKEKQSDSKGKDQERSRSKEKSKQLESKSNEHDHSKSKEKDRRAQSRSRECDITKGKHSYNSRTRERSRSRDRSRRVRSRTHDRDRSRSKEYHRYREQEYRRRGRSRSRERRTPPGRSRSKDRRRRRRDSRSSEREESQSRNKDKYRNQESKSSHRKENSESEKRMYSKSRDHNSSNNSREKKADRDQSPFSKIKQSSQDNELKSSMLKNKEDEKIRSSVEKENQKSKGQENDHVHEKNKKFDHESSPGTDEDKSG

SEQ ID NO: 1834 - protein, 414 aa, Homo sapiens
MSKKISGGSVVEMQGDEMTRIIWELIKEKLIFPYVELDLHSYDLGIENRDATNDQVTKDAAEAIKKHNVGVKCATITPDEKRVEEFKLKQMWKSPNGTIRNILGGTVFREAIICKNIPRLVSGWVKPIIIGRHAYGDQYRATDFVVPGPGKVEITYTPSDGTQKVTYLVHNFEEGGGVAMGMYNQDKSIEDFAHSSFQMALSKGWPLYLSTKNTILKKYDGRFKDIFQEIYDKQYKSQFEAQKIWYEHRLIDDMVAQAMKSEGGFIWACKNYDGDVQSDSVAQGYGSLGMMTSVLVCPDGKTVEAEAAHGTVTRHYRMYQKGQETSTNPIASIFAWTRGLAHRAKLDNNKELAFFANALEEVSIETIEAGFMTKDLAACIKGLPNVQRSDYLNTFEFMDKLGENLKIKLAQAKL

SEQ ID NO: 1835 - protein, 482 aa, Homo sapiens
MEPWPLLLLFSLCSAGLVLGSEHETRLVAKLFKDYSSVVRPVEDHRQVVEVTVGLQLIQLINVDEVNQIVTTNVRLKQGDMVDLPRPSCVTLGVPLFSHLQNEQWVDYNLKWNPDDYGGVKKIHIPSEKIWRPDLVLYNNADGDFAIVKFTKVLLQYTGHITWTPPAIFKSYCEIIVTHFPFDEQNCSMKLGTWTYDGSVVAINPESDQPDLSNFMESGEWVIKESRGWKHSVTYSCCPDTPYLDITYHFVMQRLPLYFIVNVIIPCLLFSFLTGLVFYLPTDSGEKMTLSISVLLSLTVFLLVIVELIPSTSSAVPLIGKYMLFTMVFVIASIIITVIVINTHHRSPSTHVMPNWVRKVFIDTIPNIMFFSTMKRPSREKQDKKIFTEDIDISDISGKPGPPPMGFHSPLIKHPEVKSAIEGIKYIAETMKSDQESNNAAAEWKYVAMVMDHILLGVFMLVCIIGTLAVFAGRLIELNQQG

SEQ ID NO: 1836 - protein, 457 aa, Homo sapiens
MEPWPLLLLFSLCSAGLVLGSEHETRLVAKLFKDYSSVVRPVEDHRQVVEVTVGLQLIQLINVDEVNQIVTTNVRLKQQWVDYNLKWNPDDYGGVKKIHIPSEKIWRPDLVLYNNADGDFAIVKFTKVLLQYTGHITWTPPAIFKSYCEIIVTHFPFDEQNCSMKLGTWTYDGSVVAINPESDQPDLSNFMESGEWVIKESRGWKHSVTYSCCPDTPYLDITYHFVMQRLPLYFIVNVIIPCLLFSFLTGLVFYLPTDSGEKMTLSISVLLSLTVFLLVIVELIPSTSSAVPLIGKYMLFTMVFVIASIIITVIVINTHHRSPSTHVMPNWVRKVFIDTIPNIMFFSTMKRPSREKQDKKIFTEDIDISDISGKPGPPPMGFHSPLIKHPEVKSAIEGIKYIAETMKSDQESNNAAAEWKYVAMVMDHILLGVFMLVCIIGTLAVFAGRLIELNQQG

SEQ ID NO: 1837 - protein, 423 aa, Homo sapiens [sequence omitted]

SEQ ID NO: 1838 - protein, 475 aa, Homo sapiens
MAELQMLLEEEIPGGRRALFDSYTNLERVADYCENNYIQSADKQRALEETKAYTTQSLASVAYLINTLANNVLQMLDIQASQLRRMESSINHISQTVDIHKEKVARREIGILTTNKNTSRTHKIIAPANLERPVRYIRKPIDYTILDDIGHGVKVSTQNMKMGGLPRTTPPTQKPPSPPMSGKGTLGRHSPYRTLEPVRPPVVPNDYVPSPTRNMAPSQQSPVRTASVNQRNRTYSSSGSSGGSHPSSRSSSRENSGSGSVGVPIAVPTPSPPSVFPGHPVQFYSMNRPASRHTPPTIGGSLPYRRPPSITSQTSLQNQMNGGPFYSQNPVSLAPPPPSILQVTPQLPLMGFVARVQENISDTPPPPPPVEEPVFDESPPPPPPPEDYEEEEAAVVEYSDPYAEEDPPWAPRSYLEKVVAIYDYTKDKEDELSFQEGAIIYVIKKNDDGWYEGVMNGVTGLFPGNYVESIMHYSE

SEQ ID NO: 1839 - protein, 1048 aa, Homo sapiens
MAFPPRRRLRLGPRGLPLLLSGLLLPLCRAFNLDVDSPAEYSGPEGSYFGFAVDFFVPSASSRMFLLVGAPKANTTQPGIVEGGQVLKCDWSSTRRCQPIEFDATGNRDYAKDDPLEFKSHQWFGASVRSKQDKILACAPLYHWRTEMKQEREPVGTCFLQDGTKTVEYAPCRSQDIDADGQGFCQGGFSIDFTKADRVLLGGPGSFYWQGQLISDQVAEIVSKYDPNVYSIKYNNQLATRTAQAIFDDSYLGYSVAVGDFNGDGIDDFVSGVPRAARTLGMVYIYDGKNMSSLYNFTGEQMAAYFGFSVAATDINGDDYADVFIGAPLFMDRGSDGKLQEVGQVSVSLQRASGDFQTTKLNGFEVFARFGSAIAPLGDLDQDGFNDIAIAAPYGGEDKKGIVYIFNGRSTGLNAVPSQILEGQWAARSMPPSFGYSMKGATDIDKNGYPDLIVGAFGVDRAILYRARPVITVNAGLEVYPSILNQDNKTCSLPGTALKVSCFNVRFCLKADGKGVLPRKLNFQVELLLDKLKQKGAIRRALFLYSRSPSHSKNMTISRGGLMQCEELIAYLRDESEFRDKLTPITIFMEYRLDYRTAADTTGLQPILNQFTPANISRQAHILLDCGEDNVCKPKLEVSVDSDQKKIYIGDDNPLTLIVKAQNQGEGAYEAELIVSIPLQADFIGVVRNNEALARLSCAFKTENQTRQVVCDLGNPMKAGTQLLAGLRFSVHQQSEMDTSVKFDLQIQSSNLFDKVSPVVSHKVDLAVLAAVEIRGVSSPDHVFLPIPNWEHKENPETEEDVGPVVQHIYELRNNGPSSFSKAMLHLQWPYKYNNNTLLYILHYDIDGPMNCTSDMEINPLRIKISSLQTTEKNDTVAGQGERDHLITKRDLALSEGDIHTLGCGVAQCLKIVCQVGRLDRGKSAILYVKSLLWTETFMNKENQNHSYSLKSSASFNVIEFPYKNLPIEDITNSTLVTTNVTWGIQPAPMPVPVWVIILAVLAGLLLLAVLVFVMYRMGFFKRVRPPQEEQEREQLQPHENGEGNSET

SEQ ID NO: 1840 - protein, 571 aa, Homo sapiens
MTRAGDHNRQRGCCGSLADYLTSAKFLLYLGHSLSTWGDRMWHFAVSVFLVELYGNSLLLTAVYGLVVAGSVLVLGAIIGDWVDKNARLKVAQTSLVVQNVSVILCGIILMMVFLHKHELLTMYHGWVLTSCYILIITIANIANLASTATAITIQRDWIVVVAGEDRSKLANMNATIRRIDQLTNILAPMAVGQIMTFGSPVIGCGFISGWNLVSMCVEYVLLWKVYQKTPALAVKAGLKEEETELKQLNLHKDTEPKPLEGTHLMGVKDSNIHELEHEQEPTCASQMAEPFRTFRDGWVSYYNQPVFLAGMGLAFLYMTVLGFDCITTGYAYTQGLSGSILSILMGASAITGIMGTVAFTWLRRKCGLVRTGLISGLAQLSCLILCVISVFMPGSPLDLSVSPFEDIRSRFIQGESITPTKIPEITTEIYMSNGSNSANIVPETSPESVPIISVSLLFAGVIAARIGLWSFDLTVTQLLQENVIESERGIINGVQNSMNYLLDLLHFIMVILAPNPEAFGLLVLISVSFVAMGHIMYFRFAQNTLGNKLFACGPDAKEVRKENQANTSVV

SEQ ID NO: 1841 - protein, 744 aa, Homo sapiens
MAVLPGPLQLLGVLLTISLSSIRLIQAGAYYGIKPLPPQIPPQMPPQIPQYQPLGQQVPHMPLAKDGLAMGKEMPHLQYGKEYPHLPQYMKEIQPAPRMGKEAVPKKGKEIPLASLRGEQGPRGEPGPRGPPGPPGLPGHGIPGIKGKPGPQGYPGVGKPGMPGMPGKPGAMGMPGAKGEIGQKGEIGPMGIPGPQGPPGPHGLPGIGKPGGPGLPGQPGPKGDRGPKGLPGPQGLRGPKGDKGFGMPGAPGVKGPPGMHGPPGPVGLPGVGKPGVTGFPGPQGPLGKPGAPGEPGPQGPIGVPGVQGPPGIPGIGKPGQDGIPGQPGFPGGKGEQGLPGLPGPPGLPGIGKPGFPGPKGDRGMGGVPGALGPRGEKGPIGAPGIGGPPGEPGLPGIPGPMGPPGAIGFPGPKGEGGIVGPQGPPGPKGEPGLQGFPGKPGFLGEVGPPGMRGLPGPIGPKGEAGQKGVPGLPGVPGLLGPKGEPGIPGDQGLQGPPGIPGIGGPSGPIGPPGIPGPKGEPGLPGPPGFPGIGKPGVAGLHGPPGKPGALGPQGQPGLPGPPGPPGPPGPPAVMPPTPPPQGEYLPDMGLGIDGVKPPHAYGAKKGKNGGPAYEMPAFTAELTAPFPPVGAPVKFNKLLYNGRQNYNPQTGIFTCEVPGVYYFAYHVHCKGGNVWVALFKNNEPVMYTYDEYKKGFLDQASGSAVLLLRPGDRVFLQMPSEQAAGLYAGQYVHSSFSGYLLYPM

SEQ ID NO: 1842 - protein, 478 aa, Homo sapiens
MGSRWSSEEERQPLLGPGLGPGLGASWRSREAAAAALPAAVPGPGRVYGRRWLVLLLFSLLAFVQGLVWNTWGPIQNSARQAYGFSSWDIALLVLWGPIGFLPCFAFMWLLDKRGLRITVLLTSFLMVLGTGLRCIPISDLILKRRLIHGGQMLNGLAGPTVMNAAPFLSTTWFSADERATATAIASMLSYLGGACAFLVGPLVVPAPNGTSPLLAAESSRAHIKDRIEAVLYAEFGVVCLIFSATLAYFPPRPPLPPSVAAASQRLSYRRSVCRLLSNFRFLMIALAYAIPLGVFAGWSGVLDLILTPAHVSQVDAGWIGFWSIVGGCVVGIAMARFADFIRGMLKLILLLLFSGATLSSTWFTLTCLNSITHLPLTTVTLYASCILLGVFLNSSVPIFFELFVETVYPVPEGITCGVVTFLSNMFMGVLLFFLTFYHTELSWFNWCLPGSCLLSLLLILCFRESYDRLYLDVVVSV

SEQ ID NO: 1843 - protein, 63 aa, Homo sapiens
MPGLVDSNPAPPESQEKKPLKPCCACPETKKARDACIIEKGEEHCGHLIEAHKECMRALGFKI

SEQ ID NO: 1844 - protein, 1007 aa, Homo sapiens
MKMWLLVSHLVIISITTCLAVSEEDKGFGPIFEEQPINTIYPEESLEGKVSLNCRARASPFPVYKWRMNNGDVDLTSDRYSMVGGNLVINNPDKQKDAGIYYCLASNNYGMVRSTEATLSFGYLDPFPPEERPEVRVKEGKGMVLLCDPPYHFPDDLSYRWLLNEFPVFITMDKRRFVSQTNGNLYIANVEASDKGNYSCFVSSPSITKSVFSKFIPLIPIPERTTKPYPADIVVQFKDVYALMGQNVTLECFALGNPVPDIRWRKVLEPMPSTAEISTSGAVLKIFNIQLEDEGIYECEAENIRGKDKHQARIYVQAFPEWVEHINDTEVDIGSDLYWPCVATGKPIPTIRWLKNGYAYHKGELRLYDVTFENAGMYQCIAENTYGAIYANAELKILALAPTFEMNPMKKKILAAKGGRVIIECKPKAAPKPKFSWSKGTEWLVNSSRILIWEDGSLEINNITRNDGGIYTCFAENNRGKANSTGTLVITDPTRIILAPINADITVGENATMQCAASFDPALDLTFVWSFNGYVIDFNKENIHYQRNFMLDSNGELLIRNAQLKHAGRYTCTAQTIVDNSSASADLVVRGPPGPPGGLRIEDIRATSVALTWSRGSDNHSPISKYTIQTKTILSDDWKDAKTDPPIIEGNMEAARAVDLIPWMEYEFRVVATNTLGRGEPSIPSNRIKTDGAAPNVAPSDVGGGGGRNRELTITWAPLSREYHYGNNFGYIVAFKPFDGEEWKKVTVTNPDTGRYVHKDETMSPSTAFQVKVKAFNNKGDGPYSLVAVINSAQDAPSEAPTEVGVKVLSSSEISVHWEHVLEKIVESYQIRYWAAHDKEEAANRVQVTSQEYSARLENLLPDTQYFIEVGACNSAGCGPPSDMIEAFTKKAPPSQPPRIISSVRSGSRYIITWDHVVALSNESTVTGYKVLYRPDGQHDGKLYSTHKHSIEVPIPRDGEYVVEVRAHSDGGDGVVSQVKISGAPTLSPSLLGLLLPAFGILVYLEF

SEQ ID NO: 1845 - protein, 641 aa, Homo sapiens
MGRRSTSSTKSGKFMNPTDQARKEARKRELKKNKKQRMMVRAAVLKMKDPKQIIRDMEKLDEMEFNPVQQPQLNEKVLKDKRKKLRETFERILRLYEKENPDIYKELRKLEVEYEQKRAQLSQYFDAVKNAQHVEVESIPLPDMPHAPSNILIQDIPLPGAQPPSILKKTSAYGPPTRAVSILPLLGHGVPRLPPGRKPPGPPPGPPPPQVVQMYGRKVGFALDLPPRRRDEDMLYSPELAQRGHDDDVSSTSEDDGYPEDMDQDKHDDSTDDSDTDKSDGESDGDEFVHRDNGERDNNEEKKSGLSVRFADMPGKSRKKKKNMKELTPLQAMMLRMAGQEIPEEGREVEEFSEDDDEDDSDDSEAEKQSQKQHKEESHSDGTSTASSQQQAPPQSVPPSQIQAPPMPGPPPLGPPPAPPLRPPGPPTGLPPGPPPGAPPFLRPPGMPGLRGPLPRLLPPGPPPGRPPGPPPGPPPGLPPGPPPRGPPPRLPPPAPPGIPPPRPGMMRPPLVPPLGPAPPGLFPPAPLPNPGVLSAPPNLIQRPKADDTSAATIEKKATATISAKPQITNPKAEITRFVPTALRVRRENKGATAAPQRKSEDDSAVPLAKAAPKSGPSVPVSVQTKDDVYEAFMKEMEGLL

SEQ ID NO: 1846 - protein, 1270 aa, Homo sapiens
MDSLEEPQKKVFKARKTMRVSDRQQLEAVYKVKEELLKTDVKLLNGNHENGDLDPTSPLENMDYIKDKEEVNGIEEICFDPEGSKAEWKETPCILSVNVKNKQDDDLNCEPLSPHNITPEPVSKLPAEPVSGDPAPGDLDAGDPASGVLASGDSTSGDPTSSEPSSSDAASGDATSGDAPSGDVSPGDATSGDATADDLSSGDPTSSDPIPGEPVPVEPISGDCAADDIASSEITSVDLASGAPASTDPASDDLASGDLSSSELASDDLATGELASDELTSESTFDRTFEPKSVPVCEPVPEIDNIEPSSNKDDDFLEKNGADEKLEQIQSKDSLDEKNKADNNIDANEETLETDDTTICSDRPPENEKKVEEDIITELALGEDAISSSMEIDQGEKNEDETSADLVETINENVIEDNKSENILENTDSMETDEIIPILEKLAPSEDELTCFSKTSLLPIDETNPDLEEKMESSFGSPSKQESSESLPKEAFLVLSDEEDISGEKDESEVISQNETCSPAEVESNEKDNKPEEEEQVIHEDDERPSEKNEFSRRKRSKSEDMDNVQSKRRRYMEEEYEAEFQVKITAKGDINQKLQKVIQWLLEEKLCALQCAVFDKTLAELKTRVEKIECNKRHKTVLTELQAKIARLTKRFEAAKEDLKKRHEHPPNPPVSPGKTVNDVNSNNNMSYRNAGTVRQMLESKRNVSESAPPSFQTPVNTVSSTNLVTPPAVVSSQPKLQTPVTSGSLTATSVLPAPNTATVVATTQVPSGNPQPTISLQPLPVILHVPVAVSSQPQLLQSHPGTLVTNQPSGNVEFISVQSPPTVSGLTKNPVSLPSLPNPTKPNNVPSVPSPSIQRNPTASAAPLGTTLAVQAVPTAHSIVQATRTSLPTVGPSGLYSPSTNRGPIQMKIPISAFSTSSAAEQNSNTTPRIENQTNKTIDASVSKKAADSTSQCGKATGSDSSGVIDLTMDDEESGASQDPKKLNHTPVSTMSSSQPVSRPLQPIQPAPPLQPSGVPTSGPSQTTIHLLPTAPTTVNVTHRPVTQVTTRLPVPRAPANHQVVYTTLPAPPAQAPLRGTVMQAPAVRQVNPQNSVTVRVPQTTTYVVNNGLTLGSTGPQLTVHHRPPQVHTEPPRPVHPAPLPEAPQPQRLPPEAASTSLPQKPHLKLARVQSQNGIVLSWSVLEVDRSCATVDSYHLYAYHEEPSATVPSQWKKIGEVKALPLPMACTLTQFVSGSKYYFAVRAKDIYGRFGPFCDPQSTDVISSTQSS

SEQ ID NO: 1847 - protein, 156 aa, Homo sapiens
MQKKEKSFGIQMLSVQPDTKPKGCAGCNRKIKDRYLLKALDKYWHEDCLKCACCDCRLGEVGSTLYTKANLILCRRDYLRLFGVTGNCAACSKLIPAFEMVMRAKDNVYHLDCFACQLCNQRFCVGDKFFLKNNMILCQTDYEEGLMKEGYAPQVR

SEQ ID NO: 1848 - protein, 1073 aa, Homo sapiens
MKTLLLDLALWSLLFQPGWLSFSSQVSQNCHNGSYEISVLMMGNSAFAEPLKNLEDAVNEGLEIVRGRLQNAGLNVTVNATFMYSDGLIHNSGDCRSSTCEGLDLLRKISNAQRMGCVLIGPSCTYSTFQMYLDTELSYPMISAGSFGLSCDYKETLTRLMSPARKLMYFLVNFWKTNDLPFKTYSWSTSYVYKNGTETEDCFWYLNALEASVSYFSHELGFKVVLRQDKEFQDILMDHNRKSNVIIMCGGPEFLYKLKGDRAVAEDIVIILVDLFNDQYFEDNVTAPDYMKNVLVLTLSPGNSLLNSSFSRNLSPTKRDFALAYLNGILLFGHMLKIFLENGENITTPKFAHAFRNLTFEGYDGPVTLDDWGDVDSTMVLLYTSVDTKKYKVLLTYDTHVNKTYPVDMSPTFTWKNSKLPNDITGRGPQILMIAVFTLTGAVVLLLLVALLMLRKYRKDYELRQKKWSHIPPENIFPLETNETNHVSLKIDDDKRRDTIQRLRQCKYDKKRVILKDLKHNDGNFTEKQKIELNKLLQIDYYNLTKFYGTVKLDTMIFGVIEYCERGSLREVLNDTISYPDGTFMDWEFKISVLYDIAKGMSYLHSSKTEVHGRLKSTNCVVDSRMVVKITDFGCNSILPPKKDLWTAPEHLRQANISQKGDVYSYGIIAQEIILRKETFYTLSCRDRNEKIFRVENSNGMKPFRPDLFLETAEEKELEVYLLVKNCWEEDPEKRPDFKKIETTLAKIFGLFHDQKNESYMDTLIRRLQLYSRNLEHLVEERTQLYKAERDRADRLNFMLLPRLVVKSLKEKGFVEPELYEEVTIYFSDIVGFTTICKYSTPMEVVDMLNDIYKSFDHIVDHHDVYKVETIGDAYMVASGLPKRNGNRHAIDIAKMALEILSFMGTFELEHLPGLPIWIRIGVHSGPCAAGVVGIKMPRYCLFGDTVNTASRMESTGLPLRIHVSGSTIAILKRTECQFLYEVRGETYLKGRGNETTYWLTGMKDQKFNLPTPPTVENQQRLQAEFSDMIANSLQKRQAAGIRSQKPRRVASYKKGTLEYLQLNTTDKESTYF

SEQ ID NO: 1849 - protein, 322 aa, Homo sapiens
MKTLAGLVLGLVIFDAAVTAPTLESINYDSETYDATLEDLDNLYNYENIPVDKVEIEIATVMPSGNRELLTPPPQPEKAQEEEEEEESTPRLIDGSSPQEPEFTGVLGPHTNEDFPTCLLCTCISTTVYCDDHELDAIPPLPKNTAYFYSRFNRIKKINKNDFASLSDLKRIDLTSNLISEIDEDAFRKLPQLRELVLRDNKIRQLPELPTTLTFIDISNNRLGRKGIKQEAFKDMYDLHHLYLTDNNLDHIPLPLPENLRALHLQNNNILEMHEDTFCNVKNLTYIRKALEDIRLDGNPINLSKTPQAYMCLPRLPVGSLV

SEQ ID NO: 1850 - protein, 1024 aa, Homo sapiens
MGEDDAALRAGSRGLSDPWADSVGVRPRTTERHIAVHKRLVLAFAVSLVALLAVTMLAVLLSLRFDECGASATPGADGGPSGFPERGGNGSLPGSARRNHHAGGDSWQPEAGGVASPGTTSAQPPSEEEREPWEPWTQLRLSGHLKPLHYNLMLTAFMENFTFSGEVNVEIACRNATRYVVLHASRVAVEKVQLAEDRAFGAVPVAGFFLYPQTQVLVVVLNRTLDAQRNYNLKIIYNALIENELLGFFRSSYVLHGERRFLGVTQFSPTHARKAFPCFDEPIYKATFKISIKHQATYLSLSNMPVETSVFEEDGWVTDHFSQTPLMSTYYLAWAICNFTYRETTTKSGVVVRLYARPDAIRRGSGDYALHITKRLIEFYEDYFKVPYSLPKLDLLAVPKHPYAAMENWGLSIFVEQRILLDPSVSSISYLLDVTMVIVHEICHQWFGDLVTPVWWEDVWLKEGFAHYFEFVGTDYLYPGWNMEKQRFLTDVLHEVMLLDGLASSHPVSQEVLQATDIDRVFDWIAYKKGAALIRMLANFMGHSVFQRGLQDYLTIHKYGNAARNDLWNTLSEALKRNGKYVNIQEVMDQWTLQMGYPVITILGNTTAENRIIITQQHFIYDISAKTKALKLQNNSYLWQIPLTIVVGNRSHVSSEAIIWVSNKSEHHRITYLDKGSWLLGNINQTGYFRVNYDLRNWRLLIDQLIRNHEVLSVSNRAGLIDDAFSLARAGYLPQNIPLEIIRYLSEEKDFLPWHAASRALYPLDKLLDRMENYNIFNEYILKQVATTYIKLGWPKNNFNGSLVQASYQHEELRREVIMLACSFGNKHCHQQASTLISDWISSNRNRIPLNVRDIVYCTGVSLLDEDVWEFIWMKFHSTTAVSEKKILLEALTCSDDRNLLNRLLNLSLNSEVVLDQDAIDVIIHVARNPHGRDLAWKFFRDKWKILNTRYGEALFMNSKLISGVTEFLNTEGELKELKNFMKNYDGVAAASFSRAVETVEANVRWKMLYQDELFQWLGKALRH

SEQ ID NO: 1851 - protein, 391 aa, Homo sapiens
MADIDNKEQSELDQDLDDVEEVEEEETGEETKLKARQLTVQMMQNPQILAALQERLDGLVETPTGYIESLPRVVKRRVNALKNLQVKCAQIEAKFYEEVHDLERKYAVLYQPLFDKRFEIINAIYEPTEEECEWKPDEEDEISEELKEKAKIEDEKKDEEKEDPKGIPEFWLTVFKNVDLLSDMVQEHDEPILKHLKDIKVKFSDAGQPMSFVLEFHFEPNEYFTNEVLTKTYRMRSEPDDSDPFSFDGPEIMGCTGCQIDWKKGKNVTLKTIKKKQKHKGRGTVRTVTKTVSNDSFFNFFAPPEVPESGDLDDDAEAILAADFEIGHFLRERIIPRSVLYFTGEAIEDDDDDYDEEGEEADEEGEEEGDEENDPDYDPKKDQNPAECKQQ

SEQ ID NO: 1852 - protein, 478 aa, Homo sapiens
MPPMPSAPPVHPPPDGGWGWIVVGAAFISIGFSYAFPKAVTVFFKEIQQIFHTTYSEIAWISSIMLAVMYAGGPVSSVLVNKYGSRPVVIAGGLLCCLGMVLASFSSSVVQLYLTMGFITGLGLAFNLQPALTIIGKYFYRKRPMANGLAMAGSPVFLSSLAPFNQYLFNTFGWKGSFLILGSLLLNACVAGSLMRPLGPNQTTSKSKNKTGKTEDDSSPKKIKTKKSTWEKVNKYLDFSLFKHRGFLIYLSGNVIMFLGFFAPIIFLAPYAKDQGIDEYSAAFLLSVMAFVDMFARPSVGLIANSKYIRPRIQYFFSFAIMFNGVCHLLCPLAQDYTSLVLYAVFFGLGFGSVSSVLFETLMDLVGAPRFSSAVGLVTIVECGPVLLGPPLAGKLVDLTGEYKYMYMSCGAIVVAASVWLLIGNAINYRLLAKERKEENARQKTRESEPLSKSKHSEDVNVKVSNAQSVTSERETNI

SEQ ID NO: 1853 - protein, 706 aa, Homo sapiens
MKIFSESHKTVFVVDHCPYMAESCRQHVEFDMLVKNRTQGIIPLAPISKSLWTCSVESSMEYCRIMYDIFPFKKLVNFIVSDSGAHVLNSWTQEDQNLQELMAALAAVGPPNPRADPECCSILHGLVAAVETLCKITEYQHEARTLLMENAERVGNRGRIICITNAKSDSHVRMLEDCVQETIHEHNKLAANSDHLMQIQKCELVLIHTYPVGEDSLVSDRSKKELSPVLTSEVHSVRAGRHLATKLNILVQQHFDLASTTITNIPMKEEQHANTSANYDVELLHHKDAHVDFLKSGDSHLGGGSREGSFKETITLKWCTPRTNNIELHYCTGAYRISPVDVNSRPSSCLTNFLLNGRSVLLEQPRKSGSKVISHMLSSHGGEIFLHVLSSSRSILEDPPSISEGCGGRVTDYRITDFGEFMRENRLTPFLDPRYKIDGSLEVPLERAKDQLEKHTRYWPMIISQTTIFNMQAVVPLASVIVKESLTEEDVLNCQKTIYNLVDMERKNDPLPISTVGTRGKGPKRDEQYRIMWNELETLVRAHINNSEKHQRVLECLMACRSKPPEEEERKKRGRKREDKEDKSEKAVKDYEQEKSWQDSERLKGILERGKEELAEAEIIKDSPDSPEPPNKKPLVEMDETPQVEKSKGPVSLLSLWSNRINTANSRKHQEFAGRLNSVNNRAELYQHLKEENGMETTENGKASRQ

SEQ ID NO: 1854 - protein, 386 aa, Homo sapiens
MKDCSNGCSAECTGEGGSKEVVGTFKAKDLIVTPATILKEKPDPNNLVFGTVFTDHMLTVEWSSEFGWEKPHIKPLQNLSLHPGSSALHYAVELFEGLKAFRGVDNKIRLFQPNLNMDRMYRSAVRATLPVFDKEELLECIQQLVKLDQEWVPYSTSASLYIRPTFIGTEPSLGVKKPTKALLFVLLSPVGPYFSSGTFNPVSLWANPKYVRAWKGGTGDCKMGGNYGSSLFAQCEAVDNGCQQVLWLYGEDHQITEVGTMNLFLYWINEDGEEELATPPLDGIILPGVTRRCILDLAHQWGEFKVSERYLTMDDLTTALEGNRVREMFGSGTACVVCPVSDILYKGETIHIPTMENGPKLASRILSKLTDIQYGREESDWTIVLS

SEQ ID NO: 1855 - protein, 703 aa, Homo sapiens
MLRGRSLSVTSLGGLPQWEVEELPVEELLLFEVAWEVTNKVGGIYTVIQTKAKTTADEWGENYFLIGPYFEHNMKTQVEQCEPVNDAVRRAVDAMNKHGCQVHFGRWLIEGSPYVVLFDIGYSAWNLDRWKGDLWEACSVGIPYHDREANDMLIFGSLTAWFLKEVTDHADGKYVVAQFHEWQAGIGLILSRARKLPIATIFTTHATLLGRYLCAANIDFYNHLDKFNIDKEAGERQIYHRYCMERASVHCAHVFTTVSEITAIEAEHMLKRKPDVVTPNGLNVKKFSAVHEFQNLHAMYKARIQDFVRGHFYGHLDFDLEKTLFLFIAGRYEFSNKGADIFLESLSRLNFLLRMHKSDITVMVFFIMPAKTNNFNVETLKGQAVRKQLWDVAHSVKEKFGKKLYDALLRGEIPDLNDILDRDDLTIMKRAIFSTQRQSLPPVTTHNMIDDSTDPILSTIRRIGLFNNRTDRVKVILHPEFLSSTSPLLPMDYEEFVRGCHLGVFPSYYEPWGYTPAECTVMGIPSVTTNLSGFGCFMQEHVADPTAYGIYIVDRRFRSPDDSCNQLTKFLYGFCKQSRRQRIIQRNRTERLSDLLDWRYLGRYYQHARHLTLSRAFPDKFHVELTSPPTTEGFKYPRPSSVPPSPSGSQASSPQSSDVEDEVEDERYDEEEEAERDRLNIKSPFSLSHVPHGKKKLHGEYKN

SEQ ID NO: 1856 - protein, 1549 aa, Homo sapiens
MSLSFCGNNISSYNINDGVLQNSCFVDALNLVPHVFLLFITFPILFIGWGSQSSKVQIHHNTWLHFPGHNLRWILTFALLFVHVCEIAEGIVSDSRRESRHLHLFMPAVMGFVATTTSIVYYHNIETSNFPKLLLALFLYWVMAFITKTIKLVKYCQSGLDISNLRFCITGMMVILNGLLMAVEINVIRVRRYVFFMNPQKVKPPEDLQDLGVRFLQPFVNLLSKATYWWMNTLIISAHKKPIDLKAIGKLPIAMRAVTNYVCLKDAYEEQKKKVADHPNRTPSIWLAMYRAFGRPILLSSTFRYLADLLGFAGPLCISGIVQRVNETQNGTNNTTGISETLSSKEFLENAYVLAVLLFLALILQRTFLQASYYVTIETGINLRGALLAMIYNKILRLSTSNLSMGEMTLGQINNLVAIETNQLMWFLFLCPNLWAMPVQIIMGVILLYNLLGSSALVGAAVIVLLAPIQYFIATKLAEAQKSTLDYSTERLKKTNEILKGIKLLKLYAWEHIFCKSVEETRMKELSSLKTFALYTSLSIFMNAAIPIAAVLATFVTHAYASGNNLKPAEAFASLSLFHILVTPLFLLSTVVRFAVKAIISVQKLNEFLLSDEIGDDSWRTGESSLPFESCKKHTGVQPKTINRKQPGRYHLDSYEQSTRRLRPAETEDIAIKVTNGYFSWGSGLATLSNIDIRIPTGQLTMIVGQVGCGKSSLLLAILGEMQTLEGKVHWSNVNESEPSFEATRSRNRYSVAYAAQKPWLLNATVEENITFGSPFNKQRYKAVTDACSLQPDIDLLPFGDQTEIGERGINLSGGQRQRICVARALYQNTNIVFLDDPFSALDIHLSDHLMQEGILKFLQDDKRTLVLVTHKLQYLTHADWIIAMKDGSVLREGTLKDIQTKDVELYEHWKTLMNRQDQELEKDMEADQTTLERKTLRRAMYSREAKAQMEDEDEEEEEEEDEDDNMSTVMRLRTKMPWKTCWRYLTSGGFFLLILMIFSKLLKHSVIVAIDYWLATWTSEYSINNTGKADQTYYVAGFSILCGAGIFLCLVTSLTVEWMGLTAAKNLHHNLLNKIILGPIRFFDTTPLGLILNRFSADTNIIDQHIPPTLESLTRSTLLCLSAIGMISYATPVFLVALLPLGVAFYFIQKYFRVASKDLQELDDSTQLPLLCHFSETAEGLTTIRAFRHETRFKQRMLELTDTNNIAYLFLSAANRWLEVRTDYLGACIVLTASIASISGSSNSGLVGLGLLYALTITNYLNWVVRNLADLEVQMGAVKKVNSFLTMESENYEGTMDPSQVPEHWPQEGEIKIHDLCVRYENNLKPVLKHVKAYIKPGQKVGICGRTGSGKSSLSLAFFRMVDIFDGKIVIDGIDISKLPLHTLRSRLSIILQDPILFSGSIRFNLDPECKCTDDRLWEALEIAQLKNMVKSLPGGLDAVVTEGGENFSVGQRQLFCLARAFVRKSSILIMDEATASIDMATENILQKVVMTAFADRTVVTIAHRVHTILTADLVIVMKRGNILEYDTPESLLAQENGVFASFVRADM

SEQ ID NO: 1857 - protein, 685 aa, Homo sapiens
MKPSWLQCRKVTSAGGLGGPLPGSSPARGAGAALRALVVPGPRGGLGGRGCRALSSGSGSEYKTHFAASVTDPERFWGKAAEQISWYKPWTKTLENKHSPSTRFVEGMLNICYNAVDRHIENGKGDKIAIIYDSPVTNTKATFTYKEVLEQVSKLAGVLVKHGIKKGDTVVIYMPMIPQAMYTMLACARIGAIHSLIFGGFASKELSSRIDHVKPKVVVTASFGIEPGRRVEYVPLVEEALKIGQHKPDKILIYNRPNMEAVPLAPGRDLDWDEEMAKAQSHDCVPVLSEHPLYILYTSGTTGLPKGVIRPTGGYAVMLHWSMSSIYGLQPGEVWWAASDLGWVVGHSYICYGPLLHGNTTVLYEGKPVGTPDAGAYFRVLAEHGVAALFTAPTAIRAIRQQDPGAALGKQYSLTRFKTLFVAGERCDVETLEWSKNVFRVPVLDHWWQTETGSPITASCVGLGNSKTPPPGQAGKSVPGYNVMILDDNMQKLKARCLGNIVVKLPLPPGAFSGLWKNQEAFKHLYFEKFPGYYDTMDAGYMDEEGYLYVMSRVDDVINVAGHRISAGAIEESILSHGTVADCAVVGKEDPLKGHVPLALCVLRKDINATEEQVLEEIVKHVRQNIGPVAAFRNAVFVKQLPKTRSGKIPRSALSAIVNGKPYKITSTIEDPSIFGHVEEMLKQA

SEQ ID NO: 1858 - protein, 523 aa, Homo sapiens
MKKFKRRLSLTLRGSQTIDESLSELAEQMTIEENSSKDNEPIVKNGRPPTSHSMHSFLHQYTGSFKKPPLRRPHSVIGGSLGSFMAMPRNGSRLDIVHENLKMGSDGESDQASGTSSDEVQSPTGVCLRNRIHRRISMEDLNKRLSLPADIRIPDGYLEKLQINSPPFDQPMSRRSRRASLSEIGFGKMETYIKLEKLGEGTYATVYKGRSKLTENLVALKEIRLEHEEGAPCTAIREVSLLKDLKHANIVTLHDIVHTDKSLTLVFEYLDKDLKQYMDDCGNIMSMHNVKLFLYQILRGLAYCHRRKVLHRDLKPQNLLINEKGELKLADFGLARAKSVPTKTYSNEVVTLWYRPPDVLLGSSEYSTQIDMWGVGCIFFEMASGRPLFPGSTVEDELHLIFRLLGTPSQETWPGISSNEEFKNYNFPKYKPQPLINHAPRLDSEGIELITKFLQYESKKRVSAEEAMKHVYFRSLGPRIHALPESVSIFSLKEIQLQKDPGFRNSSYPETGHGKNRRQSMLF

SEQ ID NO: 1859 - protein, 596 aa, Homo sapiens
MAGNCGARGALSAHTLLFDLPPALLGELCAVLDSCDGALGWRGLAERLSSSWLDVRHIEKYVDQGKSGTRELLWSWAQKNKTIGDLLQVLQEMGHRRAIHLITNYGAVLSPSEKSYQEGGFPNILFKETANVTVDNVLIPEHNEKGILLKSSISFQNIIEGTRNFHKDFLIGEGEIFEVYRVEIQNLTYAVKLFKQEKKMQCKKHWKRFLSELEVLLLFHHPNILELAAYFTETEKFCLIYPYMRNGTLFDRLQCVGDTAPLPWHIRIGILIGISKAIHYLHNVQPCSVICGSISSANILLDDQFQPKLTDFAMAHFRSHLEHQSCTINMTSSSSKHLWYMPEEYIRQGKLSIKTDVYSFGIVIMEVLTGCRVVLDDPKHIQLRDLLRELMEKRGLDSCLSFLDKKVPPCPRNFSAKLFCLAGRCAATRAKLRPSMDEVLNTLESTQASLYFAEDPPTSLKSFRCPSPLFLENVPSIPVEDDESQNNNLLPSDEGLRIDRMTQKTPFECSQSEVMFLSLDKKPESKRNEEACNMPSSSCEESWFPKYIVPSQDLRPYKVNIDPSSEAPGHSCRSRPVESSCSSKFSWDEYEQYKKE

SEQ ID NO: 1860 - protein, 309 aa, Homo sapiens
MDDQGCPRCKTTKYRNPSLKLMVNVCGHTLCESCVDLLFVRGAGNCPECGTPLRKSNFRVQLFEDPTVDKEVEIRKKVLKIYNKREEDFPSLREYNDFLEEVEEIVFNLTNNVDLDNTKKKMEIYQKENKDVIQKNKLKLTREQEELEEALEVERQENEQRRLFIQKEEQLQQILKRKNKQAFLDELESSDLPVALLLAQHKDRSTQLEMQLEKPKPVKPVTFSTGIKMGQHISLAPIHKLEEALYEYQPLQIETYGPHVPELEMLGRLGYLNHVRAASPQDLAGGYTSSLACHRALQDAFSGLFWQPS

SEQ ID NO: 1861 - protein, 509 aa, Homo sapiens
MVLWILWRPFGFSGRFLKLESHSITESKSLIPVAWTSLTQMLLEAPGIFLLGQRKRFSTMPETETHERETELFSPPSDVRGMTKLDRTAFKKTVNIPVLKVRKEIVSKLMRSLKRAALQRPGIRRVIEDPEDKESRLIMLDPYKIFTHDSFEKAELSVLEQLNVSPQISKYNLELTYEHFKSEEILRAVLPEGQDVTSGFSRIGHIAHLNLRDHQLPFKHLIGQVMIDKNPGITSAVNKINNIDNMYRNFQMEVLSGEQNMMTKVRENNYTYEFDFSKVYWNPRLSTEHSRITELLKPGDVLFDVFAGVGPFAIPVAKKNCTVFANDLNPESHKWLLYNCKLNKVDQKVKVFNLDGKDFLQGPVKEELMQLLGLSKERKPSVHVVMNLPAKAIEFLSAFKWLLDGQPCSSEFLPIVHCYSFSKDANPAEDVRQRAGAVLGISLEACSSVHLVRNVAPNKEMLCITFQIPASVLYKNQTRNPENHEDPPLKRQRTAEAFSDEKTQIVSNT

SEQ ID NO: 1862 - protein, 552 aa, Homo sapiens
MKKNRERFCNREREFVYKFKVGSQCLELRVPLKFPVQENASHLHGRLMLLHSLPCFIEKDLKEALTQFIEEESLSDYDRDAEASLAAVKSGEVDLHQLASTWAKAYAETTLEHARPEEPSWDEDFADVYHDLIHSPASETLLNLEHNYFVSISELIGERDVELKKLRERQGIEMEKVMQELGKSLTDQDVNSLAAQHFESQQDLENKWSNELKQSTAIQKQEYQEWVIKLHQDLKNPNNSSLSEEIKVQPSQFRESVEAIGRIYEEQRKLEESFTIHLGAQLKTMHNLRLLRADMLDFCKHKRNHRSGVKLHRLQTALSLYSTSLCGLVLLVDNRINSYSGIKRDFATVCQECTDFHFPRIEEQLEVVQQVVLYARTQRRSKLKESLDSGNQNGGNDDKTKNAERNYLNVLPGEFYITRHSNLSEIHVAFHLCVDDHVKSGNITARDPAIMGLRNILKVCCTHDITTISIPLLLVHDMSEEMTIPWCLRRAELVFKCVKGFMMEMASWDGGISRTVQFLVPQSISEEMFYQLSNMLPQIFRVSSTLTLTSKH

SEQ ID NO: 1863 - protein, 225 aa, Homo sapiens
MAAAGGGGGGAAAAGRAYSFKVVLLGEGCVGKTSLVLRYCENKFNDKHITTLQASFLTKKLNIGGKRVNLAIWDTAGQERFHALGPIYYRDSNGAILVYDITDEDSFQKVKNWVKELRKMLGNEICLCIVGNKIDLEKERHVSIQEAESYAESVGAKHYHTSAKQNKGIEELFLDLCKRMIETAQVDERAKGNGSSQPGTARRGVQIIDDEPQAQTSGGGCCSSG

SEQ ID NO: 1864 - protein, 1997 aa, Homo sapiens
MLSHGAGLALWITLSLLQTGLAEPERCNFTLAESKASSHSVSIQWRILGSPCNFSLIYSSDTLGAALCPTFRIDNTTYGCNLQDLQAGTIYNFRIISLDEERTVVLQTDPLPPARFGVSKEKTTSTSLHVWWTPSSGKVTSYEVQLFDENNQKIQGVQIQESTSWNEYTFFNLTAGSKYNIAITAVSGGKRSFSVYTNGSTVPSPVKDIGISTKANSLLISWSHGSGNVERYRLMLMDKGILVHGGVVDKHATSYAFHGLTPGYLYNLTVMTEAAGLQNYRWKLVRTAPMEVSNLKVTNDGSLTSLKVKWQRPPGNVDSYNITLSHKGTIKESRVLAPWITETHFKELVPGRLYQVTVSCVSGELSAQKMAVGRTFPDKVANLEANNNGRMRSLVVSWSPPAGDWEQYRILLFNDSVVLLNITVGKEETQYVMDDTGLVPGRQYEVEVIVESGNLKNSERCQGRTVPLAVLQLRVKHANETSLSIMWQTPVAEWEKYIISLADRDLLLIHKSLSKDAKEFTFTDLVPGRKYMATVTSISGDLKNSSSVKGRTVPAQVTDLHVANQGMTSSLFTNWTQAQGDVEFYQVLLIHENVVIKNESISSETSRYSFHSLKSGSLYSVVVTTVSGGISSRQVVVEGRTVPSSVSGVTVNNSGRNDYLSVSWLLAPGDVDNYEVTLSHDGKVVQSLVIAKSVRECSFSSLTPGRLYTVTITTRSGKYENHSFSQERTVPDKVQGVSVSNSARSDYLRVSWVHATGDFDHYEVTIKNKNNFIQTKSIPKSENECVFVQLVPGRLYSVTVTTKSGQYEANEQGNGRTIPEPVKDLTLRNRSTEDLHVTWSGANGDVDQYEIQLLFNDMKVFPPFHLVNTATEYRFTSLTPGRQYKILVLTISGDVQQSAFIEGFTVPSAVKNIHISPNGATDSLTVNWTPGGGDVDSYTVSAFRHSQKVDSQTIPKHVFEHTFHRLEAGEQYQIMIASVSGSLKNQINVVGRTVPASVQGVIADNAYSSYSLIVSWQKAAGVAERYDILLLTENGILLRNTSEPATTKQHKFEDLTPGKKYKIQILTVSGGLFSKEAQTEGRTVPAAVTDLRITENSTRHLSFRWTASEGELSWYNIFLYNPDGNLQERAQVDPLVQSFSFQNLLQGRMYKMVIVTHSGELSNESFIFGRTVPASVSHLRGSNRNTTDSLWFNWSPASGDFDFYELILYNPNGTKKENWKDKDLTEWRFQGLVPGRKYVLWVVTHSGDLSNKVTAESRTAPSPPSLMSFADIANTSLAITWKGPPDWTDYNDFELQWLPRDALTVFNPYNNRKSEGRIVYGLRPGRSYQFNVKTVSGDSWKTYSKPIFGSVRTKPDKIQNLHCRPQNSTAIACSWIPPDSDFDGYSIECRKMDTQEVEFSRKLEKEKSLLNIMMLVPHKRYLVSIKVQSAGMTSEVVEDSTITMIDRPPPPPPHIRVNEKDVLISKSSINFTVNCSWFSDTNGAVKYFTVVVREADGSDELKPEQQHPLPSYLEYRHNASIRVYQTNYFASKCAENPNSNSKSFNIKLGAEMESLGGKCDPTQQKFCDGPLKPHTAYRISIRAFTQLFDEDLKEFTKPLYSDTFFSLPITTESEPLFGAIEGVSAGLFLIGMLVAVVALLICRQKVSHGRERPSARLSIRRDRPLSVHLNLGQKGNRKTSCPIKINQFEGHFMKLQADSNYLLSKEYEELKDVGRNQSCDIALLPENRGKNRYNNILPYDATRVKLSNVDDDPCSDYINASYIPGNNFRREYIVTQGPLPGTKDDFWKMVWEQNVHNIVMVTQCVEKGRVKCDHYWPADQDSLYYGDLILQMLSESVLPEWTIREFKICGEEQLDAHRLIRHFHYTVWPDHGVPETTQSLIQFVRTVRDYINRSPGAGPTVVHCSAGVGRTGTFIALDRILQQLDSKDSVDIYGAVHDLRLHRVHMVQTECQYVYLHQCVRDVLRARKLRSEQENPLFPIYENVNPEYHRDPVYSRH

SEQ ID NO: 1865 - protein, 148 aa, Homo sapiens
MKALIVLGLVLLSVTVQGKVFERCELARTLKRLGMDGYRGISLANWMCLAKWESGYNTRATNYNAGDRSTDYGIFQINSRYWCNDGKTPGAVNACHLSCSALLQDNIADAVACAKRVVRDPQGIRAWVAWRNRCQNRDVRQYVQGCGV

SEQ ID NO: 1866 - protein, 500 aa, Homo sapiens
MSNSVPLLCFWSLCYCFAAGSPVPFGPEGRLEDKLHKPKATQTEVKPSVRFNLRTSKDPEHEGCYLSVGHSQPLEDCSFNMTAKTFFIIHGWTMSGIFENWLHKLVSALHTREKDANVVVVDWLPLAHQLYTDAVNNTRVVGHSIARMLDWLQEKDDFSLGNVHLIGYSLGAHVAGYAGNFVKGTVGRITGLDPAGPMFEGADIHKRLSPDDADFVDVLHTYTRSFGLSIGIQMPVGHIDIYPNGGDFQPGCGLNDVLGSIAYGTITEVVKCEHERAVHLFVDSLVNQDKPSFAFQCTDSNRFKKGICLSCRKNRCNSIGYNAKKMRNKRNSKMYLKTRAGMPFRVYHYQMKIHVFSYKNMGEIEPTFYVTLYGTNADSQTLPLEIVERIEQNATNTFLVYTEEDLGDLLKIQLTWEGASQSWYNLWKEFRSYLSQPRNPGRELNIRRIRVKSGETQRKLTFCTEDPENTSISPGRELWFRKCRDGWRMKNETSPTVELP

SEQ ID NO: 1867 - protein, 350 aa, Homo sapiens
MSAACWEEPWGLPGGFAKRVLVTGGAGFIASHMIVSLVEDYPNYMIINLDKLDYCASLKNLETISNKQNYKFIQGDICDSHFVKLLFETEKIDIVLHFAAQTHVDLSFVRAFEFTYVNVYGTHVLVSAAHEARVEKFIYVSTDEVYGGSLDKEFDESSPKQPTNPYASSKAAAECFVQSYWEQYKFPVVITRSSNVYGPHQYPEKVIPKFISLLQHNRKCCIHGSGLQTRNFLYATDVVEAFLTVLKKGKPGEIYNIGTNFEMSVVQLAKELIQLIKETNSESEMENWVDYVNDRPTNDMRYPMKSEKIHGLGWRPKVPWKEGIKKTIEWYRENFHNWKNVEKALEPFPV

SEQ ID NO: 1868 - protein, 490 aa, Homo sapiens
MGPVMPPSKKPESSGISVSSGLSQCYGGSGFSKALQEDDDLDFSLPDIRLEEGAMEDEELTNLNWLHESKNLLKSFGESVLRSVSPVQDLDDDTPPSPAHSDMPYDARQNPNCKPPYSFSCLIFMAIEDSPTKRLPVKDIYNWILEHFPYFANAPTGWKNSVRHNLSLNKCFKKVDKERSQSIGKGSLWCIDPEYRQNLIQALKKTPYHPHPHVFNTPPTCPQAYQSTSGPPIWPGSTFFKRNGALLQDPDIDAASAMMLLNTPPEIQAGFPPGVIQNGARVLSRGLFPGVRPLPITPIGVTAAMRNGITSCRMRTESEPSCGSPVVSGDPKEDHNYSSAKSSNARSTSPTSDSISSSSSSADDHYEFATKGSQEGSEGSEGSFRSHESPSDTEEDDRKHSQKEPKDSLGDSGYASQHKKRQHFAKARKVPSDTLPLKKRRTEKPPESDDEEMKEAAGSLLHLAGIRSCLNNITNRTAKGQKEQKETTKN

SEQ ID NO: 1869 - protein, 440 aa, Homo sapiens
MGQSQSGGHGPGGGKKDDKDKKKKYEPPVPTRVGKKKKKTKGPDAASKLPLVTPHTQCRLKLLKLERIKDYLLMEEEFIRNQEQMKPLEEKQEEERSKVDDLRGTPMSVGTLEEIIDDNHAIVSTSVGSEHYVSILSFVDKDLLEPGCSVLLNHKVHAVIGVLMDDTDPLVTVMKVEKAPQETYADIGGLDNQIQEIKESVELPLTHPEYYEEMGIKPPKGVILYGPPGTGKTLLAKAVANQTSATFLRVVGSELIQKYLGDGPKLVRELFRVAEEHAPSIVFIDEIDAIGTKRYDSNSGGEREIQRTMLELLNQLDGFDSRGDVKVIMATNRIETLDPALIRPGRIDRKIEFPLPDEKTKKRIFQIHTSRMTLADDVTLDDLIMAKDDLSGADIKAICTEAGLMALRERRMKVTNEDFKKSKENVLYKKQEGTPEGLYL

SEQ ID NO: 1870 - protein, 685 aa, Homo sapiens
MAEWLLSASWQRRAKAMTAAAGSAGRAAVPLLLCALLAPGGAYVLDDSDGLGREFDGIGAVSGGGATSRLLVNYPEPYRSQILDYLFKPNFGASLHILKVEIGGDGQTTDGTEPSHMHYALDENYFRGYEWWLMKEAKKRNPNITLIGLPWSFPGWLGKGFDWPYVNLQLTAYYVVTWIVGAKRYHDLDIDYIGIWNERSYNANYIKILRKMLNYQGLQRVKIIASDNLWESISASMLLDAELFKVVDVIGAHYPGTHSAKDAKLTGKKLWSSEDFSTLNSDMGAGCWGRILNQNYINGYMTSTIAWNLVASYYEQLPYGRCGLMTAQEPWSGHYVVESPVWVSAHTTQFTQPGWYYLKTVGHLEKGGSYVALTDGLGNLTIIIETMSHKHSKCIRPFLPYFNVSQQFATFVLKGSFSEIPELQVWYTKLGKTSERFLFKQLDSLWLLDSDGSFTLSLHEDELFTLTTLTTGRKGSYPLPPKSQPFPSTYKDDFNVDYPFFSEAPNFADQTGVFEYFTNIEDPGEHHFTLRQVLNQRPITWAADASNTISIIGDYNWTNLTIKCDVYIETPDTGGVFIAGRVNKGGILIRSARGIFFWIFANGSYRVTGDLAGWIIYALGRVEVTAKKWYTLTLTIKGHFTSGMLNDKSLWTDIPVNFPKNGWAAIGTHSFEFAQFDNFLVEATR

SEQ ID NO: 1871 - protein, 187 aa, Homo sapiens
MPVDLSKWSGPLSLQEVDEQPQHPLHVTYAGAAVDELGKVLTPTQVKNRPTSISWDGLDSGKLYTLVLTDPDAPSRKDPKYREWHHFLVVNMKGNDISSGTVLSDYVGSGPPKGTGLHRYVWLVYEQDRPLKCDEPILSNRSGDHRGKFKVASFRKKYELRAPVAGTCYQAEWDDYVPKLYEQLSGK

SEQ ID NO: 1872 - protein, 888 aa, Homo sapiens
MAGAAAESGRELWTFAGSRDPSAPRLAYGYGPGSLRELRAREFSRLAGTVYLDHAGATLFSQSQLESFTSDLMENTYGNPHSQNISSKLTHDTVEQVRYRILAHFHTTAEDYTVIFTAGSTAALKLVAEAFPWVSQGPESSGSRFCYLTDSHTSVVGMRNVTMAINVISTPVRPEDLWSAEERSASASNPDCQLPHLFCYPAQSNFSGVRYPLSWIEEVKSGRLHPVSTPGKWFVLLDAASYVSTSPLDLSAHQADFVPISFYKIFGFPTGLGALLVHNRAAPLLRKTYFGGGTASAYLAGEDFYIPRQSVAQRFEDGTISFLDVIALKHGFDTLERLTGGMENIKQHTFTLAQYTYVALSSLQYPNGAPVVRIYSDSEFSSPEVQGPIINFNVLDDKGNIIGYSQVDKMASLYNIHLRTGCFCNTGACQRHLGISNEMVRKHFQAGHVCGDNMDLIDGQPTGSVRISFGYMSTLDDVQAFLRFIIDTRLHSSGDWPVPQAHADTGETGAPSADSQADVIPAVMGRRSLSPQEDALTGSRVWNNSSTVNAVPVAPPVCDVARTQPTPSEKAAGVLEGALGPHVVTNLYLYPIKSCAAFEVTRWPVGNQGLLYDRSWMVVNHNGVCLSQKQEPRLCLIQPFIDLRQRIMVIKAKGMEPIEVPLEENSERTQIRQSRVCADRVSTYDCGEKISSWLSTFFGRPCHLIKQSSNSQRNAKKKHGKDQLPGTMATLSLVNEAQYLLINTSSILELHRQLNTSDENGKEELFSLKDLSLRFRANIIINGKRAFEEEKWDEISIGSLRFQVLGPCHRCQMICIDQQTGQRNQHVFQKLSESRETKVNFGMYLMHASLDLSSPCFLSVGSQVLPVLKENVEGHDLPASEKHQDVTS

SEQ ID NO: 1873 - protein, 368 aa, Homo sapiens
MSAQSVEEDSILIIPTPDEEEKILRVKLEEDPDGEEGSSIPWNHLPDPEIFRQRFRQFGYQDSPGPREAVSQLRELCRLWLRPETHTKEQILELVVLEQFVAILPKELQTWVRDHHPENGEEAVTVLEDLESELDDPGQPVSLRRRKREVLVEDMVSQEEAQGLPSSELDAVENQLKWASWELHSLRHCDDDGRTENGALAPKQELPSALESHEVPGTLNMGVPQIFKYGETCFPKGRFERKRNPSRKKQHICDECGKHFSQGSALILHQRIHSGEKPYGCVECGKAFSRSSILVQHQRVHTGEKPYKCLECGKAFSQNSGLINHQRIHTGEKPYECVQCGKSYSQSSNLFRHQRRHNAEKLLNVVKV

SEQ ID NO: 1874 - protein, 1482 aa, Homo sapiens
MRKDRLLHLCLVLLLILLSASDSNSTEPQYMVLVPSLLHTEAPKKGCVLLSHLNETVTVSASLESGRENRSLFTDLVAEKDLFHCVSFTLPRISASSEVAFLSIQIKGPTQDFRKRNTVLVLNTQSLVFVQTDKPMYKPGQTVRFRVVSVDENFRPRNELIPLIYLENPRRNRIAQWQSLKLEAGINQLSFPLSSEPIQGSYRVVVQTESGGRIQHPFTVEEFVLPKFEVKVQVPKIISIMDEKVNITVCGEYTYGKPVPGLATVSLCRKLSRVLNCDKQEVCEEFSQQLNSNGCITQQVHTKMLQITNTGFEMKLRVEARIREEGTDLEVTANRISEITNIVSKLKFVKVDSHFRQGIPFFAQVLLVDGKGVPIPNKLFFISVNDANYYSNATTNEQGLAQFSINTTSISVNKLFVRVFTVHPNLCFHYSWVAEDHQGAQHTANRVFSLSGSYIHLEPVAGTLPCGHTETITAHYTLNRQAMGELSELSFHYLIMAKGVIVRSGTHTLPVESGDMKGSFALSFPVESDVAPIARMFIFAILPDGEVVGDSEKFEIENCLANKVDLSFSPAQSPPASHAHLQVAAAPQSLCALRAVDQSVLLMKPEAELSVSSVYNLLTVKDLTNFPDNVDQQEEEQGHCPRPFFIHNGAIYVPLSSNEADIYSFLKGMGLKVFTNSKIRKPKSCSVIPSVSAGAVGQGYYGAGLGVVERPYVPQLGTYNVIPLNNEQSSGPVPETVRSYFPETWIWELVAVNSSGVAEVGVTVPDTITEWKAGAFCLSEDAGLGISSTASLRAFQPFFVELTMPYSVIRGEVFTLKATVLNYLPKCIRVSVQLKASPAFLASQNTKGEESYCICGNERQTLSWTVTPKTLGNVNFSVSAEAMQSLELCGNEVVEVPEIKRKDTVIKTLLVEAEGIEQEKTFSSMTCASGANVSEQLSLKLPSNVVKESARASFSVLGDILGSAMQNIQNLLQMPYGCGEQNMVLFAPNIYVLNYLNETQQLTQEIKAKAVGYLITGYQRQLNYKHQDGSYSTFGERYGRNQGNTWLTAFVLKTFAQARSYIFIDEAHITQSLTWLSQMQKDNGCFRSSGSLLNNAIKGGVEDEATLSAYVTIALLEIPLPVTNPIVRNALFCLESAWNVAKEGTHGSHVYTKALLAYAFSLLGKQNQNREILNSLDKEAVKEDNLVHWERPQRPKAPVGHLYQTQAPSAEVEMTSYVLLAYLTAQPAPTSGDLTSATNIVKWIMKQQNAQGGFSSTQDTVVALHALSRYGAATFTRTEKTAQVTVQDSQTFSTNFQVDNNNLLLLQQISLPELPGEYVITVTGERCVYLQTSMKYNILPEKEDSPFALKVQTVPQTCDGHKAHTSFQISLTISYTGNRPASNMVIVDVKMVSGFIPLKPTVKMLERSSSVSRTEVSNNHVLIYVEQVTNQTLSFSFMVLQDIPVGDLKPAIVKVYDYYETDESVVAEYIAPCSTDTEHGNV

SEQ ID NO: 1875 - protein, 1613 aa, Homo sapiens
MGAVLRSLLACSFCVLLRAAPLLLYANRRDLRLVDATNGKENATIVVGGLEDAAAVDFVFSHGLIYWSDVSEEAIKRTEFNKTESVQNVVVSGLLSPDGLACDWLGEKLYWTDSETNRIEVSNLDGSLRKVLFWQELDQPRAIALDPSSGFMYWTDWGEVPKIERAGMDGSSRFIIINSEIYWPNGLTLDYEEQKLYWADAKLNFIHKSNLDGTNRQAVVKGSLPHPFALTLFEDILYWTDWSTHSILACNKYTGEGLREIHSDIFSPMDIHAFSQQRQPNATNPCGIDNGGCSHLCLMSPVKPFYQCACPTGVKLLENGKTCKDGATELLLLARRTDLRRISLDTPDFTDIVLQLEDIRHAIAIDYDPVEGYIYWTDDEVRAIRRSFIDGSGSQFVVTAQIAHPDGIAVDWVARNLYWTDTGTDRIEVTRLNGTMRKILISEDLEEPRAIVLDPMVGYMYWTDWGEIPKIERAALDGSDRVVLVNTSLGWPNGLALDYDEGKIYWGDAKTDKIEVMNTDGTGRRVLVEDKIPHIFGFTLLGDYVYWTDWQRRSIERVHKRSAEREVIIDQLPDLMGLKATNVHRVIGSNPCAEENGGCSHLCLYRPQGLRCACPIGFELISDMKTCIVPEAFLLFSRRADIRRISLETNNNNVAIPLTGVKEASALDFDVTDNRIYWTDISLKTISRAFMNGSALEHVVEFGLDYPEGMAVDWLGKNLYWADTGTNRIEVSKLDGQHRQVLVWKDLDSPRALALDPAEGFMYWTEWGGKPKIDRAAMDGSERTTLVPNVGRANGLTIDYAKRRLYWTDLDTNLIESSNMLGLNREVIADDLPHPFGLTQYQDYIYWTDWSRRSIERANKTSGQNRTIIQGHLDYVMDILVFHSSRQSGWNECASSNGHCSHLCLAVPVGGFVCGCPAHYSLNADNRTCSAPTTFLLFSQKSAINRMVIDEQQSPDIILPIHSLRNVRAIDYDPLDKQLYWIDSRQNMIRKAQEDGSQGFTVVVSSVPSQNLEIQPYDLSIDIYSRYIYWTCEATNVINVTRLDGRSVGVVLKGEQDRPRAVVVNPEKGYMYFTNLQERSPKIERAALDGTEREVLFFSGLSKPIALALDSRLGKLFWADSDLRRIESSDLSGANRIVLEDSNILQPVGLTVFENWLYWIDKQQQMIEKIDMTGREGRTKVQARIAQLSDIHAVKELNLQEYRQHPCAQDNGGCSHICLVKGDGTTRCSCPMHLVLLQDELSCGEPPTCSPQQFTCFTGEIDCIPVAWRCDGFTECEDHSDELNCPVCSESQFQCASGQCIDGALRCNGDANCQDKSDEKNCEVLCLIDQFRCANGQCIGKHKKCDHNVDCSDKSDELDCYPTEEPAPQATNTVGSVIGVIVTIFVSGTVYFICQRMLCPRMKGDGETMTNDYVVHGPASVPLGYVPHPSSLSGSLPGMSRGKSMISSLSIMGGSSGPPYDRAHVTGASSSSSSSTKGTYFPAILNPPPSPATERSHYTMEFGYSSNSPSTHRSYSYRPYSYRHFAPPTTPCSTDVCDSDYAPSRRMTSVATAKGYTSDLNYDSEPVPPPPTPRSQYLSAEENYESCPPSPYTERSYSHHLYPPPPSPCTDSS

SEQ ID NO: 1876 - protein, 121 aa, Homo sapiens
MGRIFLDHIGGTRLFSCANCDTILTNRSELISTRFTGATGRAFLFNKVVNLQYSEVQDRVMLTGRHMVRDVSCKNCNSKLGWIYEFATEDSQRYKEGRVILERALVRESEGFEEHVPSDNS

SEQ ID NO: 1877 - protein, 169 aa, Homo sapiens
MEVYIPSFRYEESDLERGYTVFKIEVLMNGRKHFVEKRYSEFHALHKKLKKCIKTPEIPSKHVRNWVPKVLEQRRQGLETYLQAVILENEELPKLFLDFLNVRHLPSLPKAESCGSFDETESEESSKLSHQPVLLFLRDPYVLPAASDFPNVVIEGVLHGIFYPHLQPR

SEQ ID NO: 1878 - protein, 774 aa, Homo sapiens
MEPEREGTERHPRKVRESRQAPNKLVGAAEAMKAGWDLEESQPEAKKARLSTILFTDNCEVTHDQLCELLKYAVLGKSNVPKPSWCQLFHQNHLNNVVVFVLQGMSQLHFYRFYLEFGCLRKAFRHKFRLPPPSSDFLADVVGLQTEQRAGDLPKTMEGPLPSNAKAAINLQDDPIIQKYGSKKVGLTRCLLTKEEMRTFHFPLQGFPDCENFLLTKCNGSIADNSPLFGLDCEMCLTSKGRELTRISLVAEGGCCVMDELVKPENKILDYLTSFSGITKKILNPVTTKLKDVQRQLKALLPPDAVLVGHSLDLDLRALKMIHPYVIDTSLLYVREQGRRFKLKFLAKVILGKDIQCPDRLGHDATEDARTILELARYFLKHGPKKIAELNLEALANHQEIQAAGQEPKNTAEVLQHPNTSVLECLDSVGQKLLFLTRETDAGELPSSRNCQTIKCLSNKEVLEQARVEIPLFPFSIVQFSFKAFSPVLTEEMNKRMRIKWTEISTVYAGPFSKNCNLRALKRLFKSFGPVQSMTFVLETRQPHLCIQYEVLEAAQLAIESLDGILVDGICIKVQRPVTELTLDCDTLVNELEGDSENQGSIYLSGVSETFKEQLLQEPRLFLGLEAVILPKDLKSGKQKKYCFLKFKSFGSAQQALNILTGKDWKLKGRHALTPRHLHAWLRGLPPESTRLPGLRVVPPPFEQEALQTLKLDHPKIAAWRWSRKIGKLYNSLCPGTLCLILLPGTKSTHGSLSGLGLMGIKEEEESAGPGLCS

SEQ ID NO: 1879 - protein, 959 aa, Homo sapiens
MVAAPCARRLARRSHSALLAALTVLLLQTLVVWNFSSLDSGAGERRGGAAVGGGEQPPPAPAPRRERRDLPAEPAAARGGGGGGGGGGGGRGPQARARGGGPGEPRGQQPASRGALPARALDPHPSPLITLETQDGYFSHRPKEKVRTDSNNENSVPKDFENVDNSNFAPRTQKQKHQPELAKKPPSRQKELLKRKLEQQEKGKGHTFPGKGPGEVLPPGDRAAANSSHGKDVSRPPHARKTGGSSPETKYDQPPKCDISGKEAISALSRAKSKHCRQEIGETYCRHKLGLLMPEKVTRFCPLEGKANKNVQWDEDSVEYMPANPVRIAFVLVVHGRASRQLQRMFKAIYHKDHFYYIHVDKRSNYLHRQVLQVSRQYSNVRVTPWRMATIWGGASLLSTYLQSMRDLLEMTDWPWDFFINLSAADYPIRTNDQLVAFLSRYRDMNFLKSHGRDNARFIRKQGLDRLFLECDAHMWRLGDRRIPEGIAVDGGSDWFLLNRRFVEYVTFSTDDLVTKMKQFYSYTLLPAESFFHTVLENSPHCDTMVDNNLRITNWNRKLGCKCQYKHIVDWCGCSPNDFKPQDFHRFQQTARPTFFARKFEAVVNQEIIGQLDYYLYGNYPAGTPGLRSYWENVYDEPDGIHSLSDVTLTLYHSFARLGLRRAETSLHTDGENSCRYYPMGHPASVHLYFLADRFQGFLIKHHATNLAVSKLETLETWVMPKKVFKIASPPSDFGRLQFSEVGTDWDAKERLFRNFGGLLGPMDEPVGMQKWGKGPNVTVTVIWVDPVNVIAATYDILIESTAEFTHYKPPLNLPLRPGVWTVKILHHWVPVAETKFLVAPLTFSNRQPIKPEEALKLHNGPLRNAYMEQSFQSLNPVLSLPINPAQVEQARRNAASTGTALEGWLDSLVGGMWTAMDICATGPTACPVMQTCSQTAWSSFSPDPKSELGAVKPDGRLR

SEQ ID NO: 1880 - protein, 331 aa, Homo sapiens
MWLWEDQGGLLGPFSFLLLVLLLVTRSPVNACLLTGSLFVLLRVFSFEPVPSCRALQVLKPRDRISAIAHRGGSHDAPENTLAAIRQAAKNGATGVELDIEFTSDGIPVLMHDNTVDRTTDGTGRLCDLTFEQIRKLNPAANHRLRNDFPDEKIPTLREAVAECLNHNLTIFFDVKGHAHKATEALKKMYMEFPQLYNNSVVCSFLPEVIYKMRQTDRDVITALTHRPWSLSHTGDGKPRYDTFWKHFIFVMMDILLDWSMHNILWYLCGISAFLMQKDFVSPAYLKKWSAKGIQVVGWTVNTFDEKSYYESHLGSSYITDSMVEDCEPHF

SEQ ID NO: 1881 - protein, 1156 aa, Homo sapiens
MFPAAPSPRTPGTGSRRGPLAGLGPGSTPRTASRKGLPLGSAVSSPVLFSPVGRRSSLSSRGTPTRMFPHHSITESVNYDVKTFGSSLPVKVMEALTLAEVDDQLTINIDEGGWACLVCKEKLIIWKIALSPITKLSVCKELQLPPSDFHWSADLVALSYSSPSGEAHSTQAVAVMVATREGSIRYWPSLAGEDTYTEAFVDSGGDKTYSFLTAVQGGSFILSSSGSQLIRLIPESSGKIHQHILPQGQGMLSGIGRKVSSLFGILSPSSDLTLSSVLWDRERSSFYSLTSSNISKWELDDSSEKHAYSWDINRALKENITDAIWGSESNYEAIKEGVNIRYLDLKQNCDGLVILAAAWHSADNPCLIYYSLITIEDNGCQMSDAVTVEVTQYNPPFQSEDLILCQLTVPNFSNQTAYLYNESAVYVCSTGTGKFSLPQEKIVFNAQGDSVLGAGACGGVPIIFSRNSGLVSITSRENVSILAEDLEGSLASSVAGPNSESMIFETTTKNETIAQEDKIKLLKAAFLQYCRKDLGHAQMVVDELFSSHSDLDSDSELDRAVTQISVDLMDDYPASDPRWAESVPEEAPGFSNTSLIILHQLEDKMKAHSFLMDFIHQVGLFGRLGSFPVRGTPMATRLLLCEHAEKLSAAIVLKNHHSRLSDLVNTAILIALNKREYEIPSNLTPADVFFREVSQVDTICECLLEHEEQVLRDAPMDSIEWAEVVINVNNILKDMLQAASHYRQNRNSLYRREESLEKEPEYVPWTATSGPGGIRTVIIRQHEIVLKVAYPQADSNLRNIVTEQLVALIDCFLDGYVSQLKSVDKSSNRERYDNLEMEYLQKRSDLLSPLLSLGQYLWAASLAEKYCDFDILVQMCEQTDNQSRLQRYMTQFADQNFSDFLFRWYLEKGKRGKLLSQPISQHGQLANFLQAHEHLSWLHEINSQELEKAHATLLGLANMETRYFAKKKTLLGLSKLAALASDFSEDMLQEKIEEMAEQERFLLHQETLPEQLLAEKQLNLSAMPVLTAPQLIGLYICEENRRANEYDFKKALDLLEYIDEEEDININDLKLEILCKALQRDNWSSSDGKDDPIEVSKDSIFVKILQKLLKDGIQLSEYLPEVKDLLQADQLGSLKSNPYFEFVLKANYEYYVQGQI

SEQ ID NO: 1882 - protein, 474 aa, Homo sapiens
MRRVVRQSKFRHVFGQAVKNDQCYDDIRVSRVTWDSSFCAVNPRFVAIIIEASGGGAFLVLPLHKTGRIDKSYPTVCGHTGPVLDIDWCPHNDQVIASGSEDCTVMVWQIPENGLTLSLTEPVVILEGHSKRVGIVAWHPTARNVLLSAGCDNAIIIWNVGTGEALINLDDMHSDMIYNVSWNRNGSLICTASKDKKVRVIDPRKQEIVAEKEKAHEGARPMRAIFLADGNVFTTGFSRMSERQLALWNPKNMQEPIALHEMDTSNGVLLPFYDPDTSIIYLCGKGDSSIRYFEITDESPYVHYLNTFSSKEPQRGMGYMPKRGLDVNKCEIARFFKLHERKCEPIIMTVPRKSDLFQDDLYPDTAGPEAALEAEEWFEGKNADPILISLKHGYIPGKNRDLKVVKKNILDSKPTANKKCDLISIPKKTTDTASVQNEAKLDEILKEIKSIKDTICNQDERISKLEQQMAKIAA

SEQ ID NO: 1883 - protein, 661 aa, Homo sapiens
MEGAAAPVAGDRPDLGLGAPGSPREAVAGATAALEPRKPHGVKRHHHKHNLKHRYELQETLGKGTYGKVKRATERFSGRVVAIKSIRKDKIKDEQDMVHIRREIEIMSSLNHPHIISIYEVFENKDKIVIIMEYASKGELYDYISERRRLSERETRHFFRQIVSAVHYCHKNGVVHRDLKLENILLDDNCNIKIADFGLSNLYQKDKFLQTFCGSPLYASPEIVNGRPYRGPEVDSWALGVLLYTLVYGTMPFDGFDHKNLIRQISSGEYREPTQPSDARGLIRWMLMVNPDRRATIEDIANHWWVNWGYKSSVCDCDALHDSESPLLARIIDWHHRSTGLQADTEAKMKGLAKPTTSEVMLERQRSLKKSKKENDFAQSGQDAVPESPSKLSSKRPKGILKKRSNSEHRSHSTGFIEGVVGPALPSTFKMEQDLCRTGVLLPSSPEAEVPGKLSPKQSATMPKKGILKKTQQRESGYYSSPERSESSELLDSNDVMGSSIPSPSPPDPARVTSHSLSCRRKGILKHSSKYSAGTMDPALVSPEMPTLESLSEPGVPAEGLSRSYSRPSSVISDDSVLSSDSFDLLDLQENRPARQRIRSCVSAENFLQIQDFEGLQNRPRPQYLKRYRNRLADSSFSLLTDMDDVTQVYKQALEICSKLN

SEQ ID NO: 1884 - protein, 2813 aa, Homo sapiens
MIPARFAGVLLALALILPGTLCAEGTRGRSSTARCSLFGSDFVNTFDGSMYSFAGYCSYLLAGGCQKRSFSIIGDFQNGKRVSLSVYLGEFFDIHLFVNGTVTQGDQRVSMPYASKGLYLETEAGYYKLSGEAYGFVARIDGSGNFQVLLSDRYFNKTCGLCGNFNIFAEDDFMTQEGTLTSDPYDFANSWALSSGEQWCERASPPSSSCNISSGEMQKGLWEQCQLLKSTSVFARCHPLVDPEPFVALCEKTLCECAGGLECACPALLEYARTCAQEGMVLYGWTDHSACSPVCPAGMEYRQCVSPCARTCQSLHINEMCQERCVDGCSCPEGQLLDEGLCVESTECPCVHSGKRYPPGTSLSRDCNTCICRNSQWICSNEECPGECLVTGQSHFKSFDNRYFTFSGICQYLLARDCQDHSFSIVIETVQCADDRDAVCTRSVTVRLPGLHNSLVKLKHGAGVAMDGQDVQLPLLKGDLRIQHTVTASVRLSYGEDLQMDWDGRGRLLVKLSPVYAGKTCGLCGNYNGNQGDDFLTPSGLAEPRVEDFGNAWKLHGDCQDLQKQHSDPCALNPRMTRFSEEACAVLTSPTFEACHRAVSPLPYLRNCRYDVCSCSDGRECLCGALASYAAACAGRGVRVAWREPGRCELNCPKGQVYLQCGTPCNLTCRSLSYPDEECNEACLEGCFCPPGLYMDERGDCVPKAQCPCYYDGEIFQPEDIFSDHHTMCYCEDGFMHCTMSGVPGSLLPDAVLSSPLSHRSKRSLSCRPPMVKLVCPADNLRAEGLECTKTCQNYDLECMSMGCVSGCLCPPGMVRHENRCVALERCPCFHQGKEYAPGETVKIGCNTCVCQDRKWNCTDHVCDATCSTIGMAHYLTFDGLKYLFPGECQYVLVQDYCGSNPGTFRILVGNKGCSHPSVKCKKRVTILVEGGEIELFDGEVNVKRPMKDETHFEVVESGRYIILLLGKALSVVWDRHLSISVVLKQTYQEKVCGLCGNFDGIQNNDLTSSNLQVEEDPVDFGNSWKVSSQCADTRKVPLDSSPATCHNNIMKQTMVDSSCRILTSDVFQDCNKLVDPEPYLDVCIYDTCSCESIGDCACFCDTIAAYAHVCAQHGKVVTWRTATLCPQSCEERNLRENGYECEWRYNSCAPACQVTCQHPEPLACPVQCVEGCHAHCPPGKILDELLQTCVDPEDCPVCEVAGRRFASGKKVTLNPSDPEHCQICHCDVVNLTCEACQEPGGLVVPPTDAPVSPTTLYVEDISEPPLHDFYCSRLLDLVFLLDGSSRLSEAEFEVLKAFVVDMMERLRISQKWVRVAVVEYHDGSHAYIGLKDRKRPSELRRIASQVKYAGSQVASTSEVLKYTLFQIFSKIDRPEASRITLLLMASQEPQRMSRNFVRYVQGLKKKKVIVIPVGIGPHANLKQIRLIEKQAPENKAFVLSSVDELEQQRDEIVSYLCDLAPEAPPPTLPPDMAQVTVGPGLLGVSTLGPKRNSMVLDVAFVLEGSDKIGEADFNRSKEFMEEVIQRMDVGQDSIHVTVLQYSYMVTVEYPFSEAQSKGDILQRVREIRYQGGNRTNTGLALRYLSDHSFLVSQGDREQAPNLVYMVTGNPASDEIKRLPGDIQVVPIGVGPNANVQELERIGWPNAPILIQDFETLPREAPDLVLQRCCSGEGLQIPTLSPAPDCSQPLDVILLLDGSSSFPASYFDEMKSFAKAFISKANIGPRLTQVSVLQYGSITTIDVPWNVVPEKAHLLSLVDVMQREGGPSQIGDALGFAVRYLTSEMHGARPGASKAVVILVTDVSVDSVDAAADAARSNRVTVFPIGIGDRYDAAQLRILAGPAGDSNVVKLQRIEDLPTMVTLGNSFLHKLCSGFVRICMDEDGNEKRPGDVWTLPDQCHTVTCQPDGQTLLKSHRVNCDRGLRPSCPNSQSPVKVEETCGCRWTCPCVCTGSSTRHIVTFDGQNFKLTGSCSYVLFQNKEQDLEVILHNGACSPGARQGCMKSIEVKHSALSVELHSDMEVTVNGRLVSVPYVGGNMEVNVYGAIMHEVRFNHLGHIFTFTPQNNEFQLQLSPKTFASKTYGLCGICDENGANDFMLRDGTVTTDWKTLVQEWTVQRPGQTCQPILEEQCLVPDSSHCQVLLLPLFAECHKVLAPATFYAICQQDSCHQEQVCEVIASYAHLCRTNGVCVDWRTPDFCAMSCPPSLVYNHCEHGCPRHCDGNVSSCGDHPSEGCFCPPDKVMLEGSCVPEEACTQCIGEDGVQHQFLEAWVPDHQPCQICTCLSGRKVNCTTQPCPTAKAPTCGLCEVARLRQNADQCCPEYECVCDPVSCDLPPVPHCERGLQPTLTNPGECRPNFTCACRKEECKRVSPPSCPPHRLPTLRKTQCCDEYECACNCVNSTVSCPLGYLASTATNDCGCTTTTCLPDKVCVHRSTIYPVGQFWEEGCDVCTCTDMEDAVMGLRVAQCSQKPCEDSCRSGFTYVLHEGECCGRCLPSACEVVTGSPRGDSQSSWKSVGSQWASPENPCLINECVRVKEEVFIQQRNVSCPQLEVPVCPSGFQLSCKTSACCPSCRCERMEACMLNGTVIGPGKTVMIDVCTTCRCMVQVGVISGFKLECRKTTCNPCPLGYKEENNTGECCGRCLPTACTIQLRGGQIMTLKRDETLQDGCDTHFCKVNERGEYFWEKRVTGCPPFDEHKCLAEGGKIMKIPGTCCDTCEEPECNDITARLQYVKVGSCKSEVEVDIHYCQGKCASKAMYSIDINDVQDQCSCCSPTRTEPMQVALHCTNGSVVYHEVLNAMECKCSPRKCSK

SEQ ID NO: 1885 - protein, 487 aa, Homo sapiens
MASSAEGDEGTVVALAGVLQSGFQELSLNKLATSLGASEQALRLIISIFLGYPFALFYRHYLFYKETYLIHLFHTFTGLSIAYFNFGNQLYHSLLCIVLQFLILRLMGRTITAVLTTFCFQMAYLLAGYYYTATGNYDIKWTMPHCVLTLKLIGLAVDYFDGGKDQNSLSSEQQKYAIRGVPSLLEVAGFSYFYGAFLVGPQFSMNHYMKLVQGELIDIPGKIPNSIIPALKRLSLGLFYLVGYTLLSPHITEDYLLTEDYDNHPFWFRCMYMLIWGKFVLYKYVTCWLVTEGVCILTGLGFNGFEEKGKAKWDACANMKVWLFETNPRFTGTIASFNINTNAWVARYIFKRLKFLGNKELSQGLSLLFLALWHGLHSGYLVCFQMEFLIVIVERQAARLIQESPTLSKLAAITVLQPFYYLVQQTIHWLFMGYSMTAFCLFTWDKWLKVYKSIYFLGHIFFLSLLFILPYIHKAMVPRKEKLKKME

SEQ ID NO: 1886 - protein, 414 aa, Homo sapiens
MAASIVRRGMLLARQVVLPQLSPAGKRYLLSSAYVDSHKWEAREKEHYCLADLASLMDKTFERKLPVSSLTISRLIDNISSREEIDHAEYYLYKFRHSPNCWYLRNWTIHTWIRQCLKYDAQDKALYTLVNKVQYGIFPDNFTFNLLMDSFIKKENYKDALSVVFEVMMQEAFEVPSTQLLSLYVLFHCLAKKTDFSWEEERNFGASLLLPGLKQKNSVGFSSQLYGYALLGKVELQQGLRAVYHNMPLIWKPGYLDRALQVMEKVAASPEDIKLCREALDVLGAVLKALTSADGASEEQSQNDEDNQGSEKLVEQLDIEETEQSKLPQYLERFKALHSKLQALGKIESEGLLSLTTQLVKEKLSTCEAEDIATYEQNLQQWHLDLVQLIQREQQQREQAKQEYQAQKAAKASA

SEQ ID NO: 1887 - protein, 624 aa, Homo sapiens
MSDNQSWNSSGSEEDPETESGPPVERCGVLSKWTNYIHGWQDRWVVLKNNALSYYKSEDETEYGCRGSICLSKAVITPHDFDECRFDISVNDSVWYLRAQDPDHRQQWIDAIEQHKTESGYGSESSLRRHGSMVSLVSGASGYSATSTSSFKKGHSLREKLAEMETFRDILCRQVDTLQKYFDACADAVSKDELQRDKVVEDDEDDFPTTRSDGDFLHSTNGNKEKLFPHVTPKGINGIDFKGEAITFKATTAGILATLSHCIELMVKREDSWQKRLDKETEKKRRTEEAYKNAMTELKKKSHFGGPDYEEGPNSLINEEEFFDAVEAALDRQDKIEEQSQSEKVRLHWPTSLPSGDAFSSVGTHRFVQKPYSRSSSMSSIDLVSASDDVHRFSSQVEEMVQNHMTYSLQDVGGDANWQLVVEEGEMKVYRREVEENGIVLDPLKATHAVKGVTGHEVCNYFWNVDVRNDWETTIENFHVVETLADNAIIIYQTHKRVWPASQRDVLYLSVIRKIPALTENDPETWIVCNFSVDHDSAPLNNRCVRAKINVAMICQTLVSPPEGNQEISRDNILCKITYVANVNPGGWAPASVLRAVAKREYPKFLKRFTSYVQEKTAGKPILF

SEQ ID NO: 1888 - protein, 556 aa, Homo sapiens
MELCGLGLPRPPMLLALLLATLLAAMLALLTQVALVVQVAEAARAPSVSAKPGPALWPLPLLVKMTPNLLHLAPENFYISHSPNSTAGPSCTLLEEAFRRYHGYIFGFYKWHHEPAEFQAKTQVQQLLVSITLQSECDAFPNISSDESYTLLVKEPVAVLKANRVWGALRGLETFSQLVYQDSYGTFTINESTIIDSPRFSHRGILIDTSRHYLPVKIILKTLDAMAFNKFNVLHWHIVDDQSFPYQSITFPELSNKGSYSLSHVYTPNDVRMVIEYARLRGIRVLPEFDTPGHTLSWGKGQKDLLTPCYSRQNKLDSFGPINPTLNTTYSFLTTFFKEISEVFPDQFIHLGGDEVEFKCWESNPKIQDFMRQKGFGTDFKKLESFYIQKVLDIIATINKGSIVWQEVFDDKAKLAPGTIVEVWKDSAYPEELSRVTASGFPVILSAPWYLDLISYGQDWRKYYKVEPLDFGGTQKQKQLFIGGEACLWGEYVDATNLTPRLWPRASAVGERLWSSKDVRDMDDAYDRLTRHRCRMVERGIAAQPLYAGYCNHENM

SEQ ID NO: 1889 - protein, 1147 aa, Homo sapiens
MDIRKFFGVIPSGKKLVSETVKKNEKTKSDEETLKAKKGIKEIKVNSSRKEDDFKQKQPSKKKRIIYDSDSESEETLQVKNAKKPPEKLPVSSKPGKISRQDPVTYISETDEEDDFMCKKAASKSKENGRSTNSHLGTSNMKKNEENTKTKNKPLSPIKLTPTSVLDYFGTGSVQRSNKKMVASKRKELSQNTDESGLNDEAIAKQLQLDEDAELERQLHEDEEFARTLAMLDEEPKTKKARKDTEAGETFSSVQANLSKAEKHKYPHKVKTAQVSDERKSYSPRKQSKYESSKESQQHSKSSADKIGEVSSPKASSKLAIMKRKEESSYKEIEPVASKRKENAIKLKGETKTPKKTKSSPAKKESVSPEDSEKKRTNYQAYRSYLNREGPKALGSKEIPKGAENCLEGLIFVITGVLESIERDEAKSLIERYGGKVTGNVSKKTNYLVMGRDSGQSKSDKAAALGTKIIDEDGLLNLIRTMPGKKSKYEIAVETEMKKESKLERTPQKNVQGKRKISPSKKESESKKSRPTSKRDSLAKTIKKETDVFWKSLDFKEQVAEETSGDSKARNLADDSSENKVENLLWVDKYKPTSLKTIIGQQGDQSCANKLLRWLRNWQKSSSEDKKHAKFGKFSGKDDGSSFKAALLSGPPGVGKTTTASLVCQELGYSYVELNASDTRSKSSLKAIVAESLNNTSIKGFYSNGAASSVSTKHALIMDEVDGMAGNEDRGGIQELIGLIKHTKIPIICMCNDRNHPKIRSLVHYCFDLRFQRPRVEQIKGAMMSIAFKEGLKIPPPAMNEIILGANQDIRQVLHNLSMWCARSKALTYDQAKADSHRAKKDIKMGPFDVARKVFAAGEETAHMSLVDKSDLFFHDYSIAPLFVQENYIHVKPVAAGGDMKKHLMLLSRAADSICDGDLVDSQIRSKQNWSLLPAQAIYASVLPGELMRGYMTQFPTFPSWLGKHSSTGKHDRIVQDLALHMSLRTYSSKRTVNMDYLSLLRDALVQPLTSQGVDGVQDVVALMDTYYLMKEDFENIMEISSWGGKPSPFSKLDPKVKAAFTRAYNKEAHLTPYSLQAIKASRHSTSPSLDSEYNEELNEDDSQSDEKDQDAIETDAMIKKKTKSSKPSKPEKDKEPRKGKGKSSKK

SEQ ID NO: 1890 - protein, 709 aa, Homo sapiens
MSGSRKEFDVKQILKIRWRWFGHQASSPNSTVDSQQGEFWNRGQTGANGGRKFLDPCSLQLPLASIGYRRSSQLDFQNSPSWPMASTSEVPAFEFTAEDCGGAHWLDRPEVDDGTSEEENESDSSSCRTSNSSQTLSSCHTMEPCTSDEFFQALNHAEQTFKKMENYLRHKQLCDVILVAGDRRIPAHRLVLSSVSDYFAAMFTNDVREARQEEIKMEGVEPNSLWSLIQYAYTGRLELKEDNIECLLSTACLLQLSQVVEACCKFLMKQLHPSNCLGIRSFADAQGCTDLHKVAHNYTMEHFMEVIRNQEFVLLPASEIAKLLASDDMNIPNEETILNALLTWVRHDLEQRRKDLSKLLAYIRLPLLAPQFLADMENNVLFRDDIECQKLIMEAMKYHLLPERRPMLQSPRTKPRKSTVGTLFAVGGMDSTKGATSIEKYDLRTNMWTPVANMNGRRLQFGVAVLDDKLYVVGGRDGLKTLNTVECYNPKTKTWSVMPPMSTHRHGLGVAVLEGPMYAVGGHDGWSYLNTVERWDPQARQWNFVATMSTPRSTVGVAVLSGKLYAVGGRDGSSCLKSVECFDPHTNKWTLCAQMSKRRGGVGVTTWNGLLYAIGGHDAPASNLTSRLSDCVERYDPKTDMWTAVASMSISRDAVGVCLLGDKLYAVGGYDGQAYLNTVEAYDPQTNEWTQVAPLCLGRAGACVVTVKL

SEQ ID NO: 1891 - protein, 200 aa, Homo sapiens
MANIAVQRIKREFKEVLKSEETSKNQIKVDLVDENFTELRGEIAGPPDTPYEGGRYQLEIKIPETYPFNPPKVRFITKIWHPNISSVTGAICLDILKDQWAAAMTLRTVLLSLQALLAAAEPDDPQDAVVANQYKQNPEMFKQTARLWAHVYAGAPVSSPEYTKKIENLCAMGFDRNAVIVALSSKSWDVETATELLLSN

SEQ ID NO: 1892 - protein, 345 aa, Homo sapiens
MLMFDPVPVKQEAMDPVSVSYPSNYMESMKPNKYGVIYSTPLPEKFFQTPEGLSHGIQMEPVDLTVNKRSSPPSAGNSPSSLKFPSSHRRASPGLSMPSSSPPIKKYSPPSPGVQPFGVPLSMPPVMAAALSRHGIRSPGILPVIQPVVVQPVPFMYTSHLQQPLMVSLSEEMENSSSSMQVPVIESYEKPISQKKIKIEPGIEPQRTDYYPEEMSPPLMNSVSPPQALLQENHPSVIVQPGKRPLPVESPDTQRKRRIHRCDYDGCNKVYTKSSHLKAHRRTHTGEKPYKCTWEGCTWKFARSDELTRHFRKHTGIKPFQCPDCDRSFSRSDHLALHRKRHMLV

SEQ ID NO: 1893 - protein, 802 aa, Homo sapiens
MFISGRRTADKWRAEERLQCPAGSARAALARCADGGAVGPFKCVFVGEMAAQVGAVRVVRAVAAQEEPDKEGKEKPHAGVSPRGVKRQRRSSSGGSQEKRGRPSQEPPLAPPHRRRRSRQHPGPLPPTNAAPTVPGPVEPLLLPPPPPPSLAPAGPAVAAPLPAPSTSALFTFSPLTVSAAGPKHKGHKERHKHHHHRGPDGDPSSCGTDLKHKDKQENGERTGGVPLIKAPKRETPDENGKTQRADDFVLKKIKKKKKKKHREDMRGRRLKMYNKEVQTVCAGLTRISKEILTQGQINSTSGLNKESFRYLKDEQLCRLNLGMQEYRVPQGVQTPFMTHQEHSIRRNFLKTGTKFSNFIHEEHQSNGGALVLHAYMDELSFLSPMEMERFSEEFLALTFSENEKNAAYYALAIVHGAAAYLPDFLDYFAFNFPNTPVKMEILGKKDIETTTISNFHTQVNRTYCCGTYRAGPMRQISLVGAVDEEVGDYFPEFLDMLEESPFLKMTLPWGTLSSLRLQCRSQSDDGPIMWVRPGEQMIPTADMPKSPFKRRRSMNEIKNLQYLPRTSEPREVLFEDRTRAHADHVGQGFDWQSTAAVGVLKAVQFGEWSDQPRITKDVICFHAEDFTDVVQRLQLDLHEPPVSQCVQWVDEAKLNQMRREGIRYARIQLCDNDIYFIPRNVIHQFKTVSAVCSLAWHIRLKQYHPVVEATQNTESNSNMDCGLTGKRELEVDSQCVRIKTESEEACTEIQLLTTASSSFPPASELNLQQDQKTQPIPVLKVESRLDSDQQHNLQEHSTTSV

SEQ ID NO: 1894 - protein, 767 aa, Homo sapiens
MSFDPNLLHNNGHNGYPNGTSAALRETGVIEKLLTSYGFIQCSERQARLFFHCSQYNGNLQDLKVGDDVEFEVSSDRRTGKPIAVKLVKIKQEILPEERMNGQEVFYLTYTPEDVEGNVQLETGDKINFVIDNNKHTGAVSARNIMLLKKKQARCQGVVCAMKEAFGFIERGDVVKEIFFHYSEFKGDLETLQPGDDVEFTIKDRNGKEVATDVRLLPQGTVIFEDISIEHFEGTVTKVIPKVPSKNQNDPLPGRIKVDFVIPKELPFGDKDTKSKVTLLEGDHVRFNISTDRRDKLERATNIEVLSNTFQFTNEAREMGVIAAMRDGFGFIKCVDRDVRMFFHFSEILDGNQLHIADEVEFTVVPDMLSAQRNHAIRIKKLPKGTVSFHSHSDHRFLGTVEKEATFSNPKTTSPNKGKEKEAEDGIIAYDDCGVKLTIAFQAKDVEGSTSPQIGDKVEFSISDKQRPGQQVATCVRLLGRNSNSKRLLGYVATLKDNFGFIETANHDKEIFFHYSEFSGDVDSLELGDMVEYSLSKGKGNKVSAEKVNKTHSVNGITEEADPTIYSGKVIRPLRSVDPTQTEYQGMIEIVEEGDMKGEVYPFGIVGMANKGDCLQKGESVKFQLCVLGQNAQTMAYNITPLRRATVECVKDQFGFINYEVGDSKKLFFHVKEVQDGIELQAGDEVEFSVILNQRTGKCSACNVWRVCEGPKAVAAPRPDRLVNRLKNITLDDASAPRLMVLRQPRGPDNSMGFGAERKIRQAGVID

SEQ ID NO: 1895 - protein, 399 aa, Homo sapiens
MKRTHLFIVGIYFLSSCRAEEGLNFPTYDGKDRVVSLSEKNFKQVLKKYDLLCLYYHEPVSSDKVTQKQFQLKEIVLELVAQVLEHKAIGFVMVDAKKEAKLAKKLGFDEEGSLYILKGDRTIEFDGEFAADVLVEFLLDLIEDPVEIISSKLEVQAFERIEDYIKLIGFFKSEDSEYYKAFEEAAEHFQPYIKFFATFDKGVAKKLSLKMNEVDFYEPFMDEPIAIPNKPYTEEELVEFVKEHQRPTLRRLRPEEMFETWEDDLNGIHIVAFAEKSDPDGYEFLEILKQVARDNTDNPDLSILWIDPDDFPLLVAYWEKTFKIDLFRPQIGVVNVTDADSVWMEIPDDDDLPTAEELEDWIEDVLSGKINTEDDDEDDDDDDNSDEEDNDDSDDDDDE

SEQ ID NO: 1896 - protein, 350 aa, Homo sapiens
MIRQERSTSYQELSEELVQVVENSELADEQDKETVRVQGPGILPGLDSESASSSIRFSKACLKNVFSVLLIFIYLLLMAVAVFLVYRTITDFREKLKHPVMSVSYKEVDRYDAPGIALYPGQAQLLSCKHHYEVIPPLTSPGQPGDMNCTTQRINYTDPFSNQTVKSALIVQGPREVKKRELVFLQFRLNKSSEDFSAIDYLLFSSFQEFLQSPNRVGFMQACESAYSSWKFSGGFRTWVKMSLVKTKEEDGREAVEFRQETSVVNYIDQRPAAKKSAQLFFVVFEWKDPFIQKVQDIVTANPWNTIALLCGAFLALFKAAEFAKLSIKWMIKIRKRYLKRRGQATSHIS

SEQ ID NO: 1897 - protein, 486 aa, Homo sapiens
MSSSSPPAGAASAAISASEKVDGFTRKSVRKAQRQKRSQGSSQFRSQGSQAELHPLPQLKDATSNEQQELFCQKLQQCCILFDFMDSVSDLKSKEIKRATLNELVEYVSTNRGVIVESAYSDIVKMISANIFRTLPPSDNPDFDPEEDEPTLEASWPHIQLVYEFFLRFLESPDFQPSIAKRYIDQKFVQQLLELFDSEDPRERDFLKTVLHRIYGKFLGLRAFIRKQINNIFLRFIYETEHFNGVAELLEILGSIINGFALPLKAEHKQFLMKVLIPMHTAKGLALFHAQLAYCVVQFLEKDTTLTEPVIRGLLKFWPKTCSQKEVMFLGEIEEILDVIEPTQFKKIEEPLFKQISKCVSSSHFQVAERALYFWNNEYILSLIEENIDKILPIMFASLYKISKEHWNPTIVALVYNVLKTLMEMNGKLFDDLTSSYKAERQREKKKELEREELWKKLEELKLKKALEKQNSAYNMHSILSNTSAE

SEQ ID NO: 1898 - protein, 557 aa, Homo sapiens
MAYSEEHKGMPCGFIRQNSGNSISLDFEPSIEYQFVERLEERYKCAFCHSVLHNPHQTGCGHRFCQHCILSLRELNTVPICPVDKEVIKSQEVFKDNCCKREVLNLYVYCSNAPGCNAKVILGRYQDHLQQCLFQPVQCSNEKCREPVLRKDLKEHLSASCQFRKEKCLYCKKDVVVINLQNHEENLCPEYPVFCPNNCAKIILKTEVDEHLAVCPEAEQDCPFKHYGCAVTDKRRNLQQHEHSALREHMRLVLEKNVQLEEQISDLHKSLEQKESKIQQLAETIKKLEKEFKQFAQLFGKNGSFLPNIQVFASHIDKSAWLEAQVHQLLQMVNQQQNKFDLRPLMEAVDTVKQKITLLENNDQRLAVLEEETNKHDTHINIHKAQLSKNEERFKLLEGTCYNGKLIWKVTDYKMKKREAVDGHTVSIFSQSFYTSRCGYRLCARAYLNGDGSGRGSHLSLYFVVMRGEFDSLLQWPFRQRVTLMLLDQSGKKNIMETFKPDPNSSSFKRPDGEMNIASGCPRFVAHSVLENAKNAYIKDDTLFLKVAVDLTDLEDL

SEQ ID NO: 1899 - protein, 453 aa, Homo sapiens
MDWKEVLRRRLATPNTCPNKKKSEQELKDEEMDLFTKYYSEWKGGRKNTNEFYKTIPRFYYRLPAEDEVLLQKLREESRAVFLQRKSRELLDNEELQNLWFLLDKHQTPPMIGEEAMINYENFLKVGEKAGAKCKQFFTAKVFAKLLHTDSYGRISIMQFFNYVMRKVWLHQTRIGLSLYDVAGQGYLRESDLENYILELIPTLPQLDGLEKSFYSFYVCTAVRKFFFFLDPLRTGKIKIQDILACSFLDDLLELRDEELSKESQETNWFSAPSALRVYGQYLNLDKDHNGMLSKEELSRYGTATMTNVFLDRVFQECLTYDGEMDYKTYLDFVLALENRKEPAALQYIFKLLDIENKGYLNVFSLNYFFRAIQELMKIHGQDPVSFQDVKDEIFDMVKPKDPLKISLQDLINSNQGDTVTTILIDLNGFWTYENREALVANDSENSADLDDT

SEQ ID NO: 1900 - protein, 246 aa, Homo sapiens
MSRGSSAGFDRHITIFSPEGRLYQVEYAFKAINQGGLTSVAVRGKDCAVIVTQKKVPDKLLDSSTVTHLFKITENIGCVMTGMTADSRSQVQRARYEAANWKYKYGYEIPVDMLCKRIADISQVYTQNAEMRPLGCCMILIGIDEEQGPQVYKCDPAGYYCGFKATAAGVKQTESTSFLEKKVKKKFDWTFEQTVETAITCLSTVLSIDFKPSEIEVGVVTVENPKFRILTEAEIDAHLVALAERD

SEQ ID NO: 1901 - protein, 1144 aa, Homo sapiens
MKLSRQFTVFGSAIFCVVIFSLYLMLDRGHLDYPRNPRREGSFPQGQLSMLQEKIDHLERLLAENNEIISNIRDSVINLSESVEDGPKSSQSNFSQGAGSHLLPSQLSLSVDTADCLFASQSGSHNSDVQMLDVYSLISFDNPDGGVWKQGFDITYESNEWDTEPLQVFVVPHSHNDPGWLKTFNDYFRDKTQYIFNNMVLKLKEDSRRKFIWSEISYLSKWWDIIDIQKKDAVKSLIENGQLEIVTGGWVMPDEATPHYFALIDQLIEGHQWLENNIGVKPRSGWAIDPFGHSPTMAYLLNRAGLSHMLIQRVHYAVKKHFALHKTLEFFWRQNWDLGSVTDILCHMMPFYSYDIPHTCGPDPKICCQFDFKRLPGGRFGCPWGVPPETIHPGNVQSRARMLLDQYRKKSKLFRTKVLLAPLGDDFRYCEYTEWDLQFKNYQQLFDYMNSQSKFKVKIQFGTLSDFFDALDKADETQRDKGQSMFPVLSGDFFTYADRDDHYWSGYFTSRPFYKRMDRIMESHLRAAEILYYFALRQAHKYKINKFLSSSLYTALTEARRNLGLFQHHDAITGTAKDWVVVDYGTRLFHSLMVLEKIIGNSAFLLILKDKLTYDSYSPDTFLEMDLKQKSQDSLPQKNIIRLSAEPRYLVVYNPLEQDRISLVSVYVSSPTVQVFSASGKPVEVQVSAVWDTANTISETAYEISFRAHIPPLGLKVYKILESASSNSHLADYVLYKNKVEDSGIFTIKNMINTEEGITLENSFVLLRFDQTGLMKQMMTKEDGKHHEVNVQFSWYGTTIKRDKSGAYLFLPDGNAKPYVYTTPPFVRVTHGRIYSEVTCFFDHVTHRVRLYHIQGIEGQSVEVSNIVDIRKVYNREIAMKISSDIKSQNRFYTDLNGYQIQPRMTLSKLPLQANVYPMTTMAYIQDAKHRLTLLSAQSLGVSSLNSGQIEVIMDRRLMQDDNRGLEQGIQDNKITANLFRILLEKRSAVNTEEEKKSVSYPSLLSHITSSLMNHPVIPMANKFSSPTLELQGEFSPLQSSLPCDIHLVNLRTIQSKVGNGHSNEAALILHRKGFDCRFSSKGTGLFCSTTQGKILVQKLLNKFIVESLTPSSLSLMHSPPGTQNISEINLSPMEISTFRIQLR

SEQ ID NO: 1902 - protein, 1164 aa, Homo sapiens
MAGAGGQHHPPGAAGGAAAGAGAAVTSAAASAGPGEDSSDSEAEQEGPQKLIRKVSTSGQIRTKTSIKEGQLLKQTSSFQRWKKRYFKLRGRTLYYAKDSKSLIFDEVDLSDASVAEASTKNANNSFTIITPFRRLMLCAENRKEMEDWISSLKSVQTREPYEVAQFNVEHFSGMHNWYACSHARPTFCNVCRESLSGVTSHGLSCEVCKFKAHKRCAVRATNNCKWTTLASIGKDIIEDEDGVAMPHQWLEGNLPVSAKCAVCDKTCGSVLRLQDWKCLWCKTMVHTACKDLYHPICPLGQCKVSIIPPIALNSTDSDGFCRATFSFCVSPLLVFVNSKSGDNQGVKFLRRFKQLLNPAQVFDLMNGGPHLGLRLFQKFDNFRILVCGGDGSVGWVLSEIDKLNLNKQCQLGVLPLGTGNDLARVLGWGGSYDDDTQLPQILEKLERASTKMLDRWSIMTYELKLPPKASLLPGPPEASEEFYMTIYEDSVATHLTKILNSDEHAVVISSAKTLCETVKDFVAKVEKTYDKTLENAVVADAVASKCSVLNEKLEQLLQALHTDSQAAPVLPGLSPLIVEEDAVESSSEESLGESKEQLGDDVTKPSSQKAVKPREIMLRANSLKKAVRQVIEEAGKVMDDPTVHPCEPANQSSDYDSTETDESKEEAKDDGAKESITVKTAPRSPDARASYGHSQTDSVPGPAVAASKENLPVLNTRIICPGLRAGLAASIAGSSIINKMLLANIDPFGATPFIDPDLDSVDGYSEKCVMNNYFGIGLDAKISLEFNNKREEHPEKCRSRTKNLMWYGVLGTRELLQRSYKNLEQRVQLECDGQYIPLPSLQGIAVLNIPSYAGGTNFWGGTKEDDIFAAPSFDDKILEVVAIFDSMQMAVSRVIKLQHHRIAQCRTVKITIFGDEGVPVQVDGEAWVQPPGIIKIVHKNRAQMLTRDRAFESTLKSWEDKQKCDSGKPVLRTHLYIHHAIDLATEEVSQMQLCSQAAEELITRICDAATIHCLLEQELAHAVNACSHALNKANPRCPESLTRDTATEIAINVKALYNETESLLVGRVPLQLESPHEERVSNALHSVEVELQKLTEIPWLYYILHPNEDEEPPMDCTKRNNRSTVFRIVPKFKKEKVQKQKTSSQPGSGDTESGSCEANSPGN

SEQ ID NO: 1903 - protein, 584 aa, Homo sapiens
MTTSSIRRQMKNIVNNYSEAEIKVREATSNDPWGPSSSLMTEIADLTYNVVAFSEIMSMVWKRLNDHGKNWRHVYKALTLLDYLIKTGSERVAQQCRENIFAIQTLKDFQYIDRDGKDQGINVREKSKQLVALLKDEERLKAERAQALKTKERMAQVATGMGSNQITFGRGSSQPNLSTSHSEQEYGKAGGSPASYHGSTSPRVSSELEQARPQTSGEEELQLQLALAMSREVAEQEERLRRGDDLRLQMALEESRRDTVKIPKKKEHGSLPQQTTLLDLMDALPSSGPAAQKAEPWGPSASTNQTNPWGGPAAPASTSDPWPSFGTKPAASIDPWGVPTGATVQSVPKNSDPWAASQQPASSAGKRASDAWGAVSTTKPVSVSGSFELFSNLNGTIKDDFSEFDNLRTSKKTAESVTSLPSQNNGTTSPDPFESQPLTVASSKPSSARKTPESFLGPNAALVNLDSLVTRPAPPAQSLNPFLAPGAPATSAPVNPFQVNQPQPLTLNQLRGSPVLGTSTSFGPGPGVESMAVASMTSAAPQPALGATGSSLTPLGPAMMNMVGSVGIPPSAAQATGTTNPFLL

SEQ ID NO: 1904 - protein, 525 aa, Homo sapiens
MVSRPEPEGEAMDAELAVAPPGCSHLGSFKVDNWKQNLRAIYQCFVWSGTAEARKRKAKSCICHVCGVHLNRLHSCLYCVFFGCFTKKHIHEHAKAKRHNLAIDLMYGGIYCFLCQDYIYDKDMEIIAKEEQRKAWKMQGVGEKFSTWEPTKRELELLKHNPKRRKITSNCTIGLRGLINLGNTCFMNCIVQALTHTPLLRDFFLSDRHRCEMQSPSSCLVCEMSSLFQEFYSGHRSPHIPYKLLHLVWTHARHLAGYEQQDAHEFLIAALDVLHRHCKGDDNGKKANNPNHCNCIIDQIFTGGLQSDVTCQVCHGVSTTIDPFWDISLDLPGSSTPFWPLSPGSEGNVVNGESHVSGTTTLTDCLRRFTRPEHLGSSAKIKCSGCHSYQESTKQLTMKKLPIVACFHLKRFEHSAKLRRKITTYVSFPLELDMTPFMASSKESRMNGQYQQPTDSLNNDNKYSLFAVVNHQGTLESGHYTSFIRQHKDQWFKCDDAIITKASIKDVLDSEGYLLFYHKQFLEYE

SEQ ID NO: 1905 - protein, 204 aa, Homo sapiens
MATASPSVFLLMVNGQVESAQFPEYDDLYCKYCFVYGQDWAPTAGLEEGISQITSKSQDVRQALVWNFPIDVTFKSTNPYGWPQIVLSVYGPDVFGNDVVRGYGAVHVPFSPGRHKRTIPMFVPESTSKLQKFTSWFMGRRPEYTDPKVVAQGEGREVTRVRSQGFVTLLFNVVTKDMRKLGYDTGPSDTQGVLGPSPPQSFPQ

SEQ ID NO: 1906 - protein, 1068 aa, Homo sapiens
MRSAAKPWNPAIRAGGHGPDRVRPLPAASSGMKSSKSSTSLAFESRLSRLKRASSEDTLNKPGSTAASGVVRLKKTATAGAISELTESRLRSGTGAFTTTKRTGIPAPREFSVTVSRERSVPRGPSNPRKSVSSPTSSNTPTPTKHLRTPSTKPKQENEGGEKAALESQVRELLAEAKAKDSEINRLRSELKKYKEKRTLNAEGTDALGPNVDGTSVSPGDTEPMIRALEEKNKNFQKELSDLEEENRVLKEKLIYLEHSPNSEGAASHTGDSSCPTSITQESSFGSPTGNQMSSDIDEYKKNIHGNALRTSGSSSSDVTKASLSPDASDFEHITAETPSRPLSSTSNPFKSSKCSTAGSSPNSVSELSLASLTEKIQKMEENHHSTAEELQATLQELSDQQQMVQELTAENEKLVDEKTILETSFHQHRERAEQLSQENEKLMNLLQERVKNEEPTTQEGKIIELEQKCTGILEQGRFEREKLLNIQQQLTCSLRKVEEENQGALEMIKRLKEENEKLNEFLELERHNNNMMAKTLEECRVTLEGLKMENGSLKSHLQGEKQKATEASAVEQTAESCEVQEMLKVARAEKDLLELSCNELRQELLKANGEIKHVSSLLAKVEKDYSYLKEICDHQAEQLSRTSLKLQEKASESDAEIKDMKETIFELEDQVEQHRAVKLHNNQLISELESSVIKLEEQKSDLERQLKTLTKQMKEETEEWRRFQADLQTAVVVANDIKCEAQQELRTVKRKLLEEEEKNARLQKELGDVQGHGRVVTSRAAPPPVDEEPESSEVDAAGRWPGVCVSRTSPTPPESATTVKSLIKSFDLGRPGGAGQNISVHKTPRSPLSGIPVRTAPAAAVSPMQRHSTYSSVRPASRGVTQRLDLPDLPLSDILKGRTETLKPDPHLRKSPSLESLSRPPSLGFGDTRLLSASTRAWKPQSKLSVERKDPLAALAREYGGSKRNALLKWCQKKTQGYANIDITNFSSSWSDGLAFCALLHTYLPAHIPYQELNSQEKKRNLLLAFEAAESVGIKPSLELSEMLYTDRPDWQSVMQYVAQIYKYFET

SEQ ID NO: 1907 - protein, 293 aa, Homo sapiens
MATNESVSIFSSASLAVEYVDSLLPENPLQEPFKNAWNYMLNNYTKFQIATWGSLIVHEALYFLFCLPGFLFQFIPYMKKYKIQKDKPETWENQWKCFKVLLFNHFCIQLPLICGTYYFTEYFNIPYDWERMPRWYFLLARCFGCAVIEDTWHYFLHRLLHHKRIYKYIHKVHHEFQAPFGMEAEYAHPLETLILGTGFFIGIVLLCDHVILLWAWVTIRLLETIDVHSGYDIPLNPLNLIPFYAGSRHHDFHHMNFIGNYASTFTWWDRIFGTDSQYNAYNEKRKKFEKKTE

SEQ ID NO: 1908 - protein, 866 aa, Homo sapiens
MESEQLFHRGYYRNSYNSITSASSDEELLDGAGVIMDFQTSEDDNLLDGDTAVGTHYTMTNGGSINSSTHLLDLLDEPIPGVGTYDDFHTIDWVREKCKDRERHRRINSKKKESAWEMTKSLYDAWSGWLVVTLTGLASGALAGLIDIAADWMTDLKEGICLSALWYNHEQCCWGSNETTFEERDKCPQWKTWAELIIGQAEGPGSYIMNYIMYIFWALSFAFLAVSLVKVFAPYACGSGIPEIKTILSGFIIRGYLGKWTLMIKTITLVLAVASGLSLGKEGPLVHVACCCGNIFSYLFPKYSTNEAKKREVLSAASAAGVSVAFGAPIGGVLFSLEEVSYYFPLKTLWRSFFAALVAAFVLRSINPFGNSRLVLFYVEYHTPWYLFELFPFILLGVFGGLWGAFFIRANIAWCRRRKSTKFGKYPVLEVIIVAAITAVIAFPNPYTRLNTSELIKELFTDCGPLESSSLCDYRNDMNASKIVDDIPDRPAGIGVYSAIWQLCLALIFKIIMTVFTFGIKVPSGLFIPSMAIGAIAGRIVGIAVEQLAYYHHDWFIFKEWCEVGADCITPGLYAMVGAAACLGGVTRMTVSLVVIVFELTGGLEYIVPLMAAVMTSKWVGDAFGREGIYEAHIRLNGYPFLDAKEEFTHTTLAADVMRPRRNDPPLAVLTQDNMTVDDIENMINETSYNGFPVIMSKESQRLVGFALRRDLTIAIESARKKQEGIVGSSRVCFAQHTPSLPAESPRPLKLRSILDMSPFTVTDHTPMEIVVDIFRKLGLRQCLVTHNGIVLGIITKKNILEHLEQLKQHVEPLAPPWHYNKKRYPPAYGPDGKPRPRFNNVQLNLTDEEREETEEEVYLLNSTTL

SEQ ID NO: 1909 - protein, 982 aa, Homo sapiens
MSSKMVISEPGLNWDISPKNGLKTFFSRENYKDHSMAPSLKELRVLSNRRIGENLNASASSVENEPAVSSATQAKEKVKTTIGMVLLPKPRVPYPRFSRFSQREQRSYVDLLVKYAKIPANSKAVGINKNDYLQYLDMKKHVNEEVTEFLKFLQNSAKKCAQDYNMLSDDARLFTEKILRACIEQVKKYSEFYTLHEVTSLMGFFPFRVEMGLKLEKTLLALGSVKYVKTVFPSMPIKLQLSKDDIATIETSEQTAEAMHYDISKDPNAEKLVSRYHPQIALTSQSLFTLLNNHGPTYKEQWEIPVCIQVIPVAGSKPVKVIYINSPLPQKKMTMRERNQIFHEVPLKFMMSKNTSVPVSAVFMDKPEEFISEMDMSCEVNECRKIESLENLYLDFDDDVTELETFGVTTTKVSKSPSPASTSTVPNMTDAPTAPKAGTTTVAPSAPDISANSRSLSQILMEQLQKEKQLVTGMDGGPEECKNKDDQGFESCEKVSNSDKPLIQDSDLKTSDALQLENSQEIETSNKNDMTIDILHADGERPNVLENLDNSKEKTVGSEAAKTEDTVLCSSDTDEECLIIDTECKNNSDGKTAVVGSNLSSRPASPNSSSGQASVGNQTNTACSPEESCVLKKPIKRVYKKFDPVGEILKMQDELLKPISRKVPELPLMNLENSKQPSVSEQLSGPSDSSSWPKSGWPSAFQKPKGRLPYELQDYVEDTSEYLAPQEGNFVYKLFSLQDLLLLVRCSVQRIETRPRSKKRKKIRRQFPVYVLPKVEYQACYGVEALTESELCRLWTESLLHSNSSFYVGHIDAFTSKLFLLEEITSEELKEKLSALKISNLFNILQHILKKLSSLQEGSYLLSHAAEDSSLLIYKASDGKVTRTAYNLYKTHCGLPGVPSSLSVPWVPLDPSLLLPYHIHHGRIPCTFPPKSLDTTTQQKIGGTRMPTRSHRNPVSMETKSSCLPAQQVETEGVAPHKRKIT

SEQ ID NO: 1910 - protein, 482 aa, Homo sapiens
MDELVHDLASALEQTSEQNKLGELWEEMALSPRQQRRQLRKRRGRKRRSDFTHLAEHTCCYSEASESSLDEATKDCREVAPVTNFSDSDDTMVAKRHPALNAIVKSKQHSWHESDSFTENAPCRPLRRRRKVKRVTSEVAASLQQKLKVSDWSYERGCRFKSAKKQRLSRWKENTPWTSSGHGLCESAENRTFLSKTGRKERMECETDEQKQGSDENMSECETSSVCSSSDTGLFTNDEGRQGDDEQSDWFYEGECVPGFTVPNLLPKWAPDHCSEVERMDSGLDKFSDSTFLLPSRPAQRGYHTRLNRLPGAAARCLRKGRRRLVGKETSINTLGTERISHIISDPRQKEKNKALASDFPHISACAHEFNPLSPLYSLDVLADASHRRCSPAHCSARQANVHWGPPCSRDIKRKRKPVATASLSSPSAVHMDAVEPTTPASQAPKSPSSEWLVRTSAAEKATDATTATFFKMPQEKSPGYS

SEQ ID NO: 1911 - protein, 536 aa, Homo sapiens
MALTSFLPAPTQLSQDQLEAEEKARSQRSRQTSLVSSRREPPPYGYRKGWIPRLLEDFGDGGAFPEIHVAQYPLDMGRKKKMSNALAIQVDSEGKIKYDAIARQGQSKDKVIYSKYTDLVPKEVMNADDPDLQRPDEEAIKEITEKTRVALEKSVSQKVAAAMPVRAADKLAPAQYIRYTPSQQGVAFNSGAKQRVIRMVEMQKDPMEPPRFKINKKIPRGPPSPPAPVMHSPSRKMTVKEQQEWKIPPCISNWKNAKGYTIPLDKRLAADGRGLQTVHINENFAKLAEALYIADRKAREAVEMRAQVERKMAQKEKEKHEEKLREMAQKARERRAGIKTHVEKEDGEARERDEIRHDRRKERQHDRNLSRAAPDKRSKLQRNENRDISEVIALGVPNPRTSNEVQYDQRLFNQSKGMDSGFAGGEDEIYNVYDQAWRGGKDMAQSIYRPSKNLDKDMYGDDLEARIKTNRFVPDKEFSGSDRRQRGREGPVQFEEDPFGLDKFLEEAKQHGGSKRPSDSSRPKEHEHEGKKRRKE

SEQ ID NO: 1912 - protein, 750 aa, Homo sapiens
MPPATGGGLAESELRPRRGRCGPQAARAAGRDVAAEAVARSPKRPAWGSRRFEAVGWWALLALVTLLSFATRFHRLDEPPHICWDETHFGKMGSYYINRTFFFDVHPPLGKMLIGLAGYLSGYDGTFLFQKPGDKYEHHSYMGMRGFCAFLGSWLVPFAYLTVLDLSKSLSAALLTAALLTFDTGCLTLSQYILLDPILMFFIMAAMLSMVKYNSCADRPFSAPWWFWLSLTGVSLAGALGVKFVGLFIILQVGLNTIADLWYLFGDLSLSLVTVGKHLTARVLCLIVLPLALYTATFAVHFMVLSKSGPGDGFFSSAFQARLSGNNLHNASIPEHLAYGSVITVKNLRMAIGYLHSHRHLYPEGIGARQQQVTTYLHKDYNNLWIIKKHNTNSDPLDPSFPVEFVRHGDIIRLEHKETSRNLHSHYHEAPMTRKHYQVTGYGINGTGDSNDFWRIEVVNRKFGNRIKVLRSRIRFIHLVTGCVLGSSGKVLPKWGWEQLEVTCTPYLKETLNSIWNVEDHINPKLPNISLDVLQPSFPEILLESHMVMIRGNSGLKPKDNEFTSKPWHWPINYQGLRFSGVNDTDFRVYLLGNPVVWWLNLLSIALYLLSGSIIAVAMQRGARLPAEVAGLSQVLLRGGGQVLLGWTLHYFPFFLMGRVLYFHHYFPAMLFSSMLTGILWDTLLRLCAWGLASWPLARGIHVAGILSLLLGTAYSFYLFHPLAYGMVGPLAQDPQSPMAGLRWLDSWDF

SEQ ID NO: 1913 - protein, 1006 aa, Homo sapiens
MSNSRNNRVMVEGVGARVVRGPDWKWGKQDGGEGHVGTVRSFESPEEVVVVWDNGTAANYRCSGAYDLRILDSAPTGIKHDGTMCDTCRQQPIIGIRWKCAECTNYDLCTVCYHGDKHHLRHRFYRITTPGSERVLLESRRKSKKITARGIFAGARVVRGVDWQWEDQDGGNGRRGKVTEIQDWSASSPHSAAYVLWDNGAKNLYRVGFEGMSDLKCVQDAKGGSFYRDHCPVLGEQNGNRNPGGLQIGDLVNIDLDLEIVQSLQHGHGGWTDGMFETLTTTGTVCGIDEDHDIVVQYPSGNRWTFNPAVLTKANIVRSGDAAQGAEGGTSQFQVGDLVQVCYDLERIKLLQRGHGEWAEAMLPTLGKVGRVQQIYSDSDLKVEVCGTSWTYNPAAVSKVASAGSAISNASGERLSQLLKKLFETQESGDLNEELVKAAANGDVAKVEDLLKRPDVDVNGQCAGHTAMQAASQNGHVDILKLLLKQNVDVEAEDKDGDRAVHHAAFGDEGAVIEVLHRGSADLNARNKRRQTPLHIAVNKGHLQVVKTLLDFGCHPSLQDSEGDTPLHDAISKKRDDILAVLLEAGADVTITNNNGFNALHHAALRGNPSAMRVLLSKLPRPWIVDEKKDDGYTALHLAALNNHVEVAELLVHQGNANLDIQNVNQQTALHLAVERQHTQIVRLLVRAGAKLDIQDKDGDTPLHEALRHHTLSQLRQLQDMQDVGKVDAAWEPSKNTLIMGLGTQGAEKKSAASIACFLAANGADLSIRNKKGQSPLDLCPDPNLCKALAKCHKEKVSGQVGSRSPSMISNDSETLEECMVCSDMKRDTLFGPCGHIATCSLCSPRVKKCLICKEQVQSRTKIEECVVCSDKKAAVLFQPCGHMCACENCANLMKKCVQCRAVVERRVPFIMCCGGKSSEDATDDISSGNIPVLQKDKDNTNVNADVQKLQQQLQDIKEQTMCPVCLDRLKNMIFLCGHGTCQLCGDRMSECPICRKAIERRILLY

SEQ ID NO: 1914 - protein, 707 aa, Homo sapiens
MSPHGDGRGQAQGRAVRVGLRRSGGIRGGVAVFAAVAAVFTFTLPPSVPGGDSGELITAAHELGVAHPPGYPLFTLVAKLAITLFPFGSIAYRVNLLCGLFGAVAASLLFFTVFRLSGSSAGGILAAGVFSFSRLTWQWSIAAEVFSLNNLFVGLLMALTVHFEEAATAKERSKVAKIGAFCCGLSLCNQHTIILYVLCIIPWILFQLLKKKELSLGSLLKLSLYFSAGLLPYVHLPISSYLNHARWTWGDQTTLQGFLTHFLREEYGTFSLAKSEIGSSMSEILLSQVTNMRTELSFNIQALAVCANICLATKDRQNPSLVWLFTGMFCIYSLFFAWRANLDISKPLFMGVVERFWMQSNAVVAVLAGIGLAAVVSETNRVLNSNGLQCLEWLSATLFVVYQIYSNYSVCDQRTNYVIDKFAKNLLTSMPHDAIILLRGDLPGNSLRYMHYCEGLRPDISLVDQEMMTYEWYLPKMAKHLPGVNFPGNRWNPVEGILPSGMVTFNLYHFLEVNKQKETFVCIGIHEGDPTWKKNYSLWPWGSCDKLVPLEIVFNPEEWIKLTKSIYNWTEEYGRFDPSSWESVANEEMWQARMKTPFFIFNLAETAHMPSKVKAQLYAQAYDLYKEIVYLQKEHPVNWHKNYAIACERMLRLQARDADPEVLLSETIRHFRLYSQKAPNDPQQADILGALKHLRKELQSLRNRKNV

SEQ ID NO: 1915 - protein, 570 aa, Homo sapiens
MENLKSGVYPLKEASGCPGADRNLLVYSFYEKGPLTFRDVAIEFSLEEWQCLDTAQQDLYRKVMLENYRNLVFLAGIAVSKPDLITCLEQGKEPWNMKRHAMVDQPPVTYSHFAQDLWPEQGIKDSFQEVILRRYGKCGHEDLQLRTGCKSVDECNLHKECYDELNQCLTTTQSEIFQYDKYVNVFYKFSNPNIQKIRHTGKKPFKCKKCDKSFCMLLHLTQHKRIHIRENSYQCEECGKVFNWFSTLTRHRRIHTGEKPYKCEQCGKAFKQSSTLTTHKIIHTGEKPYRCEECGKTFNRSSHLTTHKRIHTGEKPYRCEECGRAFNRSSHLTTHKIIHTGEKPYKCEECGKAFNQSSTLTTHKIIHAGEKPYKCEECGKAFYRFSYLTKHKIIHTGEKFYKCEECGKGFNWSSTLTKHKRIHTGEKPYKCEQCGKAFNESSNLTAHKIIHTGEKPYKCEECGKAFNRSPKLTAHKVIHSGEKPYKCEECGKAFNQFSNLTKHKITHIGDTSYKYLECDKAFSQSSTLTKHKVIHTGEKPYNCEEYGKAFNQSSNLIEQSNSYWRETLQM

SEQ ID NO: 1916 - protein, 1186 aa, Homo sapiens [sequence omitted]

SEQ ID NO: 1917 - protein, 1618 aa, Homo sapiens
MDGQTLRKAERSWSCSREKKEGYAKDMVTDFDEKHDEYLILLQQRNRILKHLKSKDPVQLRLEHLEQGFSVYVNGANSELKSSPRKAIHSDFSRSASHTEGTHDYGRRTLFREAEEALRRSSRTAPSKVQRRGWHQKSVQIRTEAGPRLHIEPPVDYSDDFELCGDVTLQANNTSEDRPQELRRSLELSVNLQRKQKDCSSDEYDSIEEDILSEPEPEDPALVGHPRHDRPPSSGDWTQKDVHGEQETEGRSSPGPDTLVVLEFNPASKSHKRERNLSAKRKDNAEVFVPTKPEPNLTPQAPAVFPDQERMCSRPGSRRERPLSATRKTLCEAEYPEEDASAVLQAIQVENAALQRALLSRKAEQPASPLQDAEGPPAKPWTSLLEEKEETLELLPITTATTTQEPAGAAGGARAINQAMDRIGLLGSRQQQKLLKVLQAVESDSAHLGRVVSPTKEQVSDTEDKQRMRADEIKDAIYVTMEILSNWGNSWWVGLTEVEFFDLNDTKLYVSPHDVDIRNTATPGELGRLVNRNLAGKKDSSPWTCPFHPPLQLFFVIRNTRQLGDFHLAKIKVRNYWTADGDLDIGAKNVKLYVNRNLIFNGKLDKGDREAPADHSILVDQKNEKSEQLEEAMNAHSEESKGTHEMAGASGDKELGLGCSPPAETLADAKLSSQGNVSGKRKNSTNCRKDSLSQLEEYLRLSAVPTSMGDMPSAPATSPPVKCPPVHEEPSLIQQLENLMGRKICEPPGKTPSWLQPSPTGKDRKQGGRKPKPLWLSPEKPLAWKGRLPSDDVIGEGPGETEARDKGLRHEPGWGTSRSVNTKERPQRATTKVHSDDSDIFNQPPNRERPASGRRGSRKDAGSSSHGDDQPASREDTWSSRTPSRSRWRSEQEHTLHESWSSLSAFDRSHRGRISNTELPGDILDELLQQKSSRHSDLPPSKKGEQPGLSRGQDGYSGETDAGGDFKIPVLPYGQRLVIDIKSTWGDRHYVGLNGIEIFSSKGEPVQISNIKADPPDINILPAYGKDPRVVTNLIDGVNRTQDDMHVWLAPFTRGRSHSITIDFTHPCHVALIRIWNYNKSRIHSFRGVKDITMLLDTQCIFEGEIAKASGTLAGAPEHFGDTILFTTDDDILEAIFYSDEMFDLDVGSLDSLQDEEAMRRPSTADGEGDERPFTQAGLGADERIPELELPSSSPVPQVTTPEPGIYHGICLQLNFTASWGDLHYLGLTGLEVVGKEGQALPIHLHQISASPRDLNELPEYSDDSRALDKLIDGTNITMEDEHMWLIPFSPGLDHVVTIRLDRAESIAGLRFWNYNKSPEDTYRGAKIVHVSLDGLCVSPPEGFLIRKGPGNCHFDFAQEILFVDYLRAQLLPQPARRLDMRSLECASMDYEAPLMPCGFIFQFQLLTSWGDPYYIGLTGLELYDERGEKIPLSENNIAAFPDSVNSLEGVGGDVRTPDKLIDQVNDTSDGRHMWLAPILPGLVNRVYVIFDLPTTVSMIKLWNYAKTPHRGVKEFGLLVDDLLVYNGILAMVSHLVGGILPTCEPTVPYHTILFTEDRDIRHQEKHTTISNQAEDQDVQMMNENQIITNAKRKQSVVDPALRPKTCISEKETRRRRC

SEQ ID NO: 1918 - protein, 1118 aa, Homo sapiens
MARSPGRAYALLLLLICFNVGSGLHLQVLSTRNENKLLPKHPHLVRQKRAWITAPVALREGEDLSKKNPIAKIHSDLAEERGLKITYKYTGKGITEPPFGIFVFNKDTGELNVTSILDREETPFFLLTGYALDARGNNVEKPLELRIKVLDINDNEPVFTQDVFVGSVEELSAAHTLVMKINATDADEPNTLNSKISYRIVSLEPAYPPVFYLNKDTGEIYTTSVTLDREEHSSYTLTVEARDGNGEVTDKPVKQAQVQIRILDVNDNIPVVENKVLEGMVEENQVNVEVTRIKVFDADEIGSDNWLANFTFASGNEGGYFHIETDAQTNEGIVTLIKEVDYEEMKNLDFSVIVANKAAFHKSIRSKYKPTPIPIKVKVKNVKEGIHFKSSVISIYVSESMDRSSKGQIIGNFQAFDEDTGLPAHARYVKLEDRDNWISVDSVTSEIKLAKLPDFESRYVQNGTYTVKIVAISEDYPRKTITGTVLINVEDINDNCPTLIEPVQTICHDAEYVNVTAEDLDGHPNSGPFSFSVIDKPPGMAEKWKIARQESTSVLLQQSEKKLGRSEIQFLISDNQGFSCPEKQVLTLTVCECLHGSGCREAQHDSYVGLGPAAIALMILAFLLLLLVPLLLLMCHCGKGAKGFTPIPGTIEMLHPWNNEGAPPEDKVVPSFLPVDQGGSLVGRNGVGGMAKEATMKGSSSASIVKGQHEMSEMDGRWEEHRSLLSGRATQFTGATGAIMTTETTKTARATGASRDMAGAQAAAVALNEEFLRNYFTDKAASYTEEDENHTAKDCLLVYSQEETESLNASIGCCSFIEGELDDRFLDDLGLKFKTLAEVCLGQKIDINKEIEQRQKPATETSMNTASHSLCEQTMVNSENTYSSGSSFPVPKSLQEANAEKVTQEIVTERSVSSRQAQKVATPLPDPMASRNVIATETSYVTGSTMPPTTVILGPSQPQSLIVTERVYAPASTLVDQPYANEGTVVVTERVIQPHGGGSNPLEGTQHLQDVPYVMVRERESFLAPSSGVQPTLAMPNIAVGQNVTVTERVLAPASTLQSSYQIPTENSMTARNTTVSGAGVPGPLPDFGLEESGHSNSTITTSSTRVTKHSTVQHSYS

SEQ ID NO: 1919 - protein, 896 aa, Homo sapiens
MNYVGQLAGQVIVTVKELYKGINQATLSGCIDVIVVQQQDGSYQCSPFHVRFGKLGVLRSKEKVIDIEINGSAVDLHMKLGDNGEAFFVEETEEEYEKLPAYLATSPIPTEDQFFKDIDTPLVKSGGDETPSQSSDISHVLETETIFTPSSVKKKKRRRKKYKQDSKKEEQAASAAAEDTCDVGVSSDDDKGAQAARGSSNASLKEEECKEPLLFHSGDHYPLSDGDWSPLETTYPQTACPKSDSELEVKPAESLLRSESHMEWTWGGFPESTKVSKRERSDHHPRTATITPSENTHFRVIPSEDNLISEVEKDASMEDTVCTIVKPKPRALGTQMSDPTSVAELLEPPLESTQISSMLDADHLPNAALAEAPSESKPAAKVDSPSKKKGVHKRSQHQGPDDIYLDDLKGLEPEVAALYFPKSESEPGSRQWPESDTLSGSQSPQSVGSAAADSGTECLSDSAMDLPDVTLSLCGGLSENGEISKEKFMEHIITYHEFAENPGLIDNPNLVIRIYNRYYNWALAAPMILSLQVFQKSLPKATVESWVKDKMPKKSGRWWFWRKRESMTKQLPESKEGKSEAPPASDLPSSSKEPAGARPAENDSSSDEGSQELEESITVDPIPTEPLSHGSTTSYKKSLRLSSDQIAKLKLHDGPNDVVFSITTQYQGTCRCAGTIYLWNWNDKIIISDIDGTITKSDALGQILPQLGKDWTHQGIAKLYHSINENGYKFLYCSARAIGMADMTRGYLHWVNDKGTILPRGPLMLSPSSLFSAFHREVIEKKPEKFKIECLNDIKNLFAPSKQPFYAAFGNRPNDVYAYTQVGVPDCRIFTVNPKGELIQERTKGNKSSYHRLSELVEHVFPLLSKEQNSAFPCPEFSSFCYWRDPIPEVDLDDLS

SEQ ID NO: 1920 - protein, 657 aa, Homo sapiens
MSPTPPLFSLPEARTRFTKSTREALNNKNIKPLLSTFSQVPGSENEKKCTLDQAFRGILEEEIINHSSCENVLAIISLAIGGVTEGICTASTPFVLLGDVLDCLPLDQCDTIFTFVEKNVATWKSNTFYSAGKNYLLRMCNDLLRRLSKSQNTVFCGRIQLFLARLFPLSEKSGLNLQSQFNLENVTVFNTNEQESTLGQKHTEDREEGMDVEEGEMGDEEAPTTCSIPIDYNLYRKFWSLQDYFRNPVQCYEKISWKTFLKYSEEVLAVFKSYKLDDTQASRKKMEELKTGGEHVYFAKFLTSEKLMDLQLSDSNFRRHILLQYLILFQYLKGQVKFKSSNYVLTDEQSLWIEDTTKSVYQLLSENPPDGERFSKMVEHILNTEENWNSWKNEGCPSFVKERTSDTKPTRIIRKRTAPEDFLGKGPTKKILMGNEELTRLWNLCPDNMEACKSETREHMPTLEEFFEEAIEQADPENMVENEYKAVNNSNYGWRALRLLARRSPHFFQPTNQQFKSLPEYLENMVIKLAKELPPPSEEIKTGEDEDEEDNDALLKENESPDVRRDKPVTGEQIEVFANKLGEQWKILAPYLEMKDSEIRQIECDSEDMKMRAKQLLVAWQDQEGVHATPENLINALNKSGLSDLAESLTNDNETNS

SEQ ID NO: 1921 - protein, 494 aa, Homo sapiens
MPLYSVTVKWGKEKFEGVELNTDEPPMVFKAQLFALTGVQPARQKVMVKGGTLKDDDWGNIKIKNGMTLLMMGSADALPEEPSAKTVFVEDMTEEQLASAMELPCGLTNLGNTCYMNATVQCIRSVPELKDALKRYAGALRASGEMASAQYITAALRDLFDSMDKTSSSIPPIILLQFLHMAFPQFAEKGEQGQYLQQDANECWIQMMRVLQQKLEAIEDDSVKETDSSSASAATPSKKKSLIDQFFGVEFETTMKCTESEEEEVTKGKENQLQLSCFINQEVKYLFTGLKLRLQEEITKQSPTLQRNALYIKSSKISRLPAYLTIQMVRFFYKEKESVNAKVLKDVKFPLMLDMYELCTPELQEKMVSFRSKFKDLEDKKVNQQPNTSDKKSSPQKEVKYEPFSFADDIGSNNCGYYDLQAVLTHQGRSSSSGHYVSWVKRKQDEWIKFDDDKVSIVTPEDILRLSGGGDWHIAYVLLYGPRRVEIMEEESEQ

SEQ ID NO: 1922 - protein, 1589 aa, Homo sapiens
MSLPFYQRCHQHYDLSYRNKDVRSTVSHYQREKKRSAVYTQGSTAYSSRSSAAHRRESEAFRRASASSSQQQASQHALSSEVSRKAASAYDYGSSHGLTDSSLLLDDYSSKLSPKPKRAKHSLLSGEEKENLPSDYMVPIFSGRQKHVSGITDTEEERIKEAAAYIAQRNLLASEEGITTSKQSTASKQTTASKQSTASKQSTASKQSTASRQSTASRQSVVSKQATSALQQEETSEKKSRKVVIREKAERLSLRKTLEETETYHAKLNEDHLLHAPEFIIKPRSHTVWEKENVKLHCSIAGWPEPRVTWYKNQVPINVHANPGKYIIESRYGMHTLEINGCDFEDTAQYRASAMNVKGELSAYASVVVKRYKGEFDETRFHAGASTMPLSFGVTPYGYASRFEIHFDDKFDVSFGREGETMSLGCRVVITPEIKHFQPEIQWYRNGVPLSPSKWVQTLWSGERATLTFSHLNKEDEGLYTIRVRMGEYYEQYSAYVFVRDADAEIEGAPAAPLDVKCLEANKDYIIISWKQPAVDGGSPILGYFIDKCEVGTDSWSQCNDTPVKFARFPVTGLIEGRSYIFRVRAVNKMGIGFPSRVSEPVAALDPAEKARLKSRPSAPWTGQIIVTEEEPSEGIVPGPPTDLSVTEATRSYVVLSWKPPGQRGHEGIMYFVEKCEAGTENWQRVNTELPVKSPRFALFDLAEGKSYCFRVRCSNSAGVGEPSEATEVTVVGDKLDIPKAPGKIIPSRNTDTSVVVSWEESKDAKELVGYYIEASVAGSGKWEPCNNNPVKGSRFTCHGLVTGQSYIFRVRAVNAAGLSEYSQDSEAIEVKAAIAPPSPPCDITCLESFRDSMVLGWKQPDKIGGAEITGYYVNYREVIDGVPGKWREANVKAVSEEAYKISNLKENMVYQFQVAAMNMAGLGAPSAVSECFKCEEWTIAVPGPPHSLKCSEVRKDSLVLQWKPPVHSGRTPVTGYFVDLKEAKAKEDQWRGLNEAAIKNVYLKVRGLKEGVSYVFRVRAINQAGVGKPSDLAGPVVAETRPGTKEVVVNVDDDGVISLNFECDKMTPKSEFSWSKDYVSTEDSPRLEVESKGNKTKMTFKDLGMDDLGIYSCDVTDTDGIASSYLIDEEELKRLLALSHEHKFPTVPVKSELAVEILEKGQVRFWMQAEKLSGNAKVNYIFNEKEIFEGPKYKMHIDRNTGIIEMFMEKLQDEDEGTYTFQLQDGKATNHSTVVLVGDVFKKLQKEAEFQRQEWIRKQGPHFVEYLSWEVTGECNVLLKCKVANIKKETHIVWYKDEREISVDEKHDFKDGICTLLITEFSKKDAGIYEVILKDDRGKDKSRLKLVDEAFKELMMEVCKKIALSATDLKIQSTAEGIQLYSFVTYYVEDLKVNWSHNGSAIRYSDRVKTGVTGEQIWLQINEPTPNDKGKYVMELFDGKTGHQKTVDLSGQAYDEAYAEFQRLKQAAIAEKNRARVLGGLPDVVTIQEGKALNLTCNVWGDPPPEVSWLKNEKALASDDHCNLKFEAGRTAYFTINGVSTADSGKYGLVVKNKYGSETSDFTVSVFIPEEEARMAALESLKGGKKAK

SEQ ID NO: 1923 - protein, 411 aa, Homo sapiens
MWSGWWLWPLVAVCTADFFRDEAERIMRDSPVIDGHNDLPWQLLDMFNNRLQDERANLTTLAGTHTNIPKLRAGFVGGQFWSVYTPCDTQNKDAVRRTLEQMDVVHRMCRMYPETFLYVTSSAGIRQAFREGKVASLIGVEGGHSIDSSLGVLRALYQLGMRYLTLTHSCNTPWADNWLVDTGDSEPQSQGLSPFGQRVVKELNRLGVLIDLAHVSVATMKATLQLSRAPVIFSHSSAYSVCASRRNVPDDVLRLVKQTDSLVMVNFYNNYISCTNKANLSQVADHLDHIKEVAGARAVGFGGDFDGVPRVPEGLEDVSKYPDLIAELLRRNWTEAEVKGALADNLLRVFEAVEQASNLTQAPEEEPIPLDQLGGSCRTHYGYSSGASSLHRHWGLLLASLAPLVLCLSLL

SEQ ID NO: 1924 - protein, 507 aa, Homo sapiens
MAGAGPKRRALAAPAAEEKEEAREKMLAAKSADGSAPAGEGEGVTLQRNITLLNGVAIIVGTIIGSGIFVTPTGVLKEAGSPGLALVVWAACGVFSIVGALCYAELGTTISKSGGDYAYMLEVYGSLPAFLKLWIELLIIRPSSQYIVALVFATYLLKPLFPTCPVPEEAAKLVACLCVLLLTAVNCYSVKAATRVQDAFAAAKLLALALIILLGFVQIGKGDVSNLDPNFSFEGTKLDVGNIVLALYSGLFAYGGWNYLNFVTEEMINPYRNLPLAIIISLPIVTLVYVLTNLAYFTTLSTEQMLSSEAVAVDFGNYHLGVMSWIIPVFVGLSCFGSVNGSLFTSSRLFFVGSREGHLPSILSMIHPQLLTPVPSLVFTCVMTLLYAFSKDIFSVINFFSFFNWLCVALAIIGMIWLRHRKPELERPIKVNLALPVFFILACLFLIAVSFWKTPVECGIGFTIILSGLPVYFFGVWWKNKPKWLLQGIFSTTVLCQKLMQVVPQET

SEQ ID NO: 1925 - protein, 195 aa, Homo sapiens
MGQIEWAMWANEQALASGLILITGGIVATAGRFTQWYFGAYSIVAGVFVCLLEYPRGKRKKGSTMERWGQKYMTAVVKLFGPFTRNYYVRAVLHLLLSVPAGFLLATILGTACLAIASGIYLLAAVRGEQWTPIEPKPRERPQIGGTIKQPPSNPPPRPPAEARKKPSEEEAAVAAGGPPGGPQVNPIPVTDEVV

SEQ ID NO: 1926 - protein, 181 aa, Homo sapiens
MGGFFSSIFSSLFGTREMRILILGLDGAGKTTILYRLQVGEVVTTIPTIGFNVETVTYKNLKFQVWDLGGQTSIRPYWRCYYSNTDAVIYVVDSCDRDRIGISKSELVAMLEEEELRKAILVVFANKQDMEQAMTSSEMANSLGLPALKDRKWQIFKTSATKGTGLDEAMEWLVETLKSRQ

SEQ ID NO: 1927 - protein, 2785 aa, Homo sapiens
MKTKPVSHKTENTYRFLTFAERLGNVNIDIIHRIDRTASYEEEVETYFFEGLLKWRELNLTEHFGKFYKEVIDKCQSFNQLVYHQNEIVQSLKTHLQVKNSFAYQPLLDLVVQLARDLQMDFYPHFPEFFLTITSILETQDTELLEWAFTSLSYLYKYLWRLMVKDMSSIYSMYSTLLAHKKLHIRNFAAESFTFLMRKVSDKNALFNLMFLDLDKHPEKVEGVGQLLFEMCKGVRNMFHSCTGQAVKLILRKLGPVTETETQLPWMLIGETLKNMVKSTVSYISKEHFGTFFECLQESLLDLHTKVTKTNCCESSEQIKRLLETYLILVKHGSGTKIPTPADVCKVLSQTLQVASLSTSCWETLLDVISALILGENVSLPETLIKETIEKIFESRFEKRLIFSFSEVMFAMKQFEQLFLPSFLSYIVNCFLIDDAVVKDEALAILAKLILNKAAPPTAGSMAIEKYPLVFSPQMVGFYIKQKKTRSKGRNEQFPVLDHLLSIIKLPPNKDTTYLSQSWAALVVLPHIRPLEKEKVIPLVTGFIEALFMTVDKGSFGKGNLFVLCQAVNTLLSLEESSELLHLVPVERVKNLVLTFPLEPSVLLLTDLYYQRLALCGCKGPLSQEALMELFPKLQANISTGVSKIRLLTIRILNHFDVQLPESMEDDGLSERQSVFAILRQAELVPATVNDYREKLLHLRKLRHDVVQTAVPDGPLQEVPLRYLLGMLYINFSALWDPVIELISSHAHEMENKQFWKVYYEHLEKAATHAEKELQNDMTDEKSVGDESWEQTQEGDVGALYHEQLALKTDCQERLDHTNFRFLLWRALTKFPERVEPRSRELSPLFLRFINNEYYPADLQVAPTQDLRRKGKGMVAEEIEEEPAAGDDEELEEEAVPQDESSQKKKTRRAAAKQLIAHLQVFSKFSNPRALYLESKLYELYLQLLLHQDQMVQKITLDCIMTYKHPHVLPYRENLQRLLEDRSFKEEIVHFSISEDNAVVKTAHRADLFPILMRILYGRMKNKTGSKTQGKSASGTRMAIVLRFLAGTQPEEIQIFLDLLFEPVRHFKNGECHSAVIQAVEDLDLSKVLPLGRQHGILNSLEIVLKNISHLISAYLPKILQILLCMTATVSHILDQREKIQLRFINPLKNLRRLGIKMVTDIFLDWESYQFRTEEIDAVFHGAVWPQISRLGSESQYSPTPLLKLISIWSRNARYFPLLAKQKPGHPECDILTNVFAILSAKNLSDATASIVMDIVDDLLNLPDFEPTETVLNLLVTGCVYPGIAENIGESITIGGRLILPHVPAILQYLSKTTISAEKVKKKKNRAQVSKELGILSKISKFMKDKEQSSVLITLLLPFLHRGNIAEDTEVDILVTVQNLLKHCVDPTSFLKPIAKLFSVIKNKLSRKLLCTVFETLSDFESGLKYITDVVKLNAFDQRHLDDINFDVRFETFQTITSYIKEMQIVDVNYLIPVMHNCFYNLELGDMSLSDNASMCLMSIIKKLAALNVTEKDYREIIHRSLLEKLRKGLKSQTESIQQDYTTILSCLIQTFPNQLEFKDLVQLTHYHDPEMDFFENMKHIQIHRRARALKKLAKQLMEGKVVLSSKSLQNYIMPYAMTPIFDEKMLKHENITTAATEIIGAICKHLSWSAYMYYLKHFIHVLQTGQINQKLGVSLLVIVLEAFHFDHKTLEEQMGKIENEENAIEAIELPEPEAMELERVDEEEKEYTCKSLSDNGQPGTPDPADSGGTSAKESECITKPVSFLPQNKEEIERTIKNIQGTITGDILPRLHKCLASTTKREEEHKLVKSKVVNDEEVVRVPLAFAMVKLMQSLPQEVMEANLPSILLKVCALLKNRAQEIRDIARSTLAKIIEDLGVHFLLYVLKELQTTLVRGYQVHVLTFTVHMLLQGLTNKLQVGDLDSCLDIMIEIFNHELFGAVAEEKEVKQILSKVMEARRSKSYDSYEILGKFVGKDQVTKLILPLKEILQNTTSLKLARKVHETLRRITVGLIVNQEMTAESILLLSYGLISENLPLLTEKEKNPVAPAPDPRLPPQSCLLLPPTPVRGGQKAVVSRKTNMHIFIESGLRLLHLSLKTSKIKSSGECVLEMLDPFVSLLIDCLGSMDVKVITGALQCLIWVLRFPLPSIETKAEQLTKHLFLLLKDYAKLGAARGQNFHLVVNCFKCVTILVKKVKSYQITEKQLQVLLAYAEEDIYDTSRQATAFGLLKAILSRKLLVPEIDEVMRKVSKLAVSAQSEPARVQCRQVFLKYILDYPLGDKLRPNLEFMLAQLNYEHETGRESTLEMIAYLFDTFPQGLLHENCGMFFIPLCLMTINDDSATCKKMASMTIKSLLGKISLEKKDWLFDMVTTWFGAKKRLNRQLAALICGLFVESEGVDFEKRLGTVLPVIEKEIDPENFKDIMEETEEKAADRLLFSFLTLITKLIKECNIIQFTKPAETLSKIWSHVHSHLRHPHNWVWLTAAQIFGLLFASCQPEELIQKWNTKKTKKHLPEPVAIKFLASDLDQKMKSISLASCHQLHSKFLDQSLGEQVVKNLLFAAKVLYLLELYCEDKQSKIKEDLEEQEALEDGVACADEKAESDGEEKEEVKEELGRPATLLWLIQKLSRIAKLEAAYSPRNPLKRTCIFKFLGAVAMDLGIDKVKPYLPMIIAPLFRELNSTYSEQDPLLKNLSQEIIELLKKLVGLESFSLAFASVQKQANEKRALRKKRKALEFVTNPDIAAKKKMKKHKNKSEAKKRKIEFLRPGYKAKRQKSHSLKDLAMVE

SEQ ID NO: 1928 - protein, 443 aa, Homo sapiens
MAASPHTLSSRLLTGCVGGSVWYLERRTIQDSPHKFLHLLRNVNKQWITFQHFSFLKRMYVTQLNRSHNQQVRPKPEPVASPFLEKTSSGQAKAEIYEMRPLSPPSLSLSRKPNEKELIELEPDSVIEDSIDVGKETKEEKRWKEMKLQVYDLPGILARLSKIKLTALVVSTTAAGFALAPGPFDWPCFLLTSVGTGLASCAANSINQFFEVPFDSNMNRTKNRPLVRGQISPLLAVSFATCCAVPGVAILTLGVNPLTGALGLFNIFLYTCCYTPLKRISIANTWVGAVVGAIPPVMGWTAATGSLDAGAFLLGGILYSWQFPHFNALSWGLREDYSRGGYCMMSVTHPGLCRRVALRHCLALLVLSAAAPVLDITTWTFPIMALPINAYISYLGFRFYVDADRRSSRRLFFCSLWHLPLLLLLMLTCKRPSGGGDAGPPPS

SEQ ID NO: 1929 - protein, 1147 aa, Homo sapiens
MDEPPFSEAALEQALGEPCDLDAALLTDIEDMLQLINNQDSDFPGLFDPPYAGSGAGGTDPASPDTSSPGSLSPPPATLSSSLEAFLSGPQAAPSPLSPPQPAPTPLKMYPSMPAFSPGPGIKEESVPLSILQTPTPQPLPGALLPQSFPAPAPPQFSSTPVLGYPSPPGGFSTGSPPGNTQQPLPGLPLASPPGVPPVSLHTQVQSVVPQQLLTVTAAPTAAPVTTTVTSQIQQVPVLLQPHFIKADSLLLTAMKTDGATVKAAGLSPLVSGTTVQTGPLPTLVSGGTILATVPLVVDAEKLPINRLAAGSKAPASAQSRGEKRTAHNAIEKRYRSSINDKIIELKDLVVGTEAKLNKSAVLRKAIDYIRFLQHSNQKLKQENLSLRTAVHKSKSLKDLVSACGSGGNTDVLMEGVKTEVEDTLTPPPSDAGSPFQSSPLSLGSRGSGSGGSGSDSEPDSPVFEDSKAKPEQRPSLHSRGMLDRSRLALCTLVFLCLSCNPLASLLGARGLPSPSDTTSVYHSPGRNVLGTESRDGPGWAQWLLPPVVWLLNGLLVLVSLVLLFVYGEPVTRPHSGPAVYFWRHRKQADLDLARGDFAQAAQQLWLALRALGRPLPTSHLDLACSLLWNLIRHLLQRLWVGRWLAGRAGGLQQDCALRVDASASARDAALVYHKLHQLHTMGKHTGGHLTATNLALSALNLAECAGDAVSVATLAEIYVAAALRVKTSLPRALHFLTRFFLSSARQACLAQSGSVPPAMQWLCHPVGHRFFVDGDWSVLSTPWESLYSLAGNPVDPLAQVTQLFREHLLERALNCVTQPNPSPGSADGDKEFSDALGYLQLLNSCSDAAGAPAYSFSISSSMATTTGVDPVAKWWASLTAVVIHWLRRDEEAAERLCPLVEHLPRVLQESERPLPRAALHSFKAARALLGCAKAESGPASLTICEKASGYLQDSLATTPASSSIDKAVQLFLCDLLLVVRTSLWRQQQPPAPAPAAQGTSSRPQASALELRGFQRDLSSLRRLAQSFRPAMRRVFLHEATARLMAGASPTRTHQLLDRSLRRRAGPGGKGGAVAELEPRPTRREHAEALLLASCYLPPGFLSAPGQRVGMLAEAARTLEKLGDRRLLHDCQQMLMRLGGGTTVTSS

SEQ ID NO: 1930 - protein, 380 aa, Homo sapiens
MFRLLSWSLGRGFLRAAGRRCRGCSARLLPGLAGGPGPEVQVPPSRVAPHGRGPGLLPLLAALAWFSRPAAAEEEEQQGADGAAAEDGADEAEAEIIQLLKRAKLSIMKDEPEEAELILHDALRLAYQTDNKKAITYTYDLMANLAFIRGQLENAEQLFKATMSYLLGGGMKQEDNAIIEISLKLASIYAAQNRQEFAVAGYEFCISTLEEKIEREKELAEDIMSVEEKANTHLLLGMCLDACARYLLFSKQPSQAQRMYEKALQISEEIQGERHPQTIVLMSDLATTLDAQGRFDEAYIYMQRASDLARQINHPELHMVLSNLAAVLMHRERYTQAKEIYQEALKQAKLKKDEISVQHIREELAELSKKSRPLTNSVKL

SEQ ID NO: 1931 - protein, 287 aa, Homo sapiens
MRDRLPDLTACRKNDDGDTVVVVEKDHFMDDFFHQVEEIRNSIDKITQYVEEVKKNHSIILSAPNPEGKIKEELEDLNKEIKKTANKIRAKLKAIEQSFDQDESGNRTSVDLRIRRTQHSVLSRKFVEAMAEYNEAQTLFRERSKGRIQRQLEITGRTTTDDELEEMLESGKPSIFTSDIISDSQITRQALNEIESRHKDIMKLETSIRELHEMFMDMAMFVETQGEMINNIERNVMNATDYVEHAKEETKKAIKYQSKARRKLMFIIICVIVLLVILGIILATTLS

SEQ ID NO: 1932 - protein, 874 aa, Homo sapiens
MEKLLRLCCWYSWLLLFYYNFQVRGVYSRSQDHPGFQVLASASHYWPLENVDGIHELQDTTGDIVEGKVNKGIYLKEEKGVTLLYYGRYNSSCISKPEQCGPEGVTFSFFWKTQGEQSRPIPSAYGGQVISNGFKVCSSGGRGSVELYTRDNSMTWEASFSPPGPYWTHVLFTWKSKEGLKVYVNGTLSTSDPSGKVSRDYGESNVNLVIGSEQDQAKCYENGAFDEFIIWERALTPDEIAMYFTAAIGKHALLSSTLPSLFMTSTASPVMPTDAYHPIITNLTEERKTFQSPGVILSYLQNVSLSLPSKSLSEQTALNLTKTFLKAVGEILLLPGWIALSEDSAVVLSLIDTIDTVMGHVSSNLHGSTPQVTVEGSSAMAEFSVAKILPKTVNSSHYRFPAHGQSFIQIPHEAFHRHAWSTVVGLLYHSMHYYLNNIWPAHTKIAEAMHHQDCLLFATSHLISLEVSPPPTLSQNLSGSPLITVHLKHRLTRKQHSEATNSSNRVFVYCAFLDFSSGEGVWSNHGCALTRGNLTYSVCRCTHLTNFAILMQVVPLELARGHQVALSSISYVGCSLSVLCLVATLVTFAVLSSVSTIRNQRYHIHANLSFAVLVAQVLLLISFRLEPGTTPCQVMAVLLHYFFLSAFAWMLVEGLHLYSMVIKVFGSEDSKHRYYYGMGWGFPLLICIISLSFAMDSYGTSNNCWLSLASGAIWAFVAPALFVIVVNIGILIAVTRVISQISADNYKIHGDPSAFKLTAKAVAVLLPILGTSWVFGVLAVNGCAVVFQYMFATLNSLQGLFIFLFHCLLNSEVRAAFKHKTKVWSLTSSSARTSNAKPFHSDLMNGTRPGMASTKLSPWDKSSHSAHRVDLSAV

SEQ ID NO: 1933 - protein, 450 aa, Homo sapiens
MEEPQKSYVNTMDLERDEPLKSTGPQISVSEFSCHCCYDILVNPTTLNCGHSFCRHCLALWWASSKKTECPECREKWEGFPKVSILLRDAIEKLFPDAIRLRFEDIQQNNDIVQSLAAFQKYGNDQIPLAPNTGRANQQMGGGFFSGVLTALTGVAVVLLVYHWSSRESEHDLLVHKAVAKWTAEEVVLWLEQLGPWASLYRERFLSERVNGRLLLTLTEEEFSKTPYTIENSSHRRAILMELERVKALGVKPPQNLWEYKAVNPGRSLFLLYALKSSPRLSLLYLYLFDYTDTFLPFIHTICPLQEDSSGEDIVTKLLDLKEPTWKQWREFLVKYSFLPYQLIAEFAWDWLEVHYWTSRFLIINAMLLSVLELFSFWRIWSRSELKTVPQRMWSHFWKVSTQGLFVAMFWPLIPQFVCNCLFYWALYFNPIINIDLVVKELRRLETQVL

SEQ ID NO: 1934 - protein, 521 aa, Homo sapiens
MAENPSLENHRIKSFKNKGRDVETMRRHRNEVTVELRKNKRDEHLLKKRNVPQEESLEDSDVDADFKAQNVTLEAILQNATSDNPVVQLSAVQAARKLLSSDRNPPIDDLIKSGILPILVKCLERDDNPSLQFEAAWALTNIASGTSAQTQAVVQSNAVPLFLRLLRSPHQNVCEQAVWALGNIIGDGPQCRDYVISLGVVKPLLSFISPSIPITFLRNVTWVIVNLCRNKDPPPPMETVQEILPALCVLIYHTDINILVDTVWALSYLTDGGNEQIQMVIDSGVVPFLVPLLSHQEVKVQTAALRAVGNIVTGTDEQTQVVLNCDVLSHFPNLLSHPKEKINKEAVWFLSNITAGNQQQVQAVIDAGLIPMIIHQLAKGDFGTQKEAAWAISNLTISGRKDQVEYLVQQNVIPPFCNLLSVKDSQVVQVVLDGLKNILIMAGDEASTIAEIIEECGGLEKIEVLQQHENEDIYKLAFEIIDQYFSGDDIDEDPCLIPEATQGGTYNFDPTANLQTKEFNF

SEQ ID NO: 1935 - protein, 337 aa, Homo sapiens
MKKMPLFSKSHKNPAEIVKILKDNLAILEKQDKKTDKASEEVSKSLQAMKEILCGTNEKEPPTEAVAQLAQELYSSGLLVTLIADLQLIDFEGKKDVTQIFNNILRRQIGTRSPTVEYISAHPHILFMLLKGYEAPQIALRCGIMLRECIRHEPLAKIILFSNQFRDFFKYVELSTFDIASDAFATFKDLLTRHKVLVADFLEQNYDTIFEDYEKLLQSENYVTKRQSLKLLGELILDRHNFAIMTKYISKPENLKLMMNLLRDKSPNIQFEAFHVFKVFVASPHKTQPIVEILLKNQPKLIEFLSSFQKERTDDEQFADEKNYLIKQIRDLKKTAP

SEQ ID NO: 1936 - protein, 951 aa, Homo sapiens
MYGASGGRAKPERKSGAKEEAGPGGAGGGGSRVELLVFGYACKLFRDDERALAQEQGQHLIPWMGDHKILIDRYDGRGHLHDLSEYDAEYSTWNRDYQLSEEEARIEALCDEERYLALHTDLLEEEARQEEEYKRLSEALAEDGSYNAVGFTYGSDYYDPSEPTEEEEPSKQREKNEAENLEENEEPFVAPLGLSVPSDVELPPTAKMHAIIERTASFVCRQGAQFEIMLKAKQARNSQFDFLRFDHYLNPYYKFIQKAMKEGRYTVLAENKSDEKKKSGVSSDNEDDDDEEDGNYLHPSLFASKKCNRLEELMKPLKVVDPDHPLAALVRKAQADSSTPTPHNADGAPVQPSQVEYTADSTVAAMYYSYYMLPDGTYCLAPPPPGIDVTTYYSTLPAGVTVSNSPGVTTTAPPPPGTTPLPPPTTAETSSGATSTTTTTSALAPVAAIIPPPPDVQPVIDKLAEYVARNGLKFETSVRAKNDQRFEFLQPWHQYNAYYEFKKQFFLQKEGGDSMQAVSAPEEAPTDSAPEKPSDAGEDGAPEDAAEVGARAGSGGKKEASSSKTVPDGKLVKASFAPISFAIKAKENDLLPLEKNRVKLDDDSDDDEESKEGQESSSSAANTNPAVAPPCVVVEEKKPQLTQEELEAKQAKQKLEDRLAAAAREKLAQASKESKEKQLQAERKRKAALFLQTLKNPLPEAEAGKIEESPFSVEESSTTPCPLLTGGRPLPTLEVKPPDRPSSKSKDPPREEEKEKKKKKHKKRSRTRSRSPKYHSSSKSRSRSHSKAKHSLPSAYRTVRRSRSRSRSPRRRAHSPERRREERSVPTAYRVSRSPGASRKRTRSRSPHEKKKKRRSRSRTKSKARSQSVSPSKQAAPRPAAPAAHSAHSASVSPVESRGSSQERSRGVSQEKEAQISSAIVSSVQSKITQDLMAKVRAMLAASKNLQTSAS

SEQ ID NO: 1937 - protein, 675 aa, Homo sapiens
MTTSHMNGHVTEESDSEVKNVDLASPEEHQKHREMAVDCPGDLGTRMMPIRRSAQLERIRQQQEDMRRRREEEGKKQELDLNSSMRLKKLAQIPPKTGIDNPMFDTEEGIVLESPHYAVKILEIEDLFSSLKHIQHTLVDSQSQEDISLLLQLVQNKDFQNAFKIHNAITVHMNKASPPFPLISNAQDLAQEVQTVLKPVHHKEGQELTALLNTPHIQALLLAHDKVAEQEMQLEPITDERVYESIGQYGGETVKIVRIEKARDIPLGATVRNEMDSVIISRIVKGGAAEKSGLLHEGDEVLEINGIEIRGKDVNEVFDLLSDMHGTLTFVLIPSQQIKPPPAKETVIHVKAHFDYDPSDDPYVPCRELGLSFQKGDILHVISQEDPNWWQAYREGDEDNQPLAGLVPGKSFQQQREAMKQTIEEDKEPEKSGKLWCAKKNKKKRKKVLYNANKNDDYDNEEILTYEEMSLYHQPANRKRPIILIGPQNCGQNELRQRLMNKEKDRFASAVPHTTRSRRDQEVAGRDYHFVSRQAFEADIAAGKFIEHGEFEKNLYGTSIDSVRQVINSGKICLLSLRTQSLKTLRNSDLKPYIIFIAPPSQERLRALLAKEGKNPKPEELREIIEKTREMEQNNGHYFDTAIVNSDLDKAYQELLRLINKLDTEPQWVPSTWLR

SEQ ID NO: 1938 - protein, 115 aa, Homo sapiens
MSYKPNLAAHMPAAALNAAGSVHSPSTSMATSSQYRQLLSDYGPPSLGYTQGTGNSQVPQSKYAELLAIIEELGKEIRPTYAGSKSAMERLKRGIIHARGLVRECLAETERNARS

SEQ ID NO: 1939 - protein, 244 aa, Homo sapiens
MFRRKLTALDYHNPAGFNCKDETEFRNFIVWLEDQKIRHYKIEDRGNLRNIHSSDWPKFFEKYLRDVNCPFKIQDRQEAIDWLLGLAVRLEYGDNAEKYKDLVPDNSKTADNATKNAEPLINLDVNNPDFKAGVMALANLLQIQRHDDYLVMLKAIRILVQERLTQDAVAKANQTKEGLPVALDKHILGFDTGDAVLNEAAQILRLLHIEELRELQTKINEAIVAVQAIIADPKTDHRLGKVGR

SEQ ID NO: 1940 - protein, 597 aa, Homo sapiens
MAEIIQERIEDRLPELEQLERIGLFSHAEIKAIIKKASDLEYKIQRRTLFKEDFINYVQYEINLLELIQRRRTRIGYSFKKDEIENSIVHRVQGVFQRASAKWKDDVQLWLSYVAFCKKWATKTRLSKVFSAMLAIHSNKPALWIMAAKWEMEDRLSSESARQLFLRALRFHPECPKLYKEYFRMELMHAEKLRKEKEEFEKASMDVENPDYSEEILKGELAWIIYKNSVSIIKGAEFHVSLLSIAQLFDFAKDLQKEIYDDLQALHTDDPLTWDYVARRELEIESQTEEQPTTKQAKAVEVGRKEERCCAVYEEAVKTLPTEAMWKCYITFCLERFTKKSNSGFLRGKRLERTMTVFRKAHELKLLSECQYKQLSVSLLCYNFLREALEVAVAGTELFRDSGTMWQLKLQVLIESKSPDIAMLFEEAFVHLKPQVCLPLWISWAEWSEGAKSQEDTEAVFKKALLAVIGADSVTLKNKYLDWAYRSGGYKKARAVFKSLQESRPFSVDFFRKMIQFEKEQESCNMANIREYYERALREFGSADSDLWMDYMKEELNHPLGRPENCGQIYWRAMKMLQGESAEAFVAKHAMHQTGHL

SEQ ID NO: 1941 - protein, 422 aa, Homo sapiens
MAAAAVVEFQRAQSLLSTDREASIDILHSIVKRDIQENDEEAVQVKEQSILELGSLLAKTGQAAELGGLLKYVRPFLNSISKAKAARLVRSLLDLFLDMEAATGQEVELCLECIEWAKSEKRTFLRQALEARLVSLYFDTKRYQEALHLGSQLLRELKKMDDKALLVEVQLLESKTYHALSNLPKARAALTSARTTANAIYCPPKLQATLDMQSGIIHAAEEKDWKTAYSYFYEAFEGYDSIDSPKAITSLKYMLLCKIMLNTPEDVQALVSGKLALRYAGRQTEALKCVAQASKNRSLADFEKALTDYRAELRDDPIISTHLAKLYDNLLEQNLIRVIEPFSRVQIEHISSLIKLSKADVERKLSQMILDKKFHGILDQGEGVLIIFDEPPVDKTYEAALETIQNMSKVVDSLYNKAKKLT

SEQ ID NO: 1942 - protein, 455 aa, Homo sapiens
MSSSGLNSEKVAALIQKLNSDPQFVLAQNVGTTHDLLDICLKRATVQRAQHVFQHAVPQEGKPITNQKSSGRCWIFSCLNVMRLPFMKKLNIEEFEFSQSYLFFWDKVERCYFFLSAFVDTAQRKEPEDGRLVQFLLMNPANDGGQWDMLVNIVEKYGVIPKKCFPESYTTEATRRMNDILNHKMREFCIRLRNLVHSGATKGEISATQDVMMEEIFRVVCICLGNPPETFTWEYRDKDKNYQKIGPITPLEFYREHVKPLFNMEDKICLVNDPRPQHKYNKLYTVEYLSNMVGGRKTLYNNQPIDFLKKMVAASIKDGEAVWFGCDVGKHFNSKLGLSDMNLYDHELVFGVSLKNMNKAERLTFGESLMTHAMTFTAVSEKDDQDGAFTKWRVENSWGEDHGHKGYLCMTDEWFSEYVYEVVVDRKHVPEEVLAVLEQEPIILPAWDPMGALAE

SEQ ID NO: 1943 - protein, 1001 aa, Homo sapiens
MPSTNRAGSLKDPEIAELFFKEDPEKLFTDLREIGHGSFGAVYFARDVRTNEVVAIKKMSYSGKQSTEKWQDIIKEVKFLQRIKHPNSIEYKGCYLREHTAWLVMEYCLGSASDLLEVHKKPLQEVEIAAITHGALQGLAYLHSHTMIHRDIKAGNILLTEPGQVKLADFGSASMASPANSFVGTPYWMAPEVILAMDEGQYDGKVDVWSLGITCIELAERKPPLFNMNAMSALYHIAQNESPTLQSNEWSDYFRNFVDSCLQKIPQDRPTSEELLKHIFVLRERPETVLIDLIQRTKDAVRELDNLQYRKMKKLLFQEAHNGPAVEAQEEEEEQDHGVGRTGTVNSVGSNQSIPSMSISASSQSSSVNSLPDVSDDKSELDMMEGDHTVMSNSSVIHLKPEEENYREEGDPRTRASDPQSPPQVSRHKSHYRNREHFATIRTASLVTRQMQEHEQDSELREQMSGYKRMRRQHQKQLMTLENKLKAEMDEHRLRLDKDLETQRNNFAAEMEKLIKKHQAAMEKEAKVMSNEEKKFQQHIQAQQKKELNSFLESQKREYKLRKEQLKEELNENQSTPKKEKQEWLSKQKENIQHFQAEEEANLLRRQRQYLELECRRFKRRMLLGRHNLEQDLVREELNKRQTQKDLEHAMLLRQHESMQELEFRHLNTIQKMRCELIRLQHQTELTNQLEYNKRRERELRRKHVMEVRQQPKSLKSKELQIKKQFQDTCKIQTRQYKALRNHLLETTPKSEHKAVLKRLKEEQTRKLAILAEQYDHSINEMLSTQALRLDEAQEAECQVLKMQLQQELELLNAYQSKIKMQAEAQHDRELRELEQRVSLRRALLEQKIEEEMLALQNERTERIRSLLERQAREIEAFDSESMRLGFSNMVLSNLSPEAFSHSYPGASGWSHNPTGGPGPHWGHPMGGPPQAWGHPMQGGPQPWGHPSGPMQGVPRGSSMGVRNSPQALRRTASGGRTEQGMSRSTSVTSQISNGSHMSYT

SEQ ID NO: 1944 - protein, 482 aa, Homo sapiens
MASLGPAAAGEQASGAEAEPGPAGPPPPPSPSSLGPLLPLQREPLYNWQATKASLKERFAFLFNSELLSDVRFVLGKGRGAAAAGGPQRIPAHRFVLAAGSAVFDAMFNGGMATTSAEIELPDVEPAAFLALLRFLYSDEVQIGPETVMTTLYTAKKYAVPALEAHCVEFLTKHLRADNAFMLLTQARLFDEPQLASLCLDTIDKSTMDAISAEGFTDIDIDTLCAVLERDTLSIRESRLFGAVVRWAEAECQRQQLPVTFGNKQKVLGKALSLIRFPLMTIEEFAAGPAQSGILSDREVVNLFLHFTVNPKPRVEYIDRPRCCLRGKECCINRFQQVESRWGYSGTSDRIRFTVNRRISIVGFGLYGSIHGPTDYQVNIQIIEYEKKQTLGQNDTGFSCDGTANTFRVMFKEPIEILPNVCYTACATLKGPDSHYGTKGLKKVVHETPAASKTVFFFFSSPGNNNGTSIEDGQIPEIIFYT

SEQ ID NO: 1945 - protein, 517 aa, Homo sapiens
MLRAAARFGPRLGRRLLSAAATQAVPAPNQQPEVFCNQIFINNEWHDAVSRKTFPTVNPSTGEVICQVAEGDKEDVDKAVKAARAAFQLGSPWRRMDASHRGRLLNRLADLIERDRTYLAALETLDNGKPYVISYLVDLDMVLKCLRYYAGWADKYHGKTIPIDGDFFSYTRHEPVGVCGQIIPWNFPLLMQAWKLGPALATGNVVVMKVAEQTPLTALYVANLIKEAGFPPGVVNIVPGFGPTAGAAIASHEDVDKVAFTGSTEIGRVIQVAAGSSNLKRVTLELGGKSPNIIMSDADMDWAVEQAHFALFFNQGQCCCAGSRTFVQEDIYDEFVERSVARAKSRVVGNPFDSKTEQGPQVDETQFKKILGYINTGKQEGAKLLCGGGIAADRGYFIQPTVFGDVQDGMTIAKEEIFGPVMQILKFKTIEEVVGRANNSTYGLAAAVFTKDLDKANYLSQALQAGTVWVNCYDVFGAQSPFGGYKMSGSGRELGEYGLQAYTEVKTVTVKVPQKNS

SEQ ID NO: 1946 - protein, 261 aa, Homo sapiens
MAAAVPRAAFLSPLLPLLLGFLLLSAPHGGSGLHTKGALPLDTVTFYKVIPKSKFVLVKFDTQYPYGEKQDEFKRLAENSASSDDLLVAEVGISDYGDKLNMELSEKYKLDKESYPVFYLFRDGDFENPVPYTGAVKVGAIQRWLKGQGVYLGMPGCLPVYDALAGEFIRASGVEARQALLKQGQDNLSSVKETQKKWAEQYLKIMGKILDQGEDFPASEMTRIARLIEKNKMSDGKKEELQKSLNILTAFQKKGAEKEEL

SEQ ID NO: 1947 - protein, 590 aa, Homo sapiens
MSSACDAGDHYPLHLLVWKNDYRQLEKELQGQNVEAVDPRGRTLLHLAVSLGHLESARVLLRHKADVTKENRQGWTVLHEAVSTGDPEMVYTVLQHRDYHNTSMALEGVPELLQKILEAPDFYVQMKWEFTSWVPLVSRICPNDVCRIWKSGAKLRVDITLLGFENMSWIRGRRSFIFKGEDNWAELMEVNHDDKVVTTERFDLSQEMERLTLDLMKPKSREVERRLTSPVINTSLDTKNIAFERTKSGFWGWRTDKAEVVNGYEAKVYTVNNVNVITKIRTEHLTEEEKKRYKADRNPLESLLGTVEHQFGAQGDLTTECATANNPTAITPDEYFNEEFDLKDRDIGRPKELTIRTQKFKAMLWMCEEFPLSLVEQVIPIIDLMARTSAHFARLRDFIKLEFPPGFPVKIEIPLFHVLNARITFGNVNGCSTAEESVSQNVEGTQADSASHITNFEVDQSVFEIPESYYVQDNGRNVHLQDEDYEIMQFAIQQSLLESSRSQELSGPASNGGISQTNTYDAQYERAIQESLLTSTEGLCPSALSETSRFDNDLQLAMELSAKELEEWELRLQEEEAELQQVLQLSLTDK

SEQ ID NO: 1948 - protein, 960 aa, Homo sapiens
MSRLIVKNLPNGMKEERFRQLFAAFGTLTDCSLKFTKDGKFRKFGFIGFKSEEEAQKAQKHFNKSFIDTSRITVEFCKSFGDPAKPRAWSKHAQKPSQPKQPPKDSTTPEIKKDEKKKKVAGQLEKLKEDTEFQEFLSVHQRRAQAATWANDGLDAEPSKGKSKPASDYLNFDSDSGQESEEEGAGEDLEEEASLEPKAAVQKELSDMDYLKSKMVKAGSSSSSEEEESEDEAVHCDEGSEAEEEDSSATPVLQERDSKGAGQEQGMPAGKKRPPEARAETEKPANQKEPTTCHTVKLRGAPFNVTEKNVMEFLAPLKPVAIRIVRNAHGNKTGYIFVDFSNEEEVKQALKCNREYMGGRYIEVFREKNVPTTKGAPKNTTKSWQGRILGENEEEEDLAESGRLFVRNLPYTSTEEDLEKLFSKYGPLSELHYPIDSLTKKPKGFAFITFMFPEHAVKAYSEVDGQVFQGRMLHVLPSTIKKEASEDASALGSSSYKKKKEAQDKANSASSHNWNTLFMGPNAVADAIAQKYNATKSQVFDHETKGSVAVRVALGETQLVQEVRRFLIDNGVSLDSFSQAAAERSKTVILVKNLPAGTLAAQLQETFGHFGSLGRVLLPEGGITAIVEFLEPLEARKAFRHLAYSKFHHVPLYLEWAPVGVFSSTAPQKKKLQDTPSEPMEKDPAEPETVPDGETPEDENPTEEGADNSSAKMEEEEEEEEEEEESLPGCTLFIKNLNFDTTEEKLKEVFSKVGTVKSCSISKKKNKAGVLLSMGFGFVEYRKPEQAQKALKQLQGHVVDGHKLEVRISERATKPAVTLARKKQVPRKQTTSKILVRNIPFQAHSREIRELFSTFGELKTVRLPKKMTGTGTHRGFGFVDFLTKQDAKRAFNALCHSTHLYGRRLVLEWADSEVTLQALRRKTAAHFHEPPKKKRSVVLDEILEQLEGSDSDSEEQTLQL

SEQ ID NO: 1949 - protein, 972 aa, Homo sapiens
MATRGHVQDPNDRRLRPIYDYLDNGNNKMAIQQADKLLKKHKDLHCAKVLKAIGLQRTGKQEEAFTLAQEVAALEPTDDNSLQALTILYREMHRPELVTKLYEAAVKKVPNSEEYHSHLFMAYARVGEYKKMQQAGMALYKIVPKNPYYFWSVMSLIMQSISAQDENLSKTMFLPLAERMVEKMVKEDKIEAEAEVELYYMILERLGKYQEALDVIRGKLGEKLTSEIQSRENKCMAMYKKLSRWPECNALSRRLLLKNSDDWQFYLTYFDSVFRLIEEAWSPPAEGEHSLEGEVHYSAEKAVKFIEDRITEESKSSRHLRGPHLAKLELIRRLRSQGCNDEYKLGDPEELMFQYFKKFGDKPCCFTDLKVFVDLLPATQCTKFINQLLGVVPLSTPTEDKLALPADIRALQQHLCVVQLTRLLGLYHTMDKNQKLSVVRELMLRYQHGLEFGKTCLKTELQFSDYYCLLAVHALIDVWRETGDETTVWQALTLLEEGLTHSPSNAQFKLLLVRIYCMLGAFEPVVDLYSSLDAKHIQHDTIGYLLTRYAESLGQYAAASQSCNFALRFFHSNQKDTSEYIIQAYKYGAFEKIPEFIAFRNRLNNSLHFAQVRTERMLLDLLLEANISTSLAESIKSMNLRPEEDDIPWEDLRDNRDLNVFFSWDPKDRDVSEEHKKLSLEEETLWLRIRSLTLRLISGLPSLNHPVEPKNSEKTAENGVSSRIDILRLLLQQLEATLETGKRFIEKDIQYPFLGPVPTRMGGFFNSGCSQCQISSFYLVNDIYELDTSGLEDTMEIQERIENSFKSLLDQLKDVFSKCKGDLLEVKDGNLKTHPTLLENLVFFVETISVILWVSSYCESVLRPYKLNLQKKKKKKKETSIIMPPVFTSFQDYVTGLQTLISNVVDHIKGLETHLIALKLEELILEDTSLSPEERKFSKTVQGKVQSSYLHSLLEMGELLKKRLETTKKLKI

SEQ ID NO: 1950 - protein, 208 aa, Homo sapiens
MAQETNHSQVPMLCSTGCGFYGNPRTNGMCSVCYKEHLQRQNSSNGRISPPATSVSSLSESLPVQCTDGSVPEAQSALDSTSSSMQPSPVSNQSLLSESVASSQLDSTSVDKAVPETEDVQASVSDTAQQPSEEQSKSLEKPKQKKNRCFMCRKKVGLTGFECRCGNVYCGVHRYSDVHNCSYNYKADAAEKIRKENPVVVGEKIQKI

SEQ ID NO: 1951 - protein, 498 aa, Homo sapiens
MRRAPSLVLFFLVALCGRGNCRVANAEEKLMDDLLNKTRYNNLIRPATSSSQLISIKLQLSLAQLISVNEREQIMTTNVWLKQEWTDYRLTWNSSRYEGVNILRIPAKRIWLPDIVLYNNADGTYEVSVYTNLIVRSNGSVLWLPPAIYKSACKIEVKYFPFDQQNCTLKFRSWTYDHTEIDMVLMTPTASMDDFTPSGEWDIVALPGRRTVNPQDPSYVDVTYDFIIKRKPLFYTINLIIPCVLTTLLAILVFYLPSDCGEKMTLCISVLLALTFFLLLISKIVPPTSLDVPLIGKYLMFTMVLVTFSIVTSVCVLNVHHRSPSTHTMAPWVKRCFLHKLPTFLFMKRPGPDSSPARAFPPSKSCVTKPEATATSTSPSNFYGNSMYFVNPASAASKSPAGSTPVAIPRDFWLRSSGRFRQDVQEALEGVSFIAQHMKNDDEDQSVVEDWKYVAMVVDRLFLWVFMFVCVLGTVGLFLPPLFQTHAASEGPYAAQRD

SEQ ID NO: 1952 - protein, 419 aa, Homo sapiens
MSFIPVAEDSDFPIHNLPYGVFSTRGDPRPRIGVAIGDQILDLSIIKHLFTGPVLSKHQDVFNQPTLNSFMGLGQAAWKEARVFLQNLLSVSQARLRDDTELRKCAFISQASATMHLPATIGDYTDFYSSRQHATNVGIMFRDKENALMPNWLHLPVGYHGRASSVVVSGTPIRRPMGQMKPDDSKPPVYGACKLLDMELEMAFFVGPGNRLGEPIPISKAHEHIFGMVLMNDWSARDIQKWEYVPLGPFLGKSFGTTVSPWVVPMDALMPFAVPNPKQDPRPLPYLCHDEPYTFDINLSVNLKGEGMSQAATICKSNFKYMYWTMLQQLTHHSVNGCNLRPGDLLASGTISGPEPENFGSMLELSWKGTKPIDLGNGQTRKFLLDGDEVIITGYCQGDGYRIGFGQCAGKVLPALLPS

SEQ ID NO: 1953 - protein, 234 aa, Homo sapiens
MAASRWARKAVVLLCASDLLLLLLLLPPPGSCAAEGSPGTPDESTPPPRKKKKDIRDYNDADMARLLEQWEKDDDIEEGDLPEHKRPSAPVDFSKIDPSKPESILKMTKKGKTLMMFVTVSGSPTEKETEEITSLWQGSLFNANYDVQRFIVGSDRAIFMLRDGSYAWEIKDFLVGQDRCADVTLEGQVYPGKGGGSKEKNKTKQDKGKKKKEGDLKSRSSKEENRAGNKREDL

SEQ ID NO: 1954 - protein, 882 aa, Homo sapiens
MGPWSRSLSALLLLLQVSSWLCQEPEPCHPGFDAESYTFTVPRRHLERGRVLGRVNFEDCTGRQRTAYFSLDTRFKVGTDGVITVKRPLRFHNPQIHFLVYAWDSTYRKFSTKVTLNTVGHHHRPPPHQASVSGIQAELLTFPNSSPGLRRQKRDWVIPPISCPENEKGPFPKNLVQIKSNKDKEGKVFYSITGQGADTPPVGVFIIERETGWLKVTEPLDRERIATYTLFSHAVSSNGNAVEDPMEILITVTDQNDNKPEFTQEVFKGSVMEGALPGTSVMEVTATDADDDVNTYNAAIAYTILSQDPELPDKNMFTINRNTGVISVVTTGLDRESFPTYTLVVQAADLQGEGLSTTATAVITVTDTNDNPPIFNPTTYKGQVPENEANVVITTLKVTDADAPNTPAWEAVYTILNDDGGQFVVTTNPVNNDGILKTAKGLDFEAKQQYILHVAVTNVVPFEVSLTTSTATVTVDVLDVNEAPIFVPPEKRVEVSEDFGVGQEITSYTAQEPDTFMEQKITYRIWRDTANWLEINPDTGAISTRAELDREDFEHVKNSTYTALIIATDNGSPVATGTGTLLLILSDVNDNAPIPEPRTIFFCERNPKPQVINIIDADLPPNTSPFTAELTHGASANWTIQYNDPTQESIILKPKMALEVGDYKINLKLMDNQNKDQVTTLEVSVCDCEGAAGVCRKAQPVEAGLQIPAILGILGGILALLILILLLLLFLRRRAVVKEPLLPPEDDTRDNVYYYDEEGGGEEDQDFDLSQLHRGLDARPEVTRNDVAPTLMSVPRYLPRPANPDEIGNFIDENLKAADTDPTAPPYDSLLVFDYEGSGSEAASLSSLNSSESDKDQDYDYLNEWGNRFKKLADMYGGGEDD

SEQ ID NO: 1955 - protein, 968 aa, Homo sapiens
MDSTLTASEIRQRFIDFFKRNEHTYVHSSATIPLDDPTLLFANAGMNQFKPIFLNTIDPSHPMAKLSRAANTQKCIRAGGKHNDLDDVGKDVYHHTFFEMLGSWSFGDYFKELACKMALELLTQEFGIPIERLYVTYFGGDEAAGLEADLECKQIWQNLGLDDTKILPGNMKDNFWEMGDTGPCGPCSEIHYDRIGGRDAAHLVNQDDPNVLEIWNLVFIQYNREADGILKPLPKKSIDTGMGLERLVSVLQNKMSNYDTDLFVPYFEAIQKGTGARPYTGKVGAEDADGIDMAYRVLADHARTITVALADGGRPDNTGRGYVLRRILRRAVRYAHEKLNASRGFFATLVDVVVQSLGDAFPELKKDPDMVKDIINEEEVQFLKTLSRGRRILDRKIQSLGDSKTIPGDTAWLLYDTYGFPVDLTGLIAEEKGLVVDMDGFEEERKLAQLKSQGKGAGGEDLIMLDIYAIEELRARGLEVTDDSPKYNYHLDSSGSYVFENTVATVMALRREKMFVEEVSTGQECGVVLDKTCFYAEQGGQIYDEGYLVKVDDSSEDKTEFTVKNAQVRGGYVLHIGTIYGDLKVGDQVWLFIDEPRRRPIMSNHTATHILNFALRSVLGEADQKGSLVAPDRLRFDFTAKGAMSTQQIKKAEEIANEMIEAAKAVYTQDCPLAAAKAIQGLRAVFDETYPDPVRVVSIGVPVSELLDDPSGPAGSLTSVEFCGGTHLRNSSHAGAFVIVTEEAIAKGIRRIVAVTGAEAQKALRKAESLKKCLSVMEAKVKAQTAPNKDVQREIADLGEALATAVIPQWQKDELRETLKSLKKVMDDLDRASKADVQKRVLEKTKQFIDSNPNQPLVILEMESGASAKALNEALKLFKMHSPQTSAMLFTVDNEAGKITCLCQVPQNAANRGLKASEWVQQVSGLMDGKGGGKDVSAQATGKNVGCLQEALQLATSFAQLRLGDVKN

SEQ ID NO: 1956 - protein, 782 aa, Homo sapiens
MNPEKDFAPLTPNIVRALNDKLYEKRKVAALEIEKLVREFVAQNNTVQIKHVIQTLSQEFALSQHPHSRKGGLIGLAACSIALGKDSGLYLKELIEPVLTCFNDADSRLRYYACEALYNIVKVARGAVLPHFNVLFDGLSKLAADPDPNVKSGSELLDRLLKDIVTESNKFDLVSFIPLLRERIYSNNQYARQFIISWILVLESVPDINLLDYLPEILDGLFQILGDNGKEIRKMCEVVLGEFLKEIKKNPSSVKFAEMANILVIHCQTTDDLIQLTAMCWMREFIQLAGRVMLPYSSGILTAVLPCLAYDDRKKSIKEVANVCNQSLMKLVTPEDDELDELRPGQRQAEPTPDDALPKQEGTASGGPDGSCDSSFSSGISVFTAASTERAPVTLHLDGIVQVLNCHLSDTAIGMMTRIAVLKWLYHLYIKTPRKMFRHTDSLFPILLQTLSDESDEVILKDLEVLAEIASSPAGQTDDPGPLDGPDLQASHSELQVPTPGRAGLLNTSGTKGLECSPSTPTMNSYFYKFMINLLKRFSSERKLLEVRGPFIIRQLCLLLNAENIFHSMADILLREEDLKFASTMVHALNTILLTSTELFQLRNQLKDLKTLESQNLFCCLYRSWCHNPVTTVSLCFLTQNYRHAYDLIQKFGDLEVTVDFLAEVDKLVQLIECPIFTYLRLQLLDVKNNPYLIKALYGLLMLLPQSSAFQLLSHRLQCVPNPELLQTEDSLKAAPKSQKADSPSIDYAELLQHFEKVQNKHLEVRHQRSGRGDHLDRRVVL

SEQ ID NO: 1957 - protein, 1094 aa, Homo sapiens
MAARQAVGSGAQETCGLDRILEALKLLLSPGGSGSSSLQVTKHDVLLATLKSNLSALEDKFLKDPQWKNLKLLRDEIADKAEWPQNSVDVTWSFTSQTLLLLLCLKETMIRLAANFNPGKPNPRTPEVAPALSPDALSISQQKTVQFVLQFVVTLGICPYLMPGVGVPLRYRTEFGAVVQDVVCFDAAPDATRRLYTSCKALLNVAQHTSLGSLIFCHHFGDIAAGLCQLGFCPTKRKLLTPAEEVLTEEERTLSRGALRDMLDQVYQPLAVRELLILQGGPPQSCTDVKTQMRCRAPAWLRRLCGQLLSERLMRPNGVQAVVRGILEGAGAGAAGGSDAEVTAADWKKCDLIAKILASCPQQSLSPENYYRDICPQVLDLFHFQDKLTARQFQRVATTTFITLSRERPHLAAKYLLQPVLAPLHRCLNTAELSESDMVPGTILVTEEELSRCIEDVFKVYVVGNEPLTVLMDSLLPVLGVLFLLYCFTKQSVSHIRSLCQEILLWILGKLERKKAIASLKGFAGLDKAVPSLHSLCQFRVATQGGIMITIKEAISDEDEDEALYQKVSSEQGRVEHLGDLLSHCQECGLAGDFFIFCLKELTHVASENETELKTEPFSSKSLLELEQHQTLLVEGQERKLLVLQLMAVLCERMSEQIFTNVTQVVDFVAATLQRACASLAHQAESTVESQTLSMSMGLVAVMLGGAVQLKSSDFAVLKQLLPLLEKVSNTYPDPVIQELAVDLRITISTHGAFATEAVSMAAQSTLNRKDLEGKIEEQQQTSHERPTDVAHSHLEQQQSHETAPQTGLQSNAPIIPQGVNEPSTTTSQKSGSVTTEQLQEVLLSAYDPQIPTRAAALRTLSHWIEQREAKALEMQEKLLKIFLENLEHEDTFVYLSAIQGVALLSDVYPEKILPDLLAQYDSSKDKHTPETRMKVGEVLMRIVRALGDMVSKYREPLIHTFLRGVRDPDGAHRASSLANLGELCQRLDFLLGSVVHEVTACLIAVAKTDGEVQVRRAAIHVVVLLLRGLSQKATEVLSAVLKDLYHLLKHVVCLEPDDVAKLHAQLALEELDDIMKNFLFPPQKLEKKIMVLP

SEQ ID NO: 1958 - protein, 354 aa, Homo sapiens
MSLRGSLSRLLQTRVHSILKKSVHSVAVIGAPFSQGQKRKGVEHGPAAIREAGLMKRLSSLGCHLKDFGDLSFTPVPKDDLYNNLIVNPRSVGLANQELAEVVSRAVSDGYSCVTLGGDHSLAIGTISGHARHCPDLCVVWVDAHADINTPLTTSSGNLHGQPVSFLLRELQDKVPQLPGFSWIKPCISSASIVYIGLRDVDPPEHFILKNYDIQYFSMRDIDRLGIQKVMERTFDLLIGKRQRPIHLSFDIDAFDPTLAPATGTPVVGGLTYREGMYIAEEIHNTGLLSALDLVEVNPQLATSEEEAKTTANLAVDVIASSFGQTREGGHIVYDQLPTPSSPDESENQARVRI

SEQ ID NO: 1959 - protein, 606 aa, Homo sapiens
MTVVGNPRSWSCQWLPILILLLGTGHGPGVEGVTHYKAGDPVILYVNKVGPYHNPQETYHYYQLPVCCPEKIRHKSLSLGEVLDGDRMAESLYEIRFRENVEKRILCHMQLSSAQVEQLRQAIEELYYFEFVVDDLPIRGFVGYMEESGFLPHSHKIGLWTHLDFHLEFHGDRIIFANVSVRDVKPHSLDGLRPDEFLGLTHTYSVRWSETSVERRSDRRRGDDGGFFPRTLEIHWLSIINSMVLVFLLVGFVAVILMRVLRNDLARYNLDEETTSAGSGDDFDQGDNGWKIIHTDVFRFPPYRGLLCAVLGVGAQFLALGTGIIVMALLGMFNVHRHGAINSAAILLYALTCCISGYVSSHFYRQIGGERWVWNIILTTSLFSVPFFLTWSVVNSVHWANGSTQALPATTILLLLTVWLLVGFPLTVIGGIFGKNNASPFDAPCRTKNIAREIPPQPWYKSTVIHMTVGGFLPFSAISVELYYIFATVWGREQYTLYGILFFVFAILLSVGACISIALTYFQLSGEDYRWWWRSVLSVGSTGLFIFLYSVFYYARRSNMSGAVQTVEFFGYSLLTGYVFFLMLGTISFFSSLKFIRYIYVNLKMD

SEQ ID NO: 1960 - protein, 180 aa, Homo sapiens
MDWPHNLLFLLTISIFLGLGQPRSPKSKRKGQGRPGPLAPGPHQVPLDLVSRMKPYARMEEYERNIEEMVAQLRNSSELAQRKCEVNLQLWMSNKRSLSPWGYSINHDPSRIPVDLPEARCLCLGCVNPFTMQEDRSMVSVPVFSQVPVRRRLCPPPPRTGPCRQRAVMETIAVGCTCIF

SEQ ID NO: 1961 - protein, 882 aa, Homo sapiens
MPALACLRRLCRHVSPQAVLFLLFIFCLFSVFISAYYLYGWKRGLEPSADAPEPDCGDPPPVAPSRLLPLKPVQAATPSRTDPLVLVFVESLYSQLGQEVVAILESSRFKYRTEIAPGKGDMPTLTDKGRGRFALIIYENILKYVNLDAWNRELLDKYCVAYGVGIIGFFKANENSLLSAQLKGFPLFLHSNLGLKDCSINPKSPLLYVTRPSEVEKGVLPGEDWTVFQSNHSTYEPVLLAKTRSSESIPHLGADAGLHAALHATVVQDLGLHDGIQRVLFGNNLNFWLHKLVFVDAVAFLTGKRLSLPLDRYILVDIDDIFVGKEGTRMKVEDVKALFDTQNELRAHIPNFTFNLGYSGKFFHTGTNAEDAGDDLLLSYVKEFWWFPHMWSHMQPHLFHNQSVLAEQMALNKKFAVEHGIPTDMGYAVAPHHSGVYPVHVQLYEAWKQVWSIRVTSTEEYPHLKPARYRRGFIHNGIMVLPRQTCGLFTHTIFYNEYPGGSSELDKIINGGELFLTVLLNPISIFMTHLSNYGNDRLGLYTFKHLVRFLHSWTNLRLQTLPPVQLAQKYFQIFSEEKDPLWQDPCEDKRHKDIWSKEKTCDRFPKLLIIGPQKTGTTALYLFLGMHPDLSSNYPSSETFEEIQFFNGHNYHKGIDWYMEFFPIPSNTTSDFYFEKSANYFDSEVAPRRAAALLPKAKVLTILINPADRAYSWYQHQRAHDDPVALKYTFHEVITAGSDASSKLRALQNRCLVPGWYATHIERWLSAYHANQILVLDGKLLRTEPAKVMDMVQKFLGVTNTIDYHKTLAFDPKKGFWCQLLEGGKTKCLGKSKGRKYPEMDLDSRAFLKDYYRDHNIELSKLLYKMGQTLPTWLREDLQNTR

SEQ ID NO: 1962 - protein, 365 aa, Homo sapiens
MASSSGSKAEFIVGGKYKLVRKIGSGSFGDIYLAINITNGEEVAVKLESQKARHPQLLYESKLYKILQGGVGIPHIRWYGQEKDYNVLVMDLLGPSLEDLFNFCSRRFTMKTVLMLADQMISRIEYVHTKNFIHRDIKPDNFLMGIGRHCNKCLESPVGKRKRSMTVSTSQDPSFSGLNQLFLIDFGLAKKYRDNRTRQHIPYREDKNLTGTARYASINAHLGIEQSRRDDMESLGYVLMYFNRTSLPWQGLKAATKKQKYEKISEKKMSTPVEVLCKGFPAEFAMYLNYCRGLRFEEAPDYMYLRQLFRILFRTLNHQYDYTFDWTMLKQKAAQQAASSSGQGQQAQTPTGKQTDKTKSNMKGF

SEQ ID NO: 1963 - protein, 1106 aa, Homo sapiens
MRLPGAMPALALKGELLLLSLLLLLEPQISQGLVVTPPGPELVLNVSSTFVLTCSGSAPVVWERMSQEPPQEMAKAQDGTFSSVLTLTNLTGLDTGEYFCTHNDSRGLETDERKRLYIFVPDPTVGFLPNDAEELFIFLTEITEITIPCRVTDPQLVVTLHEKKGDVALPVPYDHQRGFSGIFEDRSYICKTTIGDREVDSDAYYVYRLQVSSINVSVNAVQTVVRQGENITLMCIVIGNEVVNFEWTYPRKESGRLVEPVTDFLLDMPYHIRSILHIPSAELEDSGTYTCNVTESVNDHQDEKAINITVVESGYVRLLGEVGTLQFAELHRSRTLQVVFEAYPPPTVLWFKDNRTLGDSSAGEIALSTRNVSETRYVSELTLVRVKVAEAGHYTMRAFHEDAEVQLSFQLQINVPVRVLELSESHPDSGEQTVRCRGRGMPQPNIIWSACRDLKRCPRELPPTLLGNSSEEESQLETNVTYWEEEQEFEVVSTLRLQHVDRPLSVRCTLRNAVGQDTQEVIVVPHSLPFKVVVISAILALVVLTIISLIILIMLWQKKPRYEIRWKVIESVSSDGHEYIYVDPMQLPYDSTWELPRDQLVLGRTLGSGAFGQVVEATAHGLSHSQATMKVAVKMLKSTARSSEKQALMSELKIMSHLGPHLNVVNLLGACTKGGPIYIITEYCRYGDLVDYLHRNKHTFLQHHSDKRRPPSAELYSNALPVGLPLPSHVSLTGESDGGYMDMSKDESVDYVPMLDMKGDVKYADIESSNYMAPYDNYVPSAPERTCRATLINESPVLSYMDLVGFSYQVANGMEFLASKNCVHRDLAARNVLICEGKLVKICDFGLARDIMRDSNYISKGSTFLPLKWMAPESIFNSLYTTLSDVWSFGILLWEIFTLGGTPYPELPMNEQFYNAIKRGYRMAQPAHASDEIYEIMQKCWEEKFEIRPPFSQLVLLLERLLGEGYKKKYQQVDEEFLRSDHPAILRSQARLPGFHGLRSPLDTSSVLYTAVQPNEGDNDYIIPLPDPKPEVADEGPLEGSPSLASSTLNEVNTSSTISCDSPLEPQDEPEPEPQLELQVEPEPELEQLPDSGCPAPRAEAEDSFL

SEQ ID NO: 1964 - protein, 4349 aa, Homo sapiens
MTIALLGFAIFLLHCATCEKPLEGILSSSAWHFTHSHYNATIYENSSPKTYVESFEKMGIYLAEPQWAVRYRIISGDVANVFKTEEYVVGNFCFLRIRTKSSNTALLNREVRDSYTLIIQATEKTLELEALTRVVVHILDQNDLKPLFSPPSYRVTISEDMPLKSPICKVTATDADLGQNAEFYYAFNTRSEMFAIHPTSGVVTVAGKLNVTWRGKHELQVLAVDRMRKISEGNGFGSLAALVVHVEPALRKPPAIASVVVTPPDSNDGTTYATVLVDANSSGAEVESVEVVGGDPGKHFKAIKSYARSNEFSLVSVKDINWMEYLHGFNLSLQARSGSGPYFYSQIRGFHLPPSKLSSLKFEKAVYRVQLSEFSPPGSRVVMVRVTPAFPNLQYVLKPSSENVGFKLNARTGLITTTKLMDFHDRAHYQLHIRTSPGQASTVVVIDIVDCNNHAPLFNRSSYDGTLDENIPPGTSVLAVTATDRDHGENGYVTYSIAGPKALPFSIDPYLGIISTSKPMDYELMKRIYTFRVRASDWGSPFRREKEVSIFLQLRNLNDNQPMFEEVNCTGSIRQDWPVGKSIMTMSAIDVDELQNLKYEIVSGNELEYFDLNHFSGVISLKRPFINLTAGQPTSYSLKITASDGKNYASPTTLNITVVKDPHFEVPVTCDKTGVLTQFTKTILHFIGLQNQESSDEEFTSLSTYQINHYTPQFEDHFPQSIDVLESVPINTPLARLAATDPDAGFNGKLVYVIADGNEEGCFDIELETGLLTVAAPLDYEATNFYILNVTVYDLGTPQKSSWKLLTVNVKDWNDNAPRFPPGGYQLTISEDTEVGTTIAELTTKDADSEDNGRVRYTLLSPTEKFSLHPLTGELVVTGHLDRESEPRYILKVEARDQPSKGHQLFSVTDLIITLEDVNDNSPQCITEHNRLKVPEDLPPGTVLTFLDASDPDLGPAGEVRYVLMDGAHGTFRVDLMTGALILERELDFERRAGYNLSLWASDGGRPLARRTLCHVEVIVLDVNENLHPPHFASFVHQGQVQENSPSGTQVIVVAAQDDDSGLDGELQYFLRAGTGLAAFSINQDTGMIQTLAPLDREFASYYWLTVLAVDRGSVPLSSVTEVYIEVTDANDNPPQMSQAVFYPSIQEDAPVGTSVLQLDAWDPDSSSKGKLTFNITSGNYMGFFMIHPVTGLLSTAQQLDRENKDEHILEVTVLDNGEPSLKSTSRVVVGILDVNDNPPIFSHKLFNVRLPERLSPVSPGPVYRLVASDLDEGLNGRVTYSIEDSDEEAFSIDLVTGVVSSSSTFTAGEYNILTIKATDSGQPPLSASVRLHIEWIPWPRPSSIPLAFDETYYSFTVMETDPVNHMVGVISVEGRPGLFWFNISGGDKDMDFDIEKTTGSIVIARPLDTRRRSNYNLTVEVTDGSRTIATQVHIFMIANINHHRPQFLETRYEVRVPQDTVPGVELLRVQAIDQDKGKSLIYTIHGSQDPGSASLFQLDPSSGVLVTVGKLDLGSGPSQHTLTVMVRDQEIPIKRNFVWVTIHVEDGNLHPPRFTQLHYEASVPDTIAPGTELLQVRAMDADRGVNAEVHYSLLKGNSEGFFNINALLGIITLAQKLDQANHAPHTLTVKAEDQGSPQWHDLATVIIHVYPSDRSAPIFSKSEYFVEIPESIPVGSPILLVSAMSPSEVTYELREGNKDGVFSMNSYSGLISTQKKLDHEKISSYQLKIRGSNMAGAFTDVMVVVDIIDENDNAPMFLKSTFVGQISEAAPLYSMIMDKNNNPFVIHASDSDKEANSLLVYKILEPEALKFFKIDPSMGTLTIVSEMDYESMPSFQFCVYVHDQGSPVLFAPRPAQVIIHVRDVNDSPPRFSEQIYEVAIVGPIHPGMELLMVRASDEDSEVNYSIKTGNADEAVTIHPVTGSISVLNPAFLGLSRKLTIRASDGLYQDTALVKISLTQVLDKSLQFDQDVYWAAVKENLQDRKALVILGAQGNHLNDTLSYFLLNGTDMFHMVQSAGVLQTRGVAFDREQQDTHELAVEVRDNRTPQRVAQGLVRVSIEDVNDNPPKFKHLPYYTIIQDGTEPGDVLFQVSATDEDLGTNGAVTYEFAEDYTYFRIDPYLGDISLKKPFDYQALNKYHLKVIARDGGTPSLQSEEEVLVTVRNKSNPLFQSPYYKVRVPENITLYTPILHTQARSPEGLRLIYNIVEEEPLMLFTTDFKTGVLTVTGPLDYESKTKHVFTVRATDTALGSFSEATVEVLVEDVNDNPPTFSQLVYTTSISEGLPAQTPVIQLLASDQDSGRNRDVSYQIVEDGSDVSKFFQINGSTGEMSTVQELDYEAQQHFHVKVRAMDKGDPPLTGETLVVVNVSDINDNPPEFRQPQYEANVSELATCGHLVLKVQAIDPDSRDTSRLEYLILSGNQDRHFFINSSSGIISMFNLCKKHLDSSYNLRVGASDGVFRATVPVYINTTNANKYSPEFQQHLYEAELAENAMVGTKVIDLLAIDKDSGPYGTIDYTIINKLASEKFSINPNGQIATLQKLDRENSTERVIAIKVMARDGGGRVAFCTVKIILTDENDNPPQFKASEYTVSIQSNVSKDSPVIQVLAYDADEGQNADVTYSVNPEDLVKDVIEINPVTGVVKVKDSLVGLENQTLDFFIKAQDGGPPHWNSLVPVRLQVVPKKVSLPKFSEPLYTFSAPEDLPEGSEIGIVKAVAAQDPVIYSLVRGTTPESNKDGVFSLDPDTGVIKVRKPMDHESTKLYQIDVMAHCLQNTDVVSLVSVNIQVGDVNDNRPVFEADPYKAVLTENMPVGTSVIQVTAIDKDTGRDGQVSYRLSADPGSNVHELFAIDSESGWITTLQELDCETCQTYHFHVVAYDHGQTIQLSSQALVQVSITDENDNAPRFASEEYRGSVVENSEPGELVATLKTLDADISEQNRQVTCYITEGDPLGQFGISQVGDEWRISSRKTLDREHTAKYLLRVTASDGKFQASVTVEIFVLDVNDNSPQCSQLLYTGKVHEDVFPGHFILKVSATDLDTDTNAQITYSLHGPGAHEFKLDPHTGELTTLTALDRERKDVFNLVAKATDGGGRSCQADITLHVEDVNDNAPRFFPSHCAVAVFDNTTVKTPVAVVFARDPDQGANAQVVYSLPDSAEGHFSIDATTGVIRLEKPLQVRPQAPLELTVRASDLGTPIPLSTLGTVTVSVVGLEDYLPVFLNTEHSVQVPEDAPPGTEVLQLATLTRPGAEKTGYRVVSGNEQGRFRLDARTGILYVNASLDFETSPKYFLSIECSRKSSSSLSDVTTVMVNITDVNEHRPQFPQDPYSTRVLENALVGDVILTVSATDEDGPLNSDITYSLIGGNQLGHFTIHPKKGELQVAKALDREQASSYSLKLRATDSGQPPLHEDTDIAIQVADVNDNPPRFFQLNYSTTVQENSPIGSKVLQLILSDPDSPENGPPYSFRITKGNNGSAFRVTPDGWLVTAEGLSRRAQEWYQLQIQASDSGIPPLSSLTSVRVHVTEQSHYAPSALPLEIFITVGEDEFQGGMVGKIHATDRDPQDTLTYSLAEEETLGRHFSVGAPDGKIIAAQGLPRGHYSFNVTVSDGTFTTTAGVHVYVWHVGQEALQQAMWMGFYQLTPEELVSDHWRNLQRFLSHKLDIKRANIHLASLQPAEAVAGVDVLLVFEGHSGTFYEFQELASIITHSAKEMEHSVGVQMRSAMPMVPCQGPTCQGQICHNTVHLDPKVGPTYSTARLSILTPRHHLQRSCSCNGTATRFSGQSYVRYRAPAARNWHIHFYLKTLQPQAILLFTNETASVSLKLASGVPQLEYHCLGGFYGNLSSQRHVNDHEWHSILVEEMDASIRLMVDSMGNTSLVVPENCRGLRPERHLLLGGLILLHSSSNVSQGFEGCLDAVVVNEEALDLLAPGKTVAGLLETQALTQCCLHSDYCSQNTCLNGGKCSWTHGAGYVCKCPPQFSGKHCEQGRENCTFAPCLEGGTCILSPKGASCNCPHPYTGDRCEMEARGCSEGHCLVTPEIQRGDWGQQELLIITVAVAFIIISTVGLLFYCRRCKSHKPVAMEDPDLLARSVGVDTQAMPAIELNPLSASSCNNLNQPEPSKASVPNELVTFGPNSKQRPVVCSVPPRLPPAAVPSHSDNEPVIKRTWSSEEMVYPGGAMVWPPTYSRNERWEYPHSEVTQGPLPPSAHRHSTPVVMPEPNGLYGGFPFPLEMENKRAPLPPRYSNQNLEDLMPSRPPSPRERLVAPCLNEYTAISYYHSQFRQGGGGPCLADGGYKGVGMRLSRAGPSYAVCEVEGAPLAGQGQPRVPPNYEGSDMVESDYGSCEEVMF

SEQ ID NO: 1965 - protein, 97 aa, Homo sapiens
MNQENPPPYPGPGPTAPYPPYPPQPMGPGPMGGPYPPPQGYPYQGYPQYGWQGGPQEPPKTTVYVVEDQRRDELGPSTCLTACWTALCCCCLWDMLT

SEQ ID NO: 1966 - protein, 122 aa, Homo sapiens
MAAPVDLELKKAFTELQAKVIDTQQKVKLADIQIEQLNRTKKHAHLTDTEIMTLVDETNMYEGVGRMFILQSKEAIHSQLLEKQKIAEEKIKELEQKKSYLERSVKEAEDNIREMLMARRAQ

SEQ ID NO: 1967 - protein, 755 aa, Homo sapiens
MASVHESLYFNPMMTNGVVHANVFGIKDWVTPYKIAVLVLLNEMSRTGEGAVSLMERRRLNQLLLPLLQGPDITLSKLYKLIEESCPQLANSVQIRIKLMAEGELKDMEQFFDDLSDSFSGTEPEVHKTSVVGLFLRHMILAYSKLSFSQVFKLYTALQQYFQNGEKKTVEDADMELTSRDEGERKMEKEELDVSVREEEVSCSGPLSQKQAEFFLSQQASLLKNDETKALTPASLQKELNNLLKFNPDFAEAHYLSYLNNLRVQDVFSSTHSLLHYFDRLILTGAESKSNGEEGYGRSLRYAALNLAALHCRFGHYQQAELALQEAIRIAQESNDHVCLQHCLSWLYVLGQKRSDSYVLLEHSVKKAVHFGLPYLASLGIQSLVQQRAFAGKTANKLMDALKDSDLLHWKHSLSELIDISIAQKTAIWRLYGRSTMALQQAQMLLSMNSLEAVNAGVQQNNTESFAVALCHLAELHAEQGCFAAASEVLKHLKERFPPNSQHAQLWMLCDQKIQFDRAMNDGKYHLADSLVTGITALNSIEGVYRKAVVLQAQNQMSEAHKLLQKLLVHCQKLKNTEMVISVLLSVAELYWRSSSPTIALPMLLQALALSKEYRLQYLASETVLNLAFAQLILGIPEQALSLLHMAIEPILADGAILDKGRAMFLVAKCQVASAASYDQPKKAEALEAAIENLNEAKNYFAKVDCKERIRDVVYFQARLYHTLGKTQERNRCAMLFRQLHQELPSHGVPLINHL

SEQ ID NO: 1968 - protein, 1137 aa, Homo sapiens
MSDIVEKTLTALPGLFLQNQPGGGPAAAKASFSSRLGSLVRGITALTSKHEEEKLIQQELSSLKATVSAPTTTLKMMKECMVRLIYCEMLGYDASFGYIHAIKLAQQGNLLEKRVGYLAVSLFLHESHELLLLLVNTVVKDLQSTNLVEVCMALTVVSQIFPCEMIPAVLPLIEDKLQHSKEIVRRKAVLALYKFHLIAPNQVQHIHIKFRKALCDRDVGVMAASLHIYLRMIKENSSGYKDLTGSFVTILKQVVGGKLPVEFNYHSVPAPWLQIQLLRILGLLGKDDQRTSELMYDVLDESLRRAELNHNVTYAILFECVHTVYSIYPKSELLEKAAKCIGKFVLSPKINLKYLGLKALTYVIQQDPTLALQHQMTIIECLDHPDPIIKRETLELLYRITNAQNITVIVQKMLEYLHQSKEEYVIVNLVGKIAELAEKYAPDNAWFIQTMNAVFSVGGDVMHPDIPNNFLRLLAEGFDDETEDQQLRLYAVQSYLTLLDMENVFYPQRFLQVMSWVLGEYSYLLDKETPEEVIAKLYKLLMNDSVSSETKAWLIAAVTKLTSQAHSSNTVERLIHEFTISLDTCMRQHAFELKHLHENVELMKSLLPVDRSCEDLVVDASLSFLDGFVAEGLSQGAAPYKPPHQRQEEKLSQEKVLNFEPYGLSFSSSGFTGRQSPAGISLGSDVSGNSAETGLKETNSLKLEGIKKLWGKEGYLPKKESKTGDESGALPVPQESIMENVDQAITKKDQSQVLTQSKEEKEKQLLASSLFVGLGSESTINLLGKADTVSHKFRRKSKVKEAKSGETTSTHNMTCSSFSSLSNVAYEDDYYSNTLHDTGDKELKKFSLTSELLDSESLTELPLVEKFSYCSLSTPSLFANNNMEIFHPPQSTAASVAKESSLASSFLEETTEYIHSNAMEVCNNETISVSSYKIWKDDCLLMVWSVTNKSGLELKSADLEIFPAENFKVTEQPGCCLPVMEAESTKSFQYSVQIEKPFTEGNLTGFISYHMMDTHSAQLEFSVNLSLLDFIRPLKISSDDFGKLWLSFANDVKQNVKMSESQAALPSALKTLQQKLRLHIIEIIGNEGLLACQLLPSIPCLLHCRVHADVLALWFRSSCSTLPDYLLYQCQKVMEGS

SEQ ID NO: 1969 - protein, 1076 aa, Homo sapiens
MKPDRDTLDEYFEYDAEEFLVSLALLITEGRTPECSVKGRTESFHCPPAQSCYPVTTKHECSDKLAQCRQARRTRSEVTLLWKNNLPIMVEMMLLPDCCYSDDGPTTEGIDLNDPAIKQDALLLERWILEPVPRQNGDRFIEEKTLLLAVRSFVFFSQLSAWLSVSHGAIPRNILYRISAADVDLQWNFSQTPIEHVFPVPNVSHNVALKVSVQSLPRQSNYPVLTCSIHTNIGLYEKRIQQHKLKTHQHHNPNEAEQCGTNSSQRLCSKQTWTMAPESVLHAKSGPSPEYTAAVKNIKLYPGTGSKSDHGTSQANILGFSGIGDIKSQETSVRTLKSFSMVDSSISNRQSFWQSAGETNPLIGSLIQERQEIIARIAQHLIHCDPSTSHVSGRPFNTQESSSLHSKLFRVSQENENVGKGKEAFSMTFGSPEFSSPEDTNEGKIRLKPETPRSETCISNDFYSHMPVGETNPLIGSLLQERQDVIARIAQHLEHIDPTASHIPRQSFNMHDSSSVASKVFRSSYEDKNLLKKNKDESSVSISHTKCSLLGDISDGKNLVPNKCFTSFKNNSKEKCSLKHQTRNQCQNNPSEIIQSTYQETQNKSSSLSTSSILSQHKENNLDLTSRFKEQEMSNGIDKQYSNCTTIDKQICTNKYKEKIINENYNPKFFGNLQSDDSKKNDSKIKVTVLEMSEYLNKYESMSSNKDSKRPKTCEQNTQLNSIENYLNKDNEGFKCKKSDQLKNEQDKQEDPTNEKSQNYSQRRSIKDCLSTCEQPKNTEVLRTTLKHSNVWRKHNFHSLDGTSTRAFHPQTGLPLLSSPVPQRKTQSGCFDLDSSLLHLKSFSSRSPRPCLNIEDDPDIHEKPFLSSSAPPITSLSLLGNFEESVLNYRFDPLGIVDGFTAEVGASGAFCPTHLTLPVEVSFYSVSDDNAPSPYMGVITLESLGKRGYRVPPSGTIQVTLFNPNKTVVKMFVVIYDLRDMPANHQTFLRQRTFSVPVKQEVKRSVNKENIRHTEERLLRYLIHLRFQSSKSGKIYLHRDVRLLFSRKSMEVDSGAAYELKSYTESPTNPQFSPRC

SEQ ID NO: 1970 - protein, 1056 aa, Homo sapiens
MDRAPTEQNVKLSAEVEPFIPQKKSPDTFMIPMALPNDNGSVSGVEPTPIPSYLITCYPFVQENQSNRQFPLYNNDIRWQQPNPNPTGPYFAYPIISAQPPVSTEYTYYQLMPAPCAQVMGFYHPFPTPYSNTFQAANTVNAITTECTERPSQLGQVFPLSSHRSRNSNRGSVVPKQQLLQQHIKSKRPLVKNVATQKETNAAGPDSRSKIVLLVDASQQTDFPSDIANKSLSETTATMLWKSKGRRRRASHPTAESSSEQGASEADIDSDSGYCSPKHSNNQPAAGALRNPDSGTMNHVESSMCAGGVNWSNVTCQATQKKPWMEKNQTFSRGGRQTEQRNNSQDEDGFQELNENGNAKDENIQQKLSSKVLDDLPENSPINIVQTPIPITTSVPKRAKSQKKKALAAALATAQEYSEISMEQKKLQEALSKAAGKKNKTPVQLDLGDMLAALEKQQQAMKARQITNTRPLSYTVVTAASFHTKDSTNRKPLTKSQPCLTSFNSVDIASSKAKKGKEKEIAKLKRPTALKKVILKEREEKKGRLTVDHNLLGSEEPTEMHLDFIDDLPQEIVSQEDTGLSMPSDTSLSPASQNSPYCMTPVSQGSPASSGIGSPMASSTITKIHSKRFREYCNQVLCKEIDECVTLLLQELVSFQERIYQKDPVRAKARRRLVMGLREVTKHMKLNKIKCVIISPNCEKIQSKGGLDEALYNVIAMAREQEIPFVFALGRKALGRCVNKLVPVSVVGIFNYFGAESLFNKLVELTEEARKAYKDMVAAMEQEQAEEALKNVKKVPHHMGHSRNPSAASAISFCSVISEPISEVNEKEYETNWRNMVETSDGLEASENEKEVSCKHSTSEKPSKLPFDTPPIGKQPSLVATGSTTSATSAGKSTASDKEEVKPDDLEWASQQSTETGSLDGSCRDLLNSSITSTTSTLVPGMLEEEEDEDEEEEEDYTHEPISVEVQLNSRIESWVSETQRTMETLQLGKTLNGSEEDNVEQSGEEEAEAPEVLEPGMDSEAWTADQQASPGQQKSSNCSSLNKEHSDSNYTTQTT

SEQ ID NO: 1971 - protein, 520 aa, Homo sapiens
MGPQRRLSPAGAALLWGFLLQLTAAQEAILHASGNGTTKDYCMLYNPYWTALPSTLENATSISLMNLTSTPLCNLSDIPPVGIKSKAVVVPWGSCHFLEKARIAQKGGAEAMLVVNNSVLFPPSGNRSEFPDVKILIAFISYKDFRDMNQTLGDNITVKMYSPSWPNFDYTMVVIFVIAVFTVALGGYWSGLVELENLKAVTTEDREMRKKKEEYLTFSPLTVVIFVVICCVMMVLLYFFYKWLVYVMIAIFCIASAMSLYNCLAALIHKIPYGQCTIACRGKNMEVRLIFLSGLCIAVAVVWAVFRNEDRWAWILQDILGIAFCLNLIKTLKLPNFKSCVILLGLLLLYDVFFVFITPFITKNGESIMVELAAGPFGNNEKLPVVIRVPKLIYFSVMSVCLMPVSILGFGDIIVPGLLIAYCRRFDVQTGSSYIYYVSSTVAYAIGMILTFVVLVLMKKGQPALLYLVPCTLITASVVAWRRKEMKKFWKGNSYQMMDHLDCATNEENPVISGEQIVQQ

SEQ ID NO: 1972 - protein, 617 aa, Homo sapiens
MRCLAARVNYKTLIIICALFTLVTVLLWNKCSSDKAIQFPRRSSSGFRVDGFEKRAAASESNNYMNHVAKQQSEEAFPQEQQKAPPVVGGFNSNVGSKVLGLKYEEIDCLINDEHTIKGRREGNEVFLPFTWVEKYFDVYGKVVQYDGYDRFEFSHSYSKVYAQRAPYHPDGVFMSFEGYNVEVRDRVKCISGVEGVPLSTQWGPQGYFYPIQIAQYGLSHYSKNLTEKPPHIEVYETAEDRDKNKPNDWTVPKGCFMANVADKSRFTNVKQFIAPETSEGVSLQLGNTKDFIISFDLKFLTNGSVSVVLETTEKNQLFTIHYVSNAQLIAFKERDIYYGIGPRTSWSTVTRDLVTDLRKGVGLSNTKAVKPTKIMPKKVVRLIAKGKGFLDNITISTTAHMAAFFAASDWLVRNQDEKGGWPIMVTRKLGEGFKSLEPGWYSAMAQGQAISTLVRAYLLTKDHIFLNSALRATAPYKFLSEQHGVKAVFMNKHDWYEEYPTTPSSFVLNGFMYSLIGLYDLKETAGEKLGKEARSLYERGMESLKAMLPLYDTGSGTIYDLRHFMLGIAPNLARWDYHTTHINQLQLLSTIDESPVFKEFVKRWKSYLKGSRAKHN

SEQ ID NO: 1973 - protein, 480 aa, Homo sapiens
MTVTKMSWRPQYRSSKFRNVYGKVANREHCFDGIPITKNVHDNHFCAVNTRFLAIVTESAGGGSFLVIPLEQTGRIEPNYPKVCGHQGNVLDIKWNPFIDNIIASCSEDTSVRIWEIPEGGLKRNMTEALLELHGHSRRVGLVEWHPTTNNILFSAGYDYKVLIWNLDVGEPVKMIDCHTDVILCMSFNTDGSLLTTTCKDKKLRVIEPRSGRVLQEANCKNHRVNRVVFLGNMKRLLTTGVSRWNTRQIALWDQEDLSMPLIEEEIDGLSGLLFPFYDADTHMLYLAGKGDGNIRYYEISTEKPYLSYLMEFRSPAPQKGLGVMPKHGLDVSACEVFRFYKLVTLKGLIEPISMIVPRRSDSYQEDIYPMTPGTEPALTPDEWLGGINRDPVLMSLKEGYKKSSKMVFKAPIKEKKSVVVNGIDLLENVPPRTENELLRMFFRQQDEIRRLKEELAQKDIRIRQLQLELKNLRNSPKNC

SEQ ID NO: 1974 - protein, 219 aa, Homo sapiens
MFVSYLILTLLHVQTAVLARPGGESIGCDDYLGSDKVVDKCGVCGGDNTGCQVVSGVFKHALTSLGYHRVVEIPEGATKINITEMYKSNKKKSHLKPATRGSQFSSVKVCSVPAACKLLGTPGRARQPVPAPRELEHDKNSPHCAYLSLYLTSLAQSSWRVFSLFSYVLIYLFSKYLAFNTLFALKRMALQRDRKEKTRAWCIFIKLCGREIQILPGPV

SEQ ID NO: 1975 - protein, 2443 aa, Homo sapiens
MAAEEGVASAASAGGSWGTAAMGRVLPMLLVPVPAEAMGQLGSRAQLRTQPEALGSLTAAGSLQVLSLTPGSRGGGRCCLEGPFWHFLWEDSRNSSTPTEKPKLLALGENYELLIYEFNLKDGRCDATILYSCSREALQKLIDDQDISISLLSLRILSFHNNTSLLFINKCVILHIIFPERDAAIRVLNCFTLPLPAQAVDMIIDTQLCRGILFVLSSLGWIYIFDVVDGTYVAHVDLALHKEDMCNEQQQEPAKISSFTSLKVSQDLDVAVIVSSSNSAVALNLNLYFRQHPGHLLCERILEDLPIQGPKGVDEDDPVNSAYNMKLAKFSFQIDRSWKAQLSSLNETIKNSKLEVSCCAPWFQDILHLESPESGNHSTSVQSWAFIPQDIMHGQYNVLQKDHAKTSDPGRSWKIMHISEQEEPIELKCVSVTGFTALFTWEVERMGYTITLWDLETQGMQCFSLGTKCIPVDSSGDQQLCFVLTENGLSLILFGLTQEEFLNRLMIHGSASTVDTLCHLNGWGRCSIPIHALEAGIENRQLDTVNFFLKSKENLFNPSSKSSVSDQFDHLSSHLYLRNVEELIPALDLLCSAIRESYSEPQSKHFSEQLLNLTLSFLNNQIKELFIHTEELDEHLQKGVNILTSYINELRTFMIKFPWKLTDAIDEYDVHENVPKVKESNIWKKLSFEEVIASAILNNKIPEAQTFFRIDSHSAQKLEELIGIGLNLVFDNLKKNNIKEASELLKNMGFDVKGQLLKICFYTTNKNIRDFLVEILKEKNYFSEKEKRTIDFVHQVEKLYLGHFQENMQIQSFPRYWIKEQDFFKHKSVLDSFLKYDCKDEFNKQDHRIVLNWALWWDQLTQESILLPRISPEEYKSYSPEALWRYLTARHDWLNIILWIGEFQTQHSYASLQQNKWPLLTVDVINQNTSCNNYMRNEILDKLARNGVFLASELEDFECFLLRLSRIGGVIQDTLPVQNYKTKEGWDFHSQFILYCLEHSLQHLLYVYLDCYKLSPENCPFLEKKELHEAHPWFEFLVQCRQVASNLTDPKLIFQASLANAQILIPTNQASVSSMLLEGHTLLALATTMYSPGGVSQVVQNEENENCLKKVDPQLLKMALTPYPKLKTALFPQCTPPSVLPSDITIYHLIQSLSPFDPSRLFGWQSANTLAIGDAWSHLPHFSSPDLVNKYAIVERLNFAYYLHNGRPSFAFGTFLVQELIKSKTPKQLIQQVGNEAYVIGLSSFHIPSIGAACVCFLELLGLDSLKLRVDMKVANIILSYKCRNEDAQYSFIRESVAEKLSKLADGEKTTTEELLVLLEEGTWNSIQQQEIKRLSSESSSQWALVVQFCRLHNMKLSISYLRECAKANDWLQFIIHSQLHNYHPAEVKSLIQYFSPVIQDHLRLAFENLPSVPTSKMDSDQVCNKCPQELQGSKQEMTDLFEILLQCSEEPDSWHWLLVEAVKQQAPILSVLASCLQGASAISCLCVWIITSVEDNVATEAMGHIQDSTEDHTWNLEDLSVIWRTLLTRQKSKTLIRGFQLFFKDSPLLLVMEMYELCMFFRNYKEAEAKLLEFQKSLETLNTAATKVHPVIPAMWLEDQVCFLLKLMLQQCKTQYELGKLLQLFVEREHLFSDGPDVKKLCILCQILKDTSIAINHTIITSYSIENLQHECRSILERLQTDGQFALARRVAELAELPVDNLVIKEITQEMQTLKHIEQWSLKQARIDFWKKCHENFKKNSISSKAASSFFSTQAHVACEHPTGWSSMEERHLLLTLAGHWLAQEDVVPLDKLEELEKQIWLCRITQHTLGRNQEETEPRFSRQISTSGELSFDSLASEFSFSKLAALNTSKYLELNSLPSKETCENRLDWKEQESLNFLIGRLLDDGCVHEASRVCRYFHFYNPDVALVLHCRALASGEASMEDLHPEIHALLQSAELLEEEAPDIPLRRVHSTSSLDSQKFVTVPSSNEVVTNLEVLTSKCLHGKNYCRQVLCLYDLAKELGCSYTDVAAQDGEAMLRKILASQQPDRCKRAQAFISTQGLKPDTVAELVAEEVTRELLTSSQGTGHKQMFNPTEESQTFLQLTTLCQDRTLVGMKLLDKISSVPHGELSCTTELLILAHHCFTLTCHMEGIIRVLQAAHMLTDNHLAPSEEYGLVVRLLTGIGRYNEMTYIFDLLHKKHYFEVLMRKKLDPSGTLKTALLDYIKRCRPGDSEKHNMIALCFSMCREIGENHEAAARIQLKLIESQPWEDSLKDGHQLKQLLLKALTLMLDAAESYAKDSCVRQAQHCQRLTKLITLQIHFLNTGQNTMLINLGRHKLMDCILALPRFYQASIVAEAYDFVPDWAEILYQQVILKGDFNYLEEFKQQRLLKSSIFEEISKKYKQHQPTDMVMENLKKLLTYCEDVYLYYKLAYEHKFYEIVNVLLKDPQTGCCLKDMLAG

SEQ ID NO: 1976 - protein, 429 aa, Homo sapiens
MAGSGAWKRLKSMLRKDDAPLFLNDTSAFDFSDEAGDEGLSRFNKLRVVVADDGSEAPERPVNGAHPTLQADDDSLLDQDLPLTNSQLSLKVDSCDNCSKQREILKQRKVKARLTIAAVLYLLFMIGELVGGYIANSLAIMTDALHMLTDLSAIILTLLALWLSSKSPTKRFTFGFHRLEVLSAMISVLLVYILMGFLLYEAVQRTIHMNYEINGDIMLITAAVGVAVNVIMGFLLNQSGHRHSHSHSLPSNSPTRGSGCERNHGQDSLAVRAAFVHALGDLVQSVGVLIAAYIIRFKPEYKIADPICTYVFSLLVAFTTFRIIWDTVVIILEGVPSHLNVDYIKEALMKIEDVYSVEDLNIWSLTSGKSTAIVHIQLIPGSSSKWEEVQSKANHLLLNTFGMYRCTIQLQSYRQEVDRTCANCQSSSP

SEQ ID NO: 1977 - protein, 362 aa, Homo sapiens
MENQVLTPHVYWAQRHRELYLRVELSDVQNPAISITENVLHFKAQGHGAKGDNVYEFHLEFLDLVKPEPVYKLTQRQVNITVQKKVSQWWERLTKQEKRPLFLAPDFDRWLDESDAEMELRAKEEERLNKLRLESEGSPETLTNLRKGYLFMYNLVQFLGFSWIFVNLTVRFCILGKESFYDTFHTVADMMYFCQMLAVVETINAAIGVTTSPVLPSLIQLLGRNFILFIIFGTMEEMQNKAVVFFVFYLWSAIEIFRYSFYMLTCIDMDWKVLTWLRYTLWIPLYPLGCLAEAVSVIQSIPIFNETGRFSFTLPYPVKIKVRFSFFLQIYLIMIFLGLYINFRHLYKQRRRRYGQKKKKIH

SEQ ID NO: 1978 - protein, 257 aa, Homo sapiens
MTAAVFFGCAFIAFGPALALYVFTIATEPLRIIFLIAGAFFWLVSLLISSLVWFMARVIIDNKDGPTQKYLLIFGAFVSVYIQEMFRFAYYKLLKKASEGLKSINPGETAPSMRLLAYVSGLGFGIMSGVFSFVNTLSDSLGPGTVGIHGDSPQFFLYSAFMTLVIILLHVFWGIVFFDGCEKKKWGILLIVLLTHLLVSAQTFISSYYGINLASAFIILVLMGTWAFLAAGGSCRSLKLCLLCQDKNFLLYNQRSR

SEQ ID NO: 1979 - protein, 315 aa, Homo sapiens
MAAGVPCALVTSCSSVFSGDQLVQHILGTEDLIVEVTSNDAVRFYPWTIDNKYYSADINLCVVPNKFLVTAEIAESVQAFVVYFDSTQKSGLDSVSSWLPLAKAWLPEVMILVCDRVSEDGINRQKAQEWCIKHGFELVELSPEELPEEDDDFPESTGVKRIVQALNANVWSNVVMKNDRNQGFSLLNSLTGTNHSIGSADPCHPEQPHLPAADSTESLSDHRGGASNTTDAQVDSIVDPMLDLDIQELASLTTGGGDVENFERLFSKLKEMKDKAATLPHEQRKVHAEKVAKAFWMAIGGDRDEIEGLSSDEEH

SEQ ID NO: 1980 - protein, 301 aa, Homo sapiens
MLEPQENGVIDLPDYEHVEDETFPPFPPPASPERQDGEGTEPDEESGNGAPVRVPPKRTVKRNIPKLDAQRLISERGLPALRHVFDKAKFKGKGHEAEDLKMLIRHMEHWAHRLFPKLQFEDFIDRVEYLGSKKEVQTCLKRIRLDLPILHEDFVSNNDEVAENNEHDVTSTELDPFLTNLSESEMFASELSRSLTEEQQQRIERNKQLALERRQAKLLSNSQTLGNDMLMNTPRAHTVEEVNTDEDQKEESNGLNEDILDNPCNDAIANTLNEEETLLDQSFKNVQQQLDATSRNITEAR

SEQ ID NO: 1981 - protein, 1184 aa, Homo sapiens
MVGTKAWVFSFLVLEVTSVLGRQTMLTQSVRRVQPGKKNPSIFAKPADTLESPGEWTTWFNIDYPGGKGDYERLDAIRFYYGDRVCARPLRLEARTTDWTPAGSTGQVVHGSPREGFWCLNREQRPGQNCSNYTVRFLCPPGSLRRDTERIWSPWSPWSKCSAACGQTGVQTRTRICLAEMVSLCSEASEEGQHCMGQDCTACDLTCPMGQVNADCDACMCQDFMLHGAVSLPGGAPASGAAIYLLTKTPKLLTQTDSDGRFRIPGLCPDGKSILKITKVKFAPIVLTMPKTSLKAATIKAEFVRAETPYMVMNPETKARRAGQSVSLCCKATGKPRPDKYFWYHNDTLLDPSLYKHESKLVLRKLQQHQAGEYFCKAQSDAGAVKSKVAQLIVIASDETPCNPVPESYLIRLPHDCFQNATNSFYYDVGRCPVKTCAGQQDNGIRCRDAVQNCCGISKTEEREIQCSGYTLPTKVAKECSCQRCTETRSIVRGRVSAADNGEPMRFGHVYMGNSRVSMTGYKGTFTLHVPQDTERLVLTFVDRLQKFVNTTKVLPFNKKGSAVFHEIKMLRRKKPITLEAMETNIIPLGEVVGEDPMAELEIPSRSFYRQNGEPYIGKVKASVTFLDPRNISTATAAQTDLNFINDEGDTFPLRTYGMFSVDFRDEVTSEPLNAGKVKVHLDSTQVKMPEHISTVKLWSLNPDTGLWEEEGDFKFENQRRNKREDRTFLVGNLEIRERRLFNLDVPESRRCFVKVRAYRSERFLPSEQIQGVVISVINLEPRTGFLSNPRAWGRFDSVITGPNGACVPAFCDDQSPDAYSAYVLASLAGEELQAVESSPKFNPNAIGVPQPYLNKLNYRRTDHEDPRVKKTAFQISMAKPRPNSAEESNGPIYAFENLRACEEAPPSAAHFRFYQIEGDRYDYNTVPFNEDDPMSWTEDYLAWWPKPMEFRACYIKVKIVGPLEVNVRSRNMGGTHRQTVGKLYGIRDVRSTRDRDQPNVSAACLEFKCSGMLYDQDRVDRTLVKVIPQGSCRRASVNPMLHEYLVNHLPLAVNNDTSEYTMLAPLDPLGHNYGIYTVTDQDPRTAKEIALGRCFDGTSDGSSRIMKSNVGVALTFNCVERQVGRQSAFQYLQSTPAQSPAAGTVQGRVPSRRQQRASRGGQRQGGVVASLRFPRVAQQPLIN

SEQ ID NO: 1982 - protein, 581 aa, Homo sapiens
MAVAGAVSGEPLVHWCTQQLRKTFGLDVSEEIIQYVLSIESAEEIREYVTDLLQGNEGKKGQFIEELITKWQKNDQELISDPLQQCFKKDEILDGQKSGDHLKRGRKKGRNRQEVPAFTEPDTTAEVKTPFDLAKAQENSNSVKKKTKFVNLYTREGQDRLAVLLPGRHPCDCLGQKHKLINNCLICGRIVCEQEGSGPCLFCGTLVCTHEEQDILQRDSNKSQKLLKKLMSGVENSGKVDISTKDLLPHQELRIKSGLEKAIKHKDKLLEFDRTSIRRTQVIDDESDYFASDSNQWLSKLERETLQKREEELRELRHASRLSKKVTIDFAGRKILEEENSLAEYHSRLDETIQAIANGTLNQPLTKLDRSSEEPLGVLVNPNMYQSPPQWVDHTGAASQKKAFRSSGFGLEFNSFQHQLRIQDQEFQEGFDGGWCLSVHQPWASLLVRGIKRVEGRSWYTPHRGRLWIAATAKKPSPQEVSELQATYRLLRGKDVEFPNDYPSGCLLGCVDLIDCLSQKQFKEQFPDISQESDSPFVFICKNPQEMVVKFPIKGNPKIWKLDSKIHQGAKKGLMKQNKAV

SEQ ID NO: 1983 - protein, 216 aa, Homo sapiens
MGTRDDEYDYLFKVVLIGDSGVGKSNLLSRFTRNEFNLESKSTIGVEFATRSIQVDGKTIKAQIWDTAGQERYRAITSAYYRGAVGALLVYDIAKHLTYENVERWLKELRDHADSNIVIMLVGNKSDLRHLRAVPTDEARAFAEKNGLSFIETSALDSTNVEAAFQTILTEIYRIVSQKQMSDRRENDMSPSNNVVPIHVPPTTENKPKVQCCQNI

SEQ ID NO: 1984 - protein, 547 aa, Homo sapiens
MYRLMSAVTARAAAPGGLASSCGRRGVHQRAGLPPLGHGWVGGLGLGLGLALGVKLAGGLRGAAPAQSPAAPDPEASPLAEPPQEQSLAPWSPQTPAPPCSRCFARAIESSRDLLHRIKDEVGAPGIVVGVSVDGKEVWSEGLGYADVENRVPCKPETVMRIASISKSLTMVALAKLWEAGKLDLDIPVQHYVPEFPEKEYEGEKVSVTTRLLISHLSGIRHYEKDIKKVKEEKAYKALKMMKENVAFEQEKEGKSNEKNDFTKFKTEQENEAKCRNSKPGKKKNDFEQGELYLREKFENSIESLRLFKNDPLFFKPGSQFLYSTFGYTLLAAIVERASGCKYLDYMQKIFHDLDMLTTVQEENEPVIYNRARFYVYNKKKRLVNTPYVDNSYKWAGGGFLSTVGDLLKFGNAMLYGYQVGLFKNSNENLLPGYLKPETMVMMWTPVPNTEMSWDKEGKYAMAWGVVERKQTYGSCRKQRHYASHTGGAVGASSVLLVLPEELDTETINNKVPPRGIIVSIICNMQSVGLNSTALKIALEFDKDRSD

SEQ ID NO: 1985 - protein, 726 aa, Homo sapiens
MEGERKNNNKRWYFTREQLENSPSRRFGVDPDKELSYRQQAANLLQDMGQRLNVSQLTINTAIVYMHRFYMIQSFTQFPGNSVAPAALFLAAKVEEQPKKLEHVIKVAHTCLHPQESLPDTRSEAYLQQVQDLVILESIILQTLGFELTIDHPHTHVVKCTQLVRASKDLAQTSYFMATNSLHLTTFSLQYTPPVVACVCIHLACKWSNWEIPVSTDGKHWWEYVDATVTLELLDELTHEFLQILEKTPNRLKRIWNWRACEAAKKTKADDRGTDEKTSEQTILNMISQSSSDTTIAGLMSMSTSTTSAVPSLPVSEESSSNLTSVEMLPGKRWLSSQPSFKLEPTQGHRTSENLALTGVDHSLPQDGSNAFISQKQNSKSVPSAKVSLKEYRAKHAEELAAQKRQLENMEANVKSQYAYAAQNLLSHHDSHSSVILKMPIEGSENPERPFLEKADKTALKMRIPVAGGDKAASSKPEEIKMRIKVHAAADKHNSVEDSVTKSREHKEKHKTHPSNHHHHHNHHSHKHSHSQLPVGTGNKRPGDPKHSSQTSNLAHKTYSLSSSFSSSSSTRKRGPSEETGGAVFDHPAKIAKSTKSSSLNFSFPSLPTMGQMPGHSSDTSGLSFSQPSCKTRVPHSKLDKGPTGANGHNTTQTIDYQDTVNMLHSLLSAQGVQPTQPTAFEFVRPYSDYLNPRSGGISSRSGNTDKPRPPPLPSEPPPPLPPLPK

SEQ ID NO: 1986 - protein, 1461 aa, Homo sapiens
MAAERGARRLLSTPSFWLYCLLLLGRRAPGAAAARSGSAPQSPGASIRTFTPFYFLVEPVDTLSVRGSSVILNCSAYSEPSPKIEWKKDGTFLNLVSDDRRQLLPDGSLFISNVVHSKHNKPDEGYYQCVATVESLGTIISRTAKLIVAGLPRFTSQPEPSSVYAGNNAILNCEVNADLVPFVRWEQNRQPLLLDDRVIKLPSGMLVISNATEGDGGLYRCVVESGGPPKYSDEVELKVLPDPEVISDLVFLKQPSPLVRVIGQDVVLPCVASGLPTPTIKWMKNEEALDTESSERLVLLAGGSLEISDVTEDDAGTYFCIADNGNETIEAQAELTVQAQPEFLKQPTNIYAHESMDIVFECEVTGKPTPTVKWVKNGDMVIPSDYFKIVKEHNLQVLGLVKSDEGFYQCIAENDVGNAQAGAQLIILEHAPATTGPLPSAPRDVVASLVSTRFIKLTWRTPASDPHGDNLTYSVFYTKEGIARERVENTSHPGEMQVTIQNLMPATVYIFRVMAQNKHGSGESSAPLRVETQPEVQLPGPAPNLRAYAASPTSITVTWETPVSGNGEIQNYKLYYMEKGTDKEQDVDVSSHSYTINGLKKYTEYSFRVVAYNKHGPGVSTPDVAVRTLSDVPSAAPQNLSLEVRNSKSIMIHWQPPAPATQNGQITGYKIRYRKASRKSDVTETLVSGTQLSQLIEGLDRGTEYNFRVAALTINGTGPATDWLSAETFESDLDETRVPEVPSSLHVRPLVTSIVVSWTPPENQNIVVRGYAIGYGIGSPHAQTIKVDYKQRYYTIENLDPSSHYVITLKAFNNVGEGIPLYESAVTRPHTDTSEVDLFVINAPYTPVPDPTPMMPPVGVQASILSHDTIRITWADNSLPKHQKITDSRYYTVRWKTNIPANTKYKNANATTLSYLVTGLKPNTLYEFSVMVTKGRRSSTWSMTAHGTTFELVPTSPPKDVTVVSKEGKPKTIIVNWQPPSEANGKITGYIIYYSTDVNAEIHDWVIEPVVGNRLTHQIQELTLDTPYYFKIQARNSKGMGPMSEAVQFRTPKADSSDKMPNDQASGSGGKGSRLPDLGSDYKPPMSGSNSPHGSPTSPLDSNMLLVIIVSVGVITIVVVVIIAVFCTRRTTSHQKKKRAACKSVNGSHKYKGNSKDVKPPDLWIHHERLELKPIDKSPDPNPIMTDTPIPRNSQDITPVDNSMDSNIHQRRNSYRGHESEDSMSTLAGRRGMRPKMMMPFDSQPPQPVISAHPIHSLDNPHHHFHSSSLASPARSHLYHPGSPWPIGTSMSLSDRANSTESVRNTPSTDTMPASSSQTCCTDHQDPEGATSSSYLASSQEEDSGQSLPTAHVRPSHPLKSFAVPAIPPPGPPTYDPALPSTPLLSQQALNHHIHSVKTASIGTLGRSRPPMPVVVPSAPEVQETTRMLEDSESSYEPDELTKEMAHLEGLMKDLNAITTA

SEQ ID NO: 1987 - protein, 666 aa, Homo sapiens
MTPPPPGRAAPSAPRARVPGPPARLGLPLRLRLLLLLWAAAASAQGHLRSGPRIFAVWKGHVGQDRVDFGQTEPHTVLFHEPGSSSVWVGGRGKVYLFDFPEGKNASVRTVNIGSTKGSCLDKRDCENYITLLERRSEGLLACGTNARHPSCWNLVNGTVVPLGEMRGYAPFSPDENSLVLFEGDEVYSTIRKQEYNGKIPRFRRIRGESELYTSDTVMQNPQFIKATIVHQDQAYDDKIYYFFREDNPDKNPEAPLNVSRVAQLCRGDQGGESSLSVSKWNTFLKAMLVCSDAATNKNFNRLQDVFLLPDPSGQWRDTRVYGVFSNPWNYSAVCVYSLGDIDKVFRTSSLKGYHSSLPNPRPGKCLPDQQPIPTETFQVADRHPEVAQRVEPMGPLKTPLFHSKYHYQKVAVHRMQASHGETFHVLYLTTDRGTIHKVVEPGEQEHSFAFNIMEIQPFRRAAAIQTMSLDAERRKLYVSSQWEVSQVPLDLCEVYGGGCHGCLMSRDPYCGWDQGRCISIYSSERSVLQSINPAEPHKECPNPKPDKAPLQKVSLAPNSRYYLSCPMESRHATYSWRHKENVEQSCEPGHQSPNCILFIENLTAQQYGHYFCEAQEGSYFREAQHWQLLPEDGIMAEHLLGHACALAASLWLGVLPTLTLGLLVH

SEQ ID NO: 1988 - protein, 574 aa, Homo sapiens
MALARGSRQLGALVWGACLCVLVHGQQAQPGQGSDPARWRQLIQWENNGQVYSLLNSGSEYVPAGPQRSESSSRVLLAGAPQAQQRRSHGSPRRRQAPSLPLPGRVGSDTVRGQARHPFGFGQVPDNWREVAVGDSTGMARARTSVSQQRHGGSASSVSASAFASTYRQQPSYPQQFPYPQAPFVSQYENYDPASRTYDQGFVYYRPAGGGVGAGAAAVASAGVIYPYQPRARYEEYGGGEELPEYPPQGFYPAPERPYVPPPPPPPDGLDRRYSHSLYSEGTPGFEQAYPDPGPEAAQAHGGDPRLGWYPPYANPPPEAYGPPRALEPPYLPVRSSDTPPPGGERNGAQQGRLSVGSVYRPNQNGRGLPDLVPDPNYVQASTYVQRAHLYSLRCAAEEKCLASTAYAPEATDYDVRVLLRFPQRVKNQGTADFLPNRPRHTWEWHSCHQHYHSMDEFSHYDLLDAATGKKVAEGHKASFCLEDSTCDFGNLKRYACTSHTQGLSPGCYDTYNADIDCQWIDITDVQPGNYILKVHVNPKYIVLESDFTNNVVRCNIHYTGRYVSATNCKIVQS

SEQ ID NO: 1989 - protein, 1363 aa, Homo sapiens
MQRGAALCLRLWLCLGLLDGLVSGYSMTPPTLNITEESHVIDTGDSLSISCRGQHPLEWAWPGAQEAPATGDKDSEDTGVVRDCEGTDARPYCKVLLLHEVHANDTGSYVCYYKYIKARIEGTTAASSYVFVRDFEQPFINKPDTLLVNRKDAMWVPCLVSIPGLNVTLRSQSSVLWPDGQEVVWDDRRGMLVSTPLLHDALYLQCETTWGDQDFLSNPFLVHITGNELYDIQLLPRKSLELLVGEKLVLNCTVWAEFNSGVTFDWDYPGKQAERGKWVPERRSQQTHTELSSILTIHNVSQHDLGSYVCKANNGIQRFRESTEVIVHENPFISVEWLKGPILEATAGDELVKLPVKLAAYPPPEFQWYKDGKALSGRHSPHALVLKEVTEASTGTYTLALWNSAAGLRRNISLELVVNVPPQIHEKEASSPSIYSRHSRQALTCTAYGVPLPLSIQWHWRPWTPCKMFAQRSLRRRQQQDLMPQCRDWRAVTTQDAVNPIESLDTWTEFVEGKNKTVSKLVIQNANVSAMYKCVVSNKVGQDERLIYFYVTTIPDGFTIESKPSEELLEGQPVLLSCQADSYKYEHLRWYRLNLSTLHDAHGNPLLLDCKNVHLFATPLAASLEEVAPGARHATLSLSIPRVAPEHEGHYVCEVQDRRSHDKHCHKKYLSVQALEAPRLTQNLTDLLVNVSDSLEMQCLVAGAHAPSIVWYKDERLLEEKSGVDLADSNQKLSIQRVREEDAGRYLCSVCNAKGCVNSSASVAVEGSEDKGSMEIVILVGTGVIAVFFWVLLLLIFCNMRRPAHADIKTGYLSIIMDPGEVPLEEQCEYLSYDASQWEFPRERLHLGRVLGYGAFGKVVEASAFGIHKGSSCDTVAVKMLKEGATASEHRALMSELKILIHIGNHLNVVNLLGACTKPQGPLMVIVEFCKYGNLSNFLRAKRDAFSPCAEKSPEQRGRFRAMVELARLDRRRPGSSDRVLFARFSKTEGGARRASPDQEAEDLWLSPLTMEDLVCYSFQVARGMEFLASRKCIHRDLAARNILLSESDVVKICDFGLARDIYKDPDYVRKGSARLPLKWMAPESIFDKVYTTQSDVWSFGVLLWEIFSLGASPYPGVQINEEFCQRLRDGTRMRAPELATPAIRRIMLNCWSGDPKARPAFSELVEILGDLLQGRGLQEEEEVCMAPRSSQSSEEGSFSQVSTMALHIAQADAEDSPPSLQRHSLAARYYNWVSFPGCLARGAETRGSSRMKTFEEFPMTPTTYKGSVDNQTDSGMVLASEEFEQIESRHRQESGFSCKGPGQNVAVTRAHPDSQGRRRRPERGARGGQVFYNSEYGELSEPSEEDHCSPSARVTFFTDNSY

SEQ ID NO: 1990 - protein, 445 aa, Homo sapiens
MAAPEERDLTQEQTEKLLQFQDLTGIESMDQCRHTLEQHNWNIEAAVQDRLNEQEGVPSVFNPPPSRPLQVNTADHRIYSYVVSRPQPRGLLGWGYYLIMLPFRFTYYTILDIFRFALRFIRPDPRSRVTDPVGDIVSFMHSFEEKYGRAHPVFYQGTYSQALNDAKRELRFLLVYLHGDDHQDSDEFCRNTLCAPEVISLINTRMLFWACSTNKPEGYRVSQALRENTYPFLAMIMLKDRRMTVVGRLEGLIQPDDLINQLTFIMDANQTYLVSERLEREERNQTQVLRQQQDEAYLASLRADQEKERKKREERERKRRKEEEVQQQKLAEERRRQNLQEEKERKLECLPPEPSPDDPESVKIIFKLPNDSRVERRFHFSQSLTVIHDFLFSLKESPEKFQIEANFPRRVLPCIPSEEWPNPPTLQEAGLSHTEVLFVQDLTDE

SEQ ID NO: 1991 - protein, 1310 aa, Homo sapiens
MAQLWLSCFLLPALVVSVAANVAPKFLANMTSVILPEDLPVGAQAFWLVAEDQDNDPLTYGMSGPNAYFFAVTPKTGEVKLASALDYETLYTFKVTISVSDPYIQVQREMLVIVEDRNDNAPVFQNTAFSTSINETLPVGSVVFSVLAVDKDMGSAGMVVYSIEKVIPSTGDSEHLFRILANGSIVLNGSLSYNNKSAFYQLELKACDLGGMYHNTFTIQCSLPVFLSISVVDQPDLDPQFVREFYSASVAEDAAKGTSVLTVEAVDGDKGINDPVIYSISYSTRPGWFDIGADGVIRVNGSLDREQLLEADEEVQLQVTATETHLNIYGQEAKVSIWVTVRVMDVNDHKPEFYNCSLPACTFTPEEAQVNFTGYVDEHASPRIPIDDLTMVVYDPDKGSNGTFLLSLGGPDAEAFSVSPERAVGSASVQVLVRVSALVDYERQTAMAVQVVATDSVSQNFSVAMVTIHLRDINDHRPTFPQSLYVLTVPEHSATGSVVTDSIHATDPDTGAWGQITYSLLPGNGADLFQVDPVSGTVTVRNGELLDRESQAVYYLTLQATDGGNLSSSTTLQIHLLDINDNAPVVSGSYNIFVQEEEGNVSVTIQAHDNDEPGTNNSRLLFNLLPGPYSHNFSLDPDTGLLRNLGPLDREAIDPALEGRIVLTVLVSDCGEPVLGTKVNVTITVEDINDNLPIFNQSSYNFTVKEEDPGVLVGVVKAWDADQTEANNRISFSLSGSGANYFMIRGLVLGAGWAEGYLRLPPDVSLDYETQPVFNLTVSAENPDPQGGETIVDVCVNVKDVNDNPPTLDVASLRGIRVAENGSQHGQVAVVVASDVDTSAQLEIQLVNILCTKAGVDVGSLCWGWFSVAANGSVYINQSKAIDYEACDLVTLVVRACDLATDPGFQAYSNNGSLLITIEDVNDNAPYFLPENKTFVIIPELVLPNREVASVRARDDDSGNNGVILFSILRVDFISKDGATIPFQGVFSIFTSSEADVFAGSIQPVTSLDSTLQGTYQVTVQARDRPSLGPFLEATTTLNLFTVDQSYRSRLQFSTPKEEVGANRQAINAALTQATRTTVYIVDIQDIDSAARARPHSYLDAYFVFPNGSALTLDELSVMIRNDQDSLTQLLQLGLVVLGSQESQESDLSKQLISVIIGLGVALLLVLVIMTMAFVCVRKSYNRKLQAMKAAKEARKTAAGVMPSAPAIPGTNMYNTERANPMLNLPNKDLGLEYLSPSNDLDSVSVNSLDDNSVDVDKNSQEIKEHRPPHTPPEPDPEPLSVVLLGRQAGASGQLEGPSYTNAGLDTTDL

SEQ ID NO: 1992 - protein, 384 aa, Homo sapiens
MSCAGRAGPARLAALALLTCSLWPARADNASQEYYTALINVTVQEPGRGAPLTFRIDRGRYGLDSPKAEVRGQVLAPLPLHGVADHLGCDPQTRFFVPPNIKQWIALLQRGNCTFKEKISRAAFHNAVAVVIYNNKSKEEPVTMTHPGTGDIIAVMITELRGKDILSYLEKNISVQMTIAVGTRMPPKNFSRGSLVFVSISFIVLMIISSAWLIFYFIQKIRYTNARDRNQRRLGDAAKKAISKLTTRTVKKGDKETDPDFDHCAVCIESYKQNDVVRILPCKHVFHKSCVDPWLSEHCTCPMCKLNILKALGIVPNLPCTDNVAFDMERLTRTQAVNRRSALGDLAGDNSLGLEPLRTSGISPLPQDGELTPRTGEINIAVTR

SEQ ID NO: 1993 - protein, 843 aa, Homo sapiens
MSFPPHLNRPPMGIPALPPGIPPPQFPGFPPPVPPGTPMIPVPMSIMAPAPTVLVPTVSMVGKHLGARKDHPGLKAKENDENCGPTTTVFVGNISEKASDMLIRQLLAKCGLVLSWKRVQGASGKLQAFGFCEYKEPESTLRALRLLHDLQIGEKKLLVKVDAKTKAQLDEWKAKKKASNGNARPETVTNDDEEALDEETKRRDQMIKGAIEVLIREYSSELNAPSQESDSHPRKKKKEKKEDIFRRFPVAPLIPYPLITKEDINAIEMEEDKRDLISREISKFRDTHKKLEEEKGKKEKERQEIEKERRERERERERERERREREREREREREREKEKERERERERDRDRDRTKERDRDRDRERDRDRDRERSSDRNKDRSRSREKSRDREREREREREREREREREREREREREREREREREREKDKKRDREEDEEDAYERRKLERKLREKEAAYQERLKNWEIRERKKTREYEKEAEREEERRREMAKEAKRLKEFLEDYDDDRDDPKYYRGSALQKRLRDREKEMEADERDRKREKEELEEIRQRLLAEGHPDPDAELQRMEQEAERRRQPQIKQEPESEEEEEEKQEKEEKREEPMEEEEEPEQKPCLKPTLRPISSAPSVSSASGNATPNTPGDESPCGIIIPHENSPDQQQPEEHRPKIGLSLKLGASNSPGQPNSVKRKKLPVDSVFNKFEDEDSDDVPRKRKLVPLDYGEDDKNATKGTVNTEEKRKHIKSLIEKIPTAKPELFAYPLDWSIVDSILMERRIRPWINKKIIEYIGEEEATLVDFVCSKVMAHSSPQSILDDVAMVLDEEAEVFIVKMWRLLIYETEAKKIGLVK

SEQ ID NO: 1994 - protein, 1821 aa, Homo sapiens
MRPRTKARSPGRALRNPWRGFLPLTLALFVGAGHAQRDPVGRYEPAGGDANRLRRPGGSYPAAAAAKVYSLFREQDAPVAGLQPVERAQPGWGSPRRPTEAEARRPSRAQQSRRVQPPAQTRRSTPLGQQQPAPRTRAAPALPRLGTPQRSGAAPPTPPRGRLTGRNVCGGQCCPGWTTANSTNHCIKPVCEPPCQNRGSCSRPQLCVCRSGFRGARCEEVIPDEEFDPQNSRLAPRRWAERSPNLRRSSAAGEGTLARAQPPAPQSPPAPQSPPAGTLSGLSQTHPSQQHVGLSRTVRLHPTATASSQLSSNALPPGPGLEQRDGTQQAVPLEHPSSPWGLNLTEKIKKIKIVFTPTICKQTCARGHCANSCERGDTTTLYSQGGHGHDPKSGFRIYFCQIPCLNGGRCIGRDECWCPANSTGKFCHLPIPQPDREPPGRGSRPRALLEAPLKQSTFTLPLSNQLASVNPSLVKVHIHHPPEASVQIHQVAQVRGGVEEALVENSVETRPPPWLPASPGHSLWDSNNIPARSGEPPRPLPPAAPRPRGLLGRCYLNTVNGQCANPLLELTTQEDCCGSVGAFWGVTLCAPCPPRPASPVIENGQLECPQGYKRLNLTHCQDINECLTLGLCKDAECVNTRGSYLCTCRPGLMLDPSRSRCVSDKAISMLQGLCYRSLGPGTCTLPLAQRITKQICCCSRVGKAWGSECEKCPLPGTEAFREICPAGHGYTYASSDIRLSMRKAEEEELARPPREQGQRSSGALPGPAERQPLRVVTDTWLEAGTIPDKGDSQAGQVTTSVTHAPAWVTGNATTPPMPEQGIAEIQEEQVTPSTDVLVTLSTPGIDRCAAGATNVCGPGTCVNLPDGYRCVCSPGYQLHPSQAYCTDDNECLRDPCKGKGRCINRVGSYSCFCYPGYTLATSGATQECQDINECEQPGVCSGGQCTNTEGSYHCECDQGYIMVRKGHCQDINECRHPGTCPDGRCVNSPGSYTCLACEEGYRGQSGSCVDVNECLTPGVCAHGKCTNLEGSFRCSCEQGYEVTSDEKGCQDVDECASRASCPTGLCLNTEGSFACSACENGYWVNEDGTACEDLDECAFPGVCPSGVCTNTAGSFSCKDCDGGYRPSPLGDSCEDVDECEDPQSSCLGGECKNTVGSYQCLCPQGFQLANGTVCEDVNECMGEEHCAPHGECLNSHGSFFCLCAPGFVSAEGGTSCQDVDECATTDPCVGGHCVNTEGSFNCLCETGFQPSPESGECVDIDECEDYGDPVCGTWKCENSPGSYRCVLGCQPGFHMAPNGDCIDIDECANDTMCGSHGFCDNTDGSFRCLCDQGFEISPSGWDCVDVNECELMLAVCGAALCENVEGSFLCLCASDLEEYDAQEGHCRPRGAGGQSMSEAPTGDHAPAPTRMDCYSGQKGHAPCSSVLGRNTTQAECCCTQGASWGDACDLCPSEDSAEFSEICPSGKGYIPVEGAWTFGQTMYTDADECVIFGPGLCPNGRCLNTVPGYVCLCNPGFHYDASHKKCEDHDECQDLACENGECVNTEGSFHCFCSPPLTLDLSQQRCMNSTSSTEDLPDHDIHMDICWKKVTNDVCSEPLRGHRTTYTECCCQDGEAWSQQCALCPPRSSEVYAQLCNVARIEAEREAGVHFRPGYEYGPGPDDLHYSIYGPDGAPFYNYLGPEDTVPEPAFPNTAGHSADRTPILESPLQPSELQPHYVASHPEPPAGFEGLQAEECGILNGCENGRCVRVREGYTCDCFEGFQLDAAHMACVDVNECDDLNGPAVLCVHGYCENTEGSYRCHCSPGYVAEAGPPHCTAKE

SEQ ID NO: 1995 - protein, 444 aa, Homo sapiens
MKVVPSLLLSVLLAQVWLVPGLAPSPQSPETPAPQNQTSRVVQAPKEEEEDEQEASEEKASEEEKAWLMASRQQLAKETSNFGFSLLRKISMRHDGNMVFSPFGMSLAMTGLMLGATGPTETQIKRGLHLQALKPTKPGLLPSLFKGLRETLSRNLELGLTQGSFAFIHKDFDVKETFFNLSKRYFDTECVPMNFRNASQAKRLMNHYINKETRGKIPKLFDEINPETKLILVDYILFKGKWLTPFDPVFTEVDTFHLDKYKTIKVPMMYGAGKFASTFDKNFRCHVLKLPYQGNATMLVVLMEKMGDHLALEDYLTTDLVETWLRNMKTRNMEVFFPKFKLDQKYEMHELLRQMGIRRIFSPFADLSELSATGRNLQVSRVLQRTVIEVDERGTEAVAGILSEITAYSMPPVIKVDRPFHFMIYEETSGMLLFLGRVVNPTLL

SEQ ID NO: 1996 - protein, 1321 aa, Homo sapiens
MELEDGVVYQEEPGGSGAVMSERVSGLAGSIYREFERLIGRYDEEVVKELMPLVVAVLENLDSVFAQDQEHQVELELLRDDNEQLITQYEREKALRKHAEEKFIEFEDSQEQEKKDLQTRVESLESQTRQLELKAKNYADQISRLEEREAELKKEYNALHQRHTEMIHNYMEHLERTKLHQLSGSDQLESTAHSRIRKERPISLGIFPLPAGDGLLTPDAQKGGETPGSEQWKFQELSQPRSHTSLKVSNSPEPQKAVEQEDELSDVSQGGSKATTPASTANSDVATIPTDTPLKEENEGFVKVTDAPNKSEISKHIEVQVAQETRNVSTGSAENEEKSEVQAIIESTPELDMDKDLSGYKGSSTPTKGIENKAFDRNTESLFEELSSAGSGLIGDVDEGADLLGMGREVENLILENTQLLETKNALNIVKNDLIAKVDELTCEKDVLQGELEAVKQAKLKLEEKNRELEEELRKARAEAEDARQKAKDDDDSDIPTAQRKRFTRVEMARVLMERNQYKERLMELQEAVRWTEMIRASRENPAMQEKKRSSIWQFFSRLFSSSSNTTKKPEPPVNLKYNAPTSHVTPSVKKRSSTLSQLPGDKSKAFDFLSEETEASLASRREQKREQYRQVKAHVQKEDGRVQAFGWSLPQKYKQVTNGQGENKMKNLPVPVYLRPLDEKDTSMKLWCAVGVNLSGGKTRDGGSVVGASVFYKDVAGLDTEGSKQRSASQSSLDKLDQELKEQQKELKNQEELSSLVWICTSTHSATKVLIIDAVQPGNILDSFTVCNSHVLCIASVPGARETDYPAGEDLSESGQVDKASLCGSMTSNSSAETDSLLGGITVVGCSAEGVTGAATSPSTNGASPVMDKPPEMEAENSEVDENVPTAEEATEATEGNAGSAEDTVDISQTGVYTEHVFTDPLGVQIPEDLSPVYQSSNDSDAYKDQISVLPNEQDLVREEAQKMSSLLPTMWLGAQNGCLYVHSSVAQWRKCLHSIKLKDSILSIVHVKGIVLVALADGTLAIFHRGVDGQWDLSNYHLLDLGRPHHSIRCMTVVHDKVWCGYRNKIYVVQPKAMKIEKSFDAHPRKESQVRQLAWVGDGVWVSIRLDSTLRLYHAHTYQHLQDVDIEPYVSKMLGTGKLGFSFVRITALMVSCNRLWVGTGNGVIISIPLTETNKTSGVPGNRPGSVIRVYGDENSDKVTPGTFIPYCSMAHAQLCFHGHRDAVKFFVAVPGQVISPQSSSSGTDLTGDKAGPSAQEPGSQTPLKSMLVISGGEGYIDFRMGDEGGESELLGEDLPLEPSVTKAERSHLIVWQVMYGNE

SEQ ID NO: 1997 - protein, 387 aa, Homo sapiens
MAETLFWTPLLVVLLAGLGDTEAQQTTLHPLVGRVFVHTLDHETFLSLPEHVAVPPAVHITYHAHLQGHPDLPRWLRYTQRSPHHPGFLYGSATPEDRGLQVIEVTAYNRDSFDTTRQRLVLEIGDPEGPLLPYQAEFLVRSHDAEEVLPSTPASRFLSALGGLWEPGELQLLNVTSALDRGGRVPLPIEGRKEGVYIKVGSASPFSTCLKMVASPDSHARCAQGQPPLLSCYDTLAPHFRVDWCNVTLVDKSVPEPADEVPTPGDGILEHDPFFCPPTEAPDRDFLVDALVTLLVPLLVALLLTLLLAYVMCCRREGRLKRDLATSDIQMVHHCTIHGNTEELRQMAASREVPRPLSTLPMFNVHTGERLPPRVDSAQVPLILDQH

SEQ ID NO: 1998 - protein, 900 aa, Homo sapiens
MRLFVSDGVPGCLPVLAAAGRARGRAEVLISTVGPEDCVVPFLTRPKVPVLQLDSGNYLFSTSAICRYFFLLSGWEQDDLTNQWLEWEATELQPALSAALYYLVVQGKKGEDVLGSVRRALTHIDHSLSRQNCPFLAGETESLADIVLWGALYPLLQDPAYLPEELSALHSWFQTLSTQEPCQRAAETVLKQQGVLALRPYLQKQPQPSPAEGRAVTNEPEEEELATLSEEEIAMAVTAWEKGLESLPPLRPQQNPVLPVAGERNVLITSALPYVNNVPHLGNIIGCVLSADVFARYSRLRQWNTLYLCGTDEYGTATETKALEEGLTPQEICDKYHIIHADIYRWFNISFDIFGRTTTPQQTKITQDIFQQLLKRGFVLQDTVEQLRCEHCARFLADRFVEGVCPFCGYEEARGDQCDKCGKLINAVELKKPQCKVCRSCPVVQSSQHLFLDLPKLEKRLEEWLGRTLPGSDWTPNAQFITRSWLRDGLKPRCITRDLKWGTPVPLEGFEDKVFYVWFDATIGYLSITANYTDQWERWWKNPEQVDLYQFMAKDNVPFHSLVFPCSALGAEDNYTLVSHLIATEYLNYEDGKFSKSRGVGVFGDMAQDTGIPADIWRFYLLYIRPEGQDSAFSWTDLLLKNNSELLNNLGNFINRAGMFVSKFFGGYVPEMVLTPDDQRLLAHVTLELQHYHQLLEKVRIRDALRSILTISRHGNQYIQVNEPWKRIKGSEADRQRAGTVTGLAVNIAALLSVMLQPYMPTVSATIQAQLQLPPPACSILLTNFLCTLPAGHQIGTVSPLFQKLENDQIESLRQRFGGGQAKTSPKPAVVETVTTAKPQQIQALMDEVTKQGNIVRELKAQKADKNEVAAEVAKLLDLKKQLAVAEGKPPEAPKGKKKK

SEQ ID NO: 1999 - protein, 529 aa, Homo sapiens
MLGFVGRVAAAPASGALRRLTPSASLPPAQLLLRAAPTAVHPVRDYAAQTSPSPKAGAATGRIVAVIGAVVDVQFDEGLPPILNALEVQGRETRLVLEVAQHLGESTVRTIAMDGTEGLVRGQKVLDSGAPIKIPVGPETLGRIMNVIGEPIDERGPIKTKQFAPIHAEAPEFMEMSVEQEILVTGIKVVDLLAPYAKGGKIGLFGGAGVGKTVLIMELINNVAKAHGGYSVFAGVGERTREGNDLYHEMIESGVINLKDATSKVALVYGQMNEPPGARARVALTGLTVAEYFRDQEGQDVLLFIDNIFRFTQAGSEVSALLGRIPSAVGYQPTLATDMGTMQERITTTKKGSITSVQAIYVPADDLTDPAPATTFAHLDATTVLSRAIAELGIYPAVDPLDSTSRIMDPNIVGSEHYDVARGVQKILQDYKSLQDIIAILGMDELSEEDKLTVSRARKIQRFLSQPFQVAEVFTGHMGKLVPLKETIKGFQQILAGEYDHLPEQAFYMVGPIEEAVAKADKLAEEHSS

SEQ ID NO: 2000 - protein, 407 aa, Homo sapiens
MLLSVTSRPGISTFGYNRNNKKPYVSLAQQMAPPSPSNSTPNSSSGSNGNDQLSKTNLYIRGLQPGTTDQDLVKLCQPYGKIVSTKAILDKTTNKCKGYGFVDFDSPSAAQKAVTALKASGVQAQMAKQQEQDPTNLYISNLPLSMDEQELEGMLKPFGQVISTRILRDTSGTSRGVGFARMESTEKCEAIITHFNGKYIKTPPGVPAPSDPLLCKFADGGPKKRQNQGKFVQNGRAWPRNADMGVMALTYDPTTALQNGFYPAPYNITPNRMLAQSALSPYLSSPVSSYQRVTQTSPLQVPNPSWMHHHSYLMQPSGSVLTPGMDHPISLQPASMMGPLTQQLGHLSLSSTGTYMPTAAAMQGAYISQYTPVPSSSVSVEESSGQQNQVAVDAPSEHGVYSFQFNK

SEQ ID NO: 2001 - protein, 160 aa, Homo sapiens
MQPASAKWYDRRDYVFIEFCVEDSKDVNVNFEKSKLTFSCLGGSDNFKHLNEIDLFHCIDPNDSKHKRTDRSILCCLRKGESGQSWPRLTKERAKLNWLSVDFNNWKDWEDDSDEDMSNFDRFSEMMNNMGGDEDVDLPEVDGADDDSQDSDDEKMPDLE

SEQ ID NO: 2002 - protein, 887 aa, Homo sapiens
MGEAEKFHYIYSCDLDINVQLKIGSLEGKREQKSYKAVLEDPMLKFSGLYQETCSDLYVTCQVFAEGKPLALPVRTSYKAFSTRWNWNEWLKLPVKYPDLPRNAQVALTIWDVYGPGKAVPVGGTTVSLFGKYGMFRQGMHDLKVWPNVEADGSEPTKTPGRTSSTLSEDQMSRLAKLTKAHRQGHMVKVDWLDRLTFREIEMINESEKRSSNFMYLMVEFRCVKCDDKEYGIVYYEKDGDESSPILTSFELVKVPDPQMSMENLVESKHHKLARSLRSGPSDHDLKPNAATRDQLNIIVSYPPTKQLTYEEQDLVWKFRYYLTNQEKALTKFLKCVNWDLPQEAKQALELLGKWKPMDVEDSLELLSSHYTNPTVRRYAVARLRQADDEDLLMYLLQLVQALKYENFDDIKNGLEPTKKDSQSSVSENVSNSGINSAEIDSSQIITSPLPSVSSPPPASKTKEVPDGENLEQDLCTFLISRACKNSTLANYLYWYVIVECEDQDTQQRDPKTHEMYLNVMRRFSQALLKGDKSVRVMRSLLAAQQTFVDRLVHLMKAVQRESGNRKKKNERLQALLGDNEKMNLSDVELIPLPLEPQVKIRGIIPETATLFKSALMPAQLFFKTEDGGKYPVIFKHGDDLRQDQLILQIISLMDKLLRKENLDLKLTPYKVLATSTKHGFMQFIQSVPVAEVLDTEGSIQNFFRKYAPSENGPNGISAEVMDTYVKSCAGYCVITYILGVGDRHLDNLLLTKTGKLFHIDFGYILGRDPKPLPPPMKLNKEMVEGMGGTQSEQYQEFRKQCYTAFLHLRRYSNLILNLFSLMVDANIPDIALEPDKTVKKVQDKFRLDLSDEEAVHYMQSLIDESVHALFAAVVEQIHKFAQYWRK

SEQ ID NO: 2003 - protein, 2039 aa, Homo sapiens
MDIVDTFNHLIPTEHLDDALFLGSNLENEVCEDFSASQNVLEDSLKNMLSDKDPMLGSASNQFCLPVLDSNDPNFQMPCSTVVGLDDIMDEGVVKESGNDTIDEEELILPNRNLRDKVEENSVRSPRKSPRLMAQEQVRSLRQSTIAKRSNAAPLSNTKKASGKTVSTAKAGVKQPERSQVKEEVCMSLKPEYHKENRRCSRNSGQIEVVPEVSVSSSHSSVSSCLEMKDEDGLDSKHKCNNPGEIDVPSHELNCSLLSETCVTIGEKKNEALMECKAKPVGSPLFKFSDKEEHEQNDSISGKTGETVVEEMIATRKVEQDSKETVKLSHEDDHILEDAGSSDISSDAACTNPNKTENSLVGLPSCVDEVTECNLELKDTMGIADKTENTLERNKIEPLGYCEDAESNRQLESTEFNKSNLEVVDTSTFGPESNILENAICDVPDQNSKQLNAIESTKIESHETANLQDDRNSQSSSVSYLESKSVKSKHTKPVIHSKQNMTTDAPKKIVAAKYEVIHSKTKVNVKSVKRNTDVPESQQNFHRPVKVRKKQIDKEPKIQSCNSGVKSVKNQAHSVLKKTLQDQTLVQIFKPLTHSLSDKSHAHPGCLKEPHHPAQTGHVSHSSQKQCHKPQQQAPAMKTNSHVKEELEHPGVEHFKEEDKLKLKKPEKNLQPRQRRSSKSFSLDEPPLFIPDNIATIRREGSDHSSSFESKYMWTPSKQCGFCKKPHGNRFMVGCGRCDDWFHGDCVGLSLSQAQQMGEEDKEYVCVKCCAEEDKKTEILDPDTLENQATVEFHSGDKTMECEKLGLSKHTTNDRTKYIDDTVKHKVKILKRESGEGRNSSDCRDNEIKKWQLAPLRKMGQPVLPRRSSEEKSEKIPKESTTVTCTGEKASKPGTHEKQEMKKKKVEKGVLNVHPAASASKPSADQIRQSVRHSLKDILMKRLTDSNLKVPEEKAAKVATKIEKELFSFFRDTDAKYKNKYRSLMFNLKDPKNNILFKKVLKGEVTPDHLIRMSPEELASKELAAWRRRENRHTIEMIEKEQREVERRPITKITHKGEIEIESDAPMKEQEAAMEIQEPAANKSLEKPEGSEKQKEEVDSMSKDTTSQHRQHLFDLNCKICIGRMAPPVDDLSPKKVKVVVGVARKHSDNEAESIADALSSTSNILASEFFEEEKQESPKSTFSPAPRPEMPGTVEVESTFLARLNFIWKGFINMPSVAKFVTKAYPVSGSPEYLTEDLPDSIQVGGRISPQTVWDYVEKIKASGTKEICVVRFTPVTEEDQISYTLLFAYFSSRKRYGVAANNMKQVKDMYLIPLGATDKIPHPLVPFDGPGLELHRPNLLLGLIIRQKLKRQHSACASTSHIAETPESAPPIALPPDKKSKIEVSTEEAPEEENDFFNSFTTVLHKQRNKPQQNLQEDLPTAVEPLMEVTKQEPPKPLRFLPGVLIGWENQPTTLELANKPLPVDDILQSLLGTTGQVYDQAQSVMEQNTVKEIPFLNEQTNSKIEKTDNVEVTDGENKEIKVKVDNISESTDKSAEIETSVVGSSSISAGSLTSLSLRGKPPDVSTEAFLTNLSIQSKQEETVESKEKTLKRQLQEDQENNLQDNQTSNSSPCRSNVGKGNIDGNVSCSENLVANTARSPQFINLKRDPRQAAGRSQPVTTSESKDGDSCRNGEKHMLPGLSHNKEHLTEQINVEEKLCSAEKNSCVQQSDNLKVAQNSPSVENIQTSQAEQAKPLQEDILMQNIETVHPFRRGSAVATSHFEVGNTCPSEFPSKSITFTSRSTSPRTSTNFSPMRPQQPNLQHLKSSPPGFPFPGPPNFPPQSMFGFPPHLPPPLLPPPGFGFAQNPMVPWPPVVHLPGQPQRMMGPLSQASRYIGPQNFYQVKDIRRPERRHSDPWGRQDQQQLDRPFNRGKGDRQRFYSDSHHLKRERHEKEWEQESERHRRRDRSQDKDRDRKSREEGHKDKERARLSHGDRGTDGKASRDSRNVDKKPDKPKSEDYEKDKEREKSKHREGEKDRDRYHKDRDHTDRTKSKR

SEQ ID NO: 2004 - protein, 561 aa, Homo sapiens
MVLGPEQKMSDDSVSGDHGESASLGNINPAYSNPSLSQSPGDSEEYFATYFNEKISIPEEEYSCFSFRKLWAFTGPGFLMSIAYLDPGNIESDLQSGAVAGFKLLWILLLATLVGLLLQRLAARLGVVTGLHLAEVCHRQYPKVPRVILWLMVELAIIGSDMQEVIGSAIAINLLSVGRIPLWGGVLITIADTFVFLFLDKYGLRKLEAFFGFLITIMALTFGYEYVTVKPSQSQVLKGMFVPSCSGCRTPQIEQAVGIVGAVIMPHNMYLHSALVKSRQVNRNNKQEVREANKYFFIESCIALFVSFIINVFVVSVFAEAFFGKTNEQVVEVCTNTSSPHAGLFPKDNSTLAVDIYKGGVVLGCYFGPAALYIWAVGILAAGQSSTMTGTYSGQFVMEGFLNLKWSRFARVVLTRSIAIIPTLLVAVFQDVEHLTGMNDFLNVLQSLQLPFALIPILTFTSLRPVMSDFANGLGWRIAGGILVLIICSINMYFVVVYVRDLGHVALYVVAAVVSVAYLGFVFYLGWQCLIALGMSFLDCGHTVSISKGLLTEEATRGYVK

SEQ ID NO: 2005 - protein, 271 aa, Homo sapiens
MEDSHKSTTSETAPQPGSAVQGAHISHIAQQVSSLSESEESQDSSDSIGSSQKAHGILARRPSYRKILKDLSSEDTRGRKGDGENSGVSAAVTSMSVPTPIYQTSSGQYIAIAPNGALQLASPGTDGVQGLQTLTMTNSGSTQQGTTILQYAQTSDGQQILVPSNQVVVQTASGDMQTYQIRTTPSATSLPQTVVMTSPVTLTSQTTKTDDPQLKREIRLMKNREAARECRRKKKEYVKCLENRVAVLENQNKTLIEELKTLKDLYSNKSV

SEQ ID NO: 2006 - protein, 611 aa, Homo sapiens
MAASAKKKNKKGKTISLTDFLAEDGGTGGGSTYVSKPVSWADETDDLEGDVSTTWHSNDDDVYRAPPIDRSILPTAPRAAREPNIDRSRLPKSPPYTAFLGNLPYDVTEESIKEFFRGLNISAVRLPREPSNPERLKGFGYAEFEDLDSLLSALSLNEESLGNRRIRVDVADQAQDKDRDDRSFGRDRNRDSDKTDTDWRARPATDSFDDYPPRRGDDSFGDKYRDRYDSDRYRDGYRDGYRDGPRRDMDRYGGRDRYDDRGSRDYDRGYDSRIGSGRRAFGSGYRRDDDYRGGGDRYEDRYDRRDDRSWSSRDDYSRDDYRRDDRGPPQRPKLNLKPRSTPKEDDSSASTSQSTRAASIFGGAKPVDTAAREREVEERLQKEQEKLQRQLDEPKLERRPRERHPSWRSEETQERERSRTGSESSQTGTSTTSSRNARRRESEKSLENETLNKEEDCHSPTSKPPKPDQPLKVMPAPPPKENAWVKRSSNPPARSQSSDTEQQSPTSGGGKVAPAQPSEEGPGRKDENKVDGMNAPKGQTGNSSRGPGDGGNRDHWKESDRKDGKKDQDSRSAPEPKKPEENPASKFSSASKYAALSVDGEDENEGEDYAE

SEQ ID NO: 2007 - protein, 177 aa, Homo sapiens
MEALILEPSLYTVKAILILDNDGDRLFAKYYDDTYPSVKEQKAFEKNIFNKTHRTDSEIALLEGLTVVYKSSIDLYFYVIGSSYENELMLMAVLNCLFDSLSQMLRKNVEKRALLENMEGLFLAVDEIVDGGVILESDPQQVVHRVALRGEDVPLTEQTVSQVLQSAKEQIKWSLLR

SEQ ID NO: 2008 - protein, 204 aa, Homo sapiens
MVCGGFACSKNCLCALNLLYTLVSLLLIGIAAWGIGFGLISSLRVVGVVIAVGIFLFLIALVGLIGAVKHHQVLLFFYMIILLLVFIVQFSVSCACLALNQEQQGQLLEVGWNNTASARNDIQRNLNCCGFRSVNPNDTCLASCVKSDHSCSPCAPIIGEYAGEVLRFVGGIGLFFSFTEILGVWLTYRYRNQKDPRANPSAFL

SEQ ID NO: 2009 - protein, 1475 aa, Homo sapiens
MASGAGGVGGGGGGKIRTRRCHQGPIKPYQQGRQQHQGILSRVTESVKNIVPGWLQRYFNKNEDVCSCSTDTSEVPRWPENKEDHLVYADEESSNITDGRITPEPAVSNTEEPSTTSTASNYPDVLTRPSLHRSHLNFSMLESPALHCQPSTSSAFPIGSSGFSLVKEIKDSTSQHDDDNISTTSGFSSRASDKDITVSKNTSLPPLWSPEAERSHSLSQHTATSSKKPAFNLSAFGTLSPSLGNSSILKTSQLGDSPFYPGKTTYGGAAAAVRQSKLRNTPYQAPVRRQMKAKQLSAQSYGVTSSTARRILQSLEKMSSPLADAKRIPSIVSSPLNSPLDRSGIDITDFQAKREKVDSQYPPVQRLMTPKPVSIATNRSVYFKPSLTPSGEFRKTNQRIDNKCSTGYEKNMTPGQNREQRESGFSYPNFSLPAANGLSSGVGGGGGKMRRERTRFVASKPLEEEEMEVPVLPKISLPITSSSLPTFNFSSPEITTSSPSPINSSQALTNKVQMTSPSSTGSPMFKFSSPIVKSTEANVLPPSSIGFTFSVPVAKTAELSGSSSTLEPIISSSAHHVTTVNSTNCKKTPPEDCEGPFRPAEILKEGSVLDILKSPGFASPKIDSVAAQPTATSPVVYTRPAISSFSSSGIGFGESLKAGSSWQCDTCLLQNKVTDNKCIACQAAKLSPRDTAKQTGIETPNKSGKTTLSASGTGFGDKFKPVIGTWDCDTCLVQNKPEAIKCVACETPKPGTCVKRALTLTVVSESAETMTASSSSCTVTTGTLGFGDKFKRPIGSWECSVCCVSNNAEDNKCVSCMSEKPGSSVPASSSSTVPVSLPSGGSLGLEKFKKPEGSWDCELCLVQNKADSTKCLACESAKPGTKSGFKGFDTSSSSSNSAASSSFKFGVSSSSSGPSQTLTSTGNFKFGDQGGFKIGVSSDSGSINPMSEGFKFSKPIGDFKFGVSSESKPEEVKKDSKNDNFKFGLSSGLSNPVSLTPFQFGVSNLGQEEKKEELPKSSSAGFSFGTGVINSTPAPANTIVTSENKSSFNLGTIETKSASVAPFTCKTSEAKKEEMPATKGGFSFGNVEPASLPSASVFVLGRTEEKQQEPVTSTSLVFGKKADNEEPKCQPVFSFGNSEQTKDENSSKSTFSFSMTKPSEKESEQPAKATFAFGAQTSTTADQGAAKPVFSFLNNSSSSSSTPATSAGGGIFGSSTSSSNPPVATFVFGQSSNPVSSSAFGNTAESSTSQSLLFSQDSKLATTSSTGTAVTPFVFGPGASSNNTTTSGFGFGATTTSSSAGSSFVFGTGPSAPSASPAFGANQTPTFGQSQGASQPNPPGFGSISSSTALFPTGSQPAPPTFGTVSSSSQPPVFGQQPSQSAFGSGTTPNSSSAFQFGSSTTNFNFTNNSPSGVFTFGANSSTPAASAQPSGSGGFPFNQSPAAFTVGSNGKNVFSSSGTSFSGRKIKTAVRRRK

SEQ ID NO: 2010 - protein, 423 aa, Homo sapiens
MRSLGANMAAALRAAGVLLRDPLASSSWRVCQPWRWKSGAAAAAVTTETAQHAQGAKPQVQPQKRKPKTGILMLNMGGPETLGDVHDFLLRLFLDRDLMTLPIQNKLAPFIAKRRTPKIQEQYRRIGGGSPIKIWTSKQGEGMVKLLDELSPNTAPHKYYIGFRYVHPLTEEAIEEMERDGLERAIAFTQYPQYSCSTTGSSLNAIYRYYNQVGRKPTMKWSTIDRWPTHHLLIQCFADHILKELDHFPLEKRSEVVILFSAHSLPMSVVNRGDPYPQEVSATVQKVMERLEYCNPYRLVWQSKVGPMPWLGPQTDESIKGLCERGRKNILLVPIAFTSDHIETLYELDIEYSQVLAKECGVENIRRAESLNGNPLFSKALADLVHSHIQSNELCSKQLTLSCPLCVNPVCRETKSFFTSQQL

SEQ ID NO: 2011 - protein, 367 aa, Homo sapiens
MAPSGPGSSARRRCRRVLYWIPVVFITLLLGWSYYAYAIQLCIVSMENTGEQVVCLMAYHLLFAMFVWSYWKTIFTLPMNPSKEFHLSYAEKDLLEREPRGEAHQEVLRRAAKDLPIYTRTMSGAIRYCDRCQLIKPDRCHHCSVCDKCILKMDHHCPWVNNCVGFSNYKFFLLFLAYSLLYCLFIAATDLQYFIKFWTNGLPDTQAKFHIMFLFFAAAMFSVSLSSLFGYHCWLVSKNKSTLEAFRSPVFRHGTDKNGFSLGFSKNMRQVFGDEKKYWLLPIFSSLGDGCSFPTCLVNQDPEQASTPAGLNSTAKNLENHQFPAKPLRESQSHLLTDSQSWTESSINPGKCKAGMSNPALTMENET

SEQ ID NO: 2012 - protein, 395 aa, Homo sapiens
MPGRSCVALVLLAAAVSCAVAQHAPPWTEDCRKSTYPPSGPTYRGAVPWYTINLDLPPYKRWHELMLDKAPVLKVIVNSLKNMINTFVPSGKIMQVVDEKLPGLLGNFPGPFEEEMKGIAAVTDIPLGEIISFNIFYELFTICTSIVAEDKKGHLIHGRNMDFGVFLGWNINNDTWVITEQLKPLTVNLDFQRNNKTVFKASSFAGYVGMLTGFKPGLFSLTLNERFSINGGYLGILEWILGKKDVMWIGFLTRTVLENSTSYEEAKNLLTKTKILAPAYFILGGNQSGEGCVITRDRKESLDVYELDAKQGRWYVVQTNYDRWKHPFFLDDRRTPAKMCLNRTSQENISFETMYDVLSTKPVLNKLTVYTTLIDVTKGQFETYLRDCPDPCIGW

SEQ ID NO: 2013 - protein, 863 aa, Homo sapiens
MSSPASTPSRRGSRRGRATPAQTPRSEDARSSPSQRRRGEDSTSTGELQPMPTSPGVDLQSPAAQDVLFSSPPQMHSSAIPLDFDVSSPLTYGTPSSRVEGTPRSGVRGTPVRQRPDLGSAQKGLQVDLQSDGAAAEDIVASEQSLGQKLVIWGTDVNVAACKENFQRFLQRFIDPLAKEEENVGIDITEPLYMQRLGEINVIGEPFLNVNCEHIKSFDKNLYRQLISYPQEVIPTFDMAVNEIFFDRYPDSILEHQIQVRPFNALKTKNMRNLNPEDIDQLITISGMVIRTSQLIPEMQEAFFQCQVCAHTTRVEMDRGRIAEPSVCGRCHTTHSMALIHNRSLFSDKQMIKLQESPEDMPAGQTPHTVILFAHNDLVDKVQPGDRVNVTGIYRAVPIRVNPRVSNVKSVYKTHIDVIHYRKTDAKRLHGLDEEAEQKLFSEKRVELLKELSRKPDIYERLASALAPSIYEHEDIKKGILLQLFGGTRKDFSHTGRGKFRAEINILLCGDPGTSKSQLLQYVYNLVPRGQYTSGKGSSAVGLTAYVMKDPETRQLVLQTGALVLSDNGICCIDEFDKMNESTRSVLHEVMEQQTLSIAKAGIICQLNARTSVLAAANPIESQWNPKKTTIENIQLPHTLLSRFDLIFLLLDPQDEAYDRRLAHHLVALYYQSEEQAEEELLDMAVLKDYIAYAHSTIMPRLSEEASQALIEAYVDMRKIGSSRGMVSAYPRQLESLIRLAEAHAKVRLSNKVEAIDVEEAKRLHREALKQSATDPRTGIVDISILTTGMSATSRKRKEELAEALKKLILSKGKTPALKYQQLFEDIRGQSDIAITKDMFEEALRALADDDFLTVTGKTVRLL

SEQ ID NO: 2014 - protein, 223 aa, Homo sapiens
MKLHYVAVLTLAILMFLTWLPESLSCNKALCASDVSKCLIQELCQCRPGEGNCSCCKECMLCLGALWDECCDCVGMCNPRNYSDTPPTSKSTVEELHEPIPSLFRALTEGDTQLNWNIVSFPVAEELSHHENLVSFLETVNQPHHQNVSVPSNNVHAPYSSDKEHMCTVVYFDDCMSIHQCKISCESMGASKYRWFHNACCECIGPECIDYGSKTVKCMNCMF

SEQ ID NO: 2015 - protein, 360 aa, Homo sapiens
MFVARSIAADHKDLIHDVSFDFHGRRMATCSSDQSVKVWDKSESGDWHCTASWKTHSGSVWRVTWAHPEFGQVLASCSFDRTAAVWEEIVGESNDKLRGQSHWVKRTTLVDSRTSVTDVKFAPKHMGLMLATCSADGIVRIYEAPDVMNLSQWSLQHEISCKLSCSCISWNPSSSRAHSPMIAVGSDDSSPNAMAKVQIFEYNENTRKYAKAETLMTVTDPVHDIAFAPNLGRSFHILAIATKDVRIFTLKPVRKELTSSGGPTKFEIHIVAQFDNHNSQVWRVSWNITGTVLASSGDDGCVRLWKANYMDNWKCTGILKGNGSPVNGSSQQGTSNPSLGSTIPSLQNSLNGSSAGRKHS

SEQ ID NO: 2016 - protein, 2062 aa, Homo sapiens
MPKSGFTKPIQSENSDSDSNMVEKPYGRKSKDKIASYSKTPKIERSDVSKEMKEKSSMKRKLPFTISPSRNEERDSDTDSDPGHTSENWGERLISSYRTYSEKEGPEKKKTKKEAGNKKSTPVSILFGYPLSERKQMALLMQMTARDNSPDSTPNHPSQTTPAQKKTPSSSSRQKDKVNKRNERGETPLHMAAIRGDVKQVKELISLGANVNVKDFAGWTPLHEACNVGYYDVAKILIAAGADVNTQGLDDDTPLHDSASSGHRDIVKLLLRHGGNPFQANKHGERPVDVAETEELELLLKREVPLSDDDESYTDSEEAQSVNPSSVDENIDSETEKDSLICESKQILPSKTPLPSALDEYEFKDDDDEEINKMIDDRHILRKEQRKENEPEAEKTHLFAKQEKAFYPKSFKSKKQKPSRVLYSSTESSDEEALQNKKISTSCSVIPETSNSDMQTKKEYVVSGEHKQKGKVKRKLKNQNKNKENQELKQEKEGKENTRITNLTVNTGLDCSEKTREEGNFRKSFSPKDDTSLHLFHISTGKSPKHSCGLSEKQSTPLKQEHTKTCLSPGSSEMSLQPDLVRYDNTESEFLPESSSVKSCKHKEKSKHQKDFHLEFGEKSNAKIKDEDHSPTFENSDCTLKKMDKEGKTLKKHKLKHKEREKEKHKKEIEGEKEKYKTKDSAKELQRSVEFDREFWKENFFKSDETEDLFLNMEHESLTLEKKSKLEKNIKDDKSTKEKHVSKERNFKEERDKIKKESEKSFREEKIKDLKEERENIPTDKDSEFTSLGMSAIEESIGLHLVEKEIDIEKQEKHIKESKEKPEKRSQIKEKDIEKMERKTFEKEKKIKHEHKSEKDKLDLSECVDKIKEKDKLYSHHTEKCHKEGEKSKNTAAIKKTDDREKSREKMDRKHDKEKPEKERHLAESKEKHLMEKKNKQSDNSEYSKSEKGKNKEKDRELDKKEKSRDKESINITNSKHIQEEKKSSIVDGNKAQHEKPLSLKEKTKDEPLKTPDGKEKDKKDKDIDRYKERDKHKDKIQINSLLKLKSEADKPKPKSSPASKDTRPKEKRLVNDDLMQTSFERMLSLKDLEIEQWHKKHKEKIKQKEKERLRNRNCLELKIKDKEKTKHTPTESKNKELTRSKSSEVTDAYTKEKQPKDAVSNRSQSVDTKNVMTLGKSSFVSDNSLNRSPRSENEKPGLSSRSVSMISVASSEDSCHTTVTTPRPPVEYDSDFMLESSESQMSFSQSPFLSIAKSPALHERELDSLADLPERIKPPYANRLSTSHLRSSSVEDVKLIISEGRPTIEVRRCSMPSVICEHTKQFQTISEESNQGSLLTVPGDTSPSPKPEVFSNVPERDLSNVSNIHSSFATSPTGASNSKYVSADRNLIKNTAPVNTVMDSPVHLEPSSQVGVIQNKSWEMPVDRLETLSTRDFICPNSNIPDQESSLQSFCNSENKVLKENADFLSLRQTELPGNSCAQDPASFMPPQQPCSFPSQSLSDAESISKHMSLSYVANQEPGILQQKNAVQIISSALDTDNESTKDTENTFVLGDVQKTDAFVPVYSDSTIQEASPNFEKAYTLPVLPSEKDFNGSDASTQLNTHYAFSKLTYKSSSGHEVENSTTDTQVISHEKENKLESLVLTHLSRCDSDLCEMNAGMPKGNLNEQDPKHCPESEKCLLSIEDEESQQSILSSLENHSQQSTQPEMHKYGQLVKVELEENAEDDKTENQIPQRMTRNKANTMANQSKQILASCTLLSEKDSESSSPRGRIRLTEDDDPQIHHPRKRKVSRVPQPVQVSPSLLQAKEKTQQSLAAIVDSLKLDEIQPYSSERANPYFEYLHIRKKIEEKRKLLCSVIPQAPQYYDEYVTFNGSYLLDGNPLSKICIPTITPPPSLSDPLKELFRQQEVVRMKLRLQHSIEREKLIVSNEQEVLRVHYRAARTLANQTLPFSACTVLLDAEVYNVPLDSQSDDSKTSVRDRFNARQFMSWLQDVDDKFDKLKTCLLMRQQHEAAALNAVQRLEWQLKLQELDPATYKSISIYEIQEFYVPLVDVNDDFELTPI

SEQ ID NO: 2017 - protein, 659 aa, Homo sapiens
MSLPPEKASELKQLIHQQLSKMDVHGRIREILAETIREELAPDQQHLSTEDLIKALRRRGIIDDVMKELNFVTDSVEQELPSSPKQPICFDRQSTLKKTNIDPTRRYLYLQVLGGKAFLEHLQEPEPLPGQVCSTFTLCLHYRNQRFRSKPVPCACEPDFHDGFLLEVHRESLGDGTRMADSTTMLSISDPIHMVLIKTDIFGETTLVASYFLEWRSVLGSENGVTSLTVELMGVGTESKVSVGILNIKLEMYPPLNQTLSQEVVNTQLALERQKTAEKERLFLVYAKQWWREYLQIRPSHNSRLVKIFAQDENGINRPVCSYVKPLRAGRLLDTPRQAARFVNVLGYERAPVIGGGGKQEQWCTLLAFLCRNKGDCEDHANLLCSLLLGYGLEAFVCVGTKAKGVPHAWVMTCGTDGAITFWESLTGHRYIHKPTNPDEPPVAEQPKPLYPYRTIGCVFNHQMFLGNCQPSDAVETCVFDLNDESKWKPMSEEAIKSVCAPGATTSLPPFPPLCASTIDASVTSNEIEMQLRLLVSEHRKDLGLTTVWEDQLSYLLSPALASYEFERTTSISAGNEEFQDAIRRAVPDGHTFKGFPIHFVYRNARRAFATCLRSPFCEEIICCRGDQVRLAVRVRVFTYPESACAVWIMFACKYRSVL

SEQ ID NO: 2018 - protein, 1139 aa, Homo sapiens
MPSGGDQSPPPPPPPPAAAASDEEEEDDGEAEDAAPPAESPTPQIQQRFDELCSRLNMDEAARAEAWDSYRSMSESYTLEGNDLHWLACALYVACRKSVPTVSKGTVEGNYVSLTRILKCSEQSLIEFFNKMKKWEDMANLPPHFRERTERLERNFTVSAVIFKKYEPIFQDIFKYPQEEQPRQQRGRKQRRQPCTVSEIFHFCWVLFIYAKGNFPMISDDLVNSYHLLLCALDLVYGNALQCSNRKELVNPNFKGLSEDFHAKDSKPSSDPPCIIEKLCSLHDGLVLEAKGIKEHFWKPYIRKLYEKKLLKGKEENLTGFLEPGNFGESFKAINKAYEEYVLSVGNLDERIFLGEDAEEEIGTLSRCLNAGSGTETAERVQMKNILQQHFDKSKALRISTPLTGVRYIKENSPCVTPVSTATHSLSRLHTMLTGLRNAPSEKLEQILRTCSRDPTQAIANRLKEMFEIYSQHFQPDEDFSNCAKEIASKHFRFAEMLYYKVLESVIEQEQKRLGDMDLSGILEQDAFHRSLLACCLEVVTFSYKPPGNFPFITEIFDVPLYHFYKVIEVFIRAEDGLCREVVKHLNQIEEQILDHLAWKPESPLWEKIRDNENRVPTCEEVMPPQNLERADEICIAGSPLTPRRVTEVRADTGGLGRSITSPTTLYDRYSSPPASTTRRRLFVENDSPSDGGTPGRMPPQPLVNAVPVQNVSGETVSVTPVPGQTLVTMATATVTANNGQTVTIPVQGIANENGGITFFPVQVNVGGQAQAVTGSIQPLSAQALAGSLSSQQVTGTTLQVPGQVAIQQISPGGQQQKQGQSVTSSSNRPRKTSSLSLFFRKVYHLAAVRLRDLCAKLDISDELRKKIWTCFEFSIIQCPELMMDRHLDQLLMCAIYVMAKVTKEDKSFQNIMRCYRTQPQARSQVYRSVLIKGKRKRRNSGSSDSRSHQNSPTELNKDRTSRDSSPVMRSSSTLPVPQPSSAPPTPTRLTGANSDMEEEERGDLIQFYNNIYIKQIKTFAMKYSQANMDAPPLSPYPFVRTGSPRRIQLSQNHPVYISPHKNETMLSPREKIFYYFSNSPSKRLREINSMIRTGETPTKKRGILLEDGSESPAKRICPENHSALLRRLQDVANDRGSH

SEQ ID NO: 2019 - protein, 544 aa, Homo sapiens
MSRCAQAAEVAATVPGAGVGNVGLRPPMVPRQASFFPPPVPNPFVQQTQIGSARRVQIVLLGIILLPIRVLLVALILLLAWPFAAISTVCCPEKLTHPITGWRRKITQTALKFLGRAMFFSMGFIVAVKGKIASPLEAPVFVAAPHSTFFDGIACVVAGLPSMVSRNENAQVPLIGRLLRAVQPVLVSRVDPDSRKNTINEIIKRTTSGGEWPQILVFPEGTCTNRSCLITFKPGAFIPGVPVQPVLLRYPNKLDTVTWTWQGYTFIQLCMLTFCQLFTKVEVEFMPVQVPNDEEKNDPVLFANKVRNLMAEALGIPVTDHTYEDCRLMISAGQLTLPMEAGLVEFTKISRKLKLDWDGVRKHLDEYASIASSSKGGRIGIEEFAKYLKLPVSDVLRQLFALFDRNHDGSIDFREYVIGLAVLCNPSNTEEIIQVAFKLFDVDEDGYITEEEFSTILQASLGVPDLDVSGLFKEIAQGDSISYEEFKSFALKHPEYAKIFTTYLDLQTCHVFSLPKEVQTTPSTASNKVSPEKHEESTSDKKDD

SEQ ID NO: 2020 - protein, 446 aa, Homo sapiens
MEAEAADAPPGGVESALSCFSFNQDCTSLATGTKAGYKLFSLSSVEQLDQVHGSNEIPDVYIVERLFSSSLVVVVSHTKPRQMNVYHFKKGTEICNYSYSSNILSIRLNRQRLLVCLEESIYIHNIKDMKLLKTLLDIPANPTGLCALSINHSNSYLAYPGSLTSGEIVLYDGNSLKTVCTIAAHEGTLAAITFNASGSKLASASEKGTVIRVFSVPDGQKLYEFRRGMKRYVTISSLVFSMDSQFLCASSNTETVHIFKLEQVTNSRPEEPSTWSGYMGKMFMAATNYLPTQVSDMMHQDRAFATARLNFSGQRNICTLSTIQKLPRLLVASSSGHLYMYNLDPQDGGECVLIKTHSLLGSGTTEENKENDLRPSLPQSYAATVARPSASSASTVPGYSEDGGALRGEVIPEHEFATGPVCLDDENEFPPIILCRGNQKGKTKQS

SEQ ID NO: 2021 - protein, 333 aa, Homo sapiens
MLGWIKRLIRMVFQQVGVSMQSVLWSRKPYGSSRSIVRKIGTNLSLIQCPRVQFQINSHATEWSPSHPGEDAVASFADVGWVAKEEGECSARLRTEVRSRPPLQDDLLFFEKAPSRQISLPDLSQEEPQLKTPALANEEALQKICALENELAALRAQIAKIVTQQEQQNLTAGDLDSTTFGTIPPHPPPPPPPLPPPALGLHQSTSAVDLIKERREKRANAGKTLVKNNPKKPEMPNMLEILKEMNSVKLRSVKRSEQDVKPKPVDATDPAALIAEALKKKFAYRYRSDSQDEVEKGIPKSESEATSERVLFGPHMLKPTGKMKALIENVSDS

SEQ ID NO: 2022 - protein, 772 aa, Homo sapiens
MNCYLLLRFMLGIPLLWPCLGATENSQTKKVKQPVRSHLRVKRGWVWNQFFVPEEMNTTSHHIGQLRSDLDNGNNSFQYKLLGAGAGSTFIIDERTGDIYAIQKLDREERSLYILRAQVIDIATGRAVEPESEFVIKVSDINDNEPKFLDEPYEAIVPEMSPEGTLVIQVTASDADDPSSGNNARLLYSLLQGQPYFSVEPTTGVIRISSKMDRELQDEYWVIIQAKDMIGQPGALSGTTSVLIKLSDVNDNKPIFKESLYRLTVSESAPTGTSIGTIMAYDNDIGENAEMDYSIEEDDSQTFDIITNHETQEGIVILKKKVDFEHQNHYGIRAKVKNHHVPEQLMKYHTEASTTFIKIQVEDVDEPPLFLLPYYVFEVFEETPQGSFVGVVSATDPDNRKSPIRYSITRSKVFNINDNGTITTSNSLDREISAWYNLSITATEKYNIEQISSIPLYVQVLNINDHAPEFSQYYETYVCENAGSGQVIQTISAVDRDESIEEHHFYFNLSVEDTNNSSFTIIDNQDNTAVILTNRTGFNLQEEPVFYISILIADNGIPSLTSTNTLTIHVCDCGDSGSTQTCQYQELVLSMGFKTEVIIAILICIMIIFGFIFLTLGLKQRRKQILFPEKSEDFRENIFQYDDEGGGEEDTEAFDIAELRSSTIMRERKTRKTTSAEIRSLYRQSLQVGPDSAIFRKFILEKLEEANTDPCAPPFDSLQTYAFEGTGSLAGSLSSLESAVSDQDESYDYLNELGPRFKRLACMFGSAVQSNN

SEQ ID NO: 2023 - protein, 426 aa, Homo sapiens
MFRTKRSALVRRLWRSRAPGGEDEEEGAGGGGGGGELRGEGATDSRAHGAGGGGPGRAGCCLGKAVRGAKGHHHPHPPAAGAGAAGGAEADLKALTHSVLKKLKERQLELLLQAVESRGGTRTACLLLPGRLDCRLGPGAPAGAQPAQPPSSYSLPLLLCKVFRWPDLRHSSEVKRLCCCESYGKINPELVCCNPHHLSRLCELESPPPPYSRYPMDFLKPTADCPDAVPSSAETGGTNYLAPGGLSDSQLLLEPGDRSHWCVVAYWEEKTRVGRLYCVQEPSLDIFYDLPQGNGFCLGQLNSDNKSQLVQKVRSKIGCGIQLTREVDGVWVYNRSSYPIFIKSATLDNPDSRTLLVHKVFPGFSIKAFDYEKAYSLQRPNDHEFMQQPWTGFTVQISFVKGWGQCYTRQFISSCPCWLEVIFNSR

SEQ ID NO: 2024 - protein, 467 aa, Homo sapiens
MSSILPFTPPVVKRLLGWKKSAGGSGGAGGGEQNGQEEKWCEKAVKSLVKKLKKTGRLDELEKAITTQNCNTKCVTIPSTCSEIWGLSTPNTIDQWDTTGLYSFSEQTRSLDGRLQVSHRKGLPHVIYCRLWRWPDLHSHHELKAIENCEYAFNLKKDEVCVNPYHYQRVETPVLPPVLVPRHTEILTELPPLDDYTHSIPENTNFPAGIEPQSNYIPETPPPGYISEDGETSDQQLNQSMDTGSPAELSPTTLSPVNHSLDLQPVTYSEPAFWCSIAYYELNQRVGETFHASQPSLTVDGFTDPSNSERFCLGLLSNVNRNATVEMTRRHIGRGVRLYYIGGEVFAECLSDSAIFVQSPNCNQRYGWHPATVCKIPPGCNLKIFNNQEFAALLAQSVNQGFEAVYQLTRMCTIRMSFVKGWGAEYRRQTVTSTPCWIELHLNGPLQWLDKVLTQMGSPSVRCSSMS

SEQ ID NO: 2025 - protein, 476 aa, Homo sapiens
MANSAKAEEYEKMSLEQAKASVNSETESSFNINENTTASGTGLSEKTSVCRQVDIARKRKEFEDDLVKESSSCGKDTPSKKRKLDPEIVPEEKDCGDAEGNSKKRKRETEDVPKDKSSTGDGTQNKRKIALEDVPEKQKNLEEGHSSTVAAHYNELQEVGLEKRSQSRIFYLRNFNNWMKSVLIGEFLEKVRQKKKRDITVLDLGCGKGGDLLKWKKGRINKLVCTDIADVSVKQCQQRYEDMKNRRDSEYIFSAEFITADSSKELLIDKFRDPQMCFDICSCQFVCHYSFESYEQADMMLRNACERLSPGGYFIGTTPNSFELIRRLEASETESFGNEIYTVKFQKKGDYPLFGCKYDFNLEGVVDVPEFLVYFPLLNEMAKKYNMKLVYKKTFLEFYEEKIKNNENKMLLKRMQALEPYPANESSKLVSEKVDDYEHAAKYMKNSQVRLPLGTLSKSEWEATSIYLVFAFEKQQ

SEQ ID NO: 2026 - protein, 326 aa, Homo sapiens
MVDYYEVLGVQRHASPEDIKKAYRKLALKWHPDKNPENKEEAERKFKQVAEAYEVLSDAKKRDIYDKYGKEGLNGGGGGGSHFDSPFEFGFTFRNPDDVFREFFGGRDPFSFDFFEDPFEDFFGNRRGPRGSRSRGTGSFFSAFSGFPSFGSGFSSFDTGFTSFGSLGHGGLTSFSSTSFGGSGMGNFKSISTSTKMVNGRKITTKRIVENGQERVEVEEDGQLKSLTINGVADDDALAEERMRRGQNALPAQPAGLRPPKPPRPASLLRHAPHCLSEEEGEQDRPRAPGPWDPLASAAGLKEGGKRKKQKQREESKKKKSTKGNH

SEQ ID NO: 2027 - protein, 438 aa, Homo sapiens
MRTLLPPALLTCWLLAPVNSIHPECRFHLEIQEEETKCAELLRSQTEKHKACSGVWDNITCWRPANVGETVTVPCPKVFSNFYSKAGNISKNCTSDGWSETFPDFVDACGYSDPEDESKITFYILVKAIYTLGYSVSLMSLATGSIILCLFRKLHCTRNYIHLNLFLSFILRAISVLVKDDVLYSSSGTLHCPDQPSSWVGCKLSLVFLQYCIMANFFWLLVEGLYLHTLLVAMLPPRRCFLAYLLIGWGLPTVCIGAWTAARLYLEDTGCWDTNDHSVPWWVIRIPILISIIVNFVLFISIIRILLQKLTSPDVGGNDQSQYKRLAKSTLLLIPLFGVHYMVFAVFPISISSKYQILFELCLGSFQGLVVAVLYCFLNSEVQCELKRKWRSRCPTPSASRDYRVCGSSFSRNGSEGALQFHRGSRAQSFLQTETSVI

SEQ ID NO: 2028 - protein, 184 aa, Homo sapiens
MPQSKSRKIAILGYRSVGKSSLTIQFVEGQFVDSYDPTIENTFTKLITVNGQEYHLQLVDTAGQDEYSIFPQTYSIDINGYILVYSVTSIKSFEVIKVIHGKLLDMVGKVQIPIMLVGNKKDLHMERVISYEEGKALAESWNAAFLESSAKENQTAVDVFRRIILEAEKMDGAASQGKSSCSVM

SEQ ID NO: 2029 - protein, 483 aa, Homo sapiens
MAADEVAGGARKATKSKLFEFLVHGVRPGMPSGARMPHQGAPMGPPGSPYMGSPAVRPGLAPAGMEPARKRAAPPPGQSQAQSQGQPVPTAPARSRSAKRRKMADKILPQRIRELVPESQAYMDLLAFERKLDQTIMRKRVDIQEALKRPMKQKRKLRLYISNTFNPAKPDAEDSDGSIASWELRVEGKLLDDPSKQKRKFSSFFKSLVIELDKDLYGPDNHLVEWHRTPTTQETDGFQVKRPGDLSVRCTLLLMLDYQPPQFKLDPRLARLLGLHTQSRSAIVQALWQYVKTNRLQDSHDKEYINGDKYFQQIFDCPRLKFSEIPQRLTALLLPPDPIVINHVISVDPSDQKKTACYDIDVEVEEPLKGQMSSFLLSTANQQEISALDSKIHETIESINQLKIQRDFMLSFSRDPKGYVQDLLRSQSRDLKVMTDVAGNPEEERRAEFYHQPWSQEAVSRYFYCKIQQRRQELEQSLVVRNT

SEQ ID NO: 2030 - protein, 4911 aa, Homo sapiens
MSSEEDKSVEQPQPPPPPPEEPGAPAPSPAAADKRPRGRPRKDGASPFQRARKKPRSRGKTAVEDEDSMDGLETTETETIVETEIKEQSAEEDAEAEVDNSKQLIPTLQRSVSEESANSLVSVGVEAKISEQLCAFCYCGEKSSLGQGDLKQFRITPGFILPWRNQPSNKKDIDDNSNGTYEKMQNSAPRKQRGQRKERSPQQNIVSCVSVSTQTASDDQAGKLWDELSLVGLPDAIDIQALFDSTGTCWAHHRCVEWSLGVCQMEEPLLVNVDKAVVSGSTERCAFCKHLGATIKCCEEKCTQMYHYPCAAGAGTFQDFSHIFLLCPEHIDQAPERSKEDANCAVCDSPGDLLDQFFCTTCGQHYHGMCLDIAVTPLKRAGWQCPECKVCQNCKQSGEDSKMLVCDTCDKGYHTFCLQPVMKSVPTNGWKCKNCRICIECGTRSSSQWHHNCLICDNCYQQQDNLCPFCGKCYHPELQKDMLHCNMCKRWVHLECDKPTDHELDTQLKEEYICMYCKHLGAEMDRLQPGEEVEIAELTTDYNNEMEVEGPEDQMVFSEQAANKDVNGQESTPGIVPDAVQVHTEEQQKSHPSESLDTDSLLIAVSSQHTVNTELEKQISNEVDSEDLKMSSEVKHICGEDQIEDKMEVTENIEVVTHQITVQQEQLQLLEEPETVVSREESRPPKLVMESVTLPLETLVSPHEESISLCPEEQLVIERLQGEKEQKENSELSTGLMDSEMTPTIEGCVKDVSYQGGKSIKLSSETESSFSSSADISKADVSSSPTPSSDLPSHDMLHNYPSALSSSAGNIMPTTYISVTPKIGMGKPAITKRKFSPGRPRSKQGAWSTHNTVSPPSWSPDISEGREIFKPRQLPGSAIWSIKVGRGSGFPGKRRPRGAGLSGRGGRGRSKLKSGIGAVVLPGVSTADISSNKDDEENSMHNTVVLFSSSDKFTLNQDMCVVCGSFGQGAEGRLLACSQCGQCYHPYCVSIKITKVVLSKGWRCLECTVCEACGKATDPGRLLLCDDCDISYHTYCLDPPLQTVPKGGWKCKWCVWCRHCGATSAGLRCEWQNNYTQCAPCASLSSCPVCYRNYREEDLILQCRQCDRWMHAVCQNLNTEEEVENVADIGFDCSMCRPYMPASNVPSSDCCESSLVAQIVTKVKELDPPKTYTQDGVCLTESGMTQLQSLTVTVPRRKRSKPKLKLKIINQNSVAVLQTPPDIQSEHSRDGEMDDSREGELMDCDGKSESSPEREAVDDETKGVEGTDGVKKRKRKPYRPGIGGFMVRQRSRTGQGKTKRSVIRKDSSGSISEQLPCRDDGWSEQLPDTLVDESVSVTESTEKIKKRYRKRKNKLEETFPAYLQEAFFGKDLLDTSRQSKISLDNLSEDGAQLLYKTNMNTGFLDPSLDPLLSSSSAPTKSGTHGPADDPLADISEVLNTDDDILGIISDDLAKSVDHSDIGPVTDDPSSLPQPNVNQSSRPLSEEQLDGILSPELDKMVTDGAILGKLYKIPELGGKDVEDLFTAVLSPANTQPTPLPQPPPPTQLLPIHNQDAFSRMPLMNGLIGSSPHLPHNSLPPGSGLGTFSAIAQSSYPDARDKNSAFNPMASDPNNSWTSSAPTVEGENDTMSNAQRSTLKWEKEEALGEMATVAPVLYTNINFPNLKEEFPDWTTRVKQIAKLWRKASSQERAPYVQKARDNRAALRINKVQMSNDSMKRQQQQDSIDPSSRIDSELFKDPLKQRESEHEQEWKFRQQMRQKSKQQAKIEATQKLEQVKNEQQQQQQQQFGSQHLLVQSGSDTPSSGIQSPLTPQPGNGNMSPAQSFHKELFTKQPPSTPTSTSSDDVFVKPQAPPPPPAPSRIPIQDSLSQAQTSQPPSPQVFSPGSSNSRPPSPMDPYAKMVGTPRPPPVGHSFSRRNSAAPVENCTPLSSVSRPLQMNETTANRPSPVRDLCSSSTTNNDPYAKPPDTPRPVMTDQFPKSLGLSRSPVVSEQTAKGPIAAGTSDHFTKPSPRADVFQRQRIPDSYARPLLTPAPLDSGPGPFKTPMQPPPSSQDPYGSVSQASRRLSVDPYERPALTPRPIDNFSHNQSNDPYSQPPLTPHPAVNESFAHPSRAFSQPGTISRPTSQDPYSQPPGTPRPVVDSYSQSSGTARSNTDPYSQPPGTPRPTTVDPYSQQPQTPRPSTQTDLFVTPVTNQRHSDPYAHPPGTPRPGISVPYSQPPATPRPRISEGFTRSSMTRPVLMPNQDPFLQAAQNRGPALPGPLVRPPDTCSQTPRPPGPGLSDTFSRVSPSAARDPYDQSPMTPRSQSDSFGTSQTAHDVADQPRPGSEGSFCASSNSPMHSQGQQFSGVSQLPGPVPTSGVTDTQNTVNMAQADTEKLRQRQKLREIILQQQQQKKIAGRQEKGSQDSPAVPHPGPLQHWQPENVNQAFTRPPPPYPGNIRSPVAPPLGPRYAVFPKDQRGPYPPDVASMGMRPHGFRFGFPGGSHGTMPSQERFLVPPQQIQGSGVSPQLRRSVSVDMPRPLNNSQMNNPVGLPQHFSPQSLPVQQHNILGQAYIELRHRAPDGRQRLPFSAPPGSVVEASSNLRHGNFIPRPDFPGPRHTDPMRRPPQGLPNQLPVHPDLEQVPPSQQEQGHSVHSSSMVMRTLNHPLGGEFSEAPLSTSVPSETTSDNLQITTQPSDGLEEKLDSDDPSVKELDVKDLEGVEVKDLDDEDLENLNLDTEDGKVVELDTLDNLETNDPNLDDLLRSGEFDIIAYTDPELDMGDKKSMFNEELDLPIDDKLDNQCVSVEPKKKEQENKTLVLSDKHSPQKKSTVTNEVKTEVLSPNSKVESKCETEKNDENKDNVDTPCSQASAHSDLNDGEKTSLHPCDPDLFEKRTNRETAGPSANVIQASTQLPAQDVINSCGITGSTPVLSSLLANEKSDNSDIRPSGSPPPPTLPASPSNHVSSLPPFIAPPGRVLDNAMNSNVTVVSRVNHVFSQGVQVNPGLIPGQSTVNHSLGTGKPATQTGPQTSQSGTSSMSGPQQLMIPQTLAQQNRERPLLLEEQPLLLQDLLDQERQEQQQQRQMQAMIRQRSEPFFPNIDFDAITDPIMKAKMVALKGINKVMAQNNLGMPPMVMSRFPFMGQVVTGTQNSEGQNLGPQAIPQDGSITHQISRPNPPNFGPGFVNDSQRKQYEEWLQETQQLLQMQQKYLEEQIGAHRKSKKALSAKQRTAKKAGREFPEEDAEQLKHVTEQQSMVQKQLEQIRKQQKEHAELIEDYRIKQQQQCAMAPPTMMPSVQPQPPLIPGATPPTMSQPTFPMVPQQLQHQQHTTVISGHTSPVRMPSLPGWQPNSAPAHLPLNPPRIQPPIAQLPIKTCTPAPGTVSNANPQSGPPPRVEFDDNNPFSESFQERERKERLREQQERQRIQLMQEVDRQRALQQRMEMEQHGMVGSEISSSRTSVSQIPFYSSDLPCDFMQPLGPLQQSPQHQQQMGQVLQQQNIQQGSINSPSTQTFMQTNERRQVGPPSFVPDSPSIPVGSPNFSSVKQGHGNLSGTSFQQSPVRPSFTPALPAAPPVANSSLPCGQDSTITHGHSYPGSTQSLIQLYSDIIPEEKGKKKRTRKKKRDDDAESTKAPSTPHSDITAPPTPGISETTSTPAVSTPSELPQQADQESVEPVGPSTPNMAAGQLCTELENKLPNSDFSQATPNQQTYANSEVDKLSMETPAKTEEIKLEKAETESCPGQEEPKLEEQNGSKVEGNAVACPVSSAQSPPHSAGAPAAKGDSGNELLKHLLKNKKSSSLLNQKPEGSICSEDDCTKDNKLVEKQNPAEGLQTLGAQMQGGFGCGNQLPKTDGGSETKKQRSKRTQRTGEKAAPRSKKRKKDEEEKQAMYSSTDTFTHLKQQNNLSNPPTPPASLPPTPPPMACQKMANGFATTEELAGKAGVLVSHEVTKTLGPKPFQLPFRPQDDLLARALAQGPKTVDVPASLPTPPHNNQEELRIQDHCGDRDTPDSFVPSSSPESVVGVEVSRYPDLSLVKEEPPEPVPSPIIPILPSTAGKSSESRRNDIKTEPGTLYFASPFGPSPNGPRSGLISVAITLHPTAAENISSVVAAFSDLLHVRIPNSYEVSSAPDVPSMGLVSSHRINPGLEYRQHLLLRGPPPGSANPPRLVSSYRLKQPNVPFPPTSNGLSGYKDSSHGIAESAALRPQWCCHCKVVILGSGVRKSFKDLTLLNKDSRESTKRVEKDIVFCSNNCFILYSSTAQAKNSENKESIPSLPQSPMRETPSKAFHQYSNNISTLDVHCLPQLPEKASPPASPPIAFPPAFEAAQVEAKPDELKVTVKLKPRLRAVHGGFEDCRPLNKKWRGMKWKKWSIHIVIPKGTFKPPCEDEIDEFLKKLGTSLKPDPVPKDYRKCCFCHEEGDGLTDGPARLLNLDLDLWVHLNCALWSTEVYETQAGALINVELALRRGLQMKCVFCHKTGATSGCHRFRCTNIYHFTCAIKAQCMFFKDKTMLCPMHKPKGIHEQELSYFAVFRRVYVQRDEVRQIASIVQRGERDHTFRVGSLIFHTIGQLLPQQMQAFHSPKALFPVGYEASRLYWSTRYANRRCRYLCSIEEKDGRPVFVIRIVEQGHEDLVLSDISPKGVWDKILEPVACVRKKSEMLQLFPAYLKGEDLFGLTVSAVARIAESLPGVEACENYTFRYGRNPLMELPLAVNPTGCARSEPKMSAHVKRFVLRPHTLNSTSTSKSFQSTVTGELNAPYSKQFVHSKSSQYRKMKTEWKSNVYLARSRIQGLGLYAARDIEKHTMVIEYIGTIIRNEVANRKEKLYESQNRGVYMFRMDNDHVIDATLTGGPARYINHSCAPNCVAEVVTFERGHKIIISSSRRIQKGEELCYDYKFDFEDDQHKIPCHCGAVNCRKWMN

SEQ ID NO: 2031 - protein, 241 aa, Homo sapiens
MLSSTAMYSAPGRDLGMEPHRAAGPLQLRFSPYVFNGGTILAIAGEDFAIVASDTRLSEGFSIHTRDSPKCYKLTDKTVIGCSGFHGDCLTLTKIIEARLKMYKHSNNKAMTTGAIAAMLSTILYSRRFFPYYVYNIIGGLDEEGKGAVYSFDPVGSYQRDSFKAGGSASAMLQPLLDNQVGFKNMQNVEHVPLSLDRAMRLVKDVFISAAERDVYTGDALRICIVTKEGIREETVSLRKD

SEQ ID NO: 2032 - protein, 1131 aa, Homo sapiens
MFQIPVENLDNIRKVRKKVKGILVDIGLDSCKELLKDLKGFDPGEKYFHNTSWGDVSLWEPSGKKVRYRTKPYCCGLCKYSTKVLTSFKNHLHRYHEDEIDQELVIPCPNCVFASQPKVVGRHFRMFHAPVRKVQNYTVNILGETKSSRSDVISFTCLKCNFSNTLYYSMKKHVLVAHFHYLINSYFGLRTEEMGEQPKTNDTVSIEKIPPPDKYYCKKCNANASSQDALMYHILTSDIHRDLENKLRSVISEHIKRTGLLKQTHIAPKPAAHLAAPANGSAPSAPAQPPCFHLALPQNSPSPAAGQPVTVAQGAPGSLTHSPPAAGQSHMTLVSSPLPVGQNSLTLQPPAPQPVFLSHGVPLHQSVNPPVLPLSQPVGPVNKSVGTSVLPINQTVRPGVLPLTQPVGPINRPVGPGVLPVSPSVTPGVLQAVSPGVLSVSRAVPSGVLPAGQMTPAGQMTPAGVIPGQTATSGVLPTGQMVQSGVLPVGQTAPSRVLPPGQTAPLRVISAGQVVPSGLLSPNQTVSSSAVVPVNQGVNSGVLQLSQPVVSGVLPVGQPVRPGVLQLNQTVGTNILPVNQPVRPGASQNTTFLTSGSILRQLIPTGKQVNGIPTYTLAPVSVTLPVPPGGLATVAPPQMPIQLLPSGAAAPMAGSMPGMPSPPVLVNAAQSVFVQASSSAADTNQVLKQAKQWKTCPVCNELFPSNVYQVHMEVAHKHSESKSGEKLEPEKLAACAPFLKWMREKTVRCLSCKCLVSEEELIHHLLMHGLGCLFCPCTFHDIKGLSEHSRNRHLGKKKLPMDYSNRGFQLDVDANGNLLFPHLDFITILPKEKLGEREVYLAILAGIHSKSLVPVYVKVRPQAEGTPGSTGKRVSTCPFCFGPFVTTEAYELHLKERHHIMPTVHTVLKSPAFKCIHCCGVYTGNMTLAAIAVHLVRCRSAPKDSSSDLQAQPGFIHNSELLLVSGEVMHDSSFSVKRKLPDGHLGAEDQRHGEEQPPILNADAAPGPEKVTSVVPFKRQRNESRTEGPIVKDEALQILALDPKKYEGRSYEEKKQFLKDYFHKKPYPSKKEIELLSSLFWVWKIDVASFFGKRRYICMKAIKNHKPSVLLGFDMSELKNVKHRLNFEYEP

SEQ ID NO: 2033 - protein, 1221 aa, Homo sapiens
MLFPLQVAAVTSSVRDDPLEHCVSPRTRARSPEICKMADNLDEFIEEQKARLAEDKAELESDPPYMEMKGKLSAKLSENSKILISMAKENIPPNSQQTRGSLGIDYGLSLPLGEDYERKKHKLKEELRQDYRRYLTQERLKLERNKEYNQFLRGKEESSEKFRQVEKSTEPKSQRNKKPIGQVKPDLTSQIQTSCENSEGPRKDVLTPSEAYEELLNQRRLEEDRYRQLDDEIELRNRRIIKKANEEVGISNLKHQRFASKAGIPDRRFHRFNEDRVFDRRYHRPDQDPEVSEEMDERFRYESDFDRRLSRVYTNDRMHRNKRGNMPPMEHDGDVIEQSNIRISSAENKSAPDNETSKSANQDTCSPFAGMLFGGEDRELIQRRKEKYRLELLEQMAEQQRNKRREKDLELRVAASGAQDPEKSPDRLKQFSVAPRHFEEMIPPERPRIAFQTPLPPLSAPSVPPIPSVHPVPSQNEDLRSGLSSALGEMVSPRIAPLPPPPLLPPLATNYRTPYDDAYYFYGSRNTFDPSLAYYGSGMMGVQPAAYVSAPVTHQLAQPVVNTVGQNELKITSDQVINSGLIFEDKPKPSKQSLQSYQEALQQQIREREERRKKEREEKEEYEAKLEAEMRTYNPWGKGGGGAPLRDAKGNLITDLNRMHRQNIDAYHNPDARTYEDKRAVVSLDPNLATSNAENLEDAANKSSGHMQTQSSPFARGNVFGEPPTELQIKQQELYKNFLRFQIEEKKQREEAERERLRIAEEKEERRLAEQRARIQQEYEEEQEKKREKEEEQRLKNEEHIRLAEERQKEAERKKKEEEEKYNLQLQHYCERDNLIGEETKHMRQPSPIVPALQNKIASKLQRPPSVDSIIRSFIHESSMSRAQSPPVPARKNQLRAEEEKKNVIMELSEMRKQLRSEERRLQERLLHMDSDDEIPIRKKERNPMDIFDMARHRLQAPVRRQSPKGLDAATFQNVHDFNELKDRDSETRVDLKFMYLDPPRDHHTLEIQQQALLREQQKRLNRIKMQEGAKVDLDAIPSAKVREQRMPRDDTSDFLKNSLLESDSAFIGAYGETYPAIEDDVLPPPSQLPSARERRRNKWKGLDIDSSRPNVAPDGLSLKSISSVNVDELRVRNEERMRRLNEFHNKPINTDDESSLVDPDDIMKHIGDDGSNSVATEPWLRPGTSETLKRFMAEQLNQEQQQIPGKPGTFTWQGLSTAHG

SEQ ID NO: 2034 - protein, 374 aa, Homo sapiens
MAIRKKSTKSPPVLSHEFVLQNHADIVSCVAMVFLLGLMFEITAKASIIFVTLQYNVTLPATEEQATESVSLYYYGIKDLATVFFYMLVAIIIHAVIQEYMLDKINRRMHFSKTKHSKFNESGQLSAFYLFACVWGTFILISENYISDPTILWRAYPHNLMTFQMKFFYISQLAYWLHAFPELYFQKTKKEDIPRQLVYIGLYLFHIAGAYLLNLNHLGLVLLVLHYFVEFLFHISRLFYFSNEKYQKGFSLWAVLFVLGRLLTLILSVLTVGFGLARAENQKLDFSTGNFNVLAVRIAVLASICVTQAFMMWKFINFQLRRWREHSAFQAPAVKKKPTVTKGRSSKKGTENGVNGTLTSNVADSPRNKKEKSS

SEQ ID NO: 2035 - protein, 1849 aa, Homo sapiens
MYEGKKTKNMFLTRALEKILADKEVKKAHHSQLRKACEVALEEIKAETEKQSPPHGEAKAGSSTLPPVKSKTNFIEADKYFLPFELACQSKCPRIVSTSLDCLQKLIAYGHLTGNAPDSTTPGKKLIDRIIETICGCFQGPQTDEGVQLQIIKALLTAVTSQHIEIHEGTVLQAVRTCYNIYLASKNLINQTTAKATLTQMLNVIFARMENQALQEAKQMEKERHRQHHHLLQSPVSHHEPESPQLRYLPPQTVDHISQEHEGDLDLHTNDVDKSLQDDTEPENGSDISSAENEQTEADQATAAETLSKNEVLYDGENHDCEEKPQDIVQNIVEEMVNIVVGDMGEGTTINASADGNIGTIEDGSDSENIQANGIPGTPISVAYTPSLPDDRLSVSSNDTQESGNSSGPSPGAKFSHILQKDAFLVFRSLCKLSMKPLSDGPPDPKSHELRSKILSLQLLLSILQNAGPIFRTNEMFINAIKQYLCVALSKNGVSSVPEVFELSLSIFLTLLSNFKTHLKMQIEVFFKEIFLYILETSTSSFDHKWMVIQTLTRICADAQSVVDIYVNYDCDLNAANIFERLVNDLSKIAQGRGSQELGMSNVQELSLRKKGLECLVSILKCMVEWSKDQYVNPNSQTTLGQEKPSEQEMSEIKHPETINRYGSLNSLESTSSSGIGSYSTQMSGTDNPEQFEVLKQQKEIIEQGIDLFNKKPKRGIQYLQEQGMLGTTPEDIAQFLHQEERLDSTQVGEFLGDNDKFNKEVMYAYVDQHDFSGKDFVSALRMFLEGFRLPGEAQKIDRLMEKFAARYLECNQGQTLFASADTAYVLAYSIIMLTTDLHSPQVKNKMTKEQYIKMNRGINDSKDLPEEYLSAIYNEIAGKKISMKETKELTIPTKSSKQNVASEKQRRLLYNLEMEQMAKTAKALMEAVSHVQAPFTSATHLEHVRPMFKLAWTPFLAAFSVGLQDCDDTEVASLCLEGIRCAIRIACIFSIQLERDAYVQALARFTLLTVSSGITEMKQKNIDTIKTLITVAHTDGNYLGNSWHEILKCISQLELAQLIGTGVKPRYISGTVRGREGSLTGTKDQAPDEFVGLGLVGGNVDWKQIASIQESIGETSSQSVVVAVDRIFTGSTRLDGNAIVDFVRWLCAVSMDELLSTTHPRMFSLQKIVEISYYNMGRIRLQWSRIWEVIGDHFNKVGCNPNEDVAIFAVDSLRQLSMKFLEKGELANFRFQKDFLRPFEHIMKRNRSPTIRDMVVRCIAQMVNSQAANIRSGWKNIFSVFHLAASDQDESIVELAFQTTGHIVTLVFEKHFPATIDSFQDAVKCLSEFACNAAFPDTSMEAIRLIRHCAKYVSDRPQAFKEYTSDDMNVAPEDRVWVRGWFPILFELSCIINRCKLDVRTRGLTVMFEIMKTYGHTYEKHWWQDLFRIVFRIFDNMKLPEQQTEKAEWMTTTCNHALYAICDVFTQYLEVLSDVLLDDIFAQLYWCVQQDNEQLARSGTNCLENVVILNGEKFTLEIWDKTCNCTLDIFKTTIPHALLTWRPNSGETAPPPPSPVSEKPLDTISQKSVDIHDSIQPRSVDNRPQAPLVSASAVNEEVSKIKSTAKFPEQKLFAALLIKCVVQLELIQTIDNIVFFPATSKKEDAENLAAAQRDAVDFDVRVDTQDQGMYRFLTSQQLFKLLDCLLESHRFAKAFNSNNEQRTALWKAGFKGKSKPNLLKQETSSLACGLRILFRMYMDESRVSAWEEVQQRLLNVCSEALSYFLTLTSESHREAWTNLLLLFLTKVLKISDNRFKAHASFYYPLLCEIMQFDLIPELRAVLRRFFLRIGVVFQISQPPEQELGINKQ

SEQ ID NO: 2036 - protein, 201 aa, Homo sapiens
MVTLAELLVLLAALLATVSGYFVSIDAHAEECFFERVTSGTKMGLIFEVAEGGFLDIDVEITGPDNKGIYKGDRESSGKYTFAAHMDGTYKFCFSNRMSTMTPKIVMFTIDIGEAPKGQDMETEAHQNKLEEMINELAVAMTAVKHEQEYMEVRERIHRAINDNTNSRVVLWSFFEALVLVAMTLGQIYYLKRFFEVRRVV

SEQ ID NO: 2037 - protein, 815 aa, Homo sapiens
MEDGFSSYSSLYDTSSLLQFCNDDSASAASSMEVTDRIASLEQRVQMQEDDIQLLKSALADVVRRLNITEEQQAVLNRKGPTKARPLMQTLPLRTTVNNGTVLPKKPTGSLPSPSGVRKETAVPATKSNIKRTSSSERVSPGGRRESNGDSRGNRNRTGSTSSSSSGKKNSESKPKEPVFSAEEGYVKMFLRGRPVTMYMPKDQVDSYSLEAKVELPTKRLKLEWVYGYRGRDCRNNLYLLPTGETVYFIASVVVLYNVEEQLQRHYAGHNDDVKCLAVHPDRITIATGQVAGTSKDGKQLPPHVRIWDSVTLNTLHVIGIGFFDRAVTCIAFSKSNGGTNLCAVDDSNDHVLSVWDWQKEEKLADVKCSNEAVFAADFHPTDTNIIVTCGKSHLYFWTLEGSSLNKKQGLFEKQEKPKFVLCVTFSENGDTITGDSSGNILVWGKGTNRISYAVQGAHEGGIFALCMLRDGTLVSGGGKDRKLISWSGNYQKLRKTEIPEQFGPIRTVAEGKGDVILIGTTRNFVLQGTLSGDFTPITQGHTDELWGLAIHASKSQFLTCGHDKHATLWDAVGHRPVWDKIIEDPAQSSGFHPSGSVVAVGTLTGRWFVFDTETKDLVTVHTDGNEQLSVMRYSPDGNFLAIGSHDNCIYIYGVSDNGRKYTRVGKCSGHSSFITHLDWSVNSQFLVSNSGDYEILYWVPSACKQVVSVETTRDIEWATYTCTLGFHVFGVWPEGSDGTDINAVCRAHEKKLLSTGDDFGKVHLFSYPCSQFRAPSHIYGGHSSHVTNVDFLCEDSHLISTGGKDTSIMQWRVI

SEQ ID NO: 2038 - protein, 414 aa, Homo sapiens
MASGDTLYIATDGSEMPAEIVELHEIEVETIPVETIETTVVGEEEEEDDDDEDGGGGDHGGGGGHGHAGHHHHHHHHHHHPPMIALQPLVTDDPTQVHHHQEVILVQTREEVVGGDDSDGLRAEDGFEDQILIPVPAPAGGDDDYIEQTLVTVAAAGKSGGGGSSSSGGGRVKKGGGKKSGKKSYLSGGAGAAGGGGADPGNKKWEQKQVQIKTLEGEFSVTMWSSDEKKDIDHETVVEEQIIGENSPPDYSEYMTGKKLPPGGIPGIDLSDPKQLAEFARMKPRKIKEDDAPRTIACPHKGCTKMFRDNSAMRKHLHTHGPRVHVCAECGKAFVESSKLKRHQLVHTGEKPFQCTFEGCGKRFSLDFNLRTHVRIHTGDRPYVCPFDGCNKKFAQSTNLKSHILTHAKAKNNQ

SEQ ID NO: 2039 - protein, 485 aa, Homo sapiens
MLTCNKAGSRMVVDAANSNGPFQPVVLLHIRDVPPADQEKLFIQKLRQCCVLFDFVSDPLSDLKWKEVKRAALSEMVEYITHNRNVITEPIYPEVVHMFAVNMFRTLPPSSNPTGAEFDPEEDEPTLEAAWPHLQLVYEFFLRFLESPDFQPNIAKKYIDQKFVLQLLELFDSEDPRERDFLKTTLHRIYGKFLGLRAYIRKQINNIFYRFIYETEHHNGIAELLEILGSIINGFALPLKEEHKIFLLKVLLPLHKVKSLSVYHPQLAYCVVQFLEKDSTLTEPVVMALLKYWPKTHSPKEVMFLNELEEILDVIEPSEFVKIMEPLFRQLAKCVSSPHFQVAERALYYWNNEYIMSLISDNAAKILPIMFPSLYRNSKTHWNKTIHGLIYNALKLFMEMNQKLFDDCTQQFKAEKLKEKLKMKEREEAWVKIENLAKANPQAQKDPKKDRPLARRKSELPQDPHTKKALEAHCRADELASQDGR

SEQ ID NO: 2040 - protein, 216 aa, Homo sapiens
MSIALKQVFNKDKTFRPKRKFEPGTQRFELHKRAQASLNSGVDLKAAVQLPSGEDQNDWVAVHVVDFFNRINLIYGTICEFCTERTCPVMSGGPKYEYRWQDDLKYKKPTALPAPQYMNLLMDWIEVQINNEEIFPTCVGVPFPKNFLQICKKILCRLFRVFVHVYIHHFDRVIVMGAEAHVNTCYKHFYYFVTEMNLIDRKELEPLKEMTSRMCH

SEQ ID NO: 2041 - protein, 711 aa, Homo sapiens
MPADVNLSQKPQVLGPEKQDGSCEASVSFEDVTVDFSREEWQQLDPAQRCLYRDVMLELYSHLFAVGYHIPNPEVIFRMLKEKEPRVEEAEVSHQRCQEREFGLEIPQKEISKKASFQKDMVGEFTRDGSWCSILEELRLDADRTKKDEQNQIQPMSHSAFFNKKTLNTESNCEYKDPGKMIRTRPHLASSQKQPQKCCLFTESLKLNLEVNGQNESNDTEQLDDVVGSGQLFSHSSSDACSKNIHTGETFCKGNQCRKVCGHKQSLKQHQIHTQKKPDGCSECGGSFTQKSHLFAQQRIHSVGNLHECGKCGKAFMPQLKLSVYLTDHTGDIPCICKECGKVFIQRSELLTHQKTHTRKKPYKCHDCGKAFFQMLSLFRHQRTHSREKLYECSECGKGFSQNSTLIIHQKIHTGERQYACSECGKAFTQKSTLSLHQRIHSGQKSYVCIECGQAFIQKAHLIVHQRSHTGEKPYQCHNCGKSFISKSQLDIHHRIHTGEKPYECSDCGKTFTQKSHLNIHQKIHTGERHHVCSECGKAFNQKSILSMHQRIHTGEKPYKCSECGKAFTSKSQFKEHQRIHTGEKPYVCTECGKAFNGRSNFHKHQITHTRERPFVCYKCGKAFVQKSELITHQRTHMGEKPYECLDCGKSFSKKPQLKVHQRIHTGERPYVCSECGKAFNNRSNFNKHQTTHTRDKSYKCSYSVKGFTKQ

SEQ ID NO: 2042 - protein, 364 aa, Homo sapiens
MPLLLLLPLLWAGALAMDPNFWLQVQESVTVQEGLCVLVPCTFFHPIPYYDKNSPVHGYWFREGAIISRDSPVATNKLDQEVQEETQGRFRLLGDPSRNNCSLSIVDARRRDNGSYFFRMERGSTKYSYKSPQLSVHVTDLTHRPKILIPGTLEPGHSKNLTCSVSWACEQGTPPIFSWLSAAPTSLGPRTTHSSVLIITPRPQDHGTNLTCQVKFAGAGVTTERTIQLNVTYVPQNPTTGIFPGDGSGKQETRAGVVHGAIGGAGVTALLALCLCLIFFIVKTHRRKAARTAVGRNDTHPTTGSASPKHQKKSKLHGPTETSSCSGAAPTVEMDEELHYASLNFHGMNPSKDTSTEYSEVRTQ

SEQ ID NO: 2043 - protein, 290 aa, Homo sapiens
MANPKLLGMGLSEAEAIGADSARFEELLLQASKELQQAQTTRPESTQIQPQPGFCIKTNSSEGKVFINICHSPSIPPPADVTEEELLQMLEEDQAGFRIPMSLGEPHAELDAKGQGCTAYDVAVNSDFYRRMQNSDFLRELVITIAREGLEDKYNLQLNPEWRMMKNRPFMGSISQQNIRSEQRPRIQELGDLYTPAPGRAESGPEKPHLNLWLEAPDLLLAEVDLPKLDGALGLSLEIGENRLVMGGPQQLYHLDAYIPLQINSHESKAAFHRKRKQLMVAMPLLPVPS

SEQ ID NO: 2044 - protein, 452 aa, Homo sapiens
MELALRRSPVPRWLLLLPLLLGLNAGAVIDWPTEEGKEVWDYVTVRKDAYMFWWLYYATNSCKNFSELPLVMWLQGGPGGSSTGFGNFEEIGPLDSDLKPRKTTWLQAASLLFVDNPVGTGFSYVNGSGAYAKDLAMVASDMMVLLKTFFSCHKEFQTVPFYIFSESYGGKMAAGIGLELYKAIQRGTIKCNFAGVALGDSWISPVDSVLSWGPYLYSMSLLEDKGLAEVSKVAEQVLNAVNKGLYREATELWGKAEMIIEQNTDGVNFYNILTKSTPTSTMESSLEFTQSHLVCLCQRHVRHLQRDALSQLMNGPIRKKLKIIPEDQSWGGQATNVFVNMEEDFMKPVISIVDELLEAGINVTVYNGQLDLIVDTMGQEAWVRKLKWPELPKFSQLKWKALYSDPKSLETSAFVKSYKNLAFYWILKAGHMVPSDQGDMALKMMRLVTQQE

SEQ ID NO: 2045 - protein, 712 aa, Homo sapiens
MRVLLHLPALLASLILLQAAASTTRAQTTRTSAISDTVSQAKVQVNKAFLDSRTRLKTAMSSETPTSRQLSEYLKHAKGRTRTAIRNGQVWEESLKRLRQKASLTNVTDPSLDLTSLSLEVGCGAPAPVVRCDPCSPYRTITGDCNNRRKPALGAANRALARWLPAEYEDGLSLPFGWTPGKTRNGFPLPLAREVSNKIVGYLNEEGVLDQNRSLLFMQWGQIVDHDLDFAPDTELGSSEYSKAQCDEYCIQGDNCFPIMFPPNDPKAGTQGKCMPFFRAGFVCPTPPYKSLAREQINALTSFLDASFVYSSEPSLASRLRNLSSPLGLMAVNQEVSDHGLPYLPYDSKKPSPCEFINTTARVPCFLAGDSRASEHILLATSHTLFLREHNRLARELKRLNPQWDGEKLYQEARKILGAFVQIITFRDYLPILLGDHMQKWIPPYQGYSESVDPRISNVFTFAFRFGHLEVPSSMFRLDENYQPWGPEPELPLHTLFFNTWRMVKDGGIDPLVRGLLAKKSKLMKQNKMMTGELRNKLFQPTHRIHGFDLAAINTQRCRDHGQPGYNSWRAFCDLSQPQTLEELNTVLKSKMLAKKLLGLYGTPDNIDIWIGAIAEPLVERGRVGPLLACLLGKQFQQIRDGDRFWWENPGVFTNEQKDSLQKMSFSRLVCDNTRITKVPRDPFWANSYPYDFVDCSAIDKLDLSPWASVKN

SEQ ID NO: 2046 - protein, 406 aa, Homo sapiens
MAENGKNCDQRRVAMNKEHHNGNFTDPSSVNEKKRREREERQNIVLWRQPLITLQYFSLEILVILKEWTSKLWHRQSIVVSFLLLLAVLIATYYVEGVHQQYVQRIEKQFLLYAYWIGLGILSSVGLGTGLHTFLLYLGPHIASVTLAAYECNSVNFPEPPYPDQIICPDEEGTEGTISLWSIISKVRIEACMWGIGTAIGELPPYFMARAARLSGAEPDDEEYQEFEEMLEHAESAQDFASRAKLAVQKLVQKVGFFGILACASIPNPLFDLAGITCGHFLVPFWTFFGATLIGKAIIKMHIQKIFVIITFSKHIVEQMVAFIGAVPGIGPSLQKPFQEYLEAQRQKLHHKSEMGTPQGENWLSWMFEKLVVVMVCYFILSIINSMAQSYAKRIQQRLNSEEKTK

SEQ ID NO: 2047 - protein, 360 aa, Homo sapiens
MPKFKQRRRKLKAKAERLFKKKEASHFQSKLITPPPPPPSPERVGISSIDISQSRSWLTSSWNFNFPNIRDAIKLWTNRVWSIYSWCQNCITQSLEVLKDTIFPSRICHRELYSVKQQFCILESKLCKLQEALKTISESSSCPSCGQTCHMSGKLTNVPACVLITPGDSKAVLPPTLPQPASHFPPPPPPPPLPPPPPPLAPVLLRKPSLAKALQAGPLKKDGPMQITVKDLLTVKLKKTQSLDEKRKLIPSPKARNPLVTVSDLQHVTLKPNSKVLSTRVTNVLITPGKSQMDLRKLLRKVDVERSPGGTPLTNKENMETGTGLTPVMTQALRRKFQLAHPRSPTPTLPLSTSSFDEQN

SEQ ID NO: 2048 - protein, 964 aa, Homo sapiens
MDEQSVESIAEVFRCFICMEKLRDARLCPHCSKLCCFSCIRRWLTEQRAQCPHCRAPLQLRELVNCRWAEEVTQQLDTLQLCSLTKHEENEKDKCENHHEKLSVFCWTCKKCICHQCALWGGMHGGHTFKPLAEIYEQHVTKVNEEVAKLRRRLMELISLVQEVERNVEAVRNAKDERVREIRNAVEMMIARLDTQLKNKLITLMGQKTSLTQETELLESLLQEVEHQLRSCSKSELISKSSEILMMFQQVHRKPMASFVTTPVPPDFTSELVPSYDSATFVLENFSTLRQRADPVYSPPLQVSGLCWRLKVYPDGNGVVRGYYLSVFLELSAGLPETSKYEYRVEMVHQSCNDPTKNIIREFASDFEVGECWGYNRFFRLDLLANEGYLNPQNDTVILRFQVRSPTFFQKSRDQHWYITQLEAAQTSYIQQINNLKERLTIELSRTQKSRDLSPPDNHLSPQNDDALETRAKKSACSDMLLEGGPTTASVREAKEDEEDEEKIQNEDYHHELSDGDLDLDLVYEDEVNQLDGSSSSASSTATSNTEENDIDEETMSGENDVEYNNMELEEGELMEDAAAAGPAGSSHGYVGSSSRISRRTHLCSAATSSLLDIDPLILIHLLDLKDRSSIENLWGLQPRPPASLLQPTASYSRKDKDQRKQQAMWRVPSDLKMLKRLKTQMAEVRCMKTDVKNTLSEIKSSSAASGDMQTSLFSADQAALAACGTENSGRLQDLGMELLAKSSVANCYIRNSTNKKSNSPKPARSSVAGSLSLRRAVDPGENSRSKGDCQTLSEGSPGSSQSGSRHSSPRALIHGSIGDILPKTEDRQCKALDSDAVVVAVFSGLPAVEKRRKMVTLGANAKGGHLEGLQMTDLENNSETGELQPVLPEGASAAPEEGMSSDSDIECDTENEEQEEHTSVGGFHDSFMVMTQPPDEDTHSSFPDGEQIGPEDLSFNTDENSGR

SEQ ID NO: 2049 - protein, 271 aa, Homo sapiens
MEAAAEPGNLAGVRHIILVLSGKGGVGKSTISTELALALRHAGKKVGILDVDLCGPSIPRMLGAQGRAVHQCDRGWAPVFLDREQSISLMSVGFLLEKPDEAVVWRGPKKNALIKQFVSDVAWGELDYLVVDTPPGTSDEHMATIEALRPYQPLGALVVTTPQAVSVGDVRRELTFCRKTGLRVMGIVENMSGFTCPHCTECTSVFSRGGGEELAQLAGVPFLGSVPLDPALMRTLEEGHDFIQEFPGSPAFAALTSIAQKILDATPACLP

SEQ ID NO: 2050 - protein, 4303 aa, Homo sapiens
MPPAAPARLALALGLGLWLGALAGGPGRGCGPCEPPCLCGPAPGAACRVNCSGRGLRTLGPALRIPADATALDVSHNLLRALDVGLLANLSALAELDISNNKISTLEEGIFANLFNLSEINLSGNPFECDCGLAWLPRWAEEQQVRVVQPEAATCAGPGSLAGQPLLGIPLLDSGCGEEYVACLPDNSSGTVAAVSFSAAHEGLLQPEACSAFCFSTGQGLAALSEQGWCLCGAAQPSSASFACLSLCSGPPPPPAPTCRGPTLLQHVFPASPGATLVGPHGPLASGQLAAFHIAAPLPVTATRWDFGDGSAEVDAAGPAASHRYVLPGRYHVTAVLALGAGSALLGTDVQVEAAPAALELVCPSSVQSDESLDLSIQNRGGSGLEAAYSIVALGEEPARAVHPLCPSDTEIFPGNGHCYRLVVEKAAWLQAQEQCQAWAGAALAMVDSPAVQRFLVSRVTRSLDVWIGFSTVQGVEVGPAPQGEAFSLESCQNWLPGEPHPATAEHCVRLGPTGWCNTDLCSAPHSYVCELQPGGPVQDAENLLVGAPSGDLQGPLTPLAQQDGLSAPHEPVEVMVFPGLRLSREAFLTTAEFGTQELRRPAQLRLQVYRLLSTAGTPENGSEPESRSPDNRTQLAPACMPGGRWCPGANICLPLDASCHPQACANGCTSGPGLPGAPYALWREFLFSVPAGPPAQYSVTLHGQDVLMLPGDLVGLQHDAGPGALLHCSPAPGHPGPRAPYLSANASSWLPHLPAQLEGTWACPACALRLLAATEQLTVLLGLRPNPGLRLPGRYEVRAEVGNGVSRHNLSCSFDVVSPVAGLRVIYPAPRDGRLYVPTNGSALVLQVDSGANATATARWPGGSVSARFENVCPALVATFVPGCPWETNDTLFSVVALPWLSEGEHVVDVVVENSASRANLSLRVTAEEPICGLRATPSPEARVLQGVLVRYSPVVEAGSDMVFRWTINDKQSLTFQNVVFNVIYQSAAVFKLSLTASNHVSNVTVNYNVTVERMNRMQGLQVSTVPAVLSPNATLALTAGVLVDSAVEVAFLWTFGDGEQALHQFQPPYNESFPVPDPSVAQVLVEHNVMHTYAAPGEYLLTVLASNAFENLTQQVPVSVRASLPSVAVGVSDGVLVAGRPVTFYPHPLPSPGGVLYTWDFGDGSPVLTQSQPAANHTYASRGTYHVRLEVNNTVSGAAAQADVRVFEELRGLSVDMSLAVEQGAPVVVSAAVQTGDNITWTFDMGDGTVLSGPEATVEHVYLRAQNCTVTVGAASPAGHLARSLHVLVFVLEVLRVEPAACIPTQPDARLTAYVTGNPAHYLFDWTFGDGSSNTTVRGCPTVTHNFTRSGTFPLALVLSSRVNRAHYFTSICVEPEVGNVTLQPERQFVQLGDEAWLVACAWPPFPYRYTWDFGTEEAAPTRARGPEVTFIYRDPGSYLVTVTASNNISAANDSALVEVQEPVLVTSIKVNGSLGLELQQPYLFSAVGRGRPASYLWDLGDGGWLEGPEVTHAYNSTGDFTVRVAGWNEVSRSEAWLNVTVKRRVRGLVVNASRTVVPLNGSVSFSTSLEAGSDVRYSWVLCDRCTPIPGGPTISYTFRSVGTFNIIVTAENEVGSAQDSIFVYVLQLIEGLQVVGGGRYFPTNHTVQLQAVVRDGTNVSYSWTAWRDRGPALAGSGKGFSLTVLEAGTYHVQLRATNMLGSAWADCTMDFVEPVGWLMVAASPNPAAVNTSVTLSAELAGGSGVVYTWSLEEGLSWETSEPFTTHSFPTPGLHLVTMTAGNPLGSANATVEVDVQVPVSGLSIRASEPGGSFVAAGSSVPFWGQLATGTNVSWCWAVPGGSSKRGPHVTMVFPDAGTFSIRLNASNAVSWVSATYNLTAEEPIVGLVLWASSKVVAPGQLVHFQILLAAGSAVTFRLQVGGANPEVLPGPRFSHSFPRVGDHVVSVRGKNHVSWAQAQVRIVVLEAVSGLQVPNCCEPGIATGTERNFTARVQRGSRVAYAWYFSLQKVQGDSLVILSGRDVTYTPVAAGLLEIQVRAFNALGSENRTLVLEVQDAVQYVALQSGPCFTNRSAQFEAATSPSPRRVAYHWDFGDGSPGQDTDEPRAEHSYLRPGDYRVQVNASNLVSFFVAQATVTVQVLACREPEVDVVLPLQVLMRRSQRNYLEAHVDLRDCVTYQTEYRWEVYRTASCQRPGRPARVALPGVDVSRPRLVLPRLALPVGHYCFVFVVSFGDTPLTQSIQANVTVAPERLVPIIEGGSYRVWSDTRDLVLDGSESYDPNLEDGDQTPLSFHWACVASTQREAGGCALNFGPRGSSTVTIPRERLAAGVEYTFSLTVWKAGRKEEATNQTVLIRSGRVPIVSLECVSCKAQAVYEVSRSSYVYLEGRCLNCSSGSKRGRWAARTFSNKTLVLDETTTSTGSAGMRLVLRRGVLRDGEGYTFTLTVLGRSGEEEGCASIRLSPNRPPLGGSCRLFPLGAVHALTTKVHFECTGWHDAEDAGAPLVYALLLRRCRQGHCEEFCVYKGSLSSYGAVLPPGFRPHFEVGLAVVVQDQLGAAVVALNRSLAITLPEPNGSATGLTVWLHGLTASVLPGLLRQADPQHVIEYSLALVTVLNEYERALDVAAEPKHERQHRAQIRKNITETLVSLRVHTVDDIQQIAAALAQCMGPSRELVCRSCLKQTLHKLEAMMLILQAETTAGTVTPTAIGDSILNITGDLIHLASSDVRAPQPSELGAESPSRMVASQAYNLTSALMRILMRSRVLNEEPLTLAGEEIVAQGKRSDPRSLLCYGGAPGPGCHFSIPEAFSGALANLSDVVQLIFLVDSNPFPFGYISNYTVSTKVASMAFQTQAGAQIPIERLASERAITVKVPNNSDWAARGHRSSANSANSVVVQPQASVGAVVTLDSSNPAAGLHLQLNYTLLDGHYLSEEPEPYLAVYLHSEPRPNEHNCSASRRIRPESLQGADHRPYTFFISPGSRDPAGSYHLNLSSHFRWSALQVSVGLYTSLCQYFSEEDMVWRTEGLLPLEETSPRQAVCLTRHLTAFGASLFVPPSHVRFVFPEPTADVNYIVMLTCAVCLVTYMVMAAILHKLDQLDASRGRAIPFCGQRGRFKYEILVKTGWGRGSGTTAHVGIMLYGVDSRSGHRHLDGDRAFHRNSLDIFRIATPHSLGSVWKIRVWHDNKGLSPAWFLQHVIVRDLQTARSAFFLVNDWLSVETEANGGLVEKEVLAASDAALLRFRRLLVAELQRGFFDKHIWLSIWDRPPRSRFTRIQRATCCVLLICLFLGANAVWYGAVGDSAYSTGHVSRLSPLSVDTVAVGLVSSVVVYPVYLAILFLFRMSRSKVAGSPSPTPAGQQVLDIDSCLDSSVLDSSFLTFSGLHAEQAFVGQMKSDLFLDDSKSLVCWPSGEGTLSWPDLLSDPSIVGSNLRQLARGQAGHGLGPEEDGFSLASPYSPAKSFSASDEDLIQQVLAEGVSSPAPTQDTHMETDLLSSLSSTPGEKTETLALQRLGELGPPSPGLNWEQPQAARLSRTGLVEGLRKRLLPAWCASLAHGLSLLLVAVAVAVSGWVGASFPPGVSVAWLLSSSASFLASFLGWEPLKVLLEALYFSLVAKRLHPDEDDTLVESPAVTPVSARVPRVRPPHGFALFLAKEEARKVKRLHGMLRSLLVYMLFLLVTLLASYGDASCHGHAYRLQSAIKQELHSRAFLAITRSEELWPWMAHVLLPYVHGNQSSPELGPPRLRQVRLQEALYPDPPGPRVHTCSAAGGFSTSDYDVGWESPHNGSGTWAYSAPDLLGAWSWGSCAVYDSGGYVQELGLSLEESRDRLRFLQLHNWLDNRSRAVFLELTRYSPAVGLHAAVTLRLEFPAAGRALAALSVRPFALRRLSAGLSLPLLTSVCLLLFAVHFAVAEARTWHREGRWRVLRLGAWARWLLVALTAATALVRLAQLGAADRQWTRFVRGRPRRFTSFDQVAQLSSAARGLAASLLFLLLVKAAQQLRFVRQWSVFGKTLCRALPELLGVTLGLVVLGVAYAQLAILLVSSCVDSLWSVAQALLVLCPGTGLSTLCPAESWHLSPLLCVGLWALRLWGALRLGAVILRWRYHALRGELYRPAWEPQDYEMVELFLRRLRLWMGLSKVKEFRHKVRFEGMEPLPSRSSRGSKVSPDVPPPSAGSDASHPSTSSSQLDGLSVSLGRLGTRCEPEPSRLQAVFEALLTQFDRLNQATEDVYQLEQQLHSLQGRRSSRAPAGSSRGPSPGLRPALPSRLARASRGVDLATGPSRTPLRAKNKVHPSST

SEQ ID NO: 2051 - protein, 756 aa, Homo sapiens
MASAPPASPPGSEPPGPDPEPGGPDGPGAAQLAPGPAELRLGAPVGGPDPQSPGLDEPAPGAAADGGARWSAGPAPGLEGGPRDPGPSAPPPRSGPRGQLASPDAPGPGPRSEAPLPELDPLFSWTEEPEECGPASCPESAPFRLQGSSSSHRARGEVDVFSPFPAPTAGELALEQGPGSPPQPSDLSQTHPLPSEPVGSQEDGPRLRAVFDALDGDGDGFVRIEDFIQFATVYGAEQVKDLTKYLDPSGLGVISFEDFYQGITAIRNGDPDGQCYGGVASAQDEEPLACPDEFDDFVTYEANEVTDSAYMGSESTYSECETFTDEDTSTLVHPELQPEGDADSAGGSAVPSECLDAMEEPDHGALLLLPGRPHPHGQSVITVIGGEEHFEDYGEGSEAELSPETLCNGQLGCSDPAFLTPSPTKRLSSKKVARYLHQSGALTMEALEDPSPELMEGPEEDIADKVVFLERRVLELEKDTAATGEQHSRLRQENLQLVHRANALEEQLKEQELRACEMVLEETRRQKELLCKMEREKSIEIENLQTRLQQLDEENSELRSCTPCLKANIERLEEEKQKLLDEIESLTLRLSEEQENKRRMGDRLSHERHQFQRDKEATQELIEDLRKQLEHLQLLKLEAEQRRGRSSSMGLQEYHSRARESELEQEVRRLKQDNRNLKEQNEELNGQIITLSIQGAKSLFSTAFSESLAAEISSVSRDELMEAIQKQEEINFRLQDYIDRIIVAIMETNPSILEVK

SEQ ID NO: 2052 - protein, 855 aa, Homo sapiens
MSEARRDSTSSLQRKKPPWLKLDIPSAVPLTAEEPSFLQPLRRQAFLRSVSMPAETAHISSPHHELRRPVLQRQTSITQTIRRGTADWFGVSKDSDSTQKWQRKSIRHCSQRYGKLKPQVLRELDLPSQDNVSLTSTETPPPLYVGPCQLGMQKIIDPLARGRAFRVADDTAEGLSAPHTPVTPGAASLCSFSSSRSGFHRLPRRRKRESVAKMSFRAAAALMKGRSVRDGTFRRAQRRSFTPASFLEEDTTDFPDELDTSFFAREGILHEELSTYPDEVFESPSEAALKDWEKAPEQADLTGGALDRSELERSHLMLPLERGWRKQKEGAAAPQPKVRLRQEVVSTAGPRRGQRIAVPVRKLFAREKRPYGLGMVGRLTNRTYRKRIDSFVKRQIEDMDDHRPFFTYWLTFVHSLVTILAVCIYGIAPVGFSQHETVDSVLRNRGVYENVKYVQQENFWIGPSSEALIHLGAKFSPCMRQDPQVHSFIRSAREREKHSACCVRNDRSGCVQTSEEECSSTLAVWVKWPIHPSAPELAGHKRQFGSVCHQDPRVCDEPSSEDPHEWPEDITKWPICTKNSAGNHTNHPHMDCVITGRPCCIGTKGRCEITSREYCDFMRGYFHEEATLCSQVHCMDDVCGLLPFLNPEVPDQFYRLWLSLFLHAGILHCLVSICFQMTVLRDLEKLAGWHRIAIIYLLSGVTGNLASAIFLPYRAEVGPAGSQFGILACLFVELFQSWQILARPWRAFFKLLAVVLFLFTFGLLPWIDNFAHISGFISGLFLSFAFLPYISFGKFDLYRKRCQIIIFQVVFLGLLAGLVVLFYVYPVRCEWCEFLTCIPFTDKFCEKYELDAQLH

SEQ ID NO: 2053 - protein, 837 aa, Homo sapiens
MEPAPSEVRLAVREAIHALSSSEDGGHIFCTLESLKRYLGEMEPPALPREKEEFASAHFSPVLRCLASRLSPAWLELLPHGRLEELWASFFLEGPADQAFLVLMETIEGAAGPSFRLMKMARLLARFLREGRLAVLMEAQCRQQTQPGFILLRETLLGKVVALPDHLGNRLQQENLAEFFPQNYFRLLGEEVVRVLQAVVDSLQGGLDSSVSFVSQVLGKACVHGRQQEILGVLVPRLAALTQGSYLHQRVCWRLVEQVPDRAMEAVLTGLVEAALGPEVLSRLLGNLVVKNKKAQFVMTQKLLFLQSRLTTPMLQSLLGHLAMDSQRRPLLLQVLKELLETWGSSSAIRHTPLPQQRHVSKAVLICLAQLGEPELRDSRDELLASMMAGVKCRLDSSLPPVRRLGMIVAEVVSARIHPEGPPLKFQYEEDELSLELLALASPQPAGDGASEAGTSLVPATAEPPAETPAEIVDGGVPQAQLAGSDSDLDSDDEFVPYDMSGDRELKSSKAPAYVRDCVEALTTSEDIERWEAALRALEGLVYRSPTATREVSVELAKVLLHLEEKTCVVGFAGLRQRALVAVTVTDPAPVADYLTSQFYALNYSLRQRMDILDVLTLAAQELSRPGCLGRTPQPGSPSPNTPCLPEAAVSQPGSAVASDWRVVVEERIRSKTQRLSKGGPRQGPAGSPSRFNSVAGHFFFPLLQRFDRPLVTFDLLGEDQLVLGRLAHTLGALMCLAVNTTVAVAMGKALLEFVWALRFHIDAYVRQGLLSAVSSVLLSLPAARLLEDLMDELLEARSWLADVAEKDPDEDCRTLALRALLLLQRLKNRLLPPASP

SEQ ID NO: 2054 - protein, 862 aa, Homo sapiens
MNIQEQGFPLDLGASFTEDAPRPPVPGEEGELVSTDPRPASYSFCSGKGVGIKGETSTATPRRSDLDLGYEPEGSASPTPPYLKWAESLHSLLDDQDGISLFRTFLKQEGCADLLDFWFACTGFRKLEPCDSNEEKRLKLARAIYRKYILDNNGIVSRQTKPATKSFIKGCIMKQLIDPAMFDQAQTEIQATMEENTYPSFLKSDIYLEYTRTGSESPKVCSDQSSGSGTGKGISGYLPTLNEDEEWKCDQDMDEDDGRDAAPPGRLPQKLLLETAAPRVSSSRRYSEGREFRYGSWREPVNPYYVNAGYALAPATSANDSEQQSLSSDADTLSLTDSSVDGIPPYRIRKQHRREMQESVQVNGRVPLPHIPRTYRVPKEVRVEPQKFAEELIHRLEAVQRTREAEEKLEERLKRVRMEEEGEDGDPSSGPPGPCHKLPPAPAWHHFPPRCVDMGCAGLRDAHEENPESILDEHVQRVLRTPGRQSPGPGHRSPDSGHVAKMPVALGGAASGHGKHVPKSGAKLDAAGLHHHRHVHHHVHHSTARPKEQVEAEATRRAQSSFAWGLEPHSHGARSRGYSESVGAAPNASDGLAHSGKVGVACKRNAKKAESGKSASTEVPGASEDAEKNQKIMQWIIEGEKEISRHRRTGHGSSGTRKPQPHENSRPLSLEHPWAGPQLRTSVQPSHLFIQDPTMPPHPAPNPLTQLEEARRRLEEEEKRASRAPSKQRYVQEVMRRGRACVRPACAPVLHVVPAVSDMELSETETRSQRKVGGGSAQPCDSIVVAYYFCGEPIPYRTLVRGRAVTLGQFKELLTKKGSYRYYFKKVSDEFDCGVVFEEVREDEAVLPVFEEKIIGKVEKVD

SEQ ID NO: 2055 - protein, 524 aa, Homo sapiens
MGKPARKGCEWKRFLKNNWVLLSTVAAVVLGITTGVLVREHSNLSTLEKFYFAFPGEILMRMLKLIILPLIISSMITGVAALDSNVSGKIGLRAVVYYFCTTLIAVILGIVLVVSIKPGVTQKVGEIARTGSTPEVSTVDAMLDLIRNMFPENLVQACFQQYKTKREEVKPPSDPEMNMTEESFTAVMTTAISKNKTKEYKIVGMYSDGINVLGLIVFCLVFGLVIGKMGEKGQILVDFFNALSDATMKIVQIIMCYMPLGILFLIAGKIIEVEDWEIFRKLGLYMATVLTGLAIHSIVILPLIYFIVVRKNPFRFAMGMAQALLTALMISSSSATLPVTFRCAEENNQVDKRITRFVLPVGATINMDGTALYEAVAAVFIAQLNDLDLGIGQIITISITATSASIGAAGVPQAGLVTMVIVLSAVGLPAEDVTLIIAVDWLLDRFRTMVNVLGDAFGTGIVEKLSKKELEQMDVSSEVNIVNPFALESTILDNEDSDTKKSYVNGGFAVDKSDTISFTQTSQF

SEQ ID NO: 2056 - protein, 524 aa, Homo sapiens
MHSLDEPLDLKLSITKLRAAREKRERTLGVVRPRALHRELGLVDDSPTPGSPGSPPSGFLLNSKFPEKVEGRFSAAPLVDLSLSPPSGLDSPNGSSSLSPERQGNGDLPPVPSASDFQPLRYLDGVPSSFQFFLPLGSGGALHLPASSFLTPPKDKCLSPDLPLPKQLVCRWAKCNQLFELLQDLVDHVNDYHVKPEKDAGYCCHWEGCARHGRGFNARYKMLIHIRTHTNEKPHRCPTCSKSFSRLENLKIHNRSHTGEKPYVCPYEGCNKRYSNSSDRFKHTRTHYVDKPYYCKMPGCHKRYTDPSSLRKHIKAHGHFVSHEQQELLQLRPPPKPPLPAPDGGPYVSGAQIIIPNPAALFGGPGLPGLPLPLAPGPLDLSALACGNGGGSGGGGGMGPGLPGPVLPLNLAKNPLLPSPFGAGGLGLPVVSLLAGAAGGKAEGEKGRGSVPTRALGMEGHKTPLERTESSCSRPSPDGLPLLPGTVLDLSTGVNSAASSPEALAPGWVVIPPGSVLLKPAVVN

SEQ ID NO: 2057 - protein, 2442 aa, Homo sapiens
MAENLLDGPPNPKRAKLSSPGFSANDSTDFGSLFDLENDLPDELIPNGGELGLLNSGNLVPDAASKHKQLSELLRGGSGSSINPGIGNVSASSPVQQGLGGQAQGQPNSANMASLSAMGKSPLSQGDSSAPSLPKQAASTSGPTPAASQALNPQAQKQVGLATSSPATSQTGPGICMNANFNQTHPGLLNSNSGHSLINQASQGQAQVMNGSLGAAGRGRGAGMPYPTPAMQGASSSVLAETLTQVSPQMTGHAGLNTAQAGGMAKMGITGNTSPFGQPFSQAGGQPMGATGVNPQLASKQSMVNSLPTFPTDIKNTSVTNVPNMSQMQTSVGIVPTQAIATGPTADPEKRKLIQQQLVLLLHAHKCQRREQANGEVRACSLPHCRTMKNVLNHMTHCQAGKACQVAHCASSRQIISHWKNCTRHDCPVCLPLKNASDKRNQQTILGSPASGIQNTIGSVGTGQQNATSLSNPNPIDPSSMQRAYAALGLPYMNQPQTQLQPQVPGQQPAQPQTHQQMRTLNPLGNNPMNIPAGGITTDQQPPNLISESALPTSLGATNPLMNDGSNSGNIGTLSTIPTAAPPSSTGVRKGWHEHVTQDLRSHLVHKLVQAIFPTPDPAALKDRRMENLVAYAKKVEGDMYESANSRDEYYHLLAEKIYKIQKELEEKRRSRLHKQGILGNQPALPAPGAQPPVIPQAQPVRPPNGPLSLPVNRMQVSQGMNSFNPMSLGNVQLPQAPMGPRAASPMNHSVQMNSMGSVPGMAISPSRMPQPPNMMGAHTNNMMAQAPAQSQFLPQNQFPSSSGAMSVGMGQPPAQTGVSQGQVPGAALPNPLNMLGPQASQLPCPPVTQSPLHPTPPPASTAAGMPSLQHTTPPGMTPPQPAAPTQPSTPVSSSGQTPTPTPGSVPSATQTQSTPTVQAAAQAQVTPQPQTPVQPPSVATPQSSQQQPTPVHAQPPGTPLSQAAASIDNRVPTPSSVASAETNSQQPGPDVPVLEMKTETQAEDTEPDPGESKGEPRSEMMEEDLQGASQVKEETDIAEQKSEPMEVDEKKPEVKVEVKEEEESSSNGTASQSTSPSQPRKKIFKPEELRQALMPTLEALYRQDPESLPFRQPVDPQLLGIPDYFDIVKNPMDLSTIKRKLDTGQYQEPWQYVDDVWLMFNNAWLYNRKTSRVYKFCSKLAEVFEQEIDPVMQSLGYCCGRKYEFSPQTLCCYGKQLCTIPRDAAYYSYQNRYHFCEKCFTEIQGENVTLGDDPSQPQTTISKDQFEKKKNDTLDPEPFVDCKECGRKMHQICVLHYDIIWPSGFVCDNCLKKTGRPRKENKFSAKRLQTTRLGNHLEDRVNKFLRRQNHPEAGEVFVRVVASSDKTVEVKPGMKSRFVDSGEMSESFPYRTKALFAFEEIDGVDVCFFGMHVQEYGSDCPPPNTRRVYISYLDSIHFFRPRCLRTAVYHEILIGYLEYVKKLGYVTGHIWACPPSEGDDYIFHCHPPDQKIPKPKRLQEWYKKMLDKAFAERIIHDYKDIFKQATEDRLTSAKELPYFEGDFWPNVLEESIKELEQEEEERKKEESTAASETTEGSQGDSKNAKKKNNKKTNKNKSSISRANKKKPSMPNVSNDLSQKLYATMEKHKEVFFVIHLHAGPVINTLPPIVDPDPLLSCDLMDGRDAFLTLARDKHWEFSSLRRSKWSTLCMLVELHTQGQDRFVYTCNECKHHVETRWHCTVCEDYDLCINCYNTKSHAHKMVKWGLGLDDEGSSQGEPQSKSPQESRRLSIQRCIQSLVHACQCRNANCSLPSCQKMKRVVQHTKGCKRKTNGGCPVCKQLIALCCYHAKHCQENKCPVPFCLNIKHKLRQQQIQHRLQQAQLMRRRMATMNTRNVPQQSLPSPTSAPPGTPTQQPSTPQTPQPPAQPQPSPVSMSPAGFPSVARTQPPTTVSTGKPTSQVPAPPPPAQPPPAAVEAARQIEREAQQQQHLYRVNINNSMPPGRTGMGTPGSQMAPVSLNVPRPNQVSGPVMPSMPPGQWQQAPLPQQQPMPGLPRPVISMQAQAAVAGPRMPSVQPPRSISPSALQDLLRTLKSPSSPQQQQQVLNILKSNPQLMAAFIKQRTAKYVANQPGMQPQPGLQSQPGMQPQPGMHQQPSLQNLNAMQAGVPRPGVPPQQQAMGGLNPQGQALNIMNPGHNPNMASMNPQYREMLRRQLLQQQQQQQQQQQQQQQQQQGSAGMAGGMAGHGQFQQPQGPGGYPPAMQQQQRMQQHLPLQGSSMGQMAAQMGQLGQMGQPGLGADSTPNIQQALQQRILQQQQMKQQIGSPGQPNPMSPQQHMLSGQPQASHLPGQQIATSLSNQVRSPAPVQSPRPQSQPPHSSPSPRIQPQPSPHHVSPQTGSPHPGLAVTMASSIDQGHLGNPEQSAMLPQLNTPSRSALSSELSLVGDTTGDTLEKFVEGL

SEQ ID NO: 2058 - protein, 576 aa, Homo sapiens
MGSILSRRIAGVEDIDIQANSAYRYPPKSGNYFASHFFMGGEKFDTPHPEGYLFGENMDLNFLGSRPVQFPYVTPAPHEPVKTLRSLVNIRKDSLRLVRYKDDADSPTEDGDKPRVLYSLEFTFDADARVAITIYCQASEEFLNGRAVYSPKSPSLQSETVHYKRGVSQQFSLPSFKIDFSEWKDDELNFDLDRGVFPVVIQAVVDEGDVVEVTGHAHVLLAAFEKHMDGSFSVKPLKQKQIVDRVSYLLQEIYGIENKNNQETKPSDDENSDNSNECVVCLSDLRDTLILPCRHLCLCTSCADTLRYQANNCPICRLPFRALLQIRAVRKKPGALSPVSFSPVLAQSLEHDEHSCPFKKSKPHPASLASKKPKRETNSDSVPPGYEPISLLEALNGLRAVSPAIPSAPLYEEITYSGISDGLSQASCPLAAIDHILDSSRQKGRPQSKAPDSTLRSPSSPIHEEDEEKLSEDVDAPPPLGGAELALRESSSPESFITEEVDESSSPQQGTRAASIENVLQDSSPEHCGRGPPADIYLPGRPTSMETAHGLATTSPTWPPLGGPSPDPSAAELTPL

SEQ ID NO: 2059 - protein, 464 aa, Homo sapiens
MAASCLVLLALCLLLPLLLLGGWKRWRRGRAARHVVAVVLGDVGRSPRMQYHALSLAMHGFSVTLLGFCNSKPHDELLQNNRIQIVGLTELQSLAVGPRVFQYGVKVVLQAMYLLWKLMWREPGAYIFLQNPPGLPSIAVCWFVGCLCGSKLVIDWHNYGYSIMGLVHGPNHPLVLLAKWYEKFFGRLSHLNLCVTNAMREDLADNWHIRAVTVYDKPASFFKETPLDLQHRLFMKLGSMHSPFRARSEPEDPVTERSAFTERDAGSGLVTRLRERPALLVSSTSWTEDEDFSILLAALEKFEQLTLDGHNLPSLVCVITGKGPLREYYSRLIHQKHFQHIQVCTPWLEAEDYPLLLGSADLGVCLHTSSSGLDLPMKVVDMFGCCLPVCAVNFKCLHELVKHEENGLVFEDSEELAAQLQMLFSNFPDPAGKLNQFRKNLRESQQLRWDESWVQTVLPLVMDT

SEQ ID NO: 2060 - protein, 480 aa, Homo sapiens
MAARCSTRWLLVVVGTPRLPAISGRGARPPREGVVGAWLSRKLSVPAFASSLTSCGPRALLTLRPGVSLTGTKHNPFICTASFHTSAPLAKEDYYQILGVPRNASQKEIKKAYYQLAKKYHPDTNKDDPKAKEKFSQLAEAYEVLSDEVKRKQYDAYGSAGFDPGASGSQHSYWKGGPTVDPEELFRKIFGEFSSSSFGDFQTVFDQPQEYFMELTFNQAAKGVNKEFTVNIMDTCERCNGKGNEPGTKVQHCHYCGGSGMETINTGPFVMRSTCRRCGGRGSIIISPCVVCRGAGQAKQKKRVMIPVPAGVEDGQTVRMPVGKREIFITFRVQKSPVFRRDGADIHSDLFISIAQALLGGTARAQGLYETINVTIPPGTQTDQKIRMGGKGIPRINSYGYGDHYIHIKIRVPKRLTSRQQSLILSYAEDETDVEGTVNGVTLTSSGGSTMDSSAGSKARREAGEDEEGFLSKLKKMFTS

SEQ ID NO: 2061 - protein, 1134 aa, Homo sapiens
MSEPHRVQFTSLPGSLNPAFLKKSRKEEAGAGEQHQDCEPAAAAVRITLTLFEPDHKRCPEFFYPELVKNIRGKVKGLQPGDKKKDLSDPFNDEEKERHKVEALARKFEEKYGGKKRRKDRIQDLIDMGYGYDESDSFIDNSEAYDELVPASLTTKYGGFYINSGTLQFRQASESEDDFIKEKKKKSPKKRKLKEGGEKIKKKKKDDTYDKEKKSKKSKFSKAGFTALNASKEKKKKKYSGALSVKEMLKKFQKEKEAQKKREEEHKPVAVPSAEAQGLRELEGASDPLLSLFGSTSDNDLLQAATAMDSLTDLDLEHLLSESPEGSPFRDMDDGSDSLGVGLDQEFRQPSSLPEGLPAPLEKRVKELAQAARAAEGESRQKFFTQDINGILLDIEAQTRELSSQVRSGVYAYLASFLPCSKDALLKRARKLHLYEQGGRLKEPLQKLKEAIGRAMPEQMAKYQDECQAHTQAKVAKMLEEEKDKEQRDRICSDEEEDEEKGGRRIMGPRKKFQWNDEIRELLCQVVKIKLESQDLERNNKAQAWEDCVKGFLDAEVKPLWPKGWMQARTLFKESRRGHGHLTSILAKKKVMAPSKIKVKESSTKPDKKVSVPSGQIGGPIALPSDHQTGGLSIGASSRELPSQASGGLANPPPVNLEDSLDEDLIRNPASSVEAVSKELAALNSRAAGNSEFTLPAPSKAPAEKVGGVLCTEEKRNFAKPSPSAPPPASSLQSPLNFLAEQALALGQSSQEKKPESSGYKELSCQAPLNKGLPEVHQSKAKHHSLPRTSHGPQVAVPVPGPQVKVFHAGTQQQKNFTPPSPFANKLQGPKASPTQCHRSLLQLVKTAAKGQGFHPSAPATSGGLSASSSSSHKTPASSSSALSHPAKPHSVSSAGSSYKNNPFASSISKHGVSSGSSSSGGTPVQSSVSGSLVPGIQPPSVGQATSRPVPSSAGKKMPVSQKLTLVAPPGGPNGDSSGGTQGVAKLLTSPSLKPSAVSSVTSSTSLSKGASGTVLLAGSSLMASPYKSSSPKLSGAMSSNSLGIITPVPIPVHVLSFSADSSAKAGVSKDAIVTGPAPGSFHHGLGHSLLAGLHSSPPHAAPLPHAAVPTHIPQSLPGASQLHGKGPAVPRKL

SEQ ID NO: 2062 - protein, 1284 aa, Homo sapiens
MHKKRVEEGEASDFSLAWDSSVTAAGGLEGEPECDQKTSRALEDRNSVTSQEERNEDDEDMEDESIYTCDHCQQDFESLADLTDHRAHRCPGDGDDDPQLSWVASSPSSKDVASPTQMIGDGCDLGLGEEEGGTGLPYPCQFCDKSFIRLSYLKRHEQIHSDKLPFKCTYCSRLFKHKRSRDRHIKLHTGDKKYHCHECEAAFSRSDHLKIHLKTHSSSKPFKCTVCKRGFSSTSSLQSHMQAHKKNKEHLAKSEKEAKKDDFMCDYCEDTFSQTEELEKHVLTRHPQLSEKADLQCIHCPEVFVDENTLLAHIHQAHANQKHKCPMCPEQFSSVEGVYCHLDSHRQPDSSNHSVSPDPVLGSVASMSSATPDSSASVERGSTPDSTLKPLRGQKKMRDDGQGWTKVVYSCPYCSKRDFNSLAVLEIHLKTIHADKPQQSHTCQICLDSMPTLYNLNEHVRKLHKNHAYPVMQFGNISAFHCNYCPEMFADINSLQEHIRVSHCGPNANPSDGNNAFFCNQCSMGFLTESSLTEHIQQAHCSVGSAKLESPVVQPTQSFMEVYSCPYCTNSPIFGSILKLTKHIKENHKNIPLAHSKKSKAEQSPVSSDVEVSSPKRQRLSASANSISNGEYPCNQCDLKFSNFESFQTHLKLHLELLLRKQACPQCKEDFDSQESLLQHLTVHYMTTSTHYVCESCDKQFSSVDDLQKHLLDMHTFVLYHCTLCQEVFDSKVSIQVHLAVKHSNEKKMYRCTACNWDFRKEADLQVHVKHSHLGNPAKAHKCIFCGETFSTEVELQCHITTHSKKYNCKFCSKAFHAIILLEKHLREKHCVFDAATENGTANGVPPMATKKAEPADLQGMLLKNPEAPNSHEASEDDVDASEPMYGCDICGAAYTMEVLLQNHRLRDHNIRPGEDDGSRKKAEFIKGSHKCNVCSRTFFSENGLREHLQTHRGPAKHYMCPICGERFPSLLTLTEHKVTHSKSLDTGTCRICKMPLQSEEEFIEHCQMHPDLRNSLTGFRCVVCMQTVTSTLELKIHGTFHMQKLAGSSAASSPNGQGLQKLYKCALCLKEFRSKQDLVKLDVNGLPYGLCAGCMARSANGQVGGLAPPEPADRPCAGLRCPECSVKFESAEDLESHMQVDHRDLTPETSGPRKGTQTSPVPRKKTYQCIKCQMTFENEREIQIHVANHMIEEGINHECKLCNQMFDSPAKLLCHLIEHSFEGMGGTFKCPVCFTVFVQANKLQQHIFAVHGQEDKIYDCSQCPQKFFFQTELQNHTMSQHAQ

SEQ ID NO: 2063 - protein, 896 aa, Homo sapiens
MAARAVLDEFTAPAEKAELLEQSRGRIEGLFGVSLAVLGALGAEEPLPARIWLQLCGAQEAVHSAKEYIKGICEPELEERECYPKDMHCIFVGAESLFLKSLIQDTCADLCILDIGLLGIRGSAEAVVMARSHIQQFVKLFENKENLPSSQKESEVKREFKQFVEAHADNYTMDLLILPTSLKKELLTLTQGEENLFETGDDEVIEMRDSQQTEFTQNAATGLNISRDETVLQEEARNKAGTPVSELTKQMDTVLSSSPDVLFDPINGLTPDEEALSNERICQKRRFSDSEERHTKKQFSLENVQEGEILHDAKTLAGNVIADLSDSSADSENLSPDIKETTEEMEYNILVNFFKTMGYSQEIVEKVIKVYGPSTEPLLLLEEIEKENKRFQEDREFSAGTVYPETNKTKNKGVYSSTNELTTDSTPKKTQAHTQQNMVEKFSQLPFKVEAKPCTSNCRINTFRTVPIEQKHEVWGSNQNYICNTDPETDGLSPSVASPSPKEVNFVSRGASSHQPRVPLFPENGLHQQPEPLLPNNMKSACEKRLGCCSSPHSKPNCSTLSPPMPLPQLLPSVTDARSAGPSDHIDSSVTGVQRFRDTLKIPYKLELKNEPGRTDLKHIVIDGSNVAITHGLKKFFSCRGIAIAVEYFWKLGNRNITVFVPQWRTRRDPNVTEQHFLTQLQELGILSLTPARMVFGERIASHDDRFLLHLADKTGGIIVTNDNFREFVNESVSWREIITKRLLQYTFVGDIFMVPDDPLGRSGPRLEEFLQKEVCLRDMQPLLSALPNVGMFDPSFRVPGTQAASTSHQPPTRIQGAPSSHWLPQQPHFPLLPALPSLQQNLPMPAQRSSAETNELREALLKIFPDSEQRLKIDQILVAHPYMKDLNALSAMVLD

SEQ ID NO: 2064 - protein, 470 aa, Homo sapiens
MPGFDYKFLEKPKRRLLCPLCGKPMREPVQVSTCGHRFCDTCLQEFLSEGVFKCPEDQLPLDYAKIYPDPELEVQVLGLPIRCIHSEEGCRWSGPLRHLQGHLNTCSFNVIPCPNRCPMKLSRRDLPAHLQHDCPKRRLKCEFCGCDFSGEAYESHEGMCPQESVYCENKCGARMMRRLLAQHATSECPKRTQPCTYCTKEFVFDTIQSHQYQCPRLPVACPNQCGVGTVAREDLPGHLKDSCNTALVLCPFKDSGCKHRCPKLAMARHVEESVKPHLAMMCALVSRQRQELQELRRELEELSVGSDGVLIWKIGSYGRRLQEAKAKPNLECFSPAFYTHKYGYKLQVSAFLNGNGSGEGTHLSLYIRVLPGAFDNLLEWPFARRVTFSLLDQSDPGLAKPQHVTETFHPDPNWKNFQKPGTWRGSLDESSLGFGYPKFISHQDIRKRNYVRDDAVFIRAAVELPRKILS

SEQ ID NO: 2065 - protein, 1039 aa, Homo sapiens
MARALCPLQALWLLEWVLLLLGPCAAPPAWALNLDPVQLTFYAGPNGSQFGFSLDFHKDSHGRVAIVVGAPRTLGPSQEETGGVFLCPWRAEGGQCPSLLFDLRDETRNVGSQTLQTFKARQGLGASVVSWSDVIVACAPWQHWNVLEKTEEAEKTPVGSCFLAQPESGRRAEYSPCRGNTLSRIYVENDFSWDKRYCEAGFSSVVTQAGELVLGAPGGYYFLGLLAQAPVADIFSSYRPGILLWHVSSQSLSFDSSNPEYFDGYWGYSVAVGEFDGDLNTTEYVVGAPTWSWTLGAVEILDSYYQRLHRLRGEQMASYFGHSVAVTDVNGDGRHDLLVGAPLYMESRADRKLAEVGRVYLFLQPRGPHALGAPSLLLTGTQLYGRFGSAIAPLGDLDRDGYNDIAVAAPYGGPSGRGQVLVFLGQSEGLRSRPSQVLDSPFPTGSAFGFSLRGAVDIDDNGYPDLIVGAYGANQVAVYRAQPVVKASVQLLVQDSLNPAVKSCVLPQTKTPVSCFNIQMCVGATGHNIPQKLSLNAELQLDRQKPRQGRRVLLLGSQQAGTTLNLDLGGKHSPICHTTMAFLRDEADFRDKLSPIVLSLNVSLPPTEAGMAPAVVLHGDTHVQEQTRIVLDCGEDDVCVPQLQLTASVTGSPLLVGADNVLELQMDAANEGEGAYEAELAVHLPQGAHYMRALSNVEGFERLICNQKKENETRVVLCELGNPMKKNAQIGIAMLVSVGNLEEAGESVSFQLQIRSKNSQNPNSKIVLLDVPVRAEAQVELRGNSFPASLVVAAEEGEREQNSLDSWGPKVEHTYELHNNGPGTVNGLHLSIHLPGQSQPSDLLYILDIQPQGGLQCFPQPPVNPLKVDWGLPIPSPSPIHPAHHKRDRRQIFLPEPEQPSRLQDPVLVSCDSAPCTVVQCDLQEMARGQRAMVTVLAFLWLPSLYQRPLDQFVLQSHAWFNVSSLPYAVPPLSLPRGEAQVWTQLLRALEERAIPIWWVLVGVLGGLLLLTILVLAMWKVGFFKRNRPPLEEDDEEGE

SEQ ID NO: 2066 - protein, 1220 aa, Homo sapiens [sequence omitted]

SEQ ID NO: 2067 - protein, 1105 aa, Homo sapiens
MAAMAPALTDAAAEAHHIRFKLAPPSSTLSPGSAENNGNANILIAANGTKRKAIAAEDPSLDFRNNPTKEDLGKLQPLVASYLCSDVTSVPSKESLKLQGVFSKQTVLKSHPLLSQSYELRAELLGRQPVLEFSLENLRTMNTSGQTALPQAPVNGLAKKLTKSSTHSDHDNSTSLNGGKRALTSSALHGGEMGGSESGDLKGGMTNCTLPHRSLDVEHTTLYSNNSTANKSSVNSMEQPALQGSSRLSPGTDSSSNLGGVKLEGKKSPLSSILFSALDSDTRITALLRRQADIESRARRLQKRLQVVQAKQVERHIQHQLGGFLEKTLSKLPNLESLRPRSQLMLTRKAEAALRKAASETTTSEGLSNFLKSNSISEELERFTASGIANLRCSEQAFDSDVTDSSSGGESDIEEEELTRADPEQRHVPLRRRSEWKWAADRAAIVSRWNWLQAHVSDLEYRIRQQTDIYKQIRANKGLIVLGEVPPPEHTTDLFLPLSSEVKTDHGTDKLIESVSQPLENHGAPIIGHISESLSTKSCGALRPVNGVINTLQPVLADHIPGDSSDAEEQLHKKQRLNLVSSSSDGTCVAARTRPVLSCKKRRLVRPNSIVPLSKKVHRNSTIRPGCDVNPSCALCGSGSINTMPPEIHYEAPLLERLSQLDSCVHPVLAFPDDVPTSLHFQSMLKSQWQNKPFDKIKPPKKLSLKHRAPMPGSLPDSARKDRHKLVSSFLTTAKLSHHQTRPDRTHRQHLDDVGAVPMVERVTAPKAERLLNPPPPVHDPNHSKMRLRDHSSERSEVLKHHTDMSSSSYLAATHHPPHSPLVRQLSTSSDSPAPASSSSQVTASTSQQPVRRRRGESSFDINNIVIPMSVAATTRVEKLQYKEILTPSWREVDLQSLKGSPDEENEEIEDLSDAAFAALHAKCEEMERARWLWTTSVPPQRRGSRSYRSSDGRTTPQLGSANPSTPQPASPDVSSSHSLSEYSHGQSPRSPISPELHSAPLTPVARDTPRHLASEDTRCSTPELGLDEQSVQPWERRTFPLAHSPQAECEDQLDAQERAARCTRRTSGSKTGRETEAAPTSPPIVPLKSRHLVAAATAQRPTHR

SEQ ID NO: 2068 - protein, 497 aa, Homo sapiens
MSCVLGGVIPLGLLFLVCGSQGYLLPNVTLLEELLSKYQHNESHSRVRRAIPREDKEEILMLHNKLRGQVQPQASNMEYMTWDDELEKSAAAWASQCIWEHGPTSLLVSIGQNLGAHWGRYRSPGFHVQSWYDEVKDYTYPYPSECNPWCPERCSGPMCTHYTQIVWATTNKIGCAVNTCRKMTVWGEVWENAVYFVCNYSPKGNWIGEAPYKNGRPCSECPPSYGGSCRNNLCYREETYTPKPETDEMNEVETAPIPEENHVWLQPRVMRPTKPKKTSAVNYMTQVVRCDTKMKDRCKGSTCNRYQCPAGCLNHKAKIFGTLFYESSSSICRAAIHYGILDDKGGLVDITRNGKVPFFVKSERHGVQSLSKYKPSSSFMVSKVKVQDLDCYTTVAQLCPFEKPATHCPRIHCPAHCKDEPSYWAPVFGTNIYADTSSICKTAVHAGVISNESGGDVDVMPVDKKKTYVGSLRNGVQSESLGTPRDGKAFRIFAVRQ

SEQ ID NO: 2069 - protein, 142 aa, Homo sapiens
MATKIDKEACRAAYNLVRDDGSAVIWVTFKYDGSTIVPGEQGAEYQHFIQQCTDDVRLFAFVRFTTGDAMSKRSKFALITWIGENVSGLQRAKTGTDKTLVKEVVQNFAKEFVISDRKELEEDFIKSELKKAGGANYDAQTE

SEQ ID NO: 2070 - protein, 493 aa, Homo sapiens
MRGFGPGLTARRLLPLRLPPRPPGPRLASGQAAGALERAMDELLRRAVPPTPAYELREKTPAPAEGQCADFVSFYGGLAETAQRAELLGRLARGFGVDHGQVAEQSAGVLHLRQQQREAAVLLQAEDRLRYALVPRYRGLFHHISKLDGGVRFLVQLRADLLEAQALKLVEGPDVREMNGVLKGMLSEWFSSGFLNLERVTWHSPCEVLQKISEAEAVHPVKNWMDMKRRVGPYRRCYFFSHCSTPGEPLVVLHVALTGDISSNIQAIVKEHPPSETEEKNKITAAIFYSISLTQQGLQGVELGTFLIKRVVKELQREFPHLGVFSSLSPIPGFTKWLLGLLNSQTKEHGRNELFTDSECKEISEITGGPINETLKLLLSSSEWVQSEKLVRALQTPLMRLCAWYLYGEKHRGYALNPVANFHLQNGAVLWRINWMADVSLRGITGSCGLMANYRYFLEETGPNSTSYLGSKIIKASEQVLSLVAQFQKNSKL

SEQ ID NO: 2071 - protein, 748 aa, Homo sapiens
MSNPGGRRNGPVKLRLTVLCAKNLVKKDFFRLPDPFAKVVVDGSGQCHSTDTVKNTLDPKWNQHYDLYIGKSDSVTISVWNHKKIHKKQGAGFLGCVRLLSNAINRLKDTGYQRLDLCKLGPNDNDTVRGQIVVSLQSRDRIGTGGQVVDCSRLFDNDLPDGWEERRTASGRIQYLNHITRTTQWERPTRPASEYSSPGRPLSCFVDENTPISGTNGATCGQSSDPRLAERRVRSQRHRNYMSRTHLHTPPDLPEGYEQRTTQQGQVYFLHTQTGVSTWHDPRVPRDLSNINCEELGPLPPGWEIRNTATGRVYFVDHNNRTTQFTDPRLSANLHLVLNRQNQLKDQQQQQVVSLCPDDTECLTVPRYKRDLVQKLKILRQELSQQQPQAGHCRIEVSREEIFEESYRQVMKMRPKDLWKRLMIKFRGEEGLDYGGVAREWLYLLSHEMLNPYYGLFQYSRDDIYTLQINPDSAVNPEHLSYFHFVGRIMGMAVFHGHYIDGGFTLPFYKQLLGKSITLDDMELVDPDLHNSLVWILENDITGVLDHTFCVEHNAYGEIIQHELKPNGKSIPVNEENKKEYVRLYVNWRFLRGIEAQFLALQKGFNEVIPQHLLKTFDEKELELIICGLGKIDVNDWKVNTRLKHCTPDSNIVKWFWKAVEFFDEERRARLLQFVTGSSRVPLQGFKALQGAAGPRLFTIHQIDACTNNLPKAHTCFNRIDIPPYESYEKLYEKLLTAIEETCGFAVE

SEQ ID NO: 2072 - protein, 399 aa, Homo sapiens
MAAPSPSGGGGSGGGSGSGTPGPVGSPAPGHPAVSSMQGKRKALKLNFANPPFKSTARFTLNPNPTGVQNPHIERLRTHSIESSGKLKISPEQHWDFTAEDLKDLGEIGRGAYGSVNKMVHKPSGQIMAVKRIRSTVDEKEQKQLLMDLDVVMRSSDCPYIVQFYGALFREGDCWICMELMSTSFDKFYKYVYSVLDDVIPEEILGKITLATVKALNHLKENLKIIHRDIKPSNILLDRSGNIKLCDFGISGQLVDSIAKTRDAGCRPYMAPERIDPSASRQGYDVRSDVWSLGITLYELATGRFPYPKWNSVFDQLTQVVKGDPPQLSNSEEREFSPSFINFVNLCLTKDESKRPKYKELLKHPFILMYEERAVEVACYVCKILDQMPATPSSPMYVD

SEQ ID NO: 2073 - protein, 406 aa, Homo sapiens
MHPAVFLSLPDLRCSLLLLVTWVFTPVTTEITSLDTENIDEILNNADVALVNFYADWCRFSQMLHPIFEEASDVIKEEFPNENQVVFARVDCDQHSDIAQRYRISKYPTLKLFRNGMMMKREYRGQRSVKALADYIRQQKSDPIQEIRDLAEITTLDRSKRNIIGYFEQKDSDNYRVFERVANILHDDCAFLSAFGDVSKPERYSGDNIIYKPPGHSAPDMVYLGAMTNFDVTYNWIQDKCVPLVREITFENGEELTEEGLPFLILFHMKEDTESLEIFQNEVARQLISEKGTINFLHADCDKFRHPLLHIQKTPADCPVIAIDSFRHMYVFGDFKDVLIPGKLKQFVFDLHSGKLHREFHHGPDPTDTAPGEQAQDVASSPPESSFQKLAPSEYRYTLLRDRDEL

SEQ ID NO: 2074 - protein, 1065 aa, Homo sapiens
MNKSENLLFAGSSLASQVHAAAVNGDKGALQRLIVGNSALKDKEDQFGRTPLMYCVLADRLDCADALLKAGADVNKTDHSQRTALHLAAQKGNYRFMKLLLTRRANWMQKDLEEMTPLHLTTRHRSPKCLALLLKFMAPGEVDTQDKNKQTALHWSAYYNNPEHVKLLIKHDSNIGIPDVEGKIPLHWAANHKDPSAVHTVRCILDAAPTESLLNWQDYEGRTPLHFAVADGNVTVVDVLTSYESCNITSYDNLFRTPLHWAALLGHAQIVHLLLERNKSGTIPSDSQGATPLHYAAQSNFAETVKVFLKHPSVKDDSDLEGRTSFMWAAGKGSDDVLRTMLSLKSDIDINMADKYGGTALHAAALSGHVSTVKLLLENNAQVDATDVMKHTPLFRACEMGHKDVIQTLIKGGARVDLVDQDGHSLLHWAALGGNADVCQILIENKINPNVQDYAGRTPLQCAAYGGYINCMAVLMENNADPNIQDKEGRTALHWSCNNGYLDAIKLLLDFAAFPNQMENNEERYTPLDYALLGERHEVIQFMLEHGALSIAAIQDIAAFKIQAVYKGYKVRKAFRDRKNLLMKHEQLRKDAAAKKREEENKRKEAEQQKGRRSPDSCRPQALPCLPSTQDVPSRQSRAPSKQPPAGNVAQGPEPRDSRGSPGGSLGGALQKEQHVSSDLQGTNSRRPNETAREHSKGQSACVHFRPNEGSDGSRHPGVPSVEKSRGETAGDERCAKGKGFVKQPSCIRVAGPDEKGEDSRRAAASLPPHDSHWKPSRRHDTEPKAKCAPQKRRTQELRGGRCSPAGSSRPGSARGEAVHAGQNPPHHRTPRNKVTQAKLTGGLYSHLPQSTEELRSGARRLETSTLSEDFQVSKETDPAPGPLSGQSVNIDLLPVELRLQIIQRERRRKELFRKKNKAAAVIQRAWRSYQLRKHLSHLRHMKQLGAGDVDRWRQESTALLLQVWRKELELKFPQTTAVSKAPKSPSKGTSGTKSTKHSVLKQIYGCSHEGKIHHPTRSVKASSVLRLNSVSNLQCIHLLENSGRSKNFSYNLQSATQPKNKTKP

SEQ ID NO: 2075 - protein, 196 aa, Homo sapiens
MFCEKAMELIRELHRAPEGQLPAFNEDGLRQVLEEMKALYEQNQSDVNEAKSGGRSDLIPTIKFRHCSLLRNRRCTVAYLYDRLLRIRALRWEYGSVLPNALRFHMAAEEMEWFNNYKRSLATYMRSLGGDEGLDITQDMKPPKSLYIEVRCLKDYGEFEVDDGTSVLLKKNSQHFLPRWKCEQLIRQGVLEHILS

SEQ ID NO: 2076 - protein, 1212 aa, Homo sapiens
MEPRPTAPSSGAPGLAGVGETPSAAALAAARVELPGTAVPSVPEDAAPASRDGGGVRDEGPAAAGDGLGRPLGPTPSQSRFQVDLVSENAGRAAAAAAAAAAAAAAAGAGAGAKQTPADGEASGESEPAKGSEEAKGRFRVNFVDPAASSSAEDSLSDAAGVGVDGPNVSFQNGGDTVLSEGSSLHSGGGGGSGHHQHYYYDTHTNTYYLRTFGHNTMDAVPRIDHYRHTAAQLGEKLLRPSLAELHDELEKEPFEDGFANGEESTPTRDAVVTYTAESKGVVKFGWIKGVLVRCMLNIWGVMLFIRLSWIVGQAGIGLSVLVIMMATVVTTITGLSTSAIATNGFVRGGGAYYLISRSLGPEFGGAIGLIFAFANAVAVAMYVVGFAETVVELLKEHSILMIDEINDIRIIGAITVVILLGISVAGMEWEAKAQIVLLVILLLAIGDFVIGTFIPLESKKPKGFFGYKSEIFNENFGPDFREEETFFSVFAIFFPAATGILAGANISGDLADPQSAIPKGTLLAILITTLVYVGIAVSVGSCVVRDATGNVNDTIVTELTNCTSAACKLNFDFSSCESSPCSYGLMNNFQVMSMVSGFTPLISAGIFSATLSSALASLVSAPKIFQALCKDNIYPAFQMFAKGYGKNNEPLRGYILTFLIALGFILIAELNVIAPIISNFFLASYALINFSVFHASLAKSPGWRPAFKYYNMWISLLGAILCCIVMFVINWWAALLTYVIVLGLYIYVTYKKPDVNWGSSTQALTYLNALQHSIRLSGVEDHVKNFRPQCLVMTGAPNSRPALLHLVHDFTKNVGLMICGHVHMGPRRQAMKEMSIDQAKYQRWLIKNKMKAFYAPVHADDLREGAQYLMQAAGLGRMKPNTLVLGFKKDWLQADMRDVDMYINLFHDAFDIQYGVVVIRLKEGLDISHLQGQEELLSSQEKSPGTKDVVVSVEYSKKSDLDTSKPLSEKPITHKVEEEDGKTATQPLLKKESKGPIVPLNVADQKLLEASTQFQKKQGKNTIDVWWLFDDGGLTLLIPYLLTTKKKWKDCKIRVFIGGKINRIDHDRRAMATLLSKFRIDFSDIMVLGDINTKPKKENIIAFEEIIEPYRLHEDDKEQDIADKMKEDEPWRITDNELELYKTKTYRQIRLNELLKEHSSTANIIVMSLPVARKGAVSSALYMAWLEALSKDLPPILLVRGNHQSVLTFYS

SEQ ID NO: 2077 - protein, 2912 aa, Homo sapiens
MGRRRRLCLQLYFLWLGCVVLWAQGTAGQPQPPPPKPPRPQPPPQQVRSATAGSEGGFLAPEYREEGAAVASRVRRRGQQDVLRGPNVCGSRFHSYCCPGWKTLPGGNQCIVPICRNSCGDGFCSRPNMCTCSSGQISSTCGSKSIQQCSVRCMNGGTCADDHCQCQKGYIGTYCGQPVCENGCQNGGRCIGPNRCACVYGFTGPQCERDYRTGPCFTQVNNQMCQGQLTGIVCTKTLCCATIGRAWGHPCEMCPAQPQPCRRGFIPNIRTGACQDVDECQAIPGICQGGNCINTVGSFECRCPAGHKQSETTQKCEDIDECSIIPGICETGECSNTVGSYFCVCPRGYVTSTDGSRCIDQRTGMCFSGLVNGRCAQELPGRMTKMQCCCEPGRCWGIGTIPEACPVRGSEEYRRLCMDGLPMGGIPGSAGSRPGGTGGNGFAPSGNGNGYGPGGTGFIPIPGGNGFSPGVGGAGVGAGGQGPIITGLTILNQTIDICKHHANLCLNGRCIPTVSSYRCECNMGYKQDANGDCIDVDECTSNPCTNGDCVNTPGSYYCKCHAGFQRTPTKQACIDIDECIQNGVLCKNGRCVNTDGSFQCICNAGFELTTDGKNCVDHDECTTTNMCLNGMCINEDGSFKCICKPGFVLAPNGRYCTDVDECQTPGICMNGHCINSEGSFRCDCPPGLAVGMDGRVCVDTHMRSTCYGGIKKGVCVRPFPGAVTKSECCCANPDYGFGEPCQPCPAKNSAEFHGLCSSGVGITVDGRDINECALDPDICANGICENLRGSYRCNCNSGYEPDASGRNCIDIDECLVNRLLCDNGLCRNTPGSYSCTCPPGYVFRTETETCEDINECESNPCVNGACRNNLGSFNCECSPGSKLSSTGLICIDSLKGTCWLNIQDSRCEVNINGATLKSECCATLGAAWGSPCERCELDTACPRGLARIKGVTCEDVNECEVFPGVCPNGRCVNSKGSFHCECPEGLTLDGTGRVCLDIRMEQCYLKWDEDECIHPVPGKFRMDACCCAVGAAWGTECEECPKPGTKEYETLCPRGAGFANRGDVLTGRPFYKDINECKAFPGMCTYGKCRNTIGSFKCRCNSGFALDMEERNCTDIDECRISPDLCGSGICVNTPGSFECECFEGYESGFMMMKNCMDIDECERNPLLCRGGTCVNTEGSFQCDCPLGHELSPSREDCVDINECSLSDNLCRNGKCVNMIGTYQCSCNPGYQATPDRQGCTDIDECMIMNGGCDTQCTNSEGSYECSCSEGYALMPDGRSCADIDECENNPDICDGGQCTNIPGEYRCLCYDGFMASMDMKTCIDVNECDLNSNICMFGECENTKGSFICHCQLGYSVKKGTTGCTDVDECEIGAHNCDMHASCLNIPGSFKCSCREGWIGNGIKCIDLDECSNGTHQCSINAQCVNTPGSYRCACSEGFTGDGFTCSDVDECAENINLCENGQCLNVPGAYRCECEMGFTPASDSRSCQDIDECSFQNICVFGTCNNLPGMFHCICDDGYELDRTGGNCTDIDECADPINCVNGLCVNTPGRYECNCPPDFQLNPTGVGCVDNRVGNCYLKFGPRGDGSLSCNTEIGVGVSRSSCCCSLGKAWGNPCETCPPVNSTEYYTLCPGGEGFRPNPITIILEDIDECQELPGLCQGGNCINTFGSFQCECPQGYYLSEDTRICEDIDECFAHPGVCGPGTCYNTLGNYTCICPPEYMQVNGGHNCMDMRKSFCYRSYNGTTCENELPFNVTKRMCCCTYNVGKAWNKPCEPCPTPGTADFKTICGNIPGFTFDIHTGKAVDIDECKEIPGICANGVCINQIGSFRCECPTGFSYNDLLLVCEDIDECSNGDNLCQRNADCINSPGSYRCECAAGFKLSPNGACVDRNECLEIPNVCSHGLCVDLQGSYQCICHNGFKASQDQTMCMDVDECERHPCGNGTCKNTVGSYNCLCYPGFELTHNNDCLDIDECSSFFGQVCRNGRCFNEIGSFKCLCNEGYELTPDGKNCIDTNECVALPGSCSPGTCQNLEGSFRCICPPGYEVKSENCIDINECDEDPNICLFGSCTNTPGGFQCLCPPGFVLSDNGRRCFDTRQSFCFTNFENGKCSVPKAFNTTKAKCCCSKMPGEGWGDPCELCPKDDEVAFQDLCPYGHGTVPSLHDTREDVNECLESPGICSNGQCINTDGSFRCECPMGYNLDYTGVRCVDTDECSIGNPCGNGTCTNVIGSFECNCNEGFEPGPMMNCEDINECAQNPLLCAFRCMNTFGSYECTCPIGYALREDQKMCKDLDECAEGLHDCESRGMMCKNLIGTFMCICPPGMARRPDGEGCVDENECRTKPGICENGRCVNIIGSYRCECNEGFQSSSSGTECLDNRQGLCFAEVLQTICQMASSSRNLVTKSECCCDGGRGWGHQCELCPLPGTAQYKKICPHGPGYTTDGRDIDECKVMPNLCTNGQCINTMGSFRCFCKVGYTTDISGTSCIDLDECSQSPKPCNYICKNTEGSYQCSCPRGYVLQEDGKTCKDLDECQTKQHNCQFLCVNTLGGFTCKCPPGFTQHHTACIDNNECGSQPSLCGAKGICQNTPGSFSCECQRGFSLDATGLNCEDVDECDGNHRCQHGCQNILGGYRCGCPQGYIQHYQWNQCVDENECSNPNACGSASCYNTLGSYKCACPSGFSFDQFSSACHDVNECSSSKNPCNYGCSNTEGGYLCGCPPGYYRVGQGHCVSGMGFNKGQYLSLDTEVDEENALSPEACYECKINGYSKKDSRQKRSIHEPDPTAVEQISLESVDMDSPVNMKFNLSHLGSKEHILELRPAIQPLNNHIRYVISQGNDDSVFRIHQRNGLSYLHTAKKKLMPGTYTLEITSIPLYKKKELKKLEESNEDDYLLGELGEALRMRLQIQLY

SEQ ID NO: 2078 - protein, 1375 aa, Homo sapiens
MAGGAWGRLACYLEFLKKEELKEFQLLLANKAHSRSSSGETPAQPEKTSGMEVASYLVAQYGEQRAWDLALHTWEQMGLRSLCAQAQEGAGHSPSFPYSPSEPHLGSPSQPTSTAVLMPWIHELPAGCTQGSERRVLRQLPDTSGRRWREISASLLYQALPSSPDHESPSQESPNAPTSTAVLGSWGSPPQPSLAPREQEAPGTQWPLDETSGIYYTEIREREREKSEKGRPPWAAVVGTPPQAHTSLQPHHHPWEPSVRESLCSTWPWKNEDFNQKFTQLLLLQRPHPRSQDPLVKRSWPDYVEENRGHLIEIRDLFGPGLDTQEPRIVILQGAAGIGKSTLARQVKEAWGRGQLYGDRFQHVFYFSCRELAQSKVVSLAELIGKDGTATPAPIRQILSRPERLLFILDGVDEPGWVLQEPSSELCLHWSQPQPADALLGSLLGKTILPEASFLITARTTALQNLIPSLEQARWVEVLGFSESSRKEYFYRYFTDERQAIRAFRLVKSNKELWALCLVPWVSWLACTCLMQQMKRKEKLTLTSKTTTTLCLHYLAQALQAQPLGPQLRDLCSLAAEGIWQKKTLFSPDDLRKHGLDGAIISTFLKMGILQEHPIPLSYSFIHLCFQEFFAAMSYVLEDEKGRGKHSNCIIDLEKTLEAYGIHGLFGASTTRFLLGLLSDEGEREMENIFHCRLSQGRNLMQWVPSLQLLLQPHSLESLHCLYETRNKTFLTQVMAHFEEMGMCVETDMELLVCTFCIKFSRHVKKLQLIEGRQHRSTWSPTMVVLFRWVPVTDAYWQILFSVLKVTRNLKELDLSGNSLSHSAVKSLCKTLRRPRCLLETLRLAGCGLTAEDCKDLAFGLRANQTLTELDLSFNVLTDAGAKHLCQRLRQPSCKLQRLQLVSCGLTSDCCQDLASVLSASPSLKELDLQQNNLDDVGVRLLCEGLRHPACKLIRLGLDQTTLSDEMRQELRALEQEKPQLLIFSRRKPSVMTPTEGLDTGEMSNSTSSLKRQRLGSERAASHVAQANLKLLDVSKIFPIAEIAGKSHEESSPEVVPVELLCVPSPASQGDLHTKPLGTDDDFWGPTGPVATEVVDKEKNLYRVHFPVAGSYRWPNTGLCFVMREAVTVEIEFCVWDQFLGEINPQHSWMVAGPLLDIKAEPGAVEAVHLPHFVALQGGHVDTSLFQMAHFKEEGMLLEKPARVELHHIVLENPSFSPLGVLLKMIHNALRFIPVTSVVLLYHRVHPEEVTFHLYLIPSDCSIRKAIDDLEMKFQFVRIHKPPPLTPLYMGCRYTVSGSGSGMLEILPKELELCYRSPGEDQLFSEFYVGHLGSGIRLQVKDKKDETLVWEALVKPGRNTSQPWNLRCNRDARRY

SEQ ID NO: 2079 - protein, 350 aa, Homo sapiens [sequence omitted]

SEQ ID NO: 2080 - protein, 464 aa, Homo sapiens
MVRLAAELLLLLGLLLLTLHITVLRGSGAADGPDAAAGNASQAQLQNNLNVGSDTTSETSFSLSKEAPREHLDHQAAHQPFPRPRFRQETGHPSLQRDFPRSFLLDLPNFPDLSKADINGQNPNIQVTIEVVDGPDSEADKDQHPENKPSWSVPSPDWRAWWQRSLSLARANSGDQDYKYDSTSDDSNFLNPPRGWDHTAPGHRTFETKDQPEYDSTDGEGDWSLWSVCSVTCGNGNQKRTRSCGYACTATESRTCDRPNCPGIEDTFRTAATEVSLLAGSEEFNATKLFEVDTDSCERWMSCKSEFLKKYMHKVMNDLPSCPCSYPTEVAYSTADIFDRIKRKDFRWKDASGPKEKLEIYKPTARYCIRSMLSLESTTLAAQHCCYGDNMQLITRGKGAGTPNLISTEFSAELHYKVDVLPWIICKGDWSRYNEARPPNNGQKCTESPSDEDYIKQFQEAREY

SEQ ID NO: 2081 - protein, 193 aa, Homo sapiens
MFKNTFQSGFLSILYSIGSKPLQIWDKKVRNGHIKRITDNDIQSLVLEIEGTNVSTTYITCPADPKKTLGIKLPFLVMIIKNLKKYFTFEVQVLDDKNVRRRFRASNYQSTTRVKPFICTMPMRLDDGWNQIQFNLLDFTRRAYGTNYIETLRVQIHANCRIRRVYFSDRLYSEDELPAEFKLYLPVQNKAKQ

SEQ ID NO: 2082 - protein, 350 aa, Homo sapiens
MPGPAAGSRARVYAEVNSLRSREYWDYEAHVPSWGNQDDYQLVRKLGRGKYSEVFEAINITNNERVVVKILKPVKKKKIKREVKILENLRGGTNIIKLIDTVKDPVSKTPALVFEYINNTDFKQLYQILTDFDIRFYMYELLKALDYCHSKGIMHRDVKPHNVMIDHQQKKLRLIDWGLAEFYHPAQEYNVRVASRYFKGPELLVDYQMYDYSLDMWSLGCMLASMIFRREPFFHGQDNYDQLVRIAKVLGTEELYGYLKKYHIDLDPHFNDILGQHSRKRWENFIHSENRHLVSPEALDLLDKLLRYDHQQRLTAKEAMEHPYFYPVVKEQSQPCADNAVLSSGLTAAR

SEQ ID NO: 2083 - protein, 318 aa, Homo sapiens
MAAAAVSGALGRAGWRLLQLRCLPVARCRQALVPRAFHASAVGLRSSDEQKQQPPNSFSQQHSETQGAEKPDPESSHSPPRYTDQGGEEEEDYESEEQLQHRILTAALEFVPAHGWTAEAIAEGAQSLGLSSAAASMFGKDGSELILHFVTQCNTRLTRVLEEEQKLVQLGQAEKRKTDQFLRDAVETRLRMLIPYIEHWPRALSILMLPHNIPSSLSLLTSMVDDMWHYAGDQSTDFNWYTRRAMLAAIYNTTELVMMQDSSPDFEDTWRFLENRVNDAMNMGHTAKQVKSTGEALVQGLMGAAVTLKNLTGLNQRR

SEQ ID NO: 2084 - protein, 3230 aa, Homo sapiens
MQSSPSPAHPQLPVLQTQMVSDGMTGSNPVSPASSSSPASSGAGGISPQHIAQDSSLDGPPGPPDGATVPLEGFSLSQAADLANKGPKWEKSHAEIAEQAKHEAEIETRIAELRKEGFWSLKRLPKVPEPPRPKGHWDYLCEEMQWLSADFAQERRWKRGVARKVVRMVIRHHEEQRQKEERARREEQAKLRRIASTMAKDVRQFWSNVEKVVQFKQQSRLEEKRKKALDLHLDFIVGQTEKYSDLLSQSLNQPLTSSKAGSSPCLGSSSAASSPPPPASRLDDEDGDFQPQEDEEEDDEETIEVEEQQEGNDAEAQRREIELLRREGELPLEELLRSLPPQLLEGPSSPSQTPSSHDSDTRDGPEEGAEEEPPQVLEIKPPPSAVTQRNKQPWHPDEDDEEFTANEEEAEDEEDTIAAEEQLEGEVDHAMELSELAREGELSMEELLQQYAGAYAPGSGSSEDEDEDEVDANSSDCEPEGPVEAEEPPQEDSSSQSDSVEDRSEDEEDEHSEEEETSGSSASEESESEESEDAQSQSQADEEEEDDDFGVEYLLARDEEQSEADAGSGPPTPGPTTLGPKKEITDIAAAAESLQPKGYTLATTQVKTPIPLLLRGQLREYQHIGLDWLVTMYEKKLNGILADEMGLGKTIQTISLLAHLACEKGNWGPHLIIVPTSVMLNWEMELKRWCPSFKILTYYGAQKERKLKRQGWTKPNAFHVCITSYKLVLQDHQAFRRKNWRYLILDEAQNIKNFKSQRWQSLLNFNSQRRLLLTGTPLQNSLMELWSLMHFLMPHVFQSHREFKEWFSNPLTGMIEGSQEYNEGLVKRLHKVLRPFLLRRVKVDVEKQMPKKYEHVIRCRLSKRQRCLYDDFMAQTTTKETLATGHFMSVINILMQLRKVCNHPNLFDPRPVTSPFITPGICFSTASLVLRATDVHPLQRIDMGRFDLIGLEGRVSRYEADTFLPRHRLSRRVLLEVATAPDPPPRPKPVKMKVNRMLQPVPKQEGRTVVVVNNPRAPLGPVPVRPPPGPELSAQPTPGPVPQVLPASLMVSASPAGPPLIPASRPPGPVLLPPLQPNSGSLPQVLPSPLGVLSGTSRPPTPTLSLKPTPPAPVRLSPAPPPGSSSLLKPLTVPPGYTFPPAAATTTSTTTATATTTAVPAPTPAPQRLILSPDMQARLPSGEVVSIGQLASLAQRPVANAGGSKPLTFQIQGNKLTLTGAQVRQLAVGQPRPLQRNVVHLVSAGGQHHLISQPAHVALIQAVAPTPGPTPVSVLPSSTPSTTPAPTGLSLPLAANQVPPTMVNNTGVVKIVVRQAPRDGLTPVPPLAPAPRPPSSGLPAVLNPRPTLTPGRLPTPTLGTARAPMPTPTLVRPLLKLVHSPSPEVSASAPGAAPLTISSPLHVPSSLPGPASSPMPIPNSSPLASPVSSTVSVPLSSSLPISVPTTLPAPASAPLTIPISAPLTVSASGPALLTSVTPPLAPVVPAAPGPPSLAPSGASPSASALTLGLATAPSLSSSQTPGHPLLLAPTSSHVPGLNSTVAPACSPVLVPASALASPFPSAPNPAPAQASLLAPASSASQALATPLAPMAAPQTAILAPSPAPPLAPLPVLAPSPGAAPVLASSQTPVPVMAPSSTPGTSLASASPVPAPTPVLAPSSTQTMLPAPVPSPLPSPASTQTLALAPALAPTLGGSSPSQTLSLGTGNPQGPFPTQTLSLTPASSLVPTPAQTLSLAPGPPLGPTQTLSLAPAPPLAPASPVGPAPAHTLTLAPASSSASLLAPASVQTLTLSPAPVPTLGPAAAQTLALAPASTQSPASQASSLVVSASGAAPLPVTMVSRLPVSKDEPDTLTLRSGPPSPPSTATSFGGPRPRRQPPPPPRSPFYLDSLEEKRKRQRSERLERIFQLSEAHGALAPVYGTEVLDFCTLPQPVASPIGPRSPGPSHPTFWTYTEAAHRAVLFPQQRLDQLSEIIERFIFVMPPVEAPPPSLHACHPPPWLAPRQAAFQEQLASELWPRARPLHRIVCNMRTQFPDLRLIQYDCGKLQTLAVLLRQLKAEGHRVLIFTQMTRMLDVLEQFLTYHGHLYLRLDGSTRVEQRQALMERFNADKRIFCFILSTRSGGVGVNLTGADTVVFYDSDWNPTMDAQAQDRCHRIGQTRDVHIYRLISERTVEENILKKANQKRMLGDMAIEGGNFTTAYFKQQTIRELFDMPLEEPSSSSVPSAPEEEEETVASKQTHILEQALCRAEDEEDIRAATQAKAEQVAELAEFNENDGFPAGEGEEAGRPGAEDEEMSRAEQEIAALVEQLTPIERYAMKFLEASLEEVSREELKQAEEQVEAARKDLDQAKEEVFRLPQEEEEGPGAGDESSCGTGGGTHRRSKKAKAPERPGTRVSERLRGARAETQGANHTPVISAHQTRSTTTPPRCSPARERVPRPAPRPRPTPASAPAAIPALVPVPVSAPVPISAPNPITILPVHILPSPPPPSQIPPCSSPACTPPPACTPPPAHTPPPAQTCLVTPSSPLLLGPPSVPISASVTNLPLGLRPEAELCAQALASPESLELASVASSETSSLSLVPPKDLLPVAVEILPVSEKNLSLTPSAPSLTLEAGSIPNGQEQEAPDSAEGTTLTVLPEGEELPLCVSESNGLELPPSAASDEPLQEPLEADRTSEELTEAKTPTSSPEKPQELVTAEVAAPSTSSSATSSPEGPSPARPPRRRTSADVEIRGQGTGRPGQPPGPKVLRKLPGRLVTVVEEKELVRRRRQQRGAASTLVPGVSETSASPGSPSVRSMSGPESSPPIGGPCEAAPSSSLPTPPQQPFIARRHIELGVTGGGSPENGDGALLAITPPAVKRRRGRPPKKNRSPADAGRGVDEAPSSTLKGKTNGADPVPGPETLIVADPVLEPQLIPGPQPLGPQPVHRPNPLLSPVEKRRRGRPPKARDLPIPGTISSAGDGNSESRTQPPPHPSPLTPLPPLLVCPTATVANTVTTVTISTSPPKRKRGRPPKNPPSPRPSQLPVLDRDSTSVLESCGLGRRRQPQGQGESEGSSSDEDGSRPLTRLARLRLEAEGMRGRKSGGSMVVAVIQDDLDLADSGPGGLELTPPVVSLTPKLRSTRLRPGSLVPPLETEKLPRKRAGAPVGGSPGLAKRGRLQPPSPLGPEGSVEESEAEASGEEEEGDGTPRRRPGPRRLVGTTNQGDQRILRSSAPPSLAGPAVSHRGRKAKT

SEQ ID NO: 2085 - protein, 1707 aa, Homo sapiens
MDQEGGGDGQKAPSFQWRNYKLIVDPALDPALRRPSQKVYRYDGVHFSVNDSKYIPVEDLQDPRCHVRSKNRDFSLPVPKFKLDEFYIGQIPLKEVTFARLNDNVRETFLKDMCRKYGEVEEVEILLHPRTRKHLGLARVLFTSTRGAKETVKNLHLTSVMGNIIHAQLDIKGQQRMKYYELIVNGSYTPQTVPTGGKALSEKFQGSGAATETAESRRRSSSDTAAYPAGTTAVGTPGNGTPCSQDTSFSSSRQDTPSSFGQFTPQSSQGTPYTSRGSTPYSQDSAYSSSTTSTSFKPRRSENSYQDAFSRRHFSASSASTTASTAIAATTAATASSSASSSSLSSSSSSSSSSSSSQFRSSDANYPAYYESWNRYQRHTSYPPRRATREEPPGAPFAENTAERFPPSYTSYLPPEPSRPTDQDYRPPASEAPPPEPPEPGGGGGGGGPSPEREEVRTSPRPASPARSGSPAPETTNESVPFAQHSSLDSRIEMLLKEQRSKFSFLASDTEEEEENSSMVLGARDTGSEVPSGSGHGPCTPPPAPANFEDVAPTGSGEPGATRESPKANGQNQASPCSSGDDMEISDDDRGGSPPPAPTPPQQPPPPPPPPPPPPPYLASLPLGYPPHQPAYLLPPRPDGPPPPEYPPPPPPPPHIYDFVNSLELMDRLGAQWGGMPMSFQMQTQMLTRLHQLRQGKGLIAASAGPPGGAFGEAFLPFPPPQEAAYGLPYALYAQGQEGRGAYSREAYHLPMPMAAEPLPSSSVSGEEARLPPREEAELAEGKTLPTAGTVGRVLAMLVQEMKSIMQRDLNRKMVENVAFGAFDQWWESKEEKAKPFQNAAKQQAKEEDKEKTKLKEPGLLSLVDWAKSGGTTGIEAFAFGSGLRGALRLPSFKVKRKEPSEISEASEEKRPRPSTPAEEDEDDPEQEKEAGEPGRPGTKPPKRDEERGKTQGKHRKSFALDSEGEEASQESSSEKDEEDDEEDEEDEDREEAVDTTKKETEVSDGEDEESDSSSKCSLYADSDGENDSTSDSESSSSSSSSSSSSSSSSSSSSSSSSESSSEDEEEEERPAALPSASPPPREVPVPTPAPVEVPVPERVAGSPVTPLPEQEASPARPAGPTEESPPSAPLRPPEPPAGPPAPAPRPDERPSSPIPLLPPPKKRRKTVSFSAIEVVPAPEPPPATPPQAKFPGPASRKAPRGVERTIRNLPLDHASLVKSWPEEVSRGGRSRAGGRGRLTEEEEAEPGTEVDLAVLADLALTPARRGLPALPAVEDSEATETSDEAERPRPLLSHILLEHNYALAVKPTPPAPALRPPEPVPAPAALFSSPADEVLEAPEVVVAEAEEPKPQQLQQQREEGEEEGEEEGEEEEEESSDSSSSSDGEGALRRRSLRSHARRRRPPPPPPPPPPRAYEPRSEFEQMTILYDIWNSGLDSEDMSYLRLTYERLLQQTSGADWLNDTHWVHHTITNLTTPKRKRRPQDGPREHQTGSARSEGYYPISKKEKDKYLDVCPVSARQLEGVDTQGTNRVLSERRSEQRRLLSAIGTSAIMDSDLLKLNQLKFRKKKLRFGRSRIHEWGLFAMEPIAADEMVIEYVGQNIRQMVADMREKRYVQEGIGSSYLFRVDHDTIIDATKCGNLARFINHCCTPNCYAKVITIESQKKIVIYSKQPIGVDEEITYDYKFPLEDNKIPCLCGTESCRGSLN

SEQ ID NO: 2086 - protein, 869 aa, Homo sapiens
MEPETALWGPDLQGPEQSPNDAHRGAESENEEESPRQESSGEEIIMGDPAQSPESKDSTEMSLERSSQDPSVPQNPPTPLGHSNPLDHQIPLDPPAPEVVPTPSDWTKACEASWQWGALTTWNSPPVVPANEPSLRELVQGRPAGAEKPYICNECGKSFSQWSKLLRHQRIHTGERPNTCSECGKSFTQSSHLVQHQRTHTGEKPYKCPDCGKCFSWSSNLVQHQRTHTGEKPYKCTECEKAFTQSTNLIKHQRSHTGEKPYKCGECRRAFYRSSDLIQHQATHTGEKPYKCPECGKRFGQNHNLLKHQKIHAGEKPYRCTECGKSFIQSSELTQHQRTHTGEKPYECLECGKSFGHSSTLIKHQRTHLREDPFKCPVCGKTFTLSATLLRHQRTHTGERPYKCPECGKSFSVSSNLINHQRIHRGERPYICADCGKSFIMSSTLIRHQRIHTGEKPYKCSDCGKSFIRSSHLIQHRRTHTGEKPYKCPECGKSFSQSSNLITHVRTHMDENLFVCSDCGKAFLEAHELEQHRVIHERGKTPARRAQGDSLLGLGDPSLLTPPPGAKPHKCLVCGKGFNDEGIFMQHQRIHIGENPYKNADGLIAHAAPKPPQLRSPRLPFRGNSYPGAAEGRAEAPGQPLKPPEGQEGFSQRRGLLSSKTYICSHCGESFLDRSVLLQHQLTHGNEKPFLFPDYRIGLGEGAGPSPFLSGKPFKCPECKQSFGLSSELLLHQKVHAGGKSSQKSPELGKSSSVLLEHLRSPLGARPYRCSDCRASFLDRVALTRHQETHTQEKPPNPEDPPPEAVTLSTDQEGEGETPTPTESSSHGEGQNPKTLVEEKPYLCPECGAGFTEVAALLLHRSCHPGVSL

SEQ ID NO: 2087 - protein, 767 aa, Homo sapiens
MATYLEFIQQNEERDGVRFSWNVWPSSRLEATRMVVPLACLLTPLKERPDLPPVQYEPVLCSRPTCKAVLNPLCQVDYRAKLWACNFCFQRNQFPPAYGGISEVNQPAELMPQFSTIEYVIQRGAQSPLIFLYVVDTCLEEDDLQALKESLQMSLSLLPPDALVGLITFGRMVQVHELSCEGISKSYVFRGTKDLTAKQIQDMLGLTKPAMPMQQARPAQPQEHPFASSRFLQPVHKIDMNLTDLLGELQRDPWPVTQGKRPLRSTGVALSIAVGLLEGTFPNTGARIMLFTGGPPTQGPGMVVGDELKIPIRSWHDIEKDNARFMKKATKHYEMLANRTAANGHCIDIYACALDQTGLLEMKCCANLTGGYMVMGDSFNTSLFKQTFQRIFTKDFNGDFRMAFGATLDVKTSRELKIAGAIGPCVSLNVKGPCVSENELGVGGTSQWKICGLDPTSTLGIYFEVVNQHNTPIPQGGRGAIQFVTHYQHSSTQRRIRVTTIARNWADVQSQLRHIEAAFDQEAAAVLMARLGVFRAESEEGPDVLRWLDRQLIRLCQKFGQYNKEDPTSFRLSDSFSLYPQFMFHLRRSPFLQVFNNSPDESSYYRHHFARQDLTQSLIMIQPILYSYSFHGPPEPVLLDSSSILADRILLMDTFFQIVIYLGETIAQWRKAGYQDMPEYENFKHLLQAPLDDAQEILQARFPMPRYINTEHGGSQARFLLSKVNPSQTHNNLYAWGQETGAPILTDDVSLQVFMDHLKKLAVSSAC

SEQ ID NO: 2088 - protein, 752 aa, Homo sapiens
MTAGSVCVPQIIPLRVPQPGKANHEIDNNTLLEMKSDTPDVNIYYTLDGSKPEFLKRIGYGENNTFKYIKPITLPDGKIQVKAIAVSKDCRQSGIVTKVFHVDYEPPNIVSPEDNVENVLKDSSRQEFKNGFVGSKLKKKYKNSENQRSWNVNLRKFPESPLEIPAYGGGSGSRPPTRQSQSPGFAHVSGQKCLTSTEIMRIQRETDFLKCAHCLAPRPSDPFARFCQECGSPVPPIFGCRLPPPEGAQMGLCAECRSLVPMNTPICVVCEAPLALQLQPQASLHLKEKVICRACGTGNPAHLRYCVTCEGALPSSQESMCSGDKAPPPPTQKGGTISCYRCGRWNLWEASFCGWCGAMLGIPAGCSVCPKCGASNHLSARFCGSCGICVKSLVKLSLDRSLALAAEEPRPFSESLNIPLPRSDVGTKRDIGTQTVGLFYPSGKLLAKKEQELASQKQRQEKMSDHKPLLTAISPGRGYWRRQLDHISAHLRCYAQNNPEFRALIAEPRMGKLISATVHEDGCEVSIRLNYSQVSNKNLYLNKAVNFSDHLLSSAAEGDGGLCGSRSSWVSDYSQSTSDTIEKIKRIKNFKTKTFQEKKEQLIPENRLLLKEVGPTGEGRVSVIEQLLDEGADPNCCDEDNRPVITVAVMNKHHEAIPVLVQRGADIDQQWGPLRNTALHEATLLGLAGRESTATLLGCNASIQKKNAGGQTAYDLALNTGDDLVTSLFAAKFGQGLEDQLAQTRSLSLDDC

SEQ ID NO: 2089 - protein, 298 aa, Homo sapiens
MKTLQSTLLLLLLVPLIKPAPPTQQDSRIIYDYGTDNFEESIFSQDYEDKYLDGKNIKEKETVIIPNEKSLQLQKDEAITPLPPKKENDEMPTCLLCVCLSGSVYCEEVDIDAVPPLPKESAYLYARFNKIKKLTAKDFADIPNLRRLDFTGNLIEDIEDGTFSKLSLLEELSLAENQLLKLPVLPPKLTLFNAKYNKIKSRGIKANAFKKLNNLTFLYLDHNALESVPLNLPESLRVIHLQFNNIASITDDTFCKANDTSYIRDRIEEIRLEGNPIVLGKHPNSFICLKRLPIGSYF

SEQ ID NO: 2090 - protein, 473 aa, Homo sapiens
MATATEQWVLVEMVQALYEAPAYHLILEGILILWIIRLLFSKTYKLQERSDLTVKEKEELIEEWQPEPLVPPVPKDHPALNYNIVSGPPSHKTVVNGKECINFASFNFLGLLDNPRVKAAALASLKKYGVGTCGPRGFYGTFDVHLDLEDRLAKFMKTEEAIIYSYGFATIASAIPAYSKRGDIVFVDRAACFAIQKGLQASRSDIKLFKHNDMADLERLLKEQEIEDQKNPRKARVTRRFIVVEGLYMNTGTICPLPELVKLKYKYKARIFLEESLSFGVLGEHGRGVTEHYGINIDDIDLISANMENALASIGGFCCGRSFVIDHQRLSGQGYCFSASLPPLLAAAAIEALNIMEENPGIFAVLKEKCGQIHKALQGISGLKVVGESLSPAFHLQLEESTGSREQDVRLLQEIVDQCMNRSIALTQARYLEKEEKCLPPPSIRVVVTVEQTEEELERAASTIKEVAQAVLL

SEQ ID NO: 2091 - protein, 227 aa, Homo sapiens
MGGTTSTRRVTFEADENENITVVKGIRLSENVIDRMKESSPSGSKSQRYSGAYGASVSDEELKRRVAEELALEQAKKESEDQKRLKQAKELDRERAAANEQLTRAILRERICSEEERAKAKHLARQLEEKDRVLKKQDAFYKEQLARLEERSSEFYRVTTEQYQKAAEEVEAKFKRYESHPVCADLQAKILQCYRENTHQTLKCSALATQYMHCVNHAKQSMLEKGG

SEQ ID NO: 2092 - protein, 948 aa, Homo sapiens
MEEKEILRRQIRLLQGLIDDYKTLHGNAPAPGTPAASGWQPPTYHSGRAFSARYPRPSRRGYSSHHGPSWRKKYSLVNRPPGPSDPPADHAVRPLHGARGGQPPVPQQHVLERQVQLSQGQNVVIKVKPPSKSGSASASGAQRGSLEEFEETPWSDQRPREGEGEPPRGQLQPSRPTRARGTCSVEDPLLVCQKEPGKPRMVKSVGSVGDSPREPRRTVSESVIAVKASFPSSALPPRTGVALGRKLGSHSVASCAPQLLGDRRVDAGHTDQPVPSGSVGGPARPASGPRQAREASLVVTCRTNKFRKNNYKWVAASSKSPRVARRALSPRVAAENVCKASAGMANKVEKPQLIADPEPKPRKPATSSKPGSAPSKYKWKASSPSASSSSSFRWQSEASSKDHASQLSPVLSRSPSGDRPAVGHSGLKPLSGETPLSAYKVKSRTKIIRRRSSTSLPGDKKSGTSPAATAKSHLSLRRRQALRGKSSPVLKKTPNKGLVQVTTHRLCRLPPSRAHLPTKEASSLHAVRTAPTSKVIKTRYRIVKKTPASPLSAPPFPLSLPSWRARRLSLSRSLVLNRLRPVASGGGKAQPGSPWWRSKGYRCIGGVLYKVSANKLSKTSGQPSDAGSRPLLRTGRLDPAGSCSRSLASRAVQRSLAIIRQARQRREKRKEYCMYYNRFGRCNRGERCPYIHDPEKVAVCTRFVRGTCKKTDGTCPFSHHVSKEKMPVCSYFLKGICSNSNCPYSHVYVSRKAEVCSDFLKGYCPLGAKCKKKHTLLCPDFARRGACPRGAQCQLLHRTQKRHSRRAATSPAPGPSDATARSRVSASHGPRKPSASQRPTRQTPSSAALTAAAVAAPPHCPGGSASPSSSKASSSSSSSSSPPASLDHEAPSLQEAALAAACSNRLCKLPSFISLQSSPSPGAQPRVRAPRAPLTKDSGKPLHIKPRL

SEQ ID NO: 2093 - protein, 484 aa, Homo sapiens
MGSAFERVVRRVVQELDHGGEFIPVTSLQSSTGFQPYCLVVRKPSSSWFWKPRYKCVNLSIKDILEPDAAEPDVQRGRSFHFYDAMDGQIQGSVELAAPGQAKIAGGAAVSDSSSTSMNVYSLSVDPNTWQTLLHERHLRQPEHKVLQQLRSRGDNVYVVTEVLQTQKEVEVTRTHKREGSGRFSLPGATCLQGEGQGHLSQKKTVTIPSGSTLAFRVAQLVIDSDLDVLLFPDKKQRTFQPPATGHKRSTSEGAWPQLPSGLSMMRCLHNFLTDGVPAEGAFTEDFQGLRAEVETISKELELLDRELCQLLLEGLEGVLRDQLALRALEEALEQGQSLGPVEPLDGPAGAVLECLVLSSGMLVPELAIPVVYLLGALTMLSETQHKLLAEALESQTLLGPLELVGSLLEQSAPWQERSTMSLPPGLLGNSWGEGAPAWVLLDECGLELGEDTPHVCWEPQAQGRMCALYASLALLSGLSQEPH

SEQ ID NO: 2094 - protein, 257 aa, Homo sapiens [sequence omitted]

SEQ ID NO: 2095 - protein, 1198 aa, Homo sapiens
MRSLRKKREKPRPEQWKGLPGPPRAPEPEDVAVPGGVDLLTLPQLCFPGGVCVATEPKEDCVHFLVLTDVCGNRTYGVVAQYYRPLHDEYCFYNGKTHRECPGCFVPFAVCVVSRFPYYNSLKDCLSCLLALLKPCKDFEVDSHIKDFAAKLSLIPSPPPGPLHLVFNMKSLQIVLPARADPESPILDLDLHLPLLCFRPEKVLQILTCILTEQRIVFFSSDWALLTLVTECFMAYLYPLQWQHPFVPILSDQMLDFVMAPTSFLMGCHLDHFEEVSKEADGLVLINIDHGSITYSKSTDDNVDIPDVPLLAAQTFIQRVQSLQLHHELHAAHLLSSTDLKEGRAHRRSWQQKLNCQIQQTTLQLLVSIFRDVKNHLNYEHRVFNSEEFLKTRAPGDHQFYKQVLDTYMFHSFLKARLNRRMDAFAQMDLDTQSEEDRINGMLLSPRRPTVEKRASRKSSHLHVTHRRMVVSMPNLQDIAMPELAPRNSSLRLTDTAGCRGSSAVLNVTPKSPYTFKIPEIHFPLESKCVQAYHAHFVSMLSEAMCFLAPDNSLLLARYLYLRGLVYLMQGQLLNALLDFQNLYKTDIRIFPTDLVKRTVESMSAPEWEGAEQAPELMRLISEILDKPHEASKLDDHVKKFKLPKKHMQLGDFMKRVQESGIVKDASIIHRLFEALTVGQEKQIDPETFKDFYNCWKETEAEAQEVSLPWLVMEHLDKNECVCKLSSSVKTNLGVGKIAMTQKRLFLLTEGRPGYLEISTFRNIEEVRRTTTTFLLRRIPTLKIRVASKKEVFEANLKTECDLWHLMVKEMWAGKKLADDHKDPHYVQQALTNVLLMDAVVGTLQSPGAIYAASKLSYFDKMSNEMPMTLPETTLETLKHKINPSAGEAFPQAVDVLLYTPGHLDPAEKVEDAHPKLWCALSEGKVTVFNASSWTIHQHSFKVGTAKVNCMVMADQNQVWVGSEDSVIYIINVHSMSCNKQLTAHCSSVTDLIVQDGQEAPSNVYSCSMDGMVLVWNVSTLQVTSRFQLPRGGLTSIRLHGGRLWCCTGNSIMVMKMNGSLHQELKIEENFKDTSTSFLAFQLLPEEEQLWAACAGRSEVYIWSLKDLAQPPQRVPLEDCSEINCMIRVKKQVWVGSRGLGQGTPKGKIYVIDAERKTVEKELVAHMDTVRTLCSAEDRYVLSGSGREEGKVAIWKGE

SEQ ID NO: 2096 - protein, 306 aa, Homo sapiens [sequence omitted]

SEQ ID NO: 2097 - protein, 342 aa, Homo sapiens
MSEESDSLRTSPSVASLSENELPPPPEPPGYVCSLTEDLVTKAREELQEKPEWRLRDVQALRDMVRKEYPNLSTSLDDAFLLRFLRARKFDYDRALQLLVNYHSCRRSWPEVFNNLKPSALKDVLASGFLTVLPHTDPRGCHVVCIRPDRWIPSNYPITENIRAIYLTLEKLIQSEETQVNGIVILADYKGVSLSKASHFGPFIAKKVIGILQDGFPIRIKAVHVVNEPRIFKGIFAIIKPFLKEKIANRFFLHGSDLNSLHTNLPRSILPKEYGGTAGELDTATWNAVLLASEDDFVKEFCQPVPACDSILGQTLLPEGLTSDAQCDDSLRAVKSQLYSCY

SEQ ID NO: 2098 - protein, 358 aa, Homo sapiens
MSADAAAGAPLPRLCCLEKGPNGYGFHLHGEKGKLGQYIRLVEPGSPAEKAGLLAGDRLVEVNGENVEKETHQQVVSRIRAALNAVRLLVVDPETDEQLQKLGVQVREELLRAQEAPGQAEPPAAAEVQGAGNENEPREADKSHPEQRELRPRLCTMKKGPSGYGFNLHSDKSKPGQFIRSVDPDSPAEASGLRAQDRIVEVNGVCMEGKQHGDVVSAIRAGGDETKLLVVDRETDEFFKKCRVIPSQEHLNGPLPVPFTNGEIQKENSREALAEAALESPRPALVRSASSDTSEELNSQDSPPKQDSTAPSSTSSSDPILDFNISLAMAKERAHQKRSSKRAPQMDWSKKNELFSNL

SEQ ID NO: 2099 - protein, 633 aa, Homo sapiens
MLRMRVPALLVLLFCFRGRAGPSPHFLQQPEDLVVLLGEEARLPCALGAYWGLVQWTKSGLALGGQRDLPGWSRYWISGNAANGQHDLHIRPVELEDEASYECQATQAGLRSRPAQLHVLVPPEAPQVLGGPSVSLVAGVPANLTCRSRGDARPTPELLWFRDGVLLDGATFHQTLLKEGTPGSVESTLTLTPFSHDDGATFVCRARSQALPTGRDTAITLSLQYPPEVTLSASPHTVQEGEKVIFLCQATAQPPVTGYRWAKGGSPVLGARGPRLEVVADASFLTEPVSCEVSNAVGSANRSTALDVLFGPILQAKPEPVSVDVGEDASFSCAWRGNPLPRVTWTRRGGAQVLGSGATLRLPSVGPEDAGDYVCRAEAGLSGLRGGAAEARLTVNAPPVVTALHSAPAFLRGPARLQCLVFASPAPDAVVWSWDEGFLEAGSQGRFLVETFPAPESRGGLGPGLISVLHISGTQESDFSRSFNCSARNRLGEGGAQASLGRRDLLPTVRIVAGVAAATTTLLMVITGVALCCWRHSKASASFSEQKNLMRIPGSSDGSSSRGPEEEETGSREDRGPIVHTDHSDLVLEEEGTLETKDPTNGYYKVRGVSPPASPDSRVTSFQWKSPGISNLP

SEQ ID NO: 2100 - protein, 218 aa, Homo sapiens
MGRLLALVVGAALVSSACGGCVEVDSETEAVYGMTFKILCISCKRRSETNAETFTEWTFRQKGTEEFVKILRYENEVLQLEEDERFEGRVVWNGSRGTKDLQDLSIFITNVTYNHSGDYECHVYRLLFFENYEHNTSVVKKIHIEVVDKANRDMASIVSEIMMYVLIVVLTIWLVAEMIYCYKKIAAATETAAQENASEYLAITSESKENCTGVQVAE

SEQ ID NO: 2101 - protein, 480 aa, Homo sapiens
MAGAGPAPGLPGAGGPVVPGPGAGIPGKSGEERLKEMEAEMALFEQEVLGAPVPGIPTAVPAVPTVPTVPTVEAMQVPAAPVIRPIIATNTYQQVQQTLEARAAAAATVVPPMVGGPPFVGPVGFGPGDRSHLDSPEAREAMFLRRAAVAPQRAPILRPAFVPHVLQRADSALSSAAAGPRPMALRPPHQALVGPPLPGPPGPPMMLPPMARAPGPPLGSMAALRPPLEEPAAPRELGLGLGLGLKEKEEAVVAAAAGLEEASAAVAVGAGGAPAGPAVIGPSLPLALAMPLPEPEPLPLPLEVVRGLLPPLRIPELLSLRPRPRPPRPEPPPGLMALEVPEPLGEDKKKGKPEKLKRCIRTAAGSSWEDPSLLEWDADDFRIFCGDLGNEVNDDILARAFSRFPSFLKAKVIRDKRTGKTKGYGFVSFKDPSDYVRAMREMNGKYVGSRPIKLRKSMWKDRNLDVVRKKQKEKKKLGLR

SEQ ID NO: 2102 - protein, 359 aa, Homo sapiens
MAPMGIRLSPLGVAVFCLLGLGVLYHLYSGFLAGRFSLFGLGGEPGGGAAGPAAAADGGTVDLREMLAVSVLAAVRGGDEVRRVRESNVLHEKSKGKTREGAEDKMTSGDVLSNRKMFYLLKTAFPSVQINTEEHVDAADQEVILWDHKIPEDILKEVTTPKEVPAESVTVWIDPLDATQEYTEDLRKYVTTMVCVAVNGKPMLGVIHKPFSEYTAWAMVDGGSNVKARSSYNEKTPRIVVSRSHSGMVKQVALQTFGNQTTIIPAGGAGYKVLALLDVPDKSQEKADLYIHVTYIKKWDICAGNAILKALGGHMTTLSGEEISYTGSDGIEGGLLASIRMNHQALVRKLPDLEKTGHK

SEQ ID NO: 2103 - protein, 212 aa, Homo sapiens
MAYAYLFKYIIIGDTGVGKSCLLLQFTDKRFQPVHDLTIGVEFGARMITIDGKQIKLQIWDTAGQESFRSITRSYYRGAAGALLVYDITRRDTFNHLTTWLEDARQHSNSNMVIMLIGNKSDLESRREVKKEEGEAFAREHGLIFMETSAKTASNVEEAFINTAKEIYEKIQEGVFDINNEANGIKIGPQHAATNATHAGNQGGQQAGGGCC

SEQ ID NO: 2104 - protein, 680 aa, Homo sapiens
MVPGVPGAVLTLCLWLAASSGCLAAGPGAAAARRLDESLSAGSVQRARCASRCLSLQITRISAFFQHFQNNGSLVWCQNHKQCSKCLEPCKESGDLRKHQCQSFCEPLFPKKSYECLTSCEFLKYILLVKQGDCPAPEKASGFAAACVESCEVDNECSGVKKCCSNGCGHTCQVPKTLYKGVPLKPRKELRFTELQSGQLEVKWSSKFNISIEPVIYVVQRRWNYGIHPSEDDATHWQTVAQTTDERVQLTDIRPSRWYQFRVAAVNVHGTRGFTAPSKHFRSSKDPSAPPAPANLRLANSTVNSDGSVTVTIVWDLPEEPDIPVHHYKVFWSWMVSSKSLVPTKKKRRKTTDGFQNSVILEKLQPDCDYVVELQAITYWGQTRLKSAKVSLHFTSTHATNNKEQLVKTRKGGIQTQLPFQRRRPTRPLEVGAPFYQDGQLQVKVYWKKTEDPTVNRYHVRWFPEACAHNRTTGSEASSGMTHENYIILQDLSFSCKYKVTVQPIRPKSHSKAEAVFFTTPPCSALKGKSHKPVGCLGEAGHVLSKVLAKPENLSASFIVQDVNITGHFSWKMAKANLYQPMTGFQVTWAEVTTESRQNSLPNSIISQSQILPSDHYVLTVPNLRPSTLYRLEVQVLTPGGEGPATIKTFRTPELPPSSAHRSHLKHRHPHHYKPSPERY

SEQ ID NO: 2105 - protein, 903 aa, Homo sapiens
MSDSGSQLGSMGSLTMKSQLQITVISAKLKENKKNWFGPSPYVEVTVDGQSKKTEKCNNTNSPKWKQPLTVIVTPVSKLHFRVWSHQTLKSDVLLGTAALDIYETLKSNNMKLEEVVVTLQLGGDKEPTETIGDLSICLDGLQLESEVVTNGETTCSENGVSLCLPRLECNSAISAHCNLCLPGLSDSPISASRVAGFTGASQNDDGSRSKDETRVSTNGSDDPEDAGAGENRRVSGNNSPSLSNGGFKPSRPPRPSRPPPPTPRRPASVNGSPSATSESDGSSTGSLPPTNTNTNTSEGATSGLIIPLTISGGSGPRPLNPVTQAPLPPGWEQRVDQHGRVYYVDHVEKRTTWDRPEPLPPGWERRVDNMGRIYYVDHFTRTTTWQRPTLESVRNYEQWQLQRSQLQGAMQQFNQRFIYGNQDLFATSQSKEFDPLGPLPPGWEKRTDSNGRVYFVNHNTRITQWEDPRSQGQLNEKPLPEGWEMRFTVDGIPYFVDHNRRTTTYIDPRTGKSALDNGPQIAYVRDFKAKVQYFRFWCQQLAMPQHIKITVTRKTLFEDSFQQIMSFSPQDLRRRLWVIFPGEEGLDYGGVAREWFFLLSHEVLNPMYCLFEYAGKDNYCLQINPASYINPDHLKYFRFIGRFIAMALFHGKFIDTGFSLPFYKRILNKPVGLKDLESIDPEFYNSLIWVKENNIEECDLEMYFSVDKEILGEIKSHDLKPNGGNILVTEENKEEYIRMVAEWRLSRGVEEQTQAFFEGFNEILPQQYLQYFDAKELEVLLCGMQEIDLNDWQRHAIYRHYARTSKQIMWFWQFVKEIDNEKRMRLLQFVTGTCRLPVGGFADLMGSNGPQKFCIEKVGKENWLPRSHTCFNRLDLPPYKSYEQLKEKLLFAIEETEGFGQE

SEQ ID NO: 2106 - protein, 168 aa, Homo sapiens
MAEPWGNELASAAARGDLEQLTSLLQNNVNVNAQNGFGRTALQVMKLGNPEIARRLLLRGANPDLKDRTGFAVIHDAARAGFLDTLQTLLEFQADVNIEDNEGNLPLHLAAKEGHLRVVEFLVKHTASNVGHRNHKGDTACDLARLYGRNEVVSLMQANGAGGATNLQ

SEQ ID NO: 2107 - protein, 538 aa, Homo sapiens
MERLGEKASRLLEKFGRRKGESSRSGSDGTPGPGKGRLSGLGGPRKSGPRGATGGPGDEPLEPAREQGSLDAERNQRGSFEAPRYEGSFPAGPPPTRALPLPQSLPPDFRLEPTAPALSPRSSFASSSASDASKPSSPRGSLLLDGAGAGGAGGSRPCSNRTSGISMGYDQRHGSPLPAGPCLFGPPLAGAPAGYSPGGVPSAYPELHAALDRLYAQRPAGFGCQESRHSYPPALGSPGALAGAGVGAAGPLERRGAQPGRHSVTGYGDCAVGARYQDELTALLRLTVGTGGREAGARGEPSGIEPSGLEEPPGPFVPEAARARMREPEAREDYFGTCIKCNKGIYGQSNACQALDSLYHTQCFVCCSCGRTLRCKAFYSVNGSVYCEEDYLFSGFQEAAEKCCVCGHLILEKILQAMGKSYHPGCFRCIVCNKCLDGIPFTVDFSNQVYCVTDYHKNYAPKCAACGQPILPSEGCEDIVRVISMDRDYHFECYHCEDCRMQLSDEEGCCCFPLDGHLLCHGCHMQRLNARQPPANYI

SEQ ID NO: 2108 - protein, 2627 aa, Homo sapiens
MEKLHGHVSAHPDILSLENRCLAMLPDLQPLEKLHQHVSTHSDILSLKNQCLATLPDLKTMEKPHGYVSAHPDILSLENQCLATLSDLKTMEKPHGHVSAHPDILSLENRCLATLSSLKSTVSASPLFQSLQISHMTQADLYRVNNSNCLLSEPPSWRAQHFSKGLDLSTCPIALKSISATETAQEATLGRWFDSEEKKGAETQMPSYSLSLGEEEEVEDLAVKLTSGDSESHPEPTDHVLQEKKMALLSLLCSTLVSEVNMNNTSDPTLAAIFEICRELALLEPEFILKASLYARQQLNVRNVANNILAIAAFLPACRPHLRRYFCAIVQLPSDWIQVAELYQSLAEGDKNKLVPLPACLRTAMTDKFAQFDEYQLAKYNPRKHRAKRHPRRPPRSPGMEPPFSHRCFPRYIGFLREEQRKFEKAGDTVSEKKNPPRFTLKKLVQRLHIHKPAQHVQALLGYRYPSNLQLFSRSRLPGPWDSSRAGKRMKLSRPETWERELSLRGNKASVWEELIENGKLPFMAMLRNLCNLLRVGISSRHHELILQRLQHAKSVIHSRQFPFRFLNAHDAIDALEAQLRNQALPFPSNITLMRRILTRNEKNRPRRRFLCHLSRQQLRMAMRIPVLYEQLKREKLRVHKARQWKYDGEMLNRYRQALETAVNLSVKHSLPLLPGRTVLVYLTDANADRLCPKSNPQGPPLNYALLLIGMMITRAEQVDVVLCGGDTLKTAVLKAEEGILKTAIKLQAQVQEFDENDGWSLNTFGKYLLSLAGQRVPVDRVILLGQSMDDGMINVAKQLYWQRVNSKCLFVGILLRRVQYLSTDLNPNDVTLSGCTDAILKFIAEHGASHLLEHVGQMDKIFKIPPPPGKTGVQSLRPLEEDTPSPLAPVSQQGWRSIRLFISSTFRDMHGERDLLLRSVLPALQARAAPHRISLHGIDLRWGVTEEETRRNRQLEVCLGEVENAQLFVGILGSRYGYIPPSYNLPDHPHFHWAQQYPSGRSVTEMEVMQFLNRNQRLQPSAQALIYFRDSSFLSSVPDAWKSDFVSESEEAARRISELKSYLSRQKGITCRRYPCEWGGVAAGRPYVGGLEEFGQLVLQDVWNMIQKLYLQPGALLEQPVSIPDDDLVQATFQQLQKPPSPARPRLLQDTVQRLMLPHGRLSLVTGQSGQGKTAFLASLVSALQAPDGAKVASLVFFHFSGARPDQGLALTLLRRLCTYLRGQLKEPGALPSTYRSLVWELQQRLLPKSAESLHPGQTQVLIIDGADRLVDQNGQLISDWIPKKLPRCVHLVLSVSSDAGLGETLEQSQGAHVLALGPLEASARARLVREELALYGKRLEESPFNNQMRLLLVKRESGRPLYLRLVTDHLRLFTLYEQVSERLRTLPATVPLLLQHILSTLEKEHGPDVLPQALTALEVTRSGLTVDQLHGVLSVWRTLPKGTKSWEEAVAAGNSGDPYPMGPFACLVQSLRSLLGEGPLERPGARLCLPDGPLRTAAKRCYGKRPGLEDTAHILIAAQLWKTCDADASGTFRSCPPEALGDLPYHLLQSGNRGLLSKFLTNLHVVAAHLELGLVSRLLEAHALYASSVPKEEQKLPEADVAVFRTFLRQQASILSQYPRLLPQQAANQPLDSPLCHQASLLSRRWHLQHTLRWLNKPRTMKNQQSSSLSLAVSSSPTAVAFSTNGQRAAVGTANGTVYLLDLRTWQEEKSVVSGCDGISACLFLSDDTLFLTAFDGLLELWDLQHGCRVLQTKAHQYQITGCCLSPDCRLLATVCLGGCLKLWDTVRGQLAFQHTYPKSLNCVAFHPEGQVIATGSWAGSISFFQVDGLKVTKDLGAPGASIRTLAFNVPGGVVAVGRLDSMVELWAWREGARLAAFPAHHGFVAAALFLHAGCQLLTAGEDGKVQVWSGSLGRPRGHLGSLSLSPALSVALSPDGDRVAVGYRADGIRIYKISSGSQGAQGQALDVAVSALAWLSPKVLVSGAEDGSLQGWALKECSLQSLWLLSRFQKPVLGLATSQELLASASEDFTVQLWPRQLLTRPHKAEDFPCGTELRGHEGPVSCCSFSTDGGSLATGGRDRSLLCWDVRTPKTPVLIHSFPACHRDWVTGCAWTKDNLLISCSSDGSVGLWDPESGQRLGQFLGHQSAVSAVAAVEEHVVSVSRDGTLKVWDHQGVELTSIPAHSGPISHCAAAMEPRAAGQPGSELLVVTVGLDGATRLWHPLLVCQTHTLLGHSGPVRAAAVSETSGLMLTASEDGSVRLWQVPKEADDTCIPRSSAAVTAVAWAPDGSMAVSGNQAGELILWQEAKAVATAQAPGHIGALIWSSAHTFFVLSADEKISEWQVKLRKGSAPGNLSLHLNRILQEDLGVLTSLDWAPDGHFLILAKADLKLLCMKPGDAPSEIWSSYTENPMILSTHKEYGIFVLQPKDPGVLSFLRQKESGEFEERLNFDINLENPSRTLISITQAKPESESSFLCASSDGILWNLAKCSPEGEWTTGNMWQKKANTPETQTPGTDPSTCRESDASMDSDASMDSEPTPHLKTRQRRKIHSGSVTALHVLPELLVTASKDRDVKLWERPSMQLLGLFRCEGSVSCLEPWLGANSTLQLAVGDVQGNVYFLNWE

SEQ ID NO: 2109 - protein, 801 aa, Homo sapiens
MWTSGRMSNAKNWLGLGMSLYFWGLMDLTTTVLSDTPTPQGELEALLSDKPQSHQRTKRSWVWNQFFVLEEYTGTDPLYVGKLHSDMDRGDGSIKYILSGEGAGIVFTIDDTTGDIHAIQRLDREERAQYTLRAQALDRRTGRPMEPESEFIIKIQDINDNEPKFLDGPYVATVPEMSPVGTSVIQVTATDADDPTYGNSARVVYSILQGQPYFSVDSKTGVIRTALMNMDREAKEYYEVIIQAKDMGGQLGGLAGTTTVNITLSDVNDNPPRFPQKHYQMSVLESAPISSTVGRVFAKDLDEGINAEMKYTIVDGDGADAFDISTDPNFQVGIITVKKPLSFESKKSYTLKVEGANPHLEMRFLNLGPFQDTTTVHISVEDVDEPPVFEPGFYFVEVPEDVAIGTTIQIISAKDPDVTNNSIRYSIDRSSDPGRFFYVDITTGALMTARPLDREEFSWHNITVLAMEMNNPSQVGSVPVTIKVLDVNDNAPEFPRFYEAFVCENAKAGQLIQTVSAVDQDDPRNGQHFYYSLAPEAANNPNFTIRDNQDNTARILTRRSGFRQQEQSVFHLPILIADSGQPVLSSTGTLTIQVCSCDDDGHVMSCSPEAYMLPVSLSRGALIAILACIFVLLVLVLLILSMRRHRKQPYIIDDEENIHENIVRYDDEGGGEEDTEAFDIAAMWNPREAQAGAAPKTRQDMLPEIESLSRYVPQTCAVNSTVHSYVLAKLYEADMDLWAPPFDSLQTYMFEGDGSVAGSLSSLQSATSDSEQSFDFLTDWGPRFRKLAELYGASEGPAPLW

SEQ ID NO: 2110 - protein, 1717 aa, Homo sapiens
MEPAAAATVQRLPELGREDRASAPAAAAAAAAAAAAAAAALAAAAGGGRSPEPALTPAAPSGGNGSGSGAREEAPGEAPPGPLPGRAGGAGRRRRRGAPQPIAGGAAPVPGAGGGANSLLLRRGRLKRNLSAAAAAASSSSSSSAAAASHSPGAAGLPASCSASASLCTRSLDRKTLLLKHRQTLQLQPSDRDWVRHQLQRGCVHVFDRHMASTYLRPVLCTLDTTAGEVAARLLQLGHKGGGVVKVLGQGPGAAAAREPAEPPPEAGPRLAPPEPRDSEVPPARSAPGAFGGPPRAPPADLPLPVGGPGGWSRRASPAPSDSSPGEPFVGGPVSSPRAPRPVVSDTESFSLSPSAESVSDRLDPYSSGGGSSSSSEELEADAASAPTGVPGQPRRPGHPAQPLPLPQTASSPQPQQKAPRAIDSPGGAVREGSCEEKAAAAVAPGGLQSTPGRSGVTAEKAPPPPPPPTLYVQLHGETTRRLEAEEKPLQIQNDYLFQLGFGELWRVQEEGMDSEIGCLIRFYAGKPHSTGSSERIQLSGMYNVRKGKMQLPVNRWTRRQVILCGTCLIVSSVKDSLTGKMHVLPLIGGKVEEVKKHQHCLAFSSSGPQSQTYYICFDTFTEYLRWLRQVSKVASQRISSVDLSCCSLEHLPANLFYSQDLTHLNLKQNFLRQNPSLPAARGLNELQRFTKLKSLNLSNNHLGDFPLAVCSIPTLAELNVSCNALRSVPAAVGVMHNLQTFLLDGNFLQSLPAELENMKQLSYLGLSFNEFTDIPEVLEKLTAVDKLCMSGNCVETLRLQALRKMPHIKHVDLRLNVIRKLIADEVDFLQHVTQLDLRDNKLGDLDAMIFNNIEVLHCERNQLVTLDICGYFLKALYASSNELVQLDVYPVPNYLSYMDVSRNRLENVPEWVCESRKLEVLDIGHNQICELPARLFCNSSLRKLLAGHNQLARLPERLERTSVEVLDVQHNQLLELPPNLLMKADSLRFLNASANKLESLPPATLSEETNSILQELYLTNNSLTDKCVPLLTGHPHLKILHMAYNRLQSFPASKMAKLEELEEIDLSGNKLKAIPTTIMNCRRMHTVIAHSNCIEVFPEVMQLPEIKCVDLSCNELSEVTLPENLPPKLQELDLTGNPRLVLDHKTLELLNNIRCFKIDQPSTGDASGAPAVWSHGYTEASGVKNKLCVAALSVNNFCDNREALYGVFDGDRNVEVPYLLQCTMSDILAEELQKTKNEEEYMVNTFIVMQRKLGTAGQKLGGAAVLCHIKHDPVDPGGSFTLTSANVGKCQTVLCRNGKPLPLSRSYIMSCEEELKRIKQHKAIITEDGKVNGVTESTRILGYTFLHPSVVPRPHVQSVLLTPQDEFFILGSKGLWDSLSVEEAVEAVRNVPDALAAAKKLCTLAQSYGCHDSISAVVVQLSVTEDSFCCCELSAGGAVPPPSPGIFPPSVNMVIKDRPSDGLGVPSSSSGMASEISSELSTSEMSSEVGSTASDEPPPGALSENSPAYPSEQRCMLHPICLSNSFQRQLSSATFSSAFSDNGLDSDDEEPIEGVFTNGSRVEVEVDIHCSRAKEKEKQQHLLQVPAEASDEGIVISANEDEPGLPRKADFSAVGTIGRRRANGSVAPQERSHNVIEVATDAPLRKPGGYFAAPAQPDPDDQFIIPPELEEEVKEIMKHHQEQQQQQQPPPPPQLQPQLPRHYQLDQLPDYYDTPL

SEQ ID NO: 2111 - protein, 683 aa, Homo sapiens
MERAAPSRRVPLPLLLLGGLALLAAGVDADVLLEACCADGHRMATHQKDCSLPYATESKECRMVQEQCCHSQLEELHCATGISLANEQDRCATPHGDNASLEATFVKRCCHCCLLGRAAQAQGQSCEYSLMVGYQCGQVFQACCVKSQETGDLDVGGLQETDKIIEVEEEQEDPYLNDRCRGGGPCKQQCRDTGDEVVCSCFVGYQLLSDGVSCEDVNECITGSHSCRLGESCINTVGSFRCQRDSSCGTGYELTEDNSCKDIDECESGIHNCLPDFICQNTLGSFRCRPKLQCKSGFIQDALGNCIDINECLSISAPCPIGHTCINTEGSYTCQKNVPNCGRGYHLNEEGTRCVDVDECAPPAEPCGKGHRCVNSPGSFRCECKTGYYFDGISRMCVDVNECQRYPGRLCGHKCENTLGSYLCSCSVGFRLSVDGRSCEDINECSSSPCSQECANVYGSYQCYCRRGYQLSDVDGVTCEDIDECALPTGGHICSYRCINIPGSFQCSCPSSGYRLAPNGRNCQDIDECVTGIHNCSINETCFNIQGGFRCLAFECPENYRRSAATRCERLPCHENRECSKLPLRITYYHLSFPTNIQAPAVVFRMGPSSAVPGDSMQLAITGGNEEGFFTTRKVSPHSGVVALTKPVPEPRDLLLTVKMDLSRHGTVSSFVAKLFIFVSAEL

SEQ ID NO: 2112 - protein, 3014 aa, Homo sapiens
MAPPPPPVLPVLLLLAAAAALPAMGLRAAAWEPRVPGGTRAFALRPGCTYAVGAACTPRAPRELLDVGRDGRLAGRRRVSGAGRPLPLQVRLVARSAPTALSRRLRARTHLPGCGARARLCGTGARLCGALCFPVPGGCAAAQHSALAAPTTLPACRCPPRPRPRCPGRPICLPPGGSVRLRLLCALRRAAGAVRVGLALEAATAGTPSASPSPSPPLPPNLPEARAGPARRARRGTSGRGSLKFPMPNYQVALFENEPAGTLILQLHAHYTIEGEEERVSYYMEGLFDERSRGYFRIDSATGAVSTDSVLDRETKETHVLRVKAVDYSTPPRSATTYITVLVKDTNDHSPVFEQSEYRERVRENLEVGYEVLTIRASDRDSPINANLRYRVLGGAWDVFQLNESSGVVSTRAVLDREEAAEYQLLVEANDQGRNPGPLSATATVYIEVEDENDNYPQFSEQNYVVQVPEDVGLNTAVLRVQATDRDQGQNAAIHYSILSGNVAGQFYLHSLSGILDVINPLDFEDVQKYSLSIKAQDGGRPPLINSSGVVSVQVLDVNDNEPIFVSSPFQATVLENVPLGYPVVHIQAVDADSGENARLHYRLVDTASTFLGGGSAGPKNPAPTPDFPFQIHNSSGWITVCAELDREEVEHYSFGVEAVDHGSPPMSSSTSVSITVLDVNDNDPVFTQPTYELRLNEDAAVGSSVLTLQARDRDANSVITYQLTGGNTRNRFALSSQRGGGLITLALPLDYKQEQQYVLAVTASDGTRSHTAHVLINVTDANTHRPVFQSSHYTVSVSEDRPVGTSIATLSANDEDTGENARITYVIQDPVPQFRIDPDSGTMYTMMELDYENQVAYTLTIMAQDNGIPQKSDTTTLEILILDANDNAPQFLWDFYQGSIFEDAPPSTSILQVSATDRDSGPNGRLLYTFQGGDDGDGDFYIEPTSGVIRTQRRLDRENVAVYNLWALAVDRGSPTPLSASVEIQVTILDINDNAPMFEKDELELFVEENNPVGSVVAKIRANDPDEGPNAQIMYQIVEGDMRHFFQLDLLNGDLRAMVELDFEVRREYVLVVQATSAPLVSRATVHILLVDQNDNPPVLPDFQILFNNYVTNKSNSFPTGVIGCIPAHDPDVSDSLNYTFVQGNELRLLLLDPATGELQLSRDLDNNRPLEALMEVSVSDGIHSVTAFCTLRVTIITDDMLTNSITVRLENMSQEKFLSPLLALFVEGVAAVLSTTKDDVFVFNVQNDTDVSSNILNVTFSALLPGGVRGQFFPSEDLQEQIYLNRTLLTTISTQRVLPFDDNICLREPCENYMKCVSVLRFDSSAPFLSSTTVLFRPIHPINGLRCRCPPGFTGDYCETEIDLCYSDPCGANGRCRSREGGYTCECFEDFTGEHCEVDARSGRCANGVCKNGGTCVNLLIGGFHCVCPPGEYERPYCEVTTRSFPPQSFVTFRGLRQRFHFTISLTFATQERNGLLLYNGRFNEKHDFIALEIVDEQVQLTFSAGETTTTVAPKVPSGVSDGRWHSVQVQYYNKPNIGHLGLPHGPSGEKMAVVTVDDCDTTMAVRFGKDIGNYSCAAQGTQTGSKKSLDLTGPLLLGGVPNLPEDFPVHNRQFVGCMRNLSVDGKNVDMAGFIANNGTREGCAARRNFCDGRRCQNGGTCVNRWNMYLCECPLRFGGKNCEQAMPHPQLFSGESVVSWSDLNIIISVPWYLGLMFRTRKEDSVLMEATSGGPTSFRLQILNNYLQFEVSHGPSDVESVMLSGLRVTDGEWHHLLIELKNVKEDSEMKHLVTMTLDYGMDQNKADIGGMLPGLTVRSVVVGGASEDKVSVRRGFRGCMQGVRMGGTPTNVATLNMNNALKVRVKDGCDVDDPCTSSPCPPNSRCHDAWEDYSCVCDKGYLGINCVDACHLNPCENMGACVRSPGSPQGYVCECGPSHYGPYCENKLDLPCPRGWWGNPVCGPCHCAVSKGFDPDCNKTNGQCQCKENYYKLLAQDTCLPCDCFPHGSHSRTCDMATGQCACKPGVIGRQCNRCDNPFAEVTTLGCEVIYNGCPKAFEAGIWWPQTKFGQPAAVPCPKGSVGNAVRHCSGEKGWLPPELFNCTTISFVDLRAMNEKLSRNETQVDGARALQLVRALRSATQHTGTLFGNDVRTAYQLLGHVLQHESWQQGFDLAATQDADFHEDVIHSGSALLAPATRAAWEQIQRSEGGTAQLLRRLEGYFSNVARNVRRTYLRPFVIVTANMILAVDIFDKFNFTGARVPRFDTIHEEFPRELESSVSFPADFFRPPEEKEGPLLRPAGRRTTPQTTRPGPGTEREAPISRRRRHPDDAGQFAVALVIIYRTLGQLLPERYDPDRRSLRLPHRPIINTPMVSTLVYSEGAPLPRPLERPVLVEFALLEVEERTKPVCVFWNHSLAVGGTGGWSARGCELLSRNRTHVACQCSHTASFAVLMDISRRENGEVLPLKIVTYAAVSLSLAALLVAFVLLSLVRMLRSNLHSIHKHLAVALFLSQLVFVIGINQTENPFLCTVVAILLHYIYMSTFAWTLVESLHVYRMLTEVRNIDTGPMRFYYVVGWGIPAIVTGLAVGLDPQGYGNPDFCWLSLQDTLIWSFAGPIGAVIIINTVTSVLSAKVSCQRKHHYYGKKGIVSLLRTAFLLLLLISATWLLGLLAVNRDALSFHYLFAIFSGLQGPFVLLFHCVLNQEVRKHLKGVLGGRKLHLEDSATTRATLLTRSLNCNTTFGDGPDMLRTDLGESTASLDSIVRDEGIQKLGVSSGLVRGSHGEPDASLMPRSCKDPPGHDSDSDSELSLDEQSSSYASSHSSDSEDDGVGAEEKWDPARGAVHSTPKGDAVANHVPAGWPDQSLAESDSEDPSGKPRLKVETKVSVELHREEQGSHRGEYPPDQESGGAARLASSQPPEQRKGILKNKVTYPPPLTLTEQTLKGRLREKLADCEQSPTSSRTSSLGSGGPDCAITVKSPGREPGRDHLNGVAMNVRTGSAQADGSDSEKP

SEQ ID NO: 2113 - protein, 199 aa, Homo sapiens
MSSGNAKIGHPAPNFKATAVMPDGQFKDISLSDYKGKYVVFFFYPLDFTFVCPTEIIAFSDRAEEFKKLNCQVIGASVDSHFCHLAWVNTPKKQGGLGPMNIPLVSDPKRTIAQDYGVLKADEGISFRGLFIIDDKGILRQITVNDLPVGRSVDETLRLVQAFQFTDKHGEVCPAGWKPGSDTIKPDVQKSKEYFSKQK

SEQ ID NO: 2114 - protein, 220 aa, Homo sapiens
MGAAARTLRLALGLLLLATLLRPADACSCSPVHPQQAFCNADVVIRAKAVSEKEVDSGNDIYGNPIKRIQYEIKQIKMFKGPEKDIEFIYTAPSSAVCGVSLDVGGKKEYLIAGKAEGDGKMHITLCDFIVPWDTLSTTQKKSLNHRYQMGCECKITRCPMIPCYISSPDECLWMDWVTEKNINGHQAKFFACIKRSDGSCAWYRGAAPPKQEFLDIEDP

SEQ ID NO: 2115 - protein, 585 aa, Homo sapiens
MTPPRLFWVWLLVAGTQGVNDGDMRLADGGATNQGRVEIFYRGQWGTVCDNLWDLTDASVVCRALGFENATQALGRAAFGQGSGPIMLDEVQCTGTEASLADCKSLGWLKSNCRHERDAGVVCTNETRSTHTLDLSRELSEALGQIFDSQRGCDLSISVNVQGEDALGFCGHTVILTANLEAQALWKEPGSNVTMSVDAECVPMVRDLLRYFYSRRIDITLSSVKCFHKLASAYGARQLQGYCASLFAILLPQDPSFQMPLDLYAYAVATGDALLEKLCLQFLAWNFEALTQAEAWPSVPTDLLQLLLPRSDLAVPSELALLKAVDTWSWGERASHEEVEGLVEKIRFPMMLPEELFELQFNLSLYWSHEALFQKKTLQALEFHTVPFQLLARYKGLNLTEDTYKPRIYTSPTWSAFVTDSSWSARKSQLVYQSRRGPLVKYSSDYFQAPSDYRYYPYQSFQTPQHPSFLFQDKRVSWSLVYLPTIQSCWNYGFSCSSDELPVLGLTKSGGSDRTIAYENKALMLCEGLFVADVTDFEGWKAAIPSALDTNSSKSTSSFPCPAGHFNGFRTVIRPFYLTNSSGVD

SEQ ID NO: 2116 - protein, 1211 aa, Homo sapiens
MLSLAAKLVAFFWRTADTPREEAGQLEPELAEGDTKLKTVRGVVTRYCSDYGMIDDMIYFSSDAVTSRVLLNVGQEVIAVVEENKVSNGLKAIRVEAVSDKWEDDSRNHGSPSDCGPRVLIGCVTSLVEGAGCISQTTYFSLESVCEGFEPCKGDWVEAEYRIRPGTWSSEATSVKPLRYKRVDKVCISSLCGRNGVLEESIFFTLDSLKLPDGYTPRRGDVVNAVVVESSQSCYVWRALCMTLVKRRDAAPVHEATHFYGTILLKNKGDIEVTQVTHFGTLKEGRSKTMVIWIENKGDIPQNLVSCKLAGWDKSKQFRFQMLDKDQMCPVVSFVSVPEKENSSDENINSLNSHTKNKTSQMSESSLVNNRGISPGDCTCKGENGEKDNILSRKQMTEPEPGGLVPPGGKTFIVVICDGKNPGRCKELLLLCFSDFLIGRYLEVNVISGEESLIAAREPFSWKKLKSSQALTSAKTTVVVTAQKRNSRRQLPSFLPQYPIPDRLRKCVEQKIDILTFQPLLAELLNMSNYKEKFSTLLWLEEIYAEMELKEYNMSGIILRRNGDLLVLEVPGLAEGRPSLYAGDKLILKTQEYNGHAIEYISYVTEIHEEDVTLKINPEFEQAYNFEPMDVEFTYNRTTSRRCHFALEHVIHLGVKVLFPEEIILQSPQVTGNWNHAQDTKSSGQSTSKKNRKTMTDQAEHGTEERRVGDKDLPVLAPFTAEMSDWVDEIQTPKARKMEFFNPVLNENQKLAVKRILSGDCRPLPYILFGPPGTGKTVTIIEAVLQVHFALPDSRILVCAPSNSAADLVCLRLHESKVLQPATMVRVNATCRFEEIVIDAVKPYCRDGEDIWKASRFRIIITTCSSSGLFYQIGVRVGHFTHVFVDEAGQASEPECLIPLGLMSDISGQIVLAGDPMQLGPVIKSRLAMAYGLNVSFLERLMSRPAYQRDENAFGACGAHNPLLVTKLVKNYRSHEALLMLPSRLFYHRELEVCADPTVVTSLLGWEKLPKKGFPLIFHGVRGSEAREGKSPSWFNPAEAVQVLRYCCLLAHSISSQVSASDIGVITPYRKQVEKIRILLRNVDLMDIKVGSVEEFQGQEYLVIIISTVRSNEDRFEDDRYFLGFLSNSKRFNVAITRPKALLIVLGNPHVLVRDPCFGALLEYSITNGVYMGCDLPPALQSLQNCGEGVADPSYPVVPESTGPEKHQEPS

SEQ ID NO: 2117 - protein, 1118 aa, Homo sapiens
MSVEAYGPSSQTLTFLDTEEAELLGADTQGSEFEFTDFTLPSQTQTPPGGPGGPGGGGAGGPGGAGAGAAAGQLDAQVGPEGILQNGAVDDSVAKTSQLLAELNFEEDEEDTYYTKDLPIHACSYCGIHDPACVVYCNTSKKWFCNGRGNTSGSHIVNHLVRAKCKEVTLHKDGPLGETVLECYNCGCRNVFLLGFIPAKADSVVVLLCRQPCASQSSLKDINWDSSQWQPLIQDRCFLSWLVKIPSEQEQLRARQITAQQINKLEELWKENPSATLEDLEKPGVDEEPQHVLLRYEDAYQYQNIFGPLVKLEADYDKKLKESQTQDNITVRWDLGLNKKRIAYFTLPKTDSDMRLMQGDEICLRYKGDLAPLWKGIGHVIKVPDNYGDEIAIELRSSVGAPVEVTHNFQVDFVWKSTSFDRMQSALKTFAVDETSVSGYIYHKLLGHEVEDVIIKCQLPKRFTAQGLPDLNHSQVYAVKTVLQRPLSLIQGPPGTGKTVTSATIVYHLARQGNGPVLVCAPSNIAVDQLTEKIHQTGLKVVRLCAKSREAIDSPVSFLALHNQIRNMDSMPELQKLQQLKDETGELSSADEKRYRALKRTAERELLMNADVICCTCVGAGDPRLAKMQFRSILIDESTQATEPECMVPVVLGAKQLILVGDHCQLGPVVMCKKAAKAGLSQSLFERLVVLGIRPIRLQVQYRMHPALSAFPSNIFYEGSLQNGVTAADRVKKGFDFQWPQPDKPMFFYVTQGQEEIASSGTSYLNRTEAANVEKITTKLLKAGAKPDQIGIITPYEGQRSYLVQYMQFSGSLHTKLYQEVEIASVDAFQGREKDFIILSCVRANEHQGIGFLNDPRRLNVALTRARYGVIIVGNPKALSKQPLWNHLLNYYKEQKVLVEGPLNNLRESLMQFSKPRKLVNTINPGARFMTTAMYDAREAIIPGSVYDRSSQGRPSSMYFQTHDQIGMISAGPSHVAAMNIPIPFNLVMPPMPPPGYFGQANGPAAGRGTPKGKTGRGGRQKNRFGLPGPSQTNLPNSQASQDVASQPFSQGALTQGYISMSQPSQMSQPGLSQPELSQDSYLGDEFKSQIDVALSQDSTYQGERAYQHGGVTGLSQY

SEQ ID NO: 2118 - protein, 621 aa, Homo sapiens
MAALKEDRSYGLSCGRVSDGSKVSVFHVKLTDSALRAFESYRARQDSVSLRPSIRFQGSQGHISIPQPDCPAEARTFSFYLSNIGRDNPQGSFDCIQQYVSSHGEVHLDCLGSIQDKITVCATDDSYQKARQSMAQAEEETRSRSAIVIKAGGRYLGKKVQFRKPAPGATDAVPSRKRATPINLASAIRKSGASAVSGGSGVSQRPFRDRVLHLLALRPYRKAELLLRLQKDGLTQADKDALDGLLQQVANMSAKDGTCTLQDCMYKDVQKDWPGYSEGDQQLLKRVLVRKLCQPQSTGSLLGDPAASSPPGERGRSASPPQKRLQPPDFIDPLANKKPRISHFTQRAQPAVNGKLGVPNGREALLPTPGPPASTDTLSSSTHLPPRLEPPRAHDPLADVSNDLGHSGRDCEHGEAAAPAPTVRLGLPLLTDCAQPSRPHGSPSRSKPKKKSKKHKDKERAAEDKPRAQLPDCAPATHATPGAPADTPGLNGTCSVSSVPTSTSETPDYLLKYAAISSSEQRQSYKNDFNAEYSEYRDLHARIERITRRFTQLDAQLRQLSQGSEEYETTRGQILQEYRKIKKTNTNYSQEKHRCEYLHSKLAHIKRLIAEYDQRQLQAWP

SEQ ID NO: 2119 - protein, 1309 aa, Homo sapiens
MDESSLLRRRGLQKELSLPRRGRGCRSGNRKSLVVGTPSPTLSRPLSPLSVPTAGSSPLDSPRNFSAASALNFPFARRADGRRWSLASLPSSGYGTNTPSSTLSSSSSSRERLHQLPFQPTPDELHFLSKHFRSSENVLDEEGGRSPRLRPRSRSLSPGRATGTFDNEIVMMNHVYRERFPKATAQMEGRLQEFLTAYAPGARLALADGVLGFIHHQIVELARDCLAKSGENLVTSRYFLEMQEKLERLLQDAHERSDSEEVSFIVQLVRKLLIIISRPARLLECLEFDPEEFYHLLEAAEGHAREGQGIKTDLPQYIIGQLGLAKDPLEEMVPLSHLEEEQPPAPESPESRALVGQSRRKPCESDFETIKLISNGAYGAVYLVRHRDTRQRFAIKKINKQNLILRNQIQQVFVERDILTFAENPFVVSMFCSFETRRHLCMVMEYVEGGDCATLLKNMGPLPVDMARLYFAETVLALEYLHNYGIVHRDLKPDNLLITSLGHIKLTDFGLSKIGLMSMATNLYEGHIEKDAREFIDKQVCGTPEYIAPEVIFRQGYGKPVDWWAMGVVLYEFLVGCVPFFGDTPEELFGQVVSDEIMWPEGDEALPADAQDLITRLLRQSPLDRLGTGGTHEVKQHPFFLALDWAGLLRHKAEFVPQLEAEDDTSYFDTRSERYRHLGSEDDETNDEESSTEIPQFSSCSHRFSKVYSSSEFLAVQPTPTFAERSFSEDREEGWERSEVDYGRRLSADIRLRSWTSSGSSCQSSSSQPERGPSPSLLNTISLDTMPKFAFSSEDEGVGPGPAGPKRPVFILGEPDPPPAATPVMPKPSSLSADTAALSHARLRSNSIGARHSTPRPLDAGRGRRLGGPRDPAPEKSRASSSGGSGGGSGGRVPKSASVSALSLIITADDGSGGPLMSPLSPRSLSSNPSSRDSSPSRDPSPVCGSLRPPIVIHSSGKKYGFSLRAIRVYMGDSDVYTVHHVVWSVEDGSPAQEAGLRAGDLITHINGESVLGLVHMDVVELLLKSGNKISLRTTALENTSIKVGPARKNVAKGRMARRSKRSRRRETQDRRKSLFKKISKQTSVLHTSRSFSSGLHHSLSSSESLPGSPTHSLSPSPTTPCRSPAPDVPADTTASPPSASPSSSSPASPAAAGHTRPSSLHGLAAKLGPPRPKTGRRKSTSSIPPSPLACPPISAPPPRSPSPLPGHPPAPARSPRLRRGQSADKLGTGERLDGEAGRRTRGPEAELVVMRRLHLSERRDSFKKQEAVQEVSFDEPQEEATGLPTSVPQIAVEGEEAVPVALGPTGRD

SEQ ID NO: 2120 - protein, 308 aa, Homo sapiens
MAPPAPGPASGGSGEVDELFDVKNAFYIGSYQQCINEAQRVKLSSPERDVERDVFLYRAYLAQRKFGVVLDEIKPSSAPELQAVRMFADYLAHESRRDSIVAELDREMSRSVDVTNTTFLLMAASIYLHDQNPDAALRALHQGDSLECTAMTVQILLKLDRLDLARKELKRMQDLDEDATLTQLATAWVSLATGGEKLQDAYYIFQEMADKCSPTLLLLNGQAACHMAQGRWEAAEGLLQEALDKDSGYPETLVNLIVLSQHLGKPPEVTNRYLSQLKDAHRSHPFIKEYQAKENDFDRLVLQYAPSA

SEQ ID NO: 2121 - protein, 613 aa, Homo sapiens
MAAQAAAAAQAAAAQAAQAEAADSWYLALLGFAEHFRTSSPPKIRLCVHCLQAVFPFKPPQRIEARTHLQLGSVLYHHTKNSEQARSHLEKAWLISQQIPQFEDVKFEAASLLSELYCQENSVDAAKPLLRKAIQISQQTPYWHCRLLFQLAQLHTLEKDLVSACDLLGVGAEYARVVGSEYTRALFLLSKGMLLLMERKLQEVHPLLTLCGQIVENWQGNPIQKESLRVFFLVLQVTHYLDAGQVKSVKPCLKQLQQCIQTISTLHDDEILPSNPADLFHWLPKEHMCVLVYLVTVMHSMQAGYLEKAQKYTDKALMQLEKLKMLDCSPILSSFQVILLEHIIMCRLVTGHKATALQEISQVCQLCQQSPRLFSNHAAQLHTLLGLYCVSVNCMDNAEAQFTTALRLTNHQELWAFIVTNLASVYIREGNRHQEVLYSLLERINPDHSFPVSSHCLRAAAFYVRGLFSFFQGRYNEAKRFLRETLKMSNAEDLNRLTACSLVLLGHIFYVLGNHRESNNMVVPAMQLASKIPDMSVQLWSSALLRDLNKACGNAMDAHEAAQMHQNFSQQLLQDHIEACSLPEHNLITWTDGPPPVQFQAQNGPNTSLASLL

SEQ ID NO: 2122 - protein, 342 aa, Homo sapiens
MAAVALMPPPLLLLLLLASPPAASAPSARDPFAPQLGDTQNCQLRCRDRDLGPQPSQAGLEGASESPYDRAVLISACERGCRLFSICRFVARSSKPNATQTECEAACVEAYVKEAEQQACSHGCWSQPAEPEPEQKRKVLEAPSGALSLLDLFSTLCNDLVNSAQGFVSSTWTYYLQTDNGKVVVFQTQPIVESLGFQGGRLQRVEVTWRGSHPEALEVHVDPVGPLDKVRKAKIRVKTSSKAKVESEEPQDNDFLSCMSRRSGLPRWILACCLFLSVLVMLWLSCSTLVTAPGQHLKFQPLTLEQHKGFMMEPDWPLYPPPSHACEDSLPPYKLKLDLTKL

SEQ ID NO: 2123 - protein, 889 aa, Homo sapiens
MVLAQGLLSMALLALCWERSLAGAEETIPLQTLRCYNDYTSHITCRWADTQDAQRLVNVTLIRRVNEDLLEPVSCDLSDDMPWSACPHPRCVPRRCVIPCQSFVVTDVDYFSFQPDRPLGTRLTVTLTQHVQPPEPRDLQISTDQDHFLLTWSVALGSPQSHWLSPGDLEFEVVYKRLQDSWEDAAILLSNTSQATLGPEHLMPSSTYVARVRTRLAPGSRLSGRPSKWSPEVCWDSQPGDEAQPQNLECFFDGAAVLSCSWEVRKEVASSVSFGLFYKPSPDAGEEECSPVLREGLGSLHTRHHCQIPVPDPATHGQYIVSVQPRRAEKHIKSSVNIQMAPPSLNVTKDGDSYSLRWETMKMRYEHIDHTFEIQYRKDTATWKDSKTETLQNAHSMALPALEPSTRYWARVRVRTSRTGYNGIWSEWSEARSWDTESVLPMWVLALIVIFLTIAVLLALRFCGIYGYRLRRKWEEKIPNPSKSHLFQNGSAELWPPGSMSAFTSGSPPHQGPWGSRFPELEGVFPVGFGDSEVSPLTIEDPKHVCDPPSGPDTTPAASDLPTEQPPSPQPGPPAASHTPEKQASSFDFNGPYLGPPHSRSLPDILGQPEPPQEGGSQKSPPPGSLEYLCLPAGGQVQLVPLAQAMGPGQAVEVERRPSQGAAGSPSLESGGGPAPPALGPRVGGQDQKDSPVAIPMSSGDTEDPGVASGYVSSADLVFTPNSGASSVSLVPSLGLPSDQTPSLCPGLASGPPGAPGPVKSGFEGYVELPPIEGRSPRSPRNNPVPPEAKSPVLNPGERPADVSPTSPQPEGLLVLQQVGDYCFLPGLGPGPLSLRSKPSSPGPGPEIKNLDQAFQVKKPPGQAVPQVPVIQLFKALVVSVMSVGPPVP

SEQ ID NO: 2124 - protein, 735 aa, Homo sapiens
MGESPASVVLNASGGLFSLKMETLESELTCPICLELFEDPLLLPCAHSLCFSCAHRILVSSCSSGESIEPITAFQCPTCRYVISLNHRGLDGLKRNVTLQNIIDRFQKASVSGPNSPSESRRERTYRPTTAMSSERIACQFCEQDPPRDAVKTCITCEVSYCDRCLRATHPNKKPFTSHRLVEPVPDTHLRGITCLDHENEKVNMYCVSDDQLICALCKLVGRHRDHQVASLNDRFEKLKQTLEMNLTNLVKRNSELENQMAKLIQICQQVEVNTAMHEAKLMEECDELVEIIQQRKQMIAVKIKETKVMKLRKLAQQVANCRQCLERSTVLINQAEHILKENDQARFLQSAKNIAERVAMATASSQVLIPDINFNDAFENFALDFSREKKLLEGLDYLTAPNPPSIREELCTASHDTITVHWISDDEFSISSYELQYTIFTGQANFISKSWCSWGLWPEIRKCKEAVSCSRLAGAPRGLYNSVDSWMIVPNIKQNHYTVHGLQSGTRYIFIVKAINQAGSRNSEPTRLKTNSQPFKLDPKMTHKKLKISNDGLQMEKDESSLKKSHTPERFSGTGCYGAAGNIFIDSGCHYWEVVMGSSTWYAIGIAYKSAPKNEWIGKNASSWVFSRCNSNFVVRHNNKEMLVDVPPHLKRLGVLLDYDNNMLSFYDPANSLHLHTFDVTFILPVCPTFTIWNKSLMILSGLPAPDFIDYPERQECNCRPQESPYVSGMKTCH

SEQ ID NO: 2125 - protein, 333 aa, Homo sapiens
MAAGCCGVKKQKLSSSPPSGSGGGGGASSSSHCSGESQCRAGELGLGGAGTRLNGLGGLTGGGSGSGCTLSPPQGCGGGGGGIALSPPPSCGVGTLLSTPAAATSSSPSSSSAASSSSPGSRKMVVSAEMCCFCFDVLYCHLYGYQQPRTPRFTNEPYPLFVTWKIGRDKRLRGCIGTFSAMNLHSGLREYTLTSALKDSRFPPMTRDELPRLFCSVSLLTNFEDVCDYLDWEVGVHGIRIEFINEKGSKRTATYLPEVAKEQGWDHIQTIDSLLRKGGYKAPITNEFRKTIKLTRYRSEKMTLSYAEYLAHRQHHHFQNGIGHPLPPYNHYS

SEQ ID NO: 2126 - protein, 358 aa, Homo sapiens
MEAPGLAQAAAAESDSRKVAEETPDGAPALCPSPEALSPEPPVYSLQDFDTLATVGTGTFGRVHLVKEKTAKHFFALKVMSIPDVIRLKQEQHVHNEKSVLKEVSHPFLIRLFWTWHDERFLYMLMEYVPGGELFSYLRNRGRFSSTTGLFYSAEIICAIEYLHSKEIVYRDLKPENILLDRDGHIKLTDFGFAKKLVDRTWTLCGTPEYLAPEVIQSKGHGRAVDWWALGILIFEMLSGFPPFFDDNPFGIYQKILAGKIDFPRHLDFHVKDLIKKLLVVDRTRRLGNMKNGANDVKHHRWFRSVDWEAVPQRKLKPPIVPKIAGDGDTSNFETYPENDWDTAAPVPQKDLEIFKNF

SEQ ID NO: 2127 - protein, 374 aa, Homo sapiens
MEESDSEKTTEKENLGPRMDPPLGEPEGSLGWVLPNTAMKKKVLLMGKSGSGKTSMRSIIFANYIARDTRRLGATILDRIHSLQINSSLSTYSLVDSVGNTKTFDVEHSHVRFLGNLVLNLWDCGGQDTFMENYFTSQRDNIFRNVEVLIYVFDVESRELEKDMHYYQSCLEAILQNSPDAKIFCLVHKMDLVQEDQRDLIFKEREEDLRRLSRPLECSCFRTSIWDETLYKAWSSIVYQLIPNVQQLEMNLRNFAEIIEADEVLLFERATFLVISHYQCKEQRDAHRFEKISNIIKQFKLSCSKLAASFQSMEVRNSNFAAFIDIFTSNTYVMVVMSDPSIPSAATLINIRNARKHFEKLERVDGPKQCLLMR

SEQ ID NO: 2128 - protein, 4374 aa, Homo sapiens
MKVDRTKLKKTPTEAPADCRALIDKLKVCNDEQLLLELQQIKTWNIGKCELYHWVDLLDRFDGILADAGQTVENMSWMLVCDRPEREQLKMLLLAVLNFTALLIEYSFSRHLYSSIEHLTTLLASSDMQVVLAVLNLLYVFSKRSNYITRLGSDKRTPLLTRLQHLAESWGGKENGFGLAECCRDLHMMKYPPSATTLHFEFYADPGAEVKIEKRTTSNTLHYIHIEQLDKISESPSEIMESLTKMYSIPKDKQMLLFTHIRLAHGFSNHRKRLQAVQARLHAISILVYSNALQESANSILYNGLIEELVDVLQITDKQLMEIKAASLRTLTSIVHLERTPKLSSIIDCTGTASYHGFLPVLVRNCIQAMIDPSMDPYPHQFATALFSFLYHLASYDAGGEALVSCGMMEALLKVIKFLGDEQDQITFVTRAVRVVDLITNLDMAAFQSHSGLSIFIYRLEHEVDLCRKECPFVIKPKIQRPNTTQEGEEMETDMDGVQCIPQRAALLKSMLNFLKKAIQDPAFSDGIRHVMDGSLPTSLKHIISNAEYYGPSLFLLATEVVTVFVFQEPSLLSSLQDNGLTDVMLHALLIKDVPATREVLGSLPNVFSALCLNARGLQSFVQCQPFERLFKVLLSPDYLPAMRRRRSSDPLGDTASNLGSAVDELMRHQPTLKTDATTAIIKLLEEICNLGRDPKYICQKPSIQKADGTATAPPPRSNHAAEEASSEDEEEEEVQAMQSFNSTQQNETEPNQQVVGTEERIPIPLMDYILNVMKFVESILSNNTTDDHCQEFVNQKGLLPLVTILGLPNLPIDFPTSAACQAVAGVCKSILTLSHEPKVLQEGLLQLDSILSSLEPLHRPIESPGGSVLLRELACAGNVADATLSAQATPLLHALTAAHAYIMMFVHTCRVGQSEIRSISVNQWGSQLGLSVLSKLSQLYCSLVWESTVLLSLCTPNSLPSGCEFGQADMQKLVPKDEKAGTTQGGKRSDGEQDGAAGSMDASTQGLLEGIGLDGDTLAPMETDEPTASDSKGKSKITPAMAARIKQIKPLLSASSRLGRALAELFGLLVKLCVGSPVRQRRSHHAASTTTAPTPAARSTASALTKLLTKGLSWQPPPYTPTPRFRLTFFICSVGFTSPMLFDERKYPYHLMLQKFLCSGGHNALFETFNWALSMGGKVPVSEGLEHSDLPDGTGEFLDAWLMLVEKMVNPTTVLESPHSLPAKLPGGVQNFPQFSALRFLVVTQKAAFTCIKNLWNRKPLKVYGGRMAESMLAILCHILRGEPVIRERLSKEKEGSRGEEDTGQEEGGSRREPQVNQQQLQQLMDMGFTREHAMEALLNTSTMEQATEYLLTHPPPIMGGVVRDLSMSEEDQMMRAIAMSLGQDIPMDQRAESPEEVACRKEEEERKAREKQEEEEAKCLEKFQDADPLEQDELHTFTDTMLPGCFHLLDELPDTVYRVCDLIMTAIKRNGADYRDMILKQVVNQVWEAADVLIKAALPLTTSDTKTVSEWISQMATLPQASNLATRILLLTLLFEELKLPCAWVVESSGILNVLIKLLEVVQPCLQAAKEQKEVQTPKWITPVLLLIDFYEKTAISSKRRAQMTKYLQSNSNNWRWFDDRSGRWCSYSASNNSTIDSAWKSGETSVRFTAGRRRYTVQFTTMVQVNEETGNRRPVMLTLLRVPRLNKNSKNSNGQELEKTLEESKEMDIKRKENKGNDTPLALESTNTEKETSLEETKIGEILIQGLTEDMVTVLIRACVSMLGVPVDPDTLHATLRLCLRLTRDHKYAMMFAELKSTRMILNLTQSSGFNGFTPLVTLLLRHIIEDPCTLRHTMEKVVRSAATSGAGSTTSGVVSGSLGSREINYILRVLGPAACRNPDIFTEVANCCIRIALPAPRGSGTASDDEFENLRIKGPNAVQLVKTTPLKPSPLPVIPDTIKEVIYDMLNALAAYHAPEEADKSDPKPGVMTQEVGQLLQDMGDDVYQQYRSLTRQSSDFDTQSGFSINSQVFAADGASTETSASGTSQGEASTPEESRDGKKDKEGDRASEEGKQKGKGSKPLMPTSTILRLLAELVRSYVGIATLIANYSYTVGQSELIKEDCSVLAFVLDHLLPHTQNAEDKDTPALARLFLASLAAAGSGTDAQVALVNEVKAALGRALAMAESTEKHARLQAVMCIISTIMESCPSTSSFYSSATAKTQHNGMNNIIRLFLKKGLVNDLARVPHSLDLSSPNMANTVNAALKPLETLSRIVNQPSSLFGSKSASSKNKSEQDAQGASQDSSSNQQDPGEPGEAEVQEEDHDVTQTEVADGDIMDGEAETDSVVIAGQPEVLSSQEMQVENELEDLIDELLERDGGSGNSTIIVSRSGEDESQEDVLMDEAPSNLSQASTLQANREDSMNILDPEDEEEHTQEEDSSGSNEDEDDSQDEEEEEEEDEEDDQEDDEGEEGDEDDDDDGSEMELDEDYPDMNASPLVRFERFDREDDLIIEFDNMFSSATDIPPSPGNIPTTHPLMVRHADHSSLTLGSGSSTTRLTQGIGRSQRTLRQLTANTGHTIHVHYPGNRQPNPPLILQRLLGPSAAADILQLSSSLPLQSRGRARLLVGNDDVHIIARSDDELLDDFFHDQSTATSQAGTLSSIPTALTRWTEECKVLDAESMHDCVSVVKVSIVNHLEFLRDEELEERREKRRKQLAEEETKITDKGKEDKENRDQSAQCTASKSNDSTEQNLSDGTPMPDSYPTTPSSTDAATSESKETLGTLQSSQQQPTLPTPPALGEVPQELQSPAGEGGSSTQLLMPVEPEELGPTRPSGEAETTQMELSPAPTITSLSPERAEDSDALTAVSSQLEGSPMDTSSLASCTLEEAVGDTSAAGSSEQPRAGSSTPGDAPPAVAEVQGRSDGSGESAQPPEDSSPPASSESSSTRDSAVAISGADSRGILEEPLPSTSSEEEDPLAGISLPEGVDPSFLAALPDDIRREVLQNQLGIRPPTRTAPSTNSSAPAVVGNPGVTEVSPEFLAALPPAIQEEVLAQQRAEQQRRELAQNASSDTPMDPVTFIQTLPSDLRRSVLEDMEDSVLAVMPPDIAAEAQALRREQEARQRQLMHERLFGHSSTSALSAILRSPAFTSRLSGNRGVQYTRLAVQRGGTFQMGGSSSHNRPSGSNVDTLLRLRGRLLLDHEALSCLLVLLFVDEPKLNTSRLHRVLRNLCYHAQTRHWVIRSLLSILQRSSESELCIETPKLTTSEEKGKKSSKSCGSSSHENRPLDLLHKMESKSSNQLSWLSVSMDAALGCRTNIFQIQRSGGRKHTEKHASGGSTVHIHPQAAPVVCRHVLDTLIQLAKVFPSHFTQQRTKETNCESDRERGNKACSPCSSQSSSSGICTDFWDLLVKLDNMNVSRKGKNSVKSVPVSAGGEGETSPYSLEASPLGQLMNMLSHPVIRRSSLLTEKLLRLLSLISIALPENKVSEAQANSGSGASSTTTATSTTSTTTTTAASTTPTPPTAPTPVTSAPALVAATAISTIVVAASTTVTTPTTATTTVSISPTTKGSKSPAKVSDGGSSSTDFKMVSSGLTENQLQLSVEVLTSHSCSEEGLEDAANVLLQLSRGDSGTRDTVLKLLLNGARHLGYTLCKQIGTLLAELREYNLEQQRRAQCETLSPDGLPEEQPQTTKLKGKMQSRFDMAENVVIVASQKRPLGGRELQLPSMSMLTSKTSTQKFFLRVLQVIIQLRDDTRRANKKAKQTGRLGSSGLGSASSIQAAVRQLEAEADAIIQMVREGQRARRQQQAATSESSQSEASVRREESPMDVDQPSPSAQDTQSIASDGTPQGEKEKEERPPELPLLSEQLSLDELWDMLGECLKELEESHDQHAVLVLQPAVEAFFLVHATERESKPPVRDTRESQLAHIKDEPPPLSPAPLTPATPSSLDPFFSREPSSMHISSSLPPDTQKFLRFAETHRTVLNQILRQSTTHLADGPFAVLVDYIRVLDFDVKRKYFRQELERLDEGLRKEDMAVHVRRDHVFEDSYRELHRKSPEEMKNRLYIVFEGEEGQDAGGLLREWYMIISREMFNPMYALFRTSPGDRVTYTINPSSHCNPNHLSYFKFVGRIVAKAVYDNRLLECYFTRSFYKHILGKSVRYTDMESEDYHFYQGLVYLLENDVSTLGYDLTFSTEVQEFGVCEVRDLKPNGANILVTEENKKEYVHLVCQMRMTGAIRKQLAAFLEGFYEIIPKRLISIFTEQELELLISGLPTIDIDDLKSNTEYHKYQSNSIQIQWFWRALRSFDQADRAKFLQFVTGTSKVPLQGFAALEGMNGIQKFQIHRDDRSTDRLPSAHTCFNQLDLPAYESFEKLRHMLLLAIQECSEGFGLA

SEQ ID NO: 2129 - protein, 774 aa, Homo sapiens
MDDWKSRLVIKSMLPHFAMVGNRQEPRKLQESGKKPSWMEEEDLSFLYKSSPGRKHQGTVKRRQEEDHFQFPDMADGGYPNKIKRPCLEDVTLAMGPGAHPSTACAELQVPPLTINPSPAAMGVAGQSLLLENNPMNGNIMGSPFVVPQTTEVGLKGPTVPYYEKINSVPAVDQELQELLEELTKIQDPSPNELDLEKILGTKPEEPLVLDHPQATLSTTPKPSVQMSHLESLASSKEFASSCSQVTGMSLQIPSSSTGISYSIPSTSKQIVSPSSSMAQSKSQVQAMLPVALPPLPVPQWHHAHQLKALAASKQGSATKQQGPTPSWSGLPPPGLSPPYRPVPSPHPPPLPLPPPPPPFSPQSLMVSCMSSNTLSGSTLRGSPNALLSSMTSSSNAALGPAMPYAPEKLPSPALTQQPQFGPQSSILANLMSSTIKTPQGHLMSALPASNPGPSPPYRPEKLSSPGLPQQSFTPQCSLIRSLTPTSNLLSQQQQQQQQQQQANVIFKPISSNSSKTLSMIMQQGMASSSPGATEPFTFGNTKPLSHFVSEPGPQKMPSMPTTSRQPSLLHYLQQPTPTQASSATASSTATATLQLQQQQQQQQQQPDHSSFLLQQMMQQPQRFQRSVASDSMPALPRQGCCHLFAWTSAASSVKPQHQHGNSFTSRQDPQPGDVSPSNITHVDKACKLGEARHPQVSLGRQPPSCQALGSESFLPGSSFAHELARVTSSYSTSEAAPWGSWDPKAWRQVPAPLLPSCDATARGTEIRSYGNDP

SEQ ID NO: 2130 - protein, 1494 aa, Homo sapiens
MYSEWRSLHLVIQNDQGHTSVLHSYPESVGREVANAVVRPLGQVLGTPSVAGSENLLKTDKEVKWTMEVICYGLTLPLDGETVKYCVDVYTDWIMALVLPKDSIPLPVIKEPNQYVQTILKHLQNLFVPRQEQGSSQIRLCLQVLRAIQKLARESSLMARETWEVLLLFLLQINDILLAPPTVQGGIAENLAEKLIGVLFEVWLLACTRCFPTPPYWKTAKEMVANWRHHPAVVEQWSKVICALTSRLLRFTYGPSFPAFKVPDEDASLIPPEMDNECVAQTWFRFLHMLSNPVDLSNPAIISSTPKFQEQFLNVSGMPQELNQYPCLKHLPQIFFRAMRGISCLVDAFLGISRPRSDSAPPTPVNRLSMPQSAAVSTTPPHNRRHRAVTVNKATMKTSTVSTAHASKVQHQTSSTSPLSSPNQTSSEPRPLPAPRRPKVNSILNLFGSWLFDAAFVHCKLHNGINRDSSMTAITTQASMEFRRKGSQMSTDTMVSNPMFDASEFPDNYEAGRAEACGTLCRIFCSKKTGEEILPAYLSRFYMLLIQGLQINDYVCHPVLASVILNSPPLFCCDLKGIDVVVPYFISALETILPDRELSKFKSYVNPTELRRSSINILLSLLPLPHHFGTVKSEVVLEGKFSNDDSSSYDKPITFLSLKLRLVNILIGALQTETDPNNTQMILGAMLNIVQDSALLEAIGCQMEMGGGENNLKSHSRTNSGISSASGGSTEPTTPDSERPAQALLRDYALNTDSAAGLLIRSIHLVTQRLNSQWRQDMSISLAALELLSGLAKVKVMVDSGDRKRAISSVCTYIVYQCSRPAPLHSRDLHSMIVAAFQCLCVWLTEHPDMLDEKDCLKEVLEIVELGISGSKSKNNEQEVKYKGDKEPNPASMRVKDAAEATLTCIMQLLGAFPSPSGPASPCSLVNETTLIKYSRLPTINKHSFRYFVLDNSVILAMLEQPLGNEQNDFFPSVTVLVRGMSGRLAWAQQLCLLPRGAKANQKLFVPEPRPVPKNDVGFKYSVKHRPFPEEVDKIPFVKADLSIPDLHEIVTEELEERHEKLRSGMAQQIAYEIHLEQQSEEELQKRSFPDPVTDCKPPPPAQEFQTARLFLSHFGFLSLEALKEPANSRLPPHLIALDSTIPGFFDDIGYLDLLPCRPFDTVFIFYMKPGQKTNQEILKNVESSRTVQPHFLEFLLSLGWSVDVGRHPGWTGHVSTSWSINCCDDGEGSQQEVISSEDIGASIFNGQKKVLYYADALTEIAFVVPSPVESLTDSLESNISDQDSDSNMDLMPGILKQPSLTLELFPNHTDNLNSSQRLSPSSRMRKLPQGRPVPPLGPETRVSVVWVERYDDIENFPLSELMTEISTGVETTANSSTSLRSTTLEKEVPVIFIHPLNTGLFRIKIQGATGKFNMVIPLVDGMIVSRRALGFLVRQTVINICRRKRLESDSYSPPHVRRKQKITDIVNKYRNKQLEPEFYTSLFQEVGLKNCSS

SEQ ID NO: 2131 - protein, 633 aa, Homo sapiens
MPEIRLRHVVSCSSQDSTHCAENLLKADTYRKWRAAKAGEKTISVVLQLEKEEQIHSVDIGNDGSAFVEVLVGSSAGGAGEQDYEVLLVTSSFMSPSESRSGSNPNRVRMFGPDKLVRAAAEKRWDRVKIVCSQPYSKDSPFGLSFVRFHSPPDKDEAEAPSQKVTVTKLGQFRVKEEDESANSLRPGALFFSRINKTSPVTASDPAGPSYAAATLQASSAASSASPVSRAIGSTSKPQESPKGKRKLDLNQEEKKTPSKPPAQLSPSVPKRPKLPAPTRTPATAPVPARAQGAVTGKPRGEGTEPRRPRAGPEELGKILQGVVVVLSGFQNPFRSELRDKALELGAKYRPDWTRDSTHLICAFANTPKYSQVLGLGGRIVRKEWVLDCHRMRRRLPSQRYLMAGPGSSSEEDEASHSGGSGDEAPKLPQKQPQTKTKPTQAAGPSSPQKPPTPEETKAASPVLQEDIDIEGVQSEGQDNGAEDSGDTEDELRRVAEQKEHRLPPGQEENGEDPYAGSTDENTDSEEHQEPPDLPVPELPDFFQGKHFFLYGEFPGDERRKLIRYVTAFNGELEDYMSDRVQFVITAQEWDPSFEEALMDNPSLAFVRPRWIYSCNEKQKLLPHQLYGVVPQA

SEQ ID NO: 2132 - protein, 752 aa, Homo sapiens
MSSRTVLAPGNDRNSDTHGTLGSGRSSDKGPSWSSRSLGARCRNSIASCPEEQPHVGNYRLLRTIGKGNFAKVKLARHILTGREVAIKIIDKTQLNPSSLQKLFREVRIMKGLNHPNIVKLFEVIETEKTLYLVMEYASAGEVFDYLVSHGRMKEKEARAKFRQIVSAVHYCHQKNIVHRDLKAENLLLDAEANIKIADFGFSNEFTLGSKLDTFCGSPPYAAPELFQGKKYDGPEVDIWSLGVILYTLVSGSLPFDGHNLKELRERVLRGKYRVPFYMSTDCESILRRFLVLNPAKRCTLEQIMKDKWINIGYEGEELKPYTEPEEDFGDTKRIEVMVGMGYTREEIKESLTSQKYNEVTATYLLLGRKTEEGGDRGAPGLALARVRAPSDTTNGTSSSKGTSHSKGQRSSSSTYHRQRRHSDFCGPSPAPLHPKRSPTSTGEAELKEERLPGRKASCSTAGSGSRGLPPSSPMVSSAHNPNKAEIPERRKDSTSTPNNLPPSMMTRRNTYVCTERPGAERPSLLPNGKENSSGTPRVPPASPSSHSLAPPSGERSRLARGSTIRSTFHGGQVRDRRAGGGGGGGVQNGPPASPTLAHEAAPLPAGRPRPTTNLFTKLTSKLTRRVADEPERIGGPEVTSCHLPWDQTETAPRLLRFPWSVKLTSSRPPEALMAALRQATAAARCRCRQPQPFLLACLHGGAGGPEPLSHFEVEVCQLPRPGLRGVLFRRVAGTALAFRTLVTRISNDLEL

SEQ ID NO: 2133 - protein, 706 aa, Homo sapiens
MTTLKEAVTFKDVAVVFTEEELRLLDLAQRKLYREVMLENFRNLLSVGHQSLHRDTFHFLKEEKFWMMETATQREGNLGGKIQMEMETVSESGTHEGLFSHQTWEQISSDLTRFQDSMVNSFQFSKQDDMPCQVDAGLSIIHVRQKPSEGRTCKKSFSDVSVLDLHQQLQSREKSHTCDECGKSFCYSSALRIHQRVHMGEKLYNCDVCGKEFNQSSHLQIHQRIHTGEKPFKCEQCGKGFSRRSGLYVHRKLHTGVKPHICEKCGKAFIHDSQLQEHQRIHTGEKPFKCDICCKSFRSRANLNRHSMVHMREKPFRCDTCGKSFGLKSALNSHRMVHTGEKRYKCEECGKRFIYRQDLYKHQIDHTGEKPYNCKECGKSFRWASGLSRHVRVHSGETTFKCEECGKGFYTNSQRYSHQRAHSGEKPYRCEECGKGYKRRLDLDFHQRVHRGEKPYNCKECGKSFGWASCLLNHQRIHSGEKPFKCEECGKRFTQNSQLYTHRRVHSGEKPFKCEECGKRFTQNSQLYSHRRVHTGVKPYKCEECGKGFNSKFNLDMHQRVHTGERPYNCKECGKSFSRASSILNHKRLHGDEKPFKCEECGKRFTENSQLHSHQRVHTGEKPYKCEKCGKSFRWASTHLTHQRLHSREKLLQCEDCGKSIVHSSCLKDQQRDQSGEKTSKCEDCGKRYKRRLNLDTLLSLFLNDT

SEQ ID NO: 2134 - protein, 980 aa, Homo sapiens
MPAELLLLLIVAFASPSCQVLSSLRMAAILDDQTVCGRGERLALALAREQINGIIEVPAKARVEVDIFELQRDSQYETTDTMCQILPKGVVSVLGPSSSPASASTVSHICGEKEIPHIKVGPEETPRLQYLRFASVSLYPSNEDVSLAVSRILKSFNYPSASLICAKAECLLRLEELVRGFLISKETLSVRMLDDSRDPTPLLKEIRDDKVSTIIIDANASISHLILRKASELGMTSAFYKYILTTMDFPILHLDGIVEDSSNILGFSMFNTSHPFYPEFVRSLNMSWRENCEASTYLGPALSAALMFDAVHVVVSAVRELNRSQEIGVKPLACTSANIWPHGTSLMNYLRMVEYDGLTGRVEFNSKGQRTNYTLRILEKSRQGHREIGVWYSNRTLAMNATTLDINLSQTLANKTLVVTTILENPYVMRRPNFQALSGNERFEGFCVDMLRELAELLRFRYRLRLVEDGLYGAPEPNGSWTGMVGELINRKADLAVAAFTITAEREKVIDFSKPFMTLGISILYRVHMGRKPGYFSFLDPFSPAVWLFMLLAYLAVSCVLFLAARLSPYEWYNPHPCLRARPHILENQYTLGNSLWFPVGGFMQQGSEIMPRALSTRCVSGVWWAFTLIIISSYTANLAAFLTVQRMEVPVESADDLADQTNIEYGTIHAGSTMTFFQNSRYQTYQRMWNYMQSKQPSVFVKSTEEGIARVLNSRYAFLLESTMNEYHRRLNCNLTQIGGLLDTKGYGIGMPLGSPFRDEITLAILQLQENNRLEILKRKWWEGGRCPKEEDHRAKGLGMENIGGIFIVLICGLIIAVFVAVMEFIWSTRRSAESEEVSVCQEMLQELRHAVSCRKTSRSRRRRRPGGPSRALLSLRAVREMRLSNGKLYSAGAGGDAGSAHGGPQRLLDDPGPPSGARPAAPTPCTHVRVCQECRRIQALRASGAGAPPRGLGVPAEATSPPRPRPGPAGPRELAEHE

SEQ ID NO: 2135 - protein, 766 aa, Homo sapiens
MKEKSKNAARTRREKENSEFYELAKLLPLPSAITSQLDKASIIRLTTSYLKMRVVFPEGLGEAWGHSSRTSPLDNVGRELGSHLLQTLDGFIFVVAPDGKIMYISETASVHLGLSQVELTGNSIYEYIHPADHDEMTAVLTAHQPYHSHFVQEYEIERSFFLRMKCVLAKRNAGLTCGGYKVIHCSGYLKIRQYSLDMSPFDGCYQNVGLVAVGHSLPPSAVTEIKLHSNMFMFRASLDMKLIFLDSRVAELTGYEPQDLIEKTLYHHVHGCDTFHLRCAHHLLLVKGQVTTKYYRFLAKHGGWVWVQSYATIVHNSRSSRPHCIVSVNYVLTDTEYKGLQLSLDQISASKPAFSYTSSSTPTMTDNRKGAKSRLSSSKSKSRTSPYPQYSGFHTERSESDHDSQWGGSPLTDTASPQLLDPADRPGSQHDASCAYRQFSDRSSLCYGFALDHSRLVEERHFHTQACEGGRCEAGRYFLGTPQAGREPWWGSRAALPLTKASPESREAYENSMPHIASVHRIHGRGHWDEDSVVSSPDPGSASESGDRYRTEQYQSSPHEPSKIETLIRATQQMIKEEENRLQLRKAPSDQLASINGAGKKHSLCFANYQQPPPTGEVCHGSALANTSPCDHIQQREGKMLSPHENDYDNSPTALSRISSPNSDRISKSSLILAKDYLHSDISPHQTAGDHPTVSPNCFGSHRQYFDKHAYTLTGYALEHLYDSETIRNYSLGCNGSHFDVTSHLRMQPDPAQGHKGTSVIITNGS

SEQ ID NO: 2136 - protein, 1429 aa, Homo sapiens
MVAAAAATEARLRRRTAATAALAGRSGGPHWDWDVTRAGRPGLGAGLRLPRLLSPPLRPRLLLLLLLLSPPLLLLLLPCEAEAAAAAAAVSGSAAAEAKECDRPCVNGGRCNPGTGQCVCPAGWVGEQCQHCGGRFRLTGSSGFVTDGPGNYKYKTKCTWLIEGQPNRIMRLRFNHFATECSWDHLYVYDGDSIYAPLVAAFSGLIVPERDGNETVPEVVATSGYALLHFFSDAAYNLTGFNITYSFDMCPNNCSGRGECKISNSSDTVECECSENWKGEACDIPHCTDNCGFPHRGICNSSDVRGCSCFSDWQGPGCSVPVPANQSFWTREEYSNLKLPRASHKAVVNGNIMWVVGGYMFNHSDYNMVLAYDLASREWLPLNRSVNNVVVRYGHSLALYKDKIYMYGGKIDSTGNVTNELRVFHIHNESWVLLTPKAKEQYAVVGHSAHIVTLKNGRVVMLVIFGHCPLYGYISNVQEYDLDKNTWSILHTQGALVQGGYGHSSVYDHRTRALYVHGGYKAFSANKYRLADDLYRYDVDTQMWTILKDSRFFRYLHTAVIVSGTMLVFGGNTHNDTSMSHGAKCFSSDFMAYDIACDRWSVLPRPDLHHDVNRFGHSAVLHNSTMYVFGGFNSLLLSDILVFTSEQCDAHRSEAACLAAGPGIRCVWNTGSSQCISWALATDEQEEKLKSECFSKRTLDHDRCDQHTDCYSCTANTNDCHWCNDHCVPRNHSCSEGQISIFRYENCPKDNPMYYCNKKTSCRSCALDQNCQWEPRNQECIALPENICGIGWHLVGNSCLKITTAKENYDNAKLFCRNHNALLASLTTQKKVEFVLKQLRIMQSSQSMSKLTLTPWVGLRKINVSYWCWEDMSPFTNSLLQWMPSEPSDAGFCGILSEPSTRGLKAATCINPLNGSVCERPANHSAKQCRTPCALRTACGDCTSGSSECMWCSNMKQCVDSNAYVASFPFGQCMEWYTMSTCPPENCSGYCTCSHCLEQPGCGWCTDPSNTGKGKCIEGSYKGPVKMPSQAPTGNFYPQPLLNSSMCLEDSRYNWSFIHCPACQCNGHSKCINQSICEKCENLTTGKHCETCISGFYGDPTNGGKCQPCKCNGHASLCNTNTGKCFCTTKGVKGDECQLCEVENRYQGNPLRGTCYYTLLIDYQFTFSLSQEDDRYYTAINFVATPDEQNRDLDMFINASKNFNLNITWAASFSAGTQAGEEMPVVSKTNIKEYKDSFSNEKFDFRNHPNITFFVYVSNFTWPIKIQIAFSQHSNFMDLVQFFVTFFSCFLSLLLVAAVVWKIKQSCWASRRREQLLREMQQMASRPFASVNVALETDEEPPDLIGGSIKTVPKPIALEPCFGNKAAVLSVFVRLPRGLGGIPPPGQSGLAVASALVDISQQMPIVYKEKSGAVRNRKQQPPAQPGTCI

SEQ ID NO: 2137 - protein, 180 aa, Homo sapiens
MPVPASWPHPPCPFLLLTLLLGLTGVAGEDELQVIQPEKSVSVAAGESATLRCAMTSLIPVGPIMWFRGAGAGRELIYNQKEGHFPRVTTVSELTKRNNLDFSISISNITPADAGTYYCVKFRKGSPDDVEFKSGAGTELSVREAALAPTAPLLVALLLGPKLLLVVGVSAIYICWKQKA

SEQ ID NO: 2138 - protein, 248 aa, Homo sapiens
MGPVRLGILLFLFLAVHEAWAGMLKEEDDDTERLPSKCEVCKLLSTELQAELSRTGRSREVLELGQVLDTGKRKRHVPYSVSETRLEEALENLCERILDYSVHAERKGSLRYAKGQSQTMATLKGLVQKGVKVDLGIPLELWDEPSVEVTYLKKQCETMLEEFEDIVGDWYFHHQEQPLQNFLCEGHVLPAAETACLQETWTGKEITDGEEKTEGEEEQEEEEEEEEEEGGDKMTKTGSHPKLDREDL

SEQ ID NO: 2139 - protein, 370 aa, Homo sapiens
MSLHQFLLEPITCHAWNRDRTQIALSPNNHEVHIYKKNGSQWVKAHELKEHNGHITGIDWAPKSDRIVTCGADRNAYVWSQKDGVWKPTLVILRINRAATFVKWSPLENKFAVGSGARLISVCYFESENDWWVSKHIKKPIRSTVLSLDWHPNNVLLAAGSCDFKCRVFSAYIKEVDEKPASTPWGSKMPFGQLMSEFGGSGTGGWVHGVSFSASGSRLAWVSHDSTVSVADASKSVQVSTLKTEFLPLLSVSFVSENSVVAAGHDCCPMLFNYDDRGCLTFVSKLDIPKQSIQRNMSAMERFRNMDKRATTEDRNTALETLHQNSITQVSIYEVDKQDCRKFCTTGIDGAMTIWDFKTLESSIQGLRIM

SEQ ID NO: 2140 - protein, 173 aa, Homo sapiens
MAAPSGGWNGVGASLWAALLLGAVALRPAEAVSEPTTVAFDVRPGGVVHSFSHNVGPGDKYTCMFTYASQGGTNEQWQMSLGTSEDHQHFTCTIWRPQGKSYLYFTQFKAEVRGAEIEYAMAYSKAAFERESDVPLKTEEFEVTKTAVAHRPGAFKAELSKLVIVAKASRTEL

SEQ ID NO: 2141 - protein, 400 aa, Homo sapiens [sequence omitted]

SEQ ID NO: 2142 - protein, 743 aa, Homo sapiens
MYPQGRHPTPLQSGQPFKFSILEICDRIKEEFQFLQAQYHSLKLECEKLASEKTEMQRHYVMYYEMSYGLNIEMHKQAEIVKRLSGICAQIIPFLTQEHQQQVLQAVERAKQVTVGELNSLIGQQLQPLSHHAPPVPLTPRPAGLVGGSATGLLALSGALAAQAQLAAAVKEDRAGVEAEGSRVERAPSRSASPSPPESLVEEERPSGPGGGGKQRADEKEPSGPYESDEDKSDYNLVVDEDQPSEPPSPATTPCGKVPICIPARRDLVDSPASLASSLGSPLPRAKELILNDLPASTPASKSCDSSPPQDASTPGPSSASHLCQLAAKPAPSTDSVALRSPLTLSSPFTTSFSLGSHSTLNGDLSVPSSYVSLHLSPQVSSSVVYGRSPVMAFESHPHLRGSSVSSSLPSIPGGKPAYSFHVSADGQMQPVPFPSDALVGAGIPRHARQLHTLAHGEVVCAVTISGSTQHVYTGGKGCVKVWDVGQPGAKTPVAQLDCLNRDNYIRSCKLLPDGRSLIVGGEASTLSIWDLAAPTPRIKAELTSSAPACYALAVSPDAKVCFSCCSDGNIVVWDLQNQTMVRQFQGHTDGASCIDISDYGTRLWTGGLDNTVRCWDLREGRQLQQHDFSSQIFSLGHCPNQDWLAVGMESSNVEILHVRKPEKYQLHLHESCVLSLKFASCGRWFVSTGKDNLLNAWRTPYGASIFQSKESSSVLSCDISRNNKYIVTGSGDKKATVYEVVY

SEQ ID NO: 2143 - protein, 892 aa, Homo sapiens
MRKVKKLRLDKENTGSWRSFSLNSEGAERMATTGTPTADRGDAAATDDPAARFQVQKHSWDGLRSIIHGSRKYSGLIVNKAPHDFQFVQKTDESGPHSHRLYYLGMPYGSRENSLLYSEIPKKVRKEALLLLSWKQMLDHFQATPHHGVYSREEELLRERKRLGVFGITSYDFHSESGLFLFQASNSLFHCRDGGKNGFMVSPMKPLEIKTQCSGPRMDPKICPADPAFFSFINNSDLWVANIETGEERRLTFCHQGLSNVLDDPKSAGVATFVIQEEFDRFTGYWWCPTASWEGSEGLKTLRILYEEVDESEVEVIHVPSPALEERKTDSYRYPRTGSKNPKIALKLAEFQTDSQGKIVSTQEKELVQPFSSLFPKVEYIARAGWTRDGKYAWAMFLDRPQQWLQLVLLPPALFIPSTENEEQRLASARAVPRNVQPYVVYEEVTNVWINVHDIFYPFPQSEGEDELCFLRANECKTGFCHLYKVTAVLKSQGYDWSEPFSPGEDEFKCPIKEEIALTSGEWEVLARHGSKIWVNEETKLVYFQGTKDTPLEHHLYVVSYEAAGEIVRLTTPGFSHSCSMSQNFDMFVSHYSSVSTPPCVHVYKLSGPDDDPLHKQPRFWASMMEAASCPPDYVPPEIFHFHTRSDVRLYGMIYKPHALQPGKKHPTVLFVYGGPQVQLVNNSFKGIKYLRLNTLASLGYAVVVIDGRGSCQRGLRFEGALKNQMGQVEIEDQVEGLQFVAEKYGFIDLSRVAIHGWSYGGFLSLMGLIHKPQVFKVAIAGAPVTVWMAYDTGYTERYMDVPENNQHGYEAGSVALHVEKLPNEPNRLLILHGFLDENVHFFHTNFLVSQLIRAGKPYQLQIYPNERHSIRCPESGEHYEVTLLHFLQEYL

SEQ ID NO: 2144 - protein, 323 aa, Homo sapiens
MSERKVLNKYYPPDFDPSKIPKLKLPKDRQYVVRLMAPFNMRCKTCGEYIYKGKKFNARKETVQNEVYLGLPIFRFYIKCTRCLAEITFKTDPENTDYTMEHGATRNFQAEKLLEEEEKRVQKEREDEELNNPMKVLENRTKDSKLEMEVLENLQELKDLNQRQAHVDFEAMLRQHRLSEEERRRQQQEEDEQETAALLEEARKRRLLEDSDSEDEAAPSPLQPALRPNPTAILDEAPKPKRKVEVWEQSVGSLGSRPPLSRLVVVKKAKADPDCSNGQPQAAPTPGAPQNRKEANPTPLTPGASSLSQLGAYLDSDDSNGSN

SEQ ID NO: 2145 - protein, 1501 aa, Homo sapiens
MAPTWGPGMVSVVGPMGLLVVLLVGGCAAEEPPRFIKEPKDQIGVSGGVASFVCQATGDPKPRVTWNKKGKKVNSQRFETIEFDESAGAVLRIQPLRTPRDENVYECVAQNSVGEITVHAKLTVLREDQLPSGFPNIDMGPQLKVVERTRTATMLCAASGNPDPEITWFKDFLPVDPSASNGRIKQLRSGALQIESSEETDQGKYECVATNSAGVRYSSPANLYVRVRRVAPRFSILPMSHEIMPGGNVNITCVAVGSPMPYVKWMQGAEDLTPEDDMPVGRNVLELTDVKDSANYTCVAMSSLGVIEAVAQITVKSLPKAPGTPMVTENTATSITITWDSGNPDPVSYYVIEYKSKSQDGPYQIKEDITTTRYSIGGLSPNSEYEIWVSAVNSIGQGPPSESVVTRTGEQAPASAPRNVQARMLSATTMIVQWEEPVEPNGLIRGYRVYYTMEPEHPVGNWQKHNVDDSLLTTVGSLLEDETYTVRVLAFTSVGDGPLSDPIQVKTQQGVPGQPMNLRAEARSETSITLSWSPPRQESIIKYELLFREGDHGREVGRTFDPTTSYVVEDLKPNTEYAFRLAARSPQGLGAFTPVVRQRTLQSISPKNFKVKMIMKTSVLLSWEFPDNYNSPTPYKIQYNGLTLDVDGRTTKKLITHLKPHTFYNFVLTNRGSSLGGLQQTVTAWTAFNLLNGKPSVAPKPDADGFIMVYLPDGQSPVPVQSYFIVMVPLRKSRGGQFLTPLGSPEDMDLEELIQDISRLQRRSLRHSRQLEVPRPYIAARFSVLPPTFHPGDQKQYGGFDNRGLEPGHRYVLFVLAVLQKSEPTFAASPFSDPFQLDNPDPQPIVDGEEGLIWVIGPVLAVVFIICIVIAILLYKKKPHSKRKDSEPRTKCLLNNADLAPHHPKDPVEMRRINFQTPGMLSHPPIPIADMAEHTERLKANDSLKLSQEYESIDPGQQFTWEHSNLEVNKPKNRYANVIAYDHSRVILQPIEGIMGSDYINANYVDGYRCQNAYIATQGPLPETFGDFWRMVWEQRSATIVMMTRLEEKSRIKCDQYWPNRGTETYGFIQVTLLDTIELATFCVRTFSLHKNGSSEKREVRQFQFTAWPDHGVPEYPTPFLAFLRRVKTCNPPDAGPIVVHCSAGVGRTGCFIVIDAMLERIKPEKTVDVYGHVTLMRSQRNYMVQTEDQYSFIHEALLEAVGCGNTEVPARSLYAYIQKLAQVEPGEHVTGMELEFKRLANSKAHTSRFISANLPCNKFKNRLVNIMPYESTRVCLQPIRGVEGSDYINASFIDGYRQQKAYIATQGPLAETTEDFWRMLWENNSTIVVMLTKLREMGREKCHQYWPAERSARYQYFVVDPMAEYNMPQYILREFKVTDARDGQSRTVRQFQFTDWPEQGVPKSGEGFIDFIGQVHKTKEQFGQDGPISVHCSAGVGRTGVFITLSIVLERMRYEGVVDIFQTVKMLRTQRPAMVQTEDEYQFCYQAALEYLGSFDHYAT

SEQ ID NO: 2146 - protein, 654 aa, Homo sapiens
MNQPQRMAPVGTDKELSDLLDFSMMFPLPVTNGKGRPASLAGAQFGGSGLEDRPSSGSWGSGDQSSSSFDPSRTFSEGTHFTESHSSLSSSTFLGPGLGGKSGERGAYASFGRDAGVGGLTQAGFLSGELALNSPGPLSPSGMKGTSQYYPSYSGSSRRRAADGSLDTQPKKVRKVPPGLPSSVYPPSSGEDYGRDATAYPSAKTPSSTYPAPFYVADGSLHPSAELWSPPGQAGFGPMLGGGSSPLPLPPGSGPVGSSGSSSTFGGLHQHERMGYQLHGAEVNGGLPSASSFSSAPGATYGGVSSHTPPVSGADSLLGSRGTTAGSSGDALGKALASIYSPDHSSNNFSSSPSTPVGSPQGLAGTSQWPRAGAPGALSPSYDGGLHGLQSKIEDHLDEAIHVLRSHAVGTAGDMHTLLPGHGALASGFTGPMSLGGRHAGLVGGSHPEDGLAGSTSLMHNHAALPSQPGTLPDLSRPPDSYSGLGRAGATAAASEIKREEKEDEENTSAADHSEEEKKELKAPRARTSPDEDEDDLLPPEQKAEREKERRVANNARERLRVRDINEAFKELGRMCQLHLNSEKPQTKLLILHQAVSVILNLEQQVRERNLNPKAACLKRREEEKVSGVVGDPQMVLSAPHPGLSEAHNPAGHM

SEQ ID NO: 2147 - protein, 971 aa, Homo sapiens
MELSDANLQTLTEYLKKTLDPDPAIRRPAEKFLESVEGNQNYPLLLLTLLEKSQDNVIKVCASVTFKNYIKRNWRIVEDEPNKICEADRVAIKANIVHLMLSSPEQIQKQLSDAISIIGREDFPQKWPDLLTEMVNRFQSGDFHVINGVLRTAHSLFKRYRHEFKSNELWTEIKLVLDAFALPLTNLFKATIELCSTHANDASALRILFSSLILISKLFYSLNFQDLPEFFEDNMETWMNNFHTLLTLDNKLLQTDDEEEAGLLELLKSQICDNAALYAQKYDEEFQRYLPRFVTAIWNLLVTTGQEVKYDLLVSNAIQFLASVCERPHYKNLFEDQNTLTSICEKVIVPNMEFRAADEEAFEDNSEEYIRRDLEGSDIDTRRRAACDLVRGLCKFFEGPVTGIFSGYVNSMLQEYAKNPSVNWKHKDAAIYLVTSLASKAQTQKHGITQANELVNLTEFFVNHILPDLKSANVNEFPVLKADGIKYIMIFRNQVPKEHLLVSIPLLINHLQAESIVVHTYAAHALERLFTMRGPNNATLFTAAEIAPFVEILLTNLFKALTLPGSSENEYIMKAIMRSFSLLQEAIIPYIPTLITQLTQKLLAVSKNPSKPHFNHYMFEAICLSIRITCKANPAAVVNFEEALFLVFTEILQNDVQEFIPYVFQVMSLLLETHKNDIPSSYMALFPHLLQPVLWERTGNIPALVRLLQAFLERGSNTIASAAADKIPGLLGVFQKLIASKANDHQGFYLLNSIIEHMPPESVDQYRKQIFILLFQRLQNSKTTKFIKSFLVFINLYCIKYGALALQEIFDGIQPKMFGMVLEKIIIPEIQKVSGNVEKKICAVGITKLLTECPPMMDTEYTKLWTPLLQSLIGLFELPEDDTIPDEEHFIDIEDTPGYQTAFSQLAFAGKKEHDPVGQMVNNPKIHLAQSLHKLSTACPGRVPSMVSTSLNAEALQYLQGYLQAASVTLL

SEQ ID NO: 2148 - protein, 320 aa, Homo sapiens
MPKKKTGARKKAENRREREKQLRASRSTIDLAKHPCNASMECDKCQRRQKNRAFCYFCNSVQKLPICAQCGKTKCMMKSSDCVIKHAGVYSTGLAMVGAICDFCEAWVCHGRKCLSTHACACPLTDAECVECERGVWDHGGRIFSCSFCHNFLCEDDQFEHQASCQVLEAETFKCVSCNRLGQHSCLRCKACFCDDHTRSKVFKQEKGKQPPCPKCGHETQETKDLSMSTRSLKFGRQTGGEEGDGASGYDAYWKNLSSDKYGDTSYHDEEEDEYEAEDDEEEEDEGRKDSDTESSDLFTNLNLGRTYASGYAHYEEQEN

SEQ ID NO: 2149 - protein, 924 aa, Homo sapiens
MEIKEEGASEEGQHFLPTAQANDPGDCQFTSIQKTPNEPQLEFILACKDLVAPVRDRKLNTLVQISVIHPVEQSLTRYSSTEIVEGTRDPLFLTGVTFPSEYPIYEETKIKLTVYDVKDKSHDTVRTSVLPEHKDPPPEVGRSFLGYASFKVGELLKSKEQLLVLSLRTSDGGKVVGTIEVSVVKMGEIEDGEADHITTDVQGQKCALVCECTAPESVSGKDNLPFLNSVLKNPVCKLYRFPTSDNKWMRIREQMSESILSFHIPKELISLHIKEDLCRNQEIKELGELSPHWDNLRKNVLTHCDQMVNMYQDILTELSKETGSSFKSSSSKGEKTLEFVPINLHLQRMQVHSPHLKDALYDVITVGAPAAHFQGFKNGGLRKLLHRFETERRNTGYQFIYYSPENTAKAKEVLSNINQLQPLIATHADLLLNSASQHSPDSLKNSLKMLSEKTELFVHAFKDQLVRSALLALYTARPGGILKKPPSPKSSTEESSPQDQPPVMRGQDSIPHHSDYDEEEWDRVWANVGKSLNCIIAMVDKLIERDGGSEGSGGNNDGEKEPSLTDAIPSHPREDWYEQLYPLILTLKDCMGEVVNRAKQSLTFVLLQELAYSLPQCLMLTLRRDIVFSQALAGLVCGFIIKLQTSLYDPGFLQQLHTVGLIVQYEGLLSTYSDEIGMLEDMAVGISDLKKVAFKIIEAKSNDVLPVITGRREHYVVEVKLPARMFESLPLQIKEGQLLHVYPVLFNVGINEQQTLAERFGDVSLQESINQENFELLQEYYKIFMEKMPPDYISHFQEQNDLKALLENLLQNIQSKKRKNVEIMWLAATICRKLNGIRFTCCKSAKDRTSMSVTLEQCSILRDEHQLHKDFFIRALDCMRREGCRIENVLKNIKCRKYAFNMLQLMAFPKYYRPPEGTYGKADT

SEQ ID NO: 2150 - protein, 1267 aa, Homo sapiens
MLVGQGAGPLGPAVVTAAVVLLLSGVGPAHGSEDIVVGCGGFVKSDVEINYSLIEIKLYTKHGTLKYQTDCAPNNGYFMIPLYDKGDFILKIEPPLGWSFEPTTVELHVDGVSDICTKGGDINFVFTGFSVNGKVLSKGQPLGPAGVQVSLRNTGTEAKIQSTVTQPGGKFAFFKVLPGDYEILATHPTWALKEASTTVRVTNSNANAASPLIVAGYNVSGSVRSDGEPMKGVKFLLFSSLVTKEDVLGCNVSPVPGFQPQDESLVYLCYTVSREDGSFSFYSLPSGGYTVIPFYRGERITFDVAPSRLDFTVEHDSLKIEPVFHVMGFSVTGRVLNGPEGDGVPEAVVTLNNQIKVKTKADGSFRLENITTGTYTIHAQKEHLYFETVTIKIAPNTPQLADIVATGFSVCGQISIIRFPDTVKQMNKYKVVLSSQDKDKSLVTVETDAHGSFCFKANPGTYKVQVMVPEAETRAGLTLKPQTFPLTVTDRPVMDVAFVQFLASVSGKVSCLDTCGDLLVTLQSLSRQGEKRSLQLSGKVNAMTFTFDNVLPGKYKISIMHEDWCWKNKSLEVEVLEDDVSAVEFRQTGYMLRCSLSHAITLEFYQDGNGRENVGIYNLSKGVNRFCLSKPGVYKVTPRSCHRFEQAFYTYDTSSPSILTLTAIRHHVLGTITTDKMMDVTVTIKSSIDSEPALVLGPLKSVQELRREQQLAEIEARRQEREKNGNEEGEERMTKPPVQEMVDELQGPFSYDFSYWARSGEKITVTPSSKELLFYPPSMEAVVSGESCPGKLIEIHGKAGLFLEGQIHPELEGVEIVISEKGASSPLITVFTDDKGAYSVGPLHSDLEYTVTSQKEGYVLTAVEGTIGDFKAYALAGVSFEIKAEDDQPLPGVLLSLSGGLFRSNLLTQDNGILTFSNLSPGQYYFKPMMKEFRFEPSSQMIEVQEGQNLKITITGYRTAYSCYGTVSSLNGEPEQGVAMEAVGQNDCSIYGEDTVTDEEGKFRLRGLLPGCVYHVQLKAEGNDHIERALPHHRVIEVGNNDIDDVNIIVFRQINQFDLSGNVITSSEYLPTLWVKLYKSENLDNPIQTVSLGQSLFFHFPPLLRDGENYVVLLDSTLPRSQYDYILPQVSFTAVGYHKHITLIFNPTRKLPEQDIAQGSYIALPLTLLVLLAGYNHDKLIPLLLQLTSRLQGVGALGQAASDNSGPEDAKRQAKKQKTRRTLRLQEEFQLMWCLVPWRGTLGIHLFSSLPFASEILLETTATCIHY

SEQ ID NO: 2151 - protein, 379 aa, Homo sapiens
MAAAAAQGGGGGEPRRTEGVGPGVPGEVEMVKGQPFDVGPRYTQLQYIGEGAYGMVSSAYDHVRKTRVAIKKISPFEHQTYCQRTLREIQILLRFRHENVIGIRDILRASTLEAMRDVYIVQDLMETDLYKLLKSQQLSNDHICYFLYQILRGLKYIHSANVLHRDLKPSNLLINTTCDLKICDFGLARIADPEHDHTGFLTEYVATRWYRAPEIMLNSKGYTKSIDIWSVGCILAEMLSNRPIFPGKHYLDQLNHILGILGSPSQEDLNCIINMKARNYLQSLPSKTKVAWAKLFPKSDSKALDLLDRMLTFNPNKRITVEEALAHPYLEQYYDPTDEPVAEEPFTFAMELDDLPKERLKELIFQETARFQPGVLEAP

SEQ ID NO: 2152 - protein, 671 aa, Homo sapiens
MSELLDLSFLSEEEKDLILSVLQRDEEVRKADEKRIRRLKNELLEIKRKGAKRGSQHYSDRTCARCQESLGRLSPKTNTCRGCNHLVCRDCRIQESNGTWRCKVCAKEIELKKATGDWFYDQKVNRFAYRTGSEIIRMSLRHKPAVSKRETVGQSLLHQTQMGDIWPGRKIIQERQKEPSVLFEVPKLKSGKSALEAESESLDSFTADSDSTSRRDSLDKSGLFPEWKKMSAPKSQVEKETQPGGQNVVFVDEGEMIFKKNTRKILRPSEYTKSVIDLRPEDVVHESGSLGDRSKSVPGLNVDMEEEEEEEDIDHLVKLHRQKLARSSMQSGSSMSTIGSMMSIYSEAGDFGNIFVTGRIAFSLKYEQQTQSLVVHVKECHQLAYADEAKKRSNPYVKTYLLPDKSRQGKRKTSIKRDTINPLYDETLRYEIPESLLAQRTLQFSVWHHGRFGRNTFLGEAEIQMDSWKLDKKLDHCLPLHGKISAESPTGLPSHKGELVVSLKYIPASKTPVGGDRKKSKGGEGGELQVWIKEAKNLTAAKAGGTSDSFVKGYLLPMRNKASKRKTPVMKKTLNPHYNHTFVYNGVRLEDLQHMCLELTVWDREPLASNDFLGGVRLGVGTGISNGEVVDWMDSTGEEVSLWQKMRQYPGSWAEGTLQLRSSMAKQKLGL

SEQ ID NO: 2153 - protein, 919 aa, Homo sapiens
MASATAAAARRGLGRALPLFWRGYQTERGVYGYRPRKPESREPQGALERPPVDHGLARLVTVYCEHGHKAAKINPLFTGQALLENVPEIQALVQTLQGPFHTAGLLNMGKEEASLEEVLVYLNQIYCGQISIETSQLQSQDEKDWFAKRFEELQKETFTTEERKHLSKLMLESQEFDHFLATKFSTVKRYGGEGAESMMGFFHELLKMSAYSGITDVIIGMPHRGRLNLLTGLLQFPPELMFRKMRGLSEFPENFSATGDVLSHLTSSVDLYFGAHHPLHVTMLPNPSHLEAVNPVAVGKTRGRQQSRQDGDYSPDNSAQPGDRVICLQVHGDASFCGQGIVPETFTLSNLPHFRIGGSVHLIVNNQLGYTTPAERGRSSLYCSDIGKLVGCAIIHVNGDSPEEVVRATRLAFEYQRQFRKDVIIDLLCYRQWGHNELDEPFYTNPIMYKIIRARKSIPDTYAEHLIAGGLMTQEEVSEIKSSYYAKLNDHLNNMAHYRPPALNLQAHWQGLAQPEAQITTWSTGVPLDLLRFVGMKSVEVPRELQMHSHLLKTHVQSRMEKMMDGIKLDWATAEALALGSLLAQGFNVRLSGQDVGRGTFSQRHAIVVCQETDDTYIPLNHMDPNQKGFLEVSNSPLSEEAVLGFEYGMSIESPKLLPLWEAQFGDFFNGAQIIFDTFISGGEAKWLLQSGIVILLPHGYDGAGPDHSSCRIERFLQMCDSAEEGVDGDTVNMFVVHPTTPAQYFHLLRRQMVRNFRKPLIVASPKMLLRLPAAVSTLQEMAPGTTFNPVIGDSSVDPKKVKTLVFCSGKHFYSLVKQRESLGAKKHDFAIIRVEELCPFPLDSLQQEMSKYKHVKDHIWSQEEPQNMGPWSFVSPRFEKQLACKLRLVGRPPLPVPAVGIGTVHLHQHEDILAKTFA

SEQ ID NO: 2154 - protein, 577 aa, Homo sapiens
MSHQPLSCLTEKEDSPSESTGNGPPHLAHPNLDTFTPEELLQQMKELLTENHQLKEAMKLNNQAMKGRFEELSAWTEKQKEERQFFEIQSKEAKERLMALSHENEKLKEELGKLKGKSERSSEDPTDDSRLPRAEAEQEKDQLRTQVVRLQAEKADLLGIVSELQLKLNSSGSSEDSFVEIRMAEGEAEGSVKEIKHSPGPTRTVSTGTALSKYRSRSADGAKNYFEHEELTVSQLLLCLREGNQKVERLEVALKEAKERVSDFEKKTSNRSEIETQTEGSTEKENDEEKGPETVGSEVEALNLQVTSLFKELQEAHTKLSEAELMKKRLQEKCQALERKNSAIPSELNEKQELVYTNKKLELQVESMLSEIKMEQAKTEDEKSKLTVLQMTHNKLLQEHNNALKTIEELTRKESEKVDRAVLKELSEKLELAEKALASKQLQMDEMKQTIAKQEEDLETMTILRAQMEVYCSDFHAERAAREKIHEEKEQLALQLAVLLKENDAFEDGGRQSLMEMQSRHGARTSDSDQQAYLVQRGAEDRDWRQQRNIPIHSCPKCGEVLPDIDTLQIHVMDCII

SEQ ID NO: 2155 - protein, 338 aa, Homo sapiens
MEQLRAAARLQIVLGHLGRPSAGAVVAHPTSGTISSASFHPQQFQYTLDNNVLTLEQRKFYEENGFLVIKNLVPDADIQRFRNEFEKICRKEVKPLGLTVMRDVTISKSEYAPSEKMITKVQDFQEDKELFRYCTLPEILKYVECFTGPNIMAMHTMLINKPPDSGKKTSRHPLHQDLHYFPFRPSDLIVCAWTAMEHISRNNGCLVVLPGTHKGSLKPHDYPKWEGGVNKMFHGIQDYEENKARVHLVMEKGDTVFFHPLLIHGSGQNKTQGFRKAISCHFASADCHYIDVKGTSQENIEKEVVGIAHKFFGAENSVNLKDIWMFRARLVKGERTNL

SEQ ID NO: 2156 - protein, 1168 aa, Homo sapiens
MGKVGAGGGSQARLSALLAGAGLLILCAPGVCGGGSCCPSPHPSSAPRSASTPRGFSHQGRPGRAPATPLPLVVRPLFSVAPGDRALSLERARGTGASMAVAARSGRRRRSGADQEKAERGEGASRSPRGVLRDGGQQEPGTRERDPDKATRFRMEELRLTSTTFALTGDSAHNQAMVHWSGHNSSVILILTKLYDYNLGSITESSLWRSTDYGTTYEKLNDKVGLKTILSYLYVCPTNKRKIMLLTDPEIESSLLISSDEGATYQKYRLNFYIQSLLFHPKQEDWILAYSQDQKLYSSAEFGRRWQLIQEGVVPNRFYWSVMGSNKEPDLVHLEARTVDGHSHYLTCRMQNCTEANRNQPFPGYIDPDSLIVQDHYVFVQLTSGGRPHYYVSYRRNAFAQMKLPKYALPKDMHVISTDENQVFAAVQEWNQNDTYNLYISDTRGVYFTLALENVQSSRGPEGNIMIDLYEVAGIKGMFLANKKIDNQVKTFITYNKGRDWRLLQAPDTDLRGDPVHCLLPYCSLHLHLKVSENPYTSGIIASKDTAPSIIVASGNIGSELSDTDISMFVSSDAGNTWRQIFEEEHSVLYLDQGGVLVAMKHTSLPIRHLWLSFDEGRSWSKYSFTSIPLFVDGVLGEPGEETLIMTVFGHFSHRSEWQLVKVDYKSIFDRRCAEEDYRPWQLHSQGEACIMGAKRIYKKRKSERKCMQGKYAGAMESEPCVCTEADFDCDYGYERHSNGQCLPAFWFNPSSLSKDCSLGQSYLNSTGYRKVVSNNCTDGVREQYTAKPQKCPGKAPRGLRIVTADGKLTAEQGHNVTLMVQLEEGDVQRTLIQVDFGDGIAVSYVNLSSMEDGIKHVYQNVGIFRVTVQVDNSLGSDSAVLYLHVTCPLEHVHLSLPFVTTKNKEVNATAVLWPSQVGTLTYVWWYGNNTEPLITLEGSISFRFTSEGMNTITVQVSAGNAILQDTKTIAVYEEFRSLRLSFSPNLDDYNPDIPEWRRDIGRVIKKSLVEATGVPGQHILVAVLPGLPTTAELFVLPYQDPAGENKRSTDDLEQISELLIHTLNQNSVHFELKPGVRVLVHAAHLTAAPLVDLTPTHSGSAMLMLLSVVFVGLAVFVIYKFKRRVALPSPPSPSTQPGDSSLRLQRARHATPPSTPKRGSAGAQYAI

SEQ ID NO: 2157 - protein, 467 aa, Homo sapiens
MEYMSTGSDNKEEIDLLIKHLNVSDVIDIMENLYASEEPAVYEPSLMTMCQDSNQNDERSKSLLLSGQEVPWLSSVRYGTVEDLLAFANHISNTAKHFYGQRPQESGILLNMVITPQNGRYQIDSDVLLIPWKLTYRNIGSDFIPRGAFGKVYLAQDIKTKKRMACKLIPVDQFKPSDVEIQACFRHENIAELYGAVLWGETVHLFMEAGEGGSVLEKLESCGPMREFEIIWVTKHVLKGLDFLHSKKVIHHDIKPSNIVFMSTKAVLVDFGLSVQMTEDVYFPKDLRGTEIYMSPEVILCRGHSTKADIYSLGATLIHMQTGTPPWVKRYPRSAYPSYLYIIHKQAPPLEDIADDCSPGMRELIEASLERNPNHRPRAADLLKHEALNPPREDQPRCQSLDSALLERKRLLSRKELELPENIADSSCTGSTEESEMLKRQRSLYIDLGALAGYFNLVRGPPTLEYG

SEQ ID NO: 2158 - protein, 582 aa, Homo sapiens
MAVPGVGLLTRLNLCARRRTRVQRPIVRLLSCPGTVAKDLRRDEQPSGSVETGFEDKIPKRRFSEMQNERREQAQRTVLIHCPEKISENKFLKYLSQFGPINNHFFYESFGLYAVVEFCQKESIGSLQNGTHTPSTAMETAIPFRSRFFNLKLKNQTSERSRVRSSNQLPRSNKQLFELLCYAESIDDQLNTLLKEFQLTEENTKLRYLTCSLIEDMAAAYFPDCIVRPFGSSVNTFGKLGCDLDMFLDLDETRNLSAHKISGNFLMEFQVKNVPSERIATQKILSVLGECLDHFGPGCVGVQKILNARCPLVRFSHQASGFQCDLTTNNRIALTSSELLYIYGALDSRVRALVFSVRCWARAHSLTSSIPGAWITNFSLTMMVIFFLQRRSPPILPTLDSLKTLADAEDKCVIEGNNCTFVRDLSRIKPSQNTETLELLLKEFFEYFGNFAFDKNSINIRQGREQNKPDSSPLYIQNPFETSLNISKNVSQSQLQKFVDLARESAWILQQEDTDRPSISSNRPWGLVSLLLPSAPNRKSFTKKKSNKFAIETVKNLLESLKGNRTENFTKTSGKRTISTQT

SEQ ID NO: 2159 - protein, 830 aa, Homo sapiens
MGLGLLLPLLLLWTRGTQGSELDPKGQHVCVASSPSAELQCCAGWRQKDQECTIPICEGPDACQKDEVCVKPGLCRCKPGFFGAHCSSRCPGQYWGPDCRESCPCHPHGQCEPATGACQCQADRWGARCEFPCACGPHGRCDPATGVCHCEPGWWSSTCRRPCQCNTAAARCEQATGACVCKPGWWGRRCSFRCNCHGSPCEQDSGRCACRPGWWGPECQQQCECVRGRCSAASGECTCPPGFRGARCELPCPAGSHGVQCAHSCGRCKHNEPCSPDTGSCESCEPGWNGTQCQQPCLPGTFGESCEQQCPHCRHGEACEPDTGHCQRCDPGWLGPRCEDPCPTGTFGEDCGSTCPTCVQGSCDTVTGDCVCSAGYWGPSCNASCPAGFHGNNCSVPCECPEGLCHPVSGSCQPGSGSRDTALIAGSLVPLLLLFLGLACCACCCWAPRSDLKDRPARDGATVSRMKLQVWGTLTSLGSTLPCRSLSSHKLPWVTVSHHDPEVPFNHSFIEPPSAGWATDDSFSSDPESGEADEVPAYCVPPQEGMVPVAQAGSSEASLAAGAFPPPEDASTPFAIPRTSSLARAKRPSVSFAEGTKFAPQSRRSSGELSSPLRKPKRLSRGAQSGPEGREAEESTGPEEAEAPESFPAAASPGDSATGHRRPPLGGRTVAEHVEAIEGSVQESSGPVTTIYMLAGKPRGSEGPVRSVFRHFGSFQKGQAEAKVKRAIPKPPRQALNRKKGSPGLASGSVGQSPNSAPKAGLPGATGPMAVRPEEAVRGLGAGTESSRRAQEPVSGCGSPEQDPQKQAEEERQEEPEYENVVPISRPPEP

SEQ ID NO: 2160 - protein, 1419 aa, Homo sapiens
MAEGLERVRISASELRGILATLAPQAGSRENMKELKEARPRKDNRRPDLEIYKPGLSRLRNKPKIKEPPGSEEFKDEIVNDRDCSAVENGTQPVKDVCKELNNQEQNGPIDPENNRGQESFPRTAGQEDRSLKIIKRTKKPDLQIYQPGRRLQTVSKESASRVEEEEVLNQVEQLRVEEDECRGNVAKEEVANKPDRAEIEKSPGGGRVGAAKGEKGKRMGKGEGVRETHDDPARGRPGSAKRYSRSDKRRNRYRTRSTSSAGSNNSAEGAGLTDNGCRRRRQDRTKERPRLKKQVSVSSTDSLDEDRIDEPDGLGPRRSSERKRHLERNWSGRGEGEQKNSAKEYRGTLRVTFDAEAMNKESPMVRSARDDMDRGKPDKGLSSGGKGSEKQESKNPKQELRGRGRGILILPAHTTLSVNSAGSPESAPLGPRLLFGSGSKGSRSWGRGGTTRRLWDPNNPDQKPALKTQTPQLHFLDTDDEVSPTSWGDSRQAQASYYKFQNSDNPYYYPRTPGPASQYPYTGYNPLQYPVGPTNGVYPGPYYPGYPTPSGQYVCSPLPTSTMSPEEVEQHMRNLQQQELHRLLRVADNQELQLSNLLSRDRISPEGLEKMAQLRAELLQLYERCILLDIEFSDNQNVDQILWKNAFYQVIEKFRQLVKDPNVENPEQIRNRLLELLDEGSDFFDSLLQKLQVTYKFKLEDYMDGLAIRSKPLRKTVKYALISAQRCMICQGDIARYREQASDTANYGKARSWYLKAQHIAPKNGRPYNQLALLAVYTRRKLDAVYYYMRSLAASNPILTAKESLMSLFEETKRKAEQMEKKQHEEFDLSPDQWRKGKKSTFRHVGDDTTRLEIWIHPSHPRSSQGTESGKDSEQENGLGSLSPSDLNKRFILSFLHAHGKLFTRIGMETFPAVAEKVLKEFQVLLQHSPSPIGSTRMLQLMTINMFAVHNSQLKDCFSEECRSVIQEQAAALGLAMFSLLVRRCTCLLKESAKAQLSSPEDQDDQDDIKVSSFVPDLKELLPSVKVWSDWMLGYPDTWNPPPTSLDLPSHVAVDVWSTLADFCNILTAVNQSEVPLYKDPDDDLTLLILEEDRLLSGFVPLLAAPQDPCYVEKTSDKVIAADCKRVTVLKYFLEALCGQEEPLLAFKGGKYVSVAPVPDTMGKEMGSQEGTRLEDEEEDVVIEDFEEDSEAEGSGGEDDIRELRAKKLALARKIAEQQRRQEKIQAVLEDHSQMRQMELEIRPLFLVPDTNGFIDHLASLARLLESRKYILVVPLIVINELDGLAKGQETDHRAGGYARVVQEKARKSIEFLEQRFESRDSCLRALTSRGNELESIAFRSEDITGQLGNNDDLILSCCLHYCKDKAKDFMPASKEEPIRLLREVVLLTDDRNLRVKALTRNVPVRDIPAFLTWAQVG

SEQ ID NO: 2161 - protein, 438 aa, Homo sapiens
MAALVVSGAAEQGGRDGPGRGRAPRGRVANQIPPEILKNPQLQAAIRVLPSNYNFEIPKTIWRIQQAQAKKVALQMPEGLLLFACTIVDILERFTEAEVMVMGDVTYGACCVDDFTARALGADFLVHYGHSCLIPMDTSAQDFRVLYVFVDIRIDTTHLLDSLRLTFPPATALALVSTIQFVSTLQAAAQELKAEYRVSVPQCKPLSPGEILGCTSPRLSKEVEAVVYLGDGRFHLESVMIANPNVPAYRYDPYSKVLSREHYDHQRMQAARQEAIATARSAKSWGLILGTLGRQGSPKILEHLESRLRALGLSFVRLLLSEIFPSKLSLLPEVDVWVQVACPRLSIDWGTAFPKPLLTPYEAAVALRDISWQQPYPMDFYAGSSLGPWTVNHGQDRRPHAPGRPARGKVQEGSARPPSAVACEDCSCRDEKVAPLAP

SEQ ID NO: 2162 - protein, 1179 aa, Homo sapiens
MWLFHTLLCIASLALLAAFNVDVARPWLTPKGGAPFVLSSLLHQDPSTNQTWLLVTSPRTKRTPGPLHRCSLVQDEILCHPVEHVPIPKGRHRGVTVVRSHHGVLICIQVLVRRPHSLSSELTGTCSLLGPDLRPQAQANFFDLENLLDPDARVDTGDCYSNKEGGGEDDVNTARQRRALEKEEEEDKEEEEDEEEEEAGTEIAIILDGSGSIDPPDFQRAKDFISNMMRNFYEKCFECNFALVQYGGVIQTEFDLRDSQDVMASLARVQNITQVGSVTKTASAMQHVLDSIFTSSHGSRRKASKVMVVLTDGGIFEDPLNLTTVINSPKMQGVERFAIGVGEEFKSARTARELNLIASDPDETHAFKVTNYMALDGLLSKLRYNIISMEGTVGDALHYQLAQIGFSAQILDERQVLLGAVGAFDWSGGALLYDTRSRRGRFLNQTAAAAADAEAAQYSYLGYAVAVLHKTCSLSYIAGAPRYKHHGAVFELQKEGREASFLPVLEGEQMGSYFGSELCPVDIDMDGSTDFLLVAAPFYHVHGEEGRVYVYRLSEQDGSFSLARILSGHPGFTNARFGFAMAAMGDLSQDKLTDVAIGAPLEGFGADDGASFGSVYIYNGHWDGLSASPSQRIRASTVAPGLQYFGMSMAGGFDISGDGLADITVGTLGQAVVFRSRPVVRLKVSMAFTPSALPIGFNGVVNVRLCFEISSVTTASESGLREALLNFTLDVDVGKQRRRLQCSDVRSCLGCLREWSSGSQLCEDLLLMPTEGELCEEDCFSNASVKVSYQLQTPEGQTDHPQPILDRYTEPFAIFQLPYEKACKNKLFCVAELQLATTVSQQELVVGLTKELTLNINLTNSGEDSYMTSMALNYPRNLQLKRMQKPPSPNIQCDDPQPVASVLIMNCRIGHPVLKRSSAHVSVVWQLEENAFPNRTADITVTVTNSNERRSLANETHTLQFRHGFVAVLSKPSIMYVNTGQGLSHHKEFLFHVHGENLFGAEYQLQICVPTKLRGLQVVAVKKLTRTQASTVCTWSQERACAYSSVQHVEEWHSVSCVIASDKENVTVAAEISWDHSEELLKDVTELQILGEISFNKSLYEGLNAENHRTKITVVFLKDEKYHSLPIIIKGSVGGLLVLIVILVILFKCGFFKRKYQQLNLESIRKAQLKSENLLEEEN

SEQ ID NO: 2163 - protein, 933 aa, Homo sapiens
MTATPESLFPTGDELDSSQLQMESDEVDTLKEGEDPADRMHPFLAIYELQSLKVHPLVFAPGVPVTAQVVGTERYTSGSKVGTCTLYSVRLTHGDFSWTTKKKYRHFQELHRDLLRHKVLMSLLPLARFAVAYSPARDAGNREMPSLPRAGPEGSTRHAASKQKYLENYLNRLLTMSFYRNYHAMTEFLEVSQLSFIPDLGRKGLEGMIRKRSGGHRVPGLTCCGRDQVCYRWSKRWLVVKDSFLLYMCLETGAISFVQLFDPGFEVQVGKRSTEARHGVRIDTSHRSLILKCSSYRQARWWAQEITELAQGPGRDFLQLHRHDSYAPPRPGTLARWFVNGAGYFAAVADAILRAQEEIFITDWWLSPEVYLKRPAHSDDWRLDIMLKRKAEEGVRVSILLFKEVELALGINSGYSKRALMLLHPNIKVMRHPDQVTLWAHHEKLLVVDQVVAFLGGLDLAYGRWDDLHYRLTDLGDSSESAASQPPTPRPDSPATPDLSHNQFFWLGKDYSNLITKDWVQLDRPFEDFIDRETTPRMPWRDVGVVVHGLPARDLARHFIQRWNFTKTTKAKYKTPTYPYLLPKSTSTANQLPFTLPGGQCTTVQVLRSVDRWSAGTLENSILNAYLHTIRESQHFLYIENQFFISCSDGRTVLNKVGDEIVDRILKAHKQGWCYRVYVLLPLLPGFEGDISTGGGNSIQAILHFTYRTLCRGEYSILHRLKAAMGTAWRDYISICGLRTHGELGGHPVSELIYIHSKVLIADDRTVIIGSANINDRSLLGKRDSELAVLIEDTETEPSLMNGAEYQAGRFALSLRKHCFGVILGANTRPDLDLRDPICDDFFQLWQDMAESNANIYEQIFRCLPSNATRSLRTLREYVAVEPLATVSPPLARSELTQVQGHLVHFPLKFLEDESLLPPLGSKEGMIPLEVWT

SEQ ID NO: 2164 - protein, 562 aa, Homo sapiens
MALSKSMHARNRYKDKPPDFAYLASKYPDFKQHVQINLNGRVSLNFKDPEAVRALTCTLLREDFGLSIDIPLERLIPTVPLRLNYIHWVEDLIGHQDSDKSTLRRGIDIGTGASCIYPLLGATLNGWYFLATEVDDMCFNYAKKNVEQNNLSDLIKVVKVPQKTLLMDALKEESEIIYDFCMCNPPFFANQLEAKGVNSRNPRRPPPSSVNTGGITEIMAEGGELEFVKRIIHDSLQLKKRLRWYSCMLGKKCSLAPLKEELRIQGVPKVTYTEFCQGRTMRWALAWSFYDDVTVPSPPSKRRKLEKPRKPITFVVLASVMKELSLKASPLRSETAEGIVVVTTWIEKILTDLKVQHKRVPCGKEEVSLFLTAIENSWIHLRRKKRERVRQLREVPRAPEDVIQALEEKKPTPKESGNSQELARGPQERTPCGPALREGEAAAVEGPCPSQESLSQEENPEPTEDERSEEKGGVEVLESCQGSSNGAQDQEASEQFGSPVAERGKRLPGVAGQYLFKCLINVKKEVDDALVEMHWVEGQNRDLMNQLCTYIRNQIFRLVAVN

SEQ ID NO: 2165 - protein, 690 aa, Homo sapiens
MGVRQQLALLLLLLLLLWGLGQPVWPVAVALTLRWLLGDPTCCVLLGLAMLARPWLGPWVPHGLSLAAAALALTLLPARLPPGLRWLPADVIFLAKILHLGLKIRGCLSRQPPDTFVDAFERRARAQPGRALLVWTGPGAGSVTFGELDARACQAAWALKAELGDPASLCAGEPTALLVLASQAVPALCMWLGLAKLGCPTAWINPHGRGMPLAHSVLSSGARVLVVDPDLRESLEEILPKLQAENIRCFYLSHTSPTPGVGALGAALDAAPSHPVPADLRAGITWRSPALFIYTSGTTGLPKPAILTHERVLQMSKMLSLSGATADDVVYTVLPLYHVMGLVVGILGCLDLGATCVLAPKFSTSCFWDDCRQHGVTVILYVGELLRYLCNIPQQPEDRTHTVRLAMGNGLRADVWETFQQRFGPIRIWEVYGSTEGNMGLVNYVGRCGALGKMSCLLRMLSPFELVQFDMEAAEPVRDNQGFCIPVGLGEPGLLLTKVVSQQPFVGYRGPRELSERKLVRNVRQSGDVYYNTGDVLAMDREGFLYFRDRLGDTFRWKGENVSTHEVEGVLSQVDFLQQVNVYGVCVPGCEGKVGMAAVQLAPGQTFDGEKLYQHVRAWLPAYATPHFIRIQDAMEVTSTFKLMKTRLVREGFNVGIVVDPLFVLDNRAQSFRPLTAEMYQAVCEGTWRL

SEQ ID NO: 2166 - protein, 309 aa, Homo sapiens
MSSTQFNKGPSYGLSAEVKNRLLSKYDPQKEAELRTWIEGLTGLSIGPDFQKGLKDGTILCTLMNKLQPGSVPKINRSMQNWHQLENLSNFIKAMVSYGMNPVDLFEANDLFESGNMTQVQVSLLALAGKAKTKGLQSGVDIGVKYSEKQERNFDDATMKAGQCVIGLQMGTNKCASQSGMTAYGTRRHLYDPKNHILPPMDHSTISLQMGTNKCASQVGMTAPGTRRHIYDTKLGTDKCDNSSMSLQMGYTQGANQSGQVFGLGRQIYDPKYCPQGTVADGAPSGTGDCPDPGEVPEYPPYYQEEAGY

SEQ ID NO: 2167 - protein, 495 aa, Homo sapiens
MSMLVVFLLLWGVTWGPVTEAAIFYETQPSLWAESESLLKPLANVTLTCQAHLETPDFQLFKNGVAQEPVHLDSPAIKHQFLLTGDTQGRYRCRSGLSTGWTQLSKLLELTGPKSLPAPWLSMAPVSWITPGLKTTAVCRGVLRGVTFLLRREGDHEFLEVPEAQEDVEATFPVHQPGNYSCSYRTDGEGALSEPSATVTIEELAAPPPPVLMHHGESSQVLHPGNKVTLTCVAPLSGVDFQLRRGEKELLVPRSSTSPDRIFFHLNAVALGDGGHYTCRYRLHDNQNGWSGDSAPVELILSDETLPAPEFSPEPESGRALRLRCLAPLEGARFALVREDRGGRRVHRFQSPAGTEALFELHNISVADSANYSCVYVDLKPPFGGSAPSERLELHVDGPPPRPQLRATWSGAVLAGRDAVLRCEGPIPDVTFELLREGETKAVKTVRTPGAAANLELIFVGPQHAGNYRCRYRSWVPHTFESELSDPVELLVAES

SEQ ID NO: 2168 - protein, 474 aa, Homo sapiens
MADSASESDTDGAGGNSSSSAAMQSSCSSTSGGGGGGGGGGGGGKSGGIVISPFRLEELTNRLASLQQENKVLKIELETYKLKCKALQEENRDLRKASVTIQARAEQEEEFISNTLFKKIQALQKEKETLAVNYEKEEEFLTNELSRKLMQLQHEKAELEQHLEQEQEFQVNKLMKKIKKLENDTISKQLTLEQLRREKIDLENTLEQEQEALVNRLWKRMDKLEAEKRILQEKLDQPVSAPPSPRDISMEIDSPENMMRHIRFLKNEVERLKKQLRAAQLQHSEKMAQYLEEERHMREENLRLQRKLQREMERREALCRQLSESESSLEMDDERYFNEMSAQGLRPRTVSSPIPYTPSPSSSRPISPGLSYASHTVGFTPPTSLTRAGMSYYNSPGLHVQHMGTSHGITRPSPRRSNSPDKFKRPTPPPSPNTQTPVQPPPPPPPPPMQPTVPSAATSQPTPSQHSAHPSSQP

SEQ ID NO: 2169 - protein, 554 aa, Homo sapiens
MARGYGATVSLVLLGLGLALAVIVLAVVLSRHQAPCGPQAFAHAAVAADSKVCSDIGRAILQQQGSPVDATIAALVCTSVVNPQSMGLGGGVIFTIYNVTTGAQWIGVPGELRGYAEAHRRHGRLPWAQLFQPTIALLRGGHVVAPVLSRFLHNSILRPSLQASTLRQLFFNGTEPLRPQDPLPWPALATTLETVATEGVEVFYTGRLGQMLVEDIAKEGSQLTLQDLAKFQPEVVDALEVPLGDYTLYSPPPPAGGAILSFILNVLRGFNFSTESMARPEGRVNVYHHLVETLKFAKGQRWRLGDPRSHPKLQNASRDLLGETLAQLIRQQIDGRGDHQLSHYSLAEAWGHGTGTSHVSVLGEDGSAVAATSTINTPFGAMVYSPRTGIILNNELLDLCERCPRGSGTTPSPVSGDRVGGAPGRCWPPVPGERSPSSMVPSILINKAQGSKLVIGGAGGELIISAVAQAIMSKLWLGFDLRAAIAAPILHVNSKGCVEYEPNFSQEVQRGLQDRGQNQTQRPFFLNVVQAVSQEGACVYAVSDLRKSGEAAGY

SEQ ID NO: 2170 - protein, 2220 aa, Homo sapiens
MIRIAALNASSTIEDDHEGSFKSHKTQTKEAQEAEAFALYHKALDLQKHDRFEESAKAYHELLEASLLREAVSSGDEKEGLKHPGLILKYSTYKNLAQLAAQREDLETAMEFYLEAVMLDSTDVNLWYKIGHVALRLIRIPLARHAFEEGLRCNPDHWPCLDNLITVLYTLSDYTTCLYFICKALEKDCRYSKGLVLKEKIFEEQPCLRKDSLRMFLKCDMSIHDVSVSAAETQAIVDEALGLRKKRQALIVREKEPDLKLVQPIPFFTWKCLGESLLAMYNHLTTCEPPRPSLGKRIDLSDYQDPSQPLESSMVVTPVNVIQPSTVSTNPAVAVAEPVVSYTSVATTSFPLHSPGLLETGAPVGDISGGDKSKKGVKRKKISEESGETAKRRSARVRNTKCKKEEKVDFQELLMKFLPSRLRKLDPEEEDDSFNNYEVQSEAKLESFPSIGPQRLSFDSATFMESEKQDVHEFLLENLTNGGILELMMRYLKAMGHKFLVRWPPGLAEVVLSVYHSWRRHSTSLPNPLLRDCSNKHIKDMMLMSLSCMELQLDQWLLTKGRSSAVSPRNCPAGMVNGRFGPDFPGTHCLGDLLQLSFASSQRDLFEDGWLEFVVRVYWLKARFLALQGDMEQALENYDICTEMLQSSTAIQVEAGAERRDIVIRLPNLHNDSVVSLEEIDKNLKSLERCQSLEEIQRLYEAGDYKAVVHLLRPTLCTSGFDRAKHLEFMTSIPERPAQLLLLQDSLLRLKDYRQCFECSDVALNEAVQQMVNSGEAAAKEEWVATVTQLLMGIEQALSADSSGSILKVSSSTTGLVRLTNNLIQVIDCSMAVQEEAKEPHVSSVLPWIILHRIIWQEEDTFHSLCHQQQLQNPAEEGMSETPMLPSSLMLLNTAHEYLGRRSWCCNSDGALLRFYVRVLQKELAASTSEDTHPYKEELETALEQCFYCLYSFPSKKSKARYLEEHSAQQVDLIWEDALFMFEYFKPKTLPEFDSYKTSTVSADLANLLKRIATIVPRTERPALSLDKVSAYIEGTSTEVPCLPEGADPSPPVVNELYYLLADYHFKNKEQSKAIKFYMHDICICPNRFDSWAGMALARASRIQDKLNSNELKSDGPIWKHATPVLNCFRRALEIDSSNLSLWIEYGTMSYALHSFASRQLKQWRGELPPELVQQMEGRRDSMLETAKHCFTSAARCEGDGDEEEWLIHYMLGKVAEKQQQPPTVYLLHYRQAGHYLHEEAARYPKKIHYHNPPELAMEALEVYFRLHASILKLLGKPDSGVGAEVLVNFMKEAAEGPFARGEEKNTPKASEKEKACLVDEDSHSSAGTLPGPGASLPSSSGPGLTSPPYTATPIDHDYVKCKKPHQQATPDDRSQDSTAVALSDSSSTQDFFNEPTSLLEGSRKSYTEKRLPILSSQAGATGKDLQGATEERGKNEESLESTEGFRAAEQGVQKPAAETPASACIPGKPSASTPTLWDGKKRGDLPGEPVAFPQGLPAGAEEQRQFLTEQCIASFRLCLSRFPQHYKSLYRLAFLYTYSKTHRNLQWARDVLLGSSIPWQQLQHMPAQGLFCERNKTNFFNGIWRIPVDEIDRPGSFAWHMNRSIVLLLKVLAQLRDHSTLLKVSSMLQRTPDQGKKYLRDADRQVLAQRAFILTVKVLEDTLSELAEGSERPGPKVCGLPGARMTTDVSHKASPEDGQEGLPQPKKPPLADGSGPGPEPGGKVGLLNHRPVAMDAGDSADQSGERKDKESPRAGPTEPMDTSEATVCHSDLERTPPLLPGRPARDRGPESRPTELSLEELSISARQQPTPLTPAQPAPAPAPATTTGTRAGGHPEEPLSRLSRKRKLLEDTESGKTLLLDAYRVWQQGQKGVAYDLGRVERIMSETYMLIKQVDEEAALEQAVKFCQVHLGAAAQRQASGDTPTTPKHPKDSRENFFPVTVVPTAPDPVPADSVQRPSDAHTKPRPALAAATTIITCPPSASASTLDQSKDPGPPRPHRPEATPSMASLGPEGEELARVAEGTSFPPQEPRHSPQVKMAPTSSPAEPHCWPAEAALGTGAEPTCSQEGKLRPEPRRDGEAQEAASETQPLSSPPTAASSKAPSSGSAQPPEGHPGKPEPSRAKSRPLPNMPKLVIPSAATKFPPEITVTPPTPTLLSPKGSISEETKQKLKSAILSAQSAANVRKESLCQPALEVLETSSQESSLESETDEDDDYMDI

SEQ ID NO: 2171 - protein, 286 aa, Homo sapiens
MADFDDRVSDEEKVRIAAKFITHAPPGEFNEVFNDVRLLLNNDNLLREGAAHAFAQYNMDQFTPVKIEGYEDQVLITEHGDLGNSRFLDPRNKISFKFDHLRKEASDPQPEEADGGLKSWRESCDSALRAYVKDHYSNGFCTVYAKTIDGQQTIIACIESHQFQPKNFWNGRWRSEWKFTITPPTAQVVGVLKIQVHYYEDGNVQLVSHKDVQDSLTVSNEAQTAKEFIKIIENAENEYQTAISENYQTMSDTTFKALRRQLPVTRTKIDWNKILSYKIGKEMQNA

SEQ ID NO: 2172 - protein, 551 aa, Homo sapiens
MEEAELVKGRLQAITDKRKIQEEISQKRLKIEEDKLKHQHLKKKALREKWLLDGISSGKEQEEMKKQNQQDQHQIQVLEQSILRLEKEIQDLEKAELQISTKEEAILKKLKSIERTTEDIIRSVKVEREERAEESIEDIYANIPDLPKSYIPSRLRKEINEEKEDDEQNRKALYAMEIKVEKDLKTGESTVLSSIPLPSDDFKGTGIKVYDDGQKSVYAVSSNHSAAYNGTDGLAPVEVEELLRQASERNSKSPTEYHEPVYANPFYRPTTPQRETVTPGPNFQERIKIKTNGLGIGVNESIHNMGNGLSEERGNNFNHISPIPPVPHPRSVIQQAEEKLHTPQKRLMTPWEESNVMQDKDAPSPKPRLSPRETIFGKSEHQNSSPTCQEDEEDVRYNIVHSLPPDINDTEPVTMIFMGYQQAEDSEEDKKFLTGYDGIIHAELVVIDDEEEEDEGEAEKPSYHPIAPHSQVYQPAKPTPLPRKRSEASPHENTNHKSPHKNSISLKEQEESLGSPVHHSPFDAQTTGDGTEDPSLTALRMRMAKLGKKVI

SEQ ID NO: 2173 - protein, 550 aa, Homo sapiens
MVPKADSGAFLLLFLLVLTVTEPLRPELRCNPGQFACRSGTIQCIPLPWQCDGWATCEDESDEANCPEVTGEVRPHHGKEAVDPRQGRARGGDPSHFHAVNVAQPVRFSSFLGKCPTGWHHYEGTASCYRVYLSGENYWDAAQTCQRLNGSLATFSTDQELRFVLAQEWDQPERSFGWKDQRKLWVGYQYVITGRNRSLEGRWEVAFKGSSEVFLPPDPIFASAMSENDNVFCAQLQCFHFPTLRHHDLHSWHAESCYEKSSFLCKRSQTCVDIKDNVVDEGFYFTPKGDDPCLSCTCHGGEPEMCVAALCERPQGCQQYRKDPKECCKFMCLDPDGNSLFDSMASGMRLVVSCISSFLILSLLLFMVHRLRQRRRERIESLIGANLHHFNLGRRIPGFDYGPDGFGTGLTPLHLSDDGEGGTFHFHDPPPPYTAYKYPDIGQPDDPPPPYEASIHPDSVFYDPADDDAFEPVEVSLPAPGDGGSEGALLRRLEQPLPTAGASLADLEDSADSSSALLVPPDPAQSGSTPAAEALPGGGRHSRSSLNTVV

SEQ ID NO: 2174 - protein, 307 aa, Homo sapiens
MFSFNMFDHPIPRVFQNRFSTQYRCFSVSMLAGPNDRSDVEKGGKIIMPPSALDQLSRLNITYPMLFKLTNKNSDRMTHCGVLEFVADEGICYLPHWMMQNLLLEEGGLVQVESVNLQVATYSKFQPQSPDFLDITNPKAVLENALRNFACLTTGDVIAINYNEKIYELRVMETKPDKAVSIIECDMNVDFDAPLGYKEPERQVQHEESTEGEADHSGYAGELGFRAFSGSGNRLDGKKKGVEPSPSPIKPGDIKRGIPNYEFKLGKITFIRNSRPLVKKVEEDEAGGRFVAFSGEGQSLRKKGRKP

SEQ ID NO: 2175 - protein, 788 aa, Homo sapiens
MDVSGQETDWRSTAFRQKLVSQIEDAMRKAGVAHSKSSKDMESHVFLKAKTRDEYLSLVARLIIHFRDIHNKKSQASVSDPMNALQSLTGGPAAGAAGIGMPPRGPGQSLGGMGSLGAMGQPMSLSGQPPPGTSGMAPHSMAVVSTATPQTQLQLQQVALQQQQQQQQFQQQQQAALQQQQQQQQQQQFQAQQSAMQQQFQAVVQQQQQLQQQQQQQQHLIKLHHQNQQQIQQQQQQLQRIAQLQLQQQQQQQQQQQQQQQQALQAQPPIQQPPMQQPQPPPSQALPQQLQQMHHTQHHQPPPQPQQPPVAQNQPSQLPPQSQTQPLVSQAQALPGQMLYTQPPLKFVRAPMVVQQPPVQPQVQQQQTAVQTAQAAQMVAPGVQMITEALAQGGMHIRARFPPTTAVSAIPSSSIPLGRQPMAQVSQSSLPMLSSPSPGQQVQTPQSMPPPPQPSPQPGQPSSQPNSNVSSGPAPSPSSFLPSPSPQPSQSPVTARTPQNFSVPSPGPLNTPVNPSSVMSPAGSSQAEEQQYLDKLKQLSKYIEPLRRMINKIDKNEDRKKDLSKMKSLLDILTDPSKRCPLKTLQKCEIALEKLKNDMAVPTPPPPPVPPTKQQYLCQPLLDAVLANIRSPVFNHSLYRTFVPAMTAIHGPPITAPVVCTRKRRLEDDERQSIPSVLQGEVARLDPKFLVNLDPSHCSNNGTVHLICKLDDKDLPSVPPLELSVPADYPAQSPLWIDRQWQYDANPFLQSVHRCMTSRLLQLPDKHSVTALLNTWAQSVHQACLSAA

SEQ ID NO: 2176 - protein, 1017 aa, Homo sapiens
MKLLKPTWVNHNGKPIFSVDIHPDGTKFATGGQGQDSGKVVIWNMSPVLQEDDEKDENIPKMLCQMDNHLACVNCVRWSNSGMYLASGGDDKLIMVWKRATYIGPSTVFGSSGKLANVEQWRCVSILRNHSGDVMDVAWSPHDAWLASCSVDNTVVIWNAVKFPEILATLRGHSGLVKGLTWDPVGKYIASQADDRSLKVWRTLDWQLETSITKPFDECGGTTHVLRLSWSPDGHYLVSAHAMNNSGPTAQIIEREGWKTNMDFVGHRKAVTVVKFNPKIFKKKQKNGSSAKPSCPYCCCAVGSKDRSLSVWLTCLKRPLVVIHELFDKSIMDISWTLNGLGILVCSMDGSVAFLDFSQDELGDPLSEEEKSRIHQSTYGKSLAIMTEAQLSTAVIENPEMLKYQRRQQQQQLDQKSAATREMGSATSVAGVVNGESLEDIRKNLLKKQVETRTADGRRRITPLCIAQLDTGDFSTAFFNSIPLSGSLAGTMLSSHSSPQLLPLDSSTPNSFGASKPCTEPVVAASARPAGDSVNKDSMNATSTPAALSPSVLTTPSKIEPMKAFDSRFTERSKATPGAPALTSMTPTAVERLKEQNLVKELRPRDLLESSSDSDEKVPLAKASSLSKRKLELEVETVEKKKKGRPRKDSRLMPVSLSVQSPAALTAEKEAMCLSAPALALKLPIPSPQRAFTLQVSSDPSMYIEVENEVTVVGGVKLSRLKCNREGKEWETVLTSRILTAAGSCDVVCVACEKRMLSVFSTCGRRLLSPILLPSPISTLHCTGSYVMALTAAATLSVWDVHRQVVVVKEESLHSILAGSDMTVSQILLTQHGIPVMNLSDGKAYCFNPSLSTWNLVSDKQDSLAQCADFRSSLPSQDAMLCSGPLAIIQGRTSNSGRQAARLFSVPHVVQQETTLAYLENQVAAALTLQSSHEYRHWLLVYARYLVNEGFEYRLREICKDLLGPVHYSTGSQWESTVVGLRKRELLKELLPVIGQNLRFQRLFTECQEQLDILRDK

SEQ ID NO: 2177 - protein, 773 aa, Homo sapiens
METDESPSPLPCGPAGEAVMESRARPFQALPREQSPPPPLQTSSGAEVMDVGSGGDGQSELPAEDPFNFYGASLLSKGSFSKGRLLIDPNCSGHSPRTARHAPAVRKFSPDLKLLKDVKISVSFTESCRSKDRKVLYTGAERDVRAECGLLLSPVSGDVHACPFGGSVGDGVGIGGESADKKDEENELDQEKRVEYAVLDELEDFTDNLELDEEGAGGFTAKAIVQRDRVDEEALNFPYEDDFDNDVDALLEEGLCAPKKRRTEEKYGGDSDHPSDGETSVQPMMTKIKTVLKSRGRPPTEPLPDGWIMTFHNSGVPVYLHRESRVVTWSRPYFLGTGSIRKHDPPLSSIPCLHYKKMKDNEEREQSSDLTPSGDVSPVKPLSRSAELEFPLDEPDSMGADPGPPDEKDPLGAEAAPGALGQVKAKVEVCKDESVDLEEFRSYLEKRFDFEQVTVKKFRTWAERRQFNREMKRKQAESERPILPANQKLITLSVQDAPTKKEFVINPNGKSEVCILHEYMQRVLKVRPVYNFFECENPSEPFGASVTIDGVTYGSGTASSKKLAKNKAARATLEILIPDFVKQTSEEKPKDSEELEYFNHISIEDSRVYELTSKAGLLSPYQILHECLKRNHGMGDTSIKFEVVPGKNQKSEYVMACGKHTVRGWCKNKRVGKQLASQKILQLLHPHVKNWGSLLRMYGRESSKMVKQETSDKSVIELQQYAKKNKPNLHILSKLQEEMKRLAEEREETRKKPKMSIVASAQPGGEPLCTVDV

SEQ ID NO: 2178 - protein, 454 aa, Homo sapiens
MSSGAPQKSSPMASGAEETPGFLDTLLQDFPALLNPEDPLPWKAPGTVLSQEEVEGELAELAMGFLGSRKAPPPLAAALAHEAVSQLLQTDLSEFRKLPREEEEEEEDDDEEEKAPVTLLDAQSLAQSFFNRLWEVAGQWQKQVPLAARASQRQWLVSIHAIRNTRRKMEDRHVSLPSFNQLFGLSDPVNRAYFAVFDGHGGVDAARYAAVHVHTNAARQPELPTDPEGALREAFRRTDQMFLRKAKRERLQSGTTGVCALIAGATLHVAWLGDSQVILVQQGQVVKLMEPHRPERQDEKARIEALGGFVSHMDCWRVNGTLAVSRAIGDVFQKPYVSGEADAASRALTGSEDYLLLACDGFFDVVPHQEVVGLVQSHLTRQQGSGLRVAEELVAAARERGSHDNITVMVVFLRDPQELLEGGNQGEGDPQAEGRRQDLPSSLPEPETQAPPRS

SEQ ID NO: 2179 - protein, 238 aa, Homo sapiens
MAQQQMTSSQKALMLELKSLQEEPVEGFRITLVDESDLYNWEVAIFGPPNTLYEGGYFKAHIKFPIDYPYSPPTFRFLTKMWHPNIYENGDVCISILHPPVDDPQSGELPSERWNPTQNVRTILLSVISLLNEPNTFSPANVDASVMFRKWRDSKGKDKEYAEIIRKQVSATKAEAEKDGVKVPTTLAEYCIKTKVPSNDNSSDLLYDDLYDDDIDDEDEEEEDADCYDDDDSGNEES

SEQ ID NO: 2180 - protein, 418 aa, Homo sapiens
MAGRLPACVVDCGTGYTKLGYAGNTEPQFIIPSCIAIKESAKVGDQAQRRVMKGVDDLDFFIGDEAIEKPTYATKWPIRHGIVEDWDLMERFMEQVIFKYLRAEPEDHYFLLTEPPLNTPENREYTAEIMFESFNVPGLYIAVQAVLALAASWTSRQVGERTLTGTVIDSGDGVTHVIPVAEGYVIGSCIKHIPIAGRDITYFIQQLLRDREVGIPPEQSLETAKAVKERYSYVCPDLVKEFNKYDTDGSKWIKQYTGINAISKKEFSIDVGYERFLGPEIFFHPEFANPDFTQPISEVVDEVIQNCPIDVRRPLYKNIVLSGGSTMFRDFGRRLQRDLKRTVDARLKLSEELSGGRLKPKPIDVQVITHHMQRYAVWFGGSMLASTPEFYQVCHTKKDYEEIGPSICRHNPVFGVMS

SEQ ID NO: 2181 - protein, 670 aa, Homo sapiens
MSHLPMKLLRKKIEKRNLKLRQRNLKFQGASNLTLSETQNGDVSEETMGSRKVKKSKQKPMNVGLSETQNGGMSQEAVGNIKVTKSPQKSTVLTNGEAAMQSSNSESKKKKKKKRKMVNDAEPDTKKAKTENKGKSEEESAETTKETENNVEKPDNDEDESEVPSLPLGLTGAFEDTSFASLCNLVNENTLKAIKEMGFTNMTEIQHKSIRPLLEGRDLLAAAKTGSGKTLAFLIPAVELIVKLRFMPRNGTGVLILSPTRELAMQTFGVLKELMTHHVHTYGLIMGGSNRSAEAQKLGNGINIIVATPGRLLDHMQNTPGFMYKNLQCLVIDEADRILDVGFEEELKQIIKLLPTRRQTMLFSATQTRKVEDLARISLKKEPLYVGVDDDKANATVDGLEQGYVVCPSEKRFLLLFTFLKKNRKKKLMVFFSSCMSVKYHYELLNYIDLPVLAIHGKQKQNKRTTTFFQFCNADSGTLLCTDVAARGLDIPEVDWIVQYDPPDDPKEYIHRVGRTARGLNGRGHALLILRPEELGFLRYLKQSKVPLSEFDFSWSKISDIQSQLEKLIEKNYFLHKSAQEAYKSYIRAYDSHSLKQIFNVNNLNLPQVALSFGFKVPPFVDLNVNSNEGKQKKRGGGGGFGYQKTKKVEKSKIFKHISKKSSDSRQFSH

SEQ ID NO: 2182 - protein, 516 aa, Homo sapiens
MGDPSKQDILTIFKRLRSVPTNKVCFDCGAKNPSWASITYGVFLCIDCSGSHRSLGVHLSFIRSTELDSNWSWFQLRCMQVGGNASASSFFHQHGCSTNDTNAKYNSRAAQLYREKIKSLASQATRKHGTDLWLDSCVVPPLSPPPKEEDFFASHVSPEVSDTAWASAIAEPSSLTSRPVETTLENNEGGQEQGPSVEGLNVPTKATLEVSSIIKKKPNQAKKGLGAKKGSLGAQKLANTCFNEIEKQAQAADKMKEQEDLAKVVSKEESIVSSLRLAYKDLEIQMKKDEKMNISGKKNVDSDRLGMGFGNCRSVISHSVTSDMQTIEQESPIMAKPRKKYNDDSDDSYFTSSSSYFDEPVELRSSSFSSWDDSSDSYWKKETSKDTETVLKTTGYSDRPTARRKPDYEPVENTDEAQKKFGNVKAISSDMYFGRQSQADYETRARLERLSASSSISSADLFEEPRKQPAGNYSLSSVLPNAPDMAQFKQGVRSVAGKLSVFANGVVTSIQDRYGS

SEQ ID NO: 2183 - protein, 486 aa, Homo sapiens
MSVTYDDSVGVEVSSDSFWEVGNYKRTVKRIDDGHRLCSDLMNCLHERARIEKAYAQQLTEWARRWRQLVEKGPQYGTVEKAWMAFMSEAERVSELHLEVKASLMNDDFEKIKNWQKEAFHKQMMGGFKETKEAEDGFRKAQKPWAKKLKEVEAAKKAHHAACKEEKLAISREANSKADPSLNPEQLKKLQDKIEKCKQDVLKTKEKYEKSLKELDQGTPQYMENMEQVFEQCQQFEEKRLRFFREVLLEVQKHLDLSNVAGYKAIYHDLEQSIRAADAVEDLRWFRANHGPGMAMNWPQFEEWSADLNRTLSRREKKKATDGVTLTGINQTGDQSLPSKPSSTLNVPSNPAQSAQSQSSYNPFEDEDDTGSTVSEKDDTKAKNVSSYEKTQSYPTDWSDDESNNPFSSTDANGDSNPFDDDATSGTEVRVRALYDYEGQEHDELSFKAGDELTKMEDEDEQGWCKGRLDNGQVGLYPANYVEAIQ

SEQ ID NO: 2184 - protein, 2414 aa, Homo sapiens
MAENVVEPGPPSAKRPKLSSPALSASASDGTDFGSLFDLEHDLPDELINSTELGLTNGGDINQLQTSLGMVQDAASKHKQLSELLRSGSSPNLNMGVGGPGQVMASQAQQSSPGLGLINSMVKSPMTQAGLTSPNMGMGTSGPNQGPTQSTGMMNSPVNQPAMGMNTGMNAGMNPGMLAAGNGQGIMPNQVMNGSIGAGRGRQNMQYPNPGMGSAGNLLTEPLQQGSPQMGGQTGLRGPQPLKMGMMNNPNPYGSPYTQNPGQQIGASGLGLQIQTKTVLSNNLSPFAMDKKAVPGGGMPNMGQQPAPQVQQPGLVTPVAQGMGSGAHTADPEKRKLIQQQLVLLLHAHKCQRREQANGEVRQCNLPHCRTMKNVLNHMTHCQSGKSCQVAHCASSRQIISHWKNCTRHDCPVCLPLKNAGDKRNQQPILTGAPVGLGNPSSLGVGQQSAPNLSTVSQIDPSSIERAYAALGLPYQVNQMPTQPQVQAKNQQNQQPGQSPQGMRPMSNMSASPMGVNGGVGVQTPSLLSDSMLHSAINSQNPMMSENASVPSLGPMPTAAQPSTTGIRKQWHEDITQDLRNHLVHKLVQAIFPTPDPAALKDRRMENLVAYARKVEGDMYESANNRAEYYHLLAEKIYKIQKELEEKRRTRLQKQNMLPNAAGMVPVSMNPGPNMGQPQPGMTSNGPLPDPSMIRGSVPNQMMPRITPQSGLNQFGQMSMAQPPIVPRQTPPLQHHGQLAQPGALNPPMGYGPRMQQPSNQGQFLPQTQFPSQGMNVTNIPLAPSSGQAPVSQAQMSSSSCPVNSPIMPPGSQGSHIHCPQLPQPALHQNSPSPVPSRTPTPHHTPPSIGAQQPPATTIPAPVPTPPAMPPGPQSQALHPPPRQTPTPPTTQLPQQVQPSLPAAPSADQPQQQPRSQQSTAASVPTPTAPLLPPQPATPLSQPAVSIEGQVSNPPSTSSTEVNSQAIAEKQPSQEVKMEAKMEVDQPEPADTQPEDISESKVEDCKMESTETEERSTELKTEIKEEEDQPSTSATQSSPAPGQSKKKIFKPEELRQALMPTLEALYRQDPESLPFRQPVDPQLLGIPDYFDIVKSPMDLSTIKRKLDTGQYQEPWQYVDDIWLMFNNAWLYNRKTSRVYKYCSKLSEVFEQEIDPVMQSLGYCCGRKLEFSPQTLCCYGKQLCTIPRDATYYSYQNRYHFCEKCFNEIQGESVSLGDDPSQPQTTINKEQFSKRKNDTLDPELFVECTECGRKMHQICVLHHEIIWPAGFVCDGCLKKSARTRKENKFSAKRLPSTRLGTFLENRVNDFLRRQNHPESGEVTVRVVHASDKTVEVKPGMKARFVDSGEMAESFPYRTKALFAFEEIDGVDLCFFGMHVQEYGSDCPPPNQRRVYISYLDSVHFFRPKCLRTAVYHEILIGYLEYVKKLGYTTGHIWACPPSEGDDYIFHCHPPDQKIPKPKRLQEWYKKMLDKAVSERIVHDYKDIFKQATEDRLTSAKELPYFEGDFWPNVLEESIKELEQEEEERKREENTSNESTDVTKGDSKNAKKKNNKKTSKNKSSLSRGNKKKPGMPNVSNDLSQKLYATMEKHKEVFFVIRLIAGPAANSLPPIVDPDPLIPCDLMDGRDAFLTLARDKHLEFSSLRRAQWSTMCMLVELHTQSQDRFVYTCNECKHHVETRWHCTVCEDYDLCITCYNTKNHDHKMEKLGLGLDDESNNQQAAATQSPGDSRRLSIQRCIQSLVHACQCRNANCSLPSCQKMKRVVQHTKGCKRKTNGGCPICKQLIALCCYHAKHCQENKCPVPFCLNIKQKLRQQQLQHRLQQAQMLRRRMASMQRTGVVGQQQGLPSPTPATPTTPTGQQPTTPQTPQPTSQPQPTPPNSMPPYLPRTQAAGPVSQGKAAGQVTPPTPPQTAQPPLPGPPPAAVEMAMQIQRAAETQRQMAHVQIFQRPIQHQMPPMTPMAPMGMNPPPMTRGPSGHLEPGMGPTGMQQQPPWSQGGLPQPQQLQSGMPRPAMMSVAQHGQPLNMAPQPGLGQVGISPLKPGTVSQQALQNLLRTLRSPSSPLQQQQVLSILHANPQLLAAFIKQRAAKYANSNPQPIPGQPGMPQGQPGLQPPTMPGQQGVHSNPAMQNMNPMQAGVQRAGLPQQQPQQQLQPPMGGMSPQAQQMNMNHNTMPSQFRDILRRQQMMQQQQQQGAGPGIGPGMANHNQFQQPQGVGYPPQQQQRMQHHMQQMQQGNMGQIGQLPQALGAEAGASLQAYQQRLLQQQMGSPVQPNPMSPQQHMLPNQAQSPHLQGQQIPNSLSNQVRSPQPVPSPRPQSQPPHSSPSPRMQPQPSPHHVSPQTSSPHPGLVAAQANPMEQGHFASPDQNSMLSQLASNPGMANLHGASATDLGLSTDNSDLNSNLSQSTLDIH

SEQ ID NO: 2185 - protein, 168 aa, Homo sapiens
MEPPNLYPVKLYVYDLSKGLARRLSPIMLGKQLEGIWHTSIVVHKDEFFFGSGGISSCPPGGTLLGPPDSVVDVGSTEVTEEIFLEYLSSLGESLFRGEAYNLFEHNCNTFSNEVAQFLTGRKIPSYITDLPSEVLSTPFGQALRPLLDSIQIQPPGGSSVGRPNGQS

SEQ ID NO: 2186 - protein, 1336 aa, Homo sapiens
MRGAGGPRGPRGPAKMLLLLALACASPFPEEAPGPGGAGGPGGGLGGARPLNVALVFSGPAYAAEAARLGPAVAAAVRSPGLDVRPVALVLNGSDPRSLVLQLCDLLSGLRVHGVVFEDDSRAPAVAPILDFLSAQTSLPIVAVHGGAALVLTPKEKGSTFLQLGSSTEQQLQVIFEVLEEYDWTSFVAVTTRAPGHRAFLSYIEVLTDGSLVGWEHRGALTLDPGAGEAVLSAQLRSVSAQIRLLFCAREEAEPVFRAAEEAGLTGSGYVWFMVGPQLAGGGGSGAPGEPPLLPGGAPLPAGLFAVRSAGWRDDLARRVAAGVAVVARGAQALLRDYGFLPELGHDCRAQNRTHRGESLHRYFMNITWDNRDYSFNEDGFLVNPSLVVISLTRDRTWEVVGSWEQQTLRLKYPLWSRYGRFLQPVDDTQHLTVATLEERPFVIVEPADPISGTCIRDSVPCRSQLNRTHSPPPDAPRPEKRCCKGFCIDILKRLAHTIGFSYDLYLVTNGKHGKKIDGVWNGMIGEVFYQRADMAIGSLTINEERSEIVDFSVPFVETGISVMVARSNGTVSPSAFLEPYSPAVWVMMFVMCLTVVAVTVFIFEYLSPVGYNRSLATGKRPGGSTFTIGKSIWLLWALVFNNSVPVENPRGTTSKIMVLVWAFFAVIFLASYTANLAAFMIQEEYVDTVSGLSDRKFQRPQEQYPPLKFGTVPNGSTEKNIRSNYPDMHSYMVRYNQPRVEEALTQLKAGKLDAFIYDAAVLNYMARKDEGCKLVTIGSGKVFATTGYGIALHKGSRWKRPIDLALLQFLGDDEIEMLERLWLSGICHNDKIEVMSSKLDIDNMAGVFYMLLVAMGLSLLVFAWEHLVYWRLRHCLGPTHRMDFLLAFSRGMYSCCSAEAAPPPAKPPPPPQPLPSPAYPAPRPAPGPAPFVPRERASVDRWRRTKGAGPPGGAGLADGFHRYYGPIEPQGLGLGLGEARAAPRGAAGRPLSPPAAQPPQKPPPSYFAIVRDKEPAEPPAGAFPGFPSPPAPPAAAATAVGPPLCRLAFEDESPPAPARWPRSDPESQPLLGPGAGGAGGTGGAGGGAPAAPPPCRAAPPPCPYLDLEPSPSDSEDSESLGGASLGGLEPWWFADFPYPYAERLGPPPGRYWSVDKLGGWRAGSWDYLPPRSGPAAWHCRHCASLELLPPPRHLSCSHDGLDGGWWAPPPPPWAAGPLPRRRARCGCPRSHPHRPRASHRTPAAAAPHHHRHRRAAGGWDLPPPAPTSRSLEDLSSCPRAAPARRLTGPSRHARRCPHAAHWGPPLPTASHRRHRGGDLGTRRGSAHFSSLESEV

SEQ ID NO: 2187 - protein, 142 aa, Homo sapiens
MIRFILIQNRAGKTRLAKWYMQFDDDEKQKLIEEVHAVVTVRDAKHTNFVEFRNFKIIYRRYAGLYFCICVDVNDNNLAYLEAIHNFVEVLNEYFHNVCELDLVFNFYKVYTVVDEMFLAGEIRETSQTKVLKQLLMLQSLE

SEQ ID NO: 2188 - protein, 156 aa, Homo sapiens
MIRFILIQNRAGKTRLAKWYMQFDDDEKQKLIEEVHAVVTVRDAKHTNFVEVLAISVADSLSVLQFRNFKIIYRRYAGLYFCICVDVNDNNLAYLEAIHNFVEVLNEYFHNVCELDLVFNFYKVYTVVDEMFLAGEIRETSQTKVLKQLLMLQSLE

SEQ ID NO: 2189 - protein, 919 aa, Homo sapiens
MQRSIMSFFHPKKEGKAKKPEKEASNSSRETEPPPKAALKEWNGVVSESDSPVKRPGRKAARVLGSEGEEEDEALSPAKGQKPALDCSQVSPPRPATSPENNASLSDTSPMDSSPSGIPKRRTARKQLPKRTIQEVLEEQSEDEDREAKRKKEEEEEETPKESLTEAEVATEKEGEDGDQPTTPPKPLKTSKAETPTESVSEPEVATKQELQEEEEQTKPPRRAPKTLSSFFTPRKPAVKKEVKEEEPGAPGKEGAAEGPLDPSGYNPAKNNYHPVEDACWKPGQKVPYLAVARTFEKIEEVSARLRMVETLSNLLRSVVALSPPDLLPVLYLSLNHLGPPQQGLELGVGDGVLLKAVAQATGRQLESVRAEAAEKGDVGLVAENSRSTQRLMLPPPPLTASGVFSKFRDIARLTGSASTAKKIDIIKGLFVACRHSEARFIARSLSGRLRLGLAEQSVLAALSQAVSLTPPGQEFPPAMVDAGKGKTAEARKTWLEEQGMILKQTFCEVPDLDRIIPVLLEHGLERLPEHCKLSPGIPLKPMLAHPTRGISEVLKRFEEAAFTCEYKYDGQRAQIHALEGGEVKIFSRNQEDNTGKYPDIISRIPKIKLPSVTSFILDTEAVAWDREKKQIQPFQVLTTRKRKEVDASEIQVQVCLYAFDLIYLNGESLVREPLSRRRQLLRENFVETEGEFVFATSLDTKDIEQIAEFLEQSVKDSCEGLMVKTLDVDATYEIAKRSHNWLKLKKDYLDGVGDTLDLVVIGAYLGRGKRAGRYGGFLLASYDEDSEELQAICKLGTGFSDEELEEHHQSLKALVLPSPRPYVRIDGAVIPDHWLDPSAVWEVKCADLSLSPIYPAARGLVDSDKGISLRFPRFIRVREDKQPEQATTSAQVACLYRKQSQIQNQQGEDSGSDPEDTY

SEQ ID NO: 2190 - protein, 179 aa, Homo sapiens
MVVGAFPMAKLLYLGIRQVSKPLANRIKEAARRSEFFKTYICLPPAQLYHWVEMRTKMRIMGFRGTVIKPLNEEAAAELGAELLGEATIFIVGGGCLVLEYWRHQAQQRHKEEEQRAAWNALRDEVGHLALALEALQAQVQAAPPQGALEELRTELQEVRAQLCNPGRSASHAVPASKK

SEQ ID NO: 2191 - protein, 543 aa, Homo sapiens
MFSWLKRGGARGQQPEAIRTVTSALKELYRTKLLPLEEHYRFGAFHSPALEDADFDGKPMVLVAGQYSTGKTSFIQYLLEQEVPGSRVGPEPTTDCFVAVMHGDTEGTVPGNALVVDPDKPFRKLNPFGNTFLNRFMCAQLPNQVLESISIIDTPGILSGAKQRVSRGYDFPAVLRWFAERVDLIILLFDAHKLEISDEFSEAIGALRGHEDKIRVVLNKADMVETQQLMRVYGALMWALGKVVGTPEVLRVYIGSFWSQPLLVPDNRRLFELEEQDLFRDIQGLPRHAALRKLNDLVKRARLVRVHAYIISYLKKEMPSVFGKENKKKQLILKLPVIFAKIQLEHHISPGDFPDCQKMQELLMAHDFTKFHSLKPKLLEALDEMLTHDIAKLMPLLRQEELESTEVGVQGGAFEGTHMGPFVERGPDEAMEDGEEGSDDEAEWVVTKDKSKYDEIFYNLAPADGKLSGSKAKTWMVGTKLPNSVLGRIWKLSDVDRDGMLDDEEFALASHLIEAKLEGHGLPANLPRRLVPPSKRRHKGSAE

SEQ ID NO: 2192 - protein, 753 aa, Homo sapiens
MMEERAAAAVAAAASSCRPLGSGAGPGPTGAAPVSAPAPGPGPAGKGGGGGGSPGPTAGPEPLSLPGILHFIQHEWARFEAEKARWEAERAELQAQVAFLQGERKGQENLKTDLVRRIKMLEYALKQERAKYHKLKFGTDLNQGEKKADVSEQVSNGPVESVTLENSPLVWKEGRQLLRQYLEEVGYTDTILDMRSKRVRSLLGRSLELNGAVEPSEGAPRAPPGPAGLSGGESLLVKQIEEQIKRNAAGKDGKERLGGSVLGQIPFLQNCEDEDSDEDDELDSVQHKKQRVKLPSKALVPEMEDEDEEDDSEDAINEFDFLGSGEDGEGAPDPRRCTVDGSPHELESRRVKLQGILADLRDVDGLPPKVTGPPPGTPQPRPHEDVFIMDTIGGGEVSLGDLADLTVTNDNDLSCDLSDSKDAFKKTWNPKFTLRSHYDGIRSLAFHHSQSALLTASEDGTLKLWNLQKAVTAKKNAALDVEPIHAFRAHRGPVLAVAMGSNSEYCYSGGADACIHSWKIPDLSMDPYDGYDPSVLSHVLEGHGDAVWGLAFSPTSQRLASCSADGTVRIWDPSSSSPACLCTFPTASEHGVPTSVAFTSTEPAHIVASFRSGDTVLYDMEVGSALLTLESRGSSGPTQINQVVSHPNQPLTITAHDDRGIRFLDNRTGKPVHSMVAHLDAVTCLAVDPNGAFLMSGSHDCSLRLWSLDNKTCVQEITAHRKKHEEAIHAVACHPSKALIASAGADALAKVFV

SEQ ID NO: 2193 - protein, 419 aa, Homo sapiens
MTTSPILQLLLRLSLCGLLLQRAETGSKGQTAGELYQRWERYRRECQETLAAAEPPSGLACNGSFDMYVCWDYAAPNATARASCPWYLPWHHHVAAGFVLRQCGSDGQWGLWRDHTQCENPEKNEAFLDQRLILERLQVMYTVGYSLSLATLLLALLILSLFRRLHCTRNYIHINLFTSFMLRAAAILSRDRLLPRPGPYLGDQALALWNQALAACRTAQIVTQYCVGANYTWLLVEGVYLHSLLVLVGGSEEGHFRYYLLLGWGAPALFVIPWVIVRYLYENTQCWERNEVKAIWWIIRTPILMTILINFLIFIRILGILLSKLRTRQMRCRDYRLRLARSTLTLVPLLGVHEVVFAPVTEEQARGALRFAKLGFEIFLSSFQGFLVSVLYCFINKEVGRDPAAAPALWRQRGVRRRL

SEQ ID NO: 2194 - protein, 529 aa, Homo sapiens [sequence omitted]

SEQ ID NO: 2195 - protein, 1135 aa, Homo sapiens
MDPGSRWRNLPSGPSLKHLTDPSYGIPREQQKAALQELTRAHVESFNYAVHEGLGLAVQAIPPFEFAFKDERISFTILDAVISPPTVPKGTICKEANVYPAECRGRRSTYRGKLTADINWAVNGISKGIIKQFLGYVPIMVKSKLCNLRNLPPQALIEHHEEAEEMGGYFIINGIEKVIRMLIMPRRNFPIAMIRPKWKTRGPGYTQYGVSMHCVREEHSAVNMNLHYLENGTVMLNFIYRKELFFLPLGFALKALVSFSDYQIFQELIKGKEDDSFLRNSVSQMLRIVMEEGCSTQKQVLNYLGECFRVKLNVPDWYPNEQAAEFLFNQCICIHLKSNTEKFYMLCLMTRKLFALAKGECMEDNPDSLVNQEVLTPGQLFLMFLKEKLEGWLVSIKIAFDKKAQKTSVSMNTDNLMRIFTMGIDLTKPFEYLFATGNLRSKTGLGLLQDSGLCVVADKLNFIRYLSHFRCVHRGADFAKMRTTTVRRLLPESWGFLCPVHTPDGEPCGLMNHLTAVCEVVTQFVYTASIPALLCNLGVTPIDGAPHRSYSECYPVLLDGVMVGWVDKDLAPGIADSLRHFKVLREKRIPPWMEVVLIPMTGKPSLYPGLFLFTTPCRLVRPVQNLALGKEELIGTMEQIFMNVAIFEDEVFAGVTTHQELFPHSLLSVIANFIPFSDHNQSPRNMYQCQMGKQTMGFPLLTYQDRSDNKLYRLQTPQSPLVRPSMYDYYDMDNYPIGTNAIVAVISYTGYDMEDAMIVNKASWERGFAHGSVYKSEFIDLSEKIKQGDSSLVFGIKPGDPRVLQKLDDDGLPFIGAKLQYGDPYYSYLNLNTGESFVMYYKSKENCVVDNIKVCSNDTGSGKFKCVCITMRVPRNPTIGDKFASRHGQKGILSRLWPAEDMPFTESGMVPDILFNPHGFPSRMTIGMLIESMAGKSAALHGLCHDATPFIFSEENSALEYFGEMLKAAGYNFYGTERLYSGISGLELEADIFIGVVYYQRLRHMVSDKFQVRTTGARDRVTNQPIGGRNVQGGIRFGEMERDALLAHGTSFLLHDRLFNCSDRSVAHVCVKCGSLLSPLLEKPPPSWSAMRNRKYNCTLCSRSDTIDTVSVPYVFRYFVAELAAMNIKVKLDVV

SEQ ID NO: 2196 - protein, 473 aa, Homo sapiens
MRLLESKKGLSFFAFEHSEEYQQAQHKFLVAVESMEPNNIVVLLQTSPYHVDSLLQLSDACRFQEDQEMARDLVERALYSMECAFHPLFSLTSGACRLDYRRPENRSFYLALYKQMSFLEKRGCPRTALEYCKLILSLEPDEDPLCMLLLIDHLALRARNYEYLIRLFQEWEAHRNLSQLPNFAFSVPLAYFLLSQQTDLPECEQSSARQKASLLIQQALTMFPGVLLPLLESCSVRPDASVSSHRFFGPNAEISQPPALSQLVNLYLGRSHFLWKEPATMSWLEENVHEVLQAVDAGDPAVEACENRRKVLYQRAPRNIHRHVILSEIKEAVAALPPDVTTQSVMGFDPLPPSDTIYSYVRPERKGEEERNSVIWGSQLCVCRPRSFPSPPNVQALACRPLWQAKSYQPWKHHCSLLPVTVAKLYHGGGEARGRSGWGSEPQPGPEQADAGCARHDGQLPPQRPGGAARGRR

SEQ ID NO: 2197 - protein, 295 aa, Homo sapiens
MDNSGKEAEAMALLAEAERKVKNSQSFFSGLFGGSSKIEEACEIYARAANMFKMAKNWSAAGNAFCQAAQLHLQLQSKHDAATCFVDAGNAFKKADPQEAINCLMRAIEIYTDMGRFTIAAKHHISIAEIYETELVDIEKAIAHYEQSADYYKGEESNSSANKCLLKVAGYAALLEQYQKAIDIYEQVGTNAMDSPLLKYSAKDYFFKAALCHFCIDMLNAKLAVQKYEELFPAFSDSRECKLMKKLLEAHEEQNVDSYTESVKEYDSISRLDQWLTTMLLRIKKTIQGDEEDLR

SEQ ID NO: 2198 - protein, 206 aa, Homo sapiens
MAVKKIAIFGATGQTGLTTLAQAVQAGYEVTVLVRDSSRLPSEGPRPAHVVVGDVLQAADVDKTVAGQDAVIVLLGTRNDLSPTTVMSEGARNIVAAMKAHGVDKVVACTSAFLLWDPTKVPPRLQAVTDDHIRMHKVLRESGLKYVAVMPPHIGDQPLTGAYTVTLDGRGPSRVISKHDLGHFMLRCLTTDEYDGHSTYPSHQYQ

SEQ ID NO: 2199 - protein, 131 aa, Homo sapiens
MARSLVCLGVIILLSAFSGPGVRGGPMPKLADRKLCADQECSHPISMAVALQDYMAPDCRFLTIHRGQVVYVFSKLKGRGRLFWGGSVQGDYYGDLAARLGYFPSSIVREDQTLKPGKVDVKTDKWDFYCQ

SEQ ID NO: 2200 - protein, 683 aa, Homo sapiens
MRRCPCRGSLNEAEAGALPAAARMGLEAPRGGRRRQPGQQRPGPGAGAPAGRPEGGGPWARTEGSSLHSEPERAGLGPAPGTESPQAEFWTDGQTEPAAAGLGVETERPKQKTEPDRSSLRTHLEWSWSELETTCLWTETGTDGLWTDPHRSDLQFQPEEASPWTQPGVHGPWTELETHGSQTQPERVKSWADNLWTHQNSSSLQTHPEGACPSKEPSADGSWKELYTDGSRTQQDIEGPWTEPYTDGSQKKQDTEAARKQPGTGGFQIQQDTDGSWTQPSTDGSQTAPGTDCLLGEPEDGPLEEPEPGELLTHLYSHLKCSPLCPVPRLIITPETPEPEAQPVGPPSRVEGGSGGFSSASSFDESEDDVVAGGGGASDPEDRSGSKPWKKLKTVLKYSPFVVSFRKHYPWVQLSGHAGNFQAGEDGRILKRFCQCEQRSLEQLMKDPLRPFVPAYYGMVLQDGQTFNQMEDLLADFEGPSIMDCKMGSRTYLEEELVKARERPRPRKDMYEKMVAVDPGAPTPEEHAQGAVTKPRYMQWRETMSSTSTLGFRIEGIKKADGTCNTNFKKTQALEQVTKVLEDFVDGDHVILQKYVACLEELREALEISPFFKTHEVVGSSLLFVHDHTGLAKVWMIDFGKTVALPDHQTLSHRLPWAEGNREDGYLWGLDNMICLLQGLAQS

SEQ ID NO: 2201 - protein, 313 aa, Homo sapiens
MRRGALLAGALAAYAAYLVLGALLVARLEGPHEARLRAELETLRAQLLQRSPCVAAPALDAFVERVLAAGRLGRVVLANASGSANASDPAWDFASALFFASTLITTVGYGYTTPLTDAGKAFSIAFALLGVPTTMLLLTASAQRLSLLLTHVPLSWLSMRWGWDPRRAACWHLVALLGVVVTVCFLVPAVIFAHLEEAWSFLDAFYFCFISLSTIGLGDYVPGEAPGQPYRALYKVLVTVYLFLGLVAMVLVLQTFRHVSDLHGLTELILLPPPCPASFNADEDDRVDILGPQPESHQQLSASSHTDYASIPR

SEQ ID NO: 2202 - protein, 636 aa, Homo sapiens
MRGGRGAPFWLWPLPKLALLPLLWVLFQRTRPQGSAGPLQCYGVGPLGDLNCSWEPLGDLGAPSELHLQSQKYRSNKTQTVAVAAGRSWVAIPREQLTMSDKLLVWGTKAGQPLWPPVFVNLETQMKPNAPRLGPDVDFSEDDPLEATVHWAPPTWPSHKVLICQFHYRRCQEAAWTLLEPELKTIPLTPVEIQDLELATGYKVYGRCRMEKEEDLWGEWSPILSFQTPPSAPKDVWVSGNLCGTPGGEEPLLLWKAPGPCVQVSYKVWFWVGGRELSPEGITCCCSLIPSGAEWARVSAVNATSWEPLTNLSLVCLDSASAPRSVAVSSIAGSTELLVTWQPGPGEPLEHVVDWARDGDPLEKLNWVRLPPGNLSALLPGNFTVGVPYRITVTAVSASGLASASSVWGFREELAPLVGPTLWRLQDAPPGTPAIAWGEVPRHQLRGHLTHYTLCAQSGTSPSVCMNVSGNTQSVTLPDLPWGPCELWVTASTIAGQGPPGPILRLHLPDNTLRWKVLPGILFLWGLFLLGCGLSLATSGRCYHLRHKVLPRWVWEKVPDPANSSSGQPHMEQVPEAQPLGDLPILEVEEMEPPPVMESSQPAQATAPLDSGYEKHFLPTPEELGLLGPPRPQVLA

SEQ ID NO: 2203 - protein, 632 aa, Homo sapiens
METPAAAAPAGSLFPSFLLLACGTLVAALLGAAHRLGLFYQLLHKVDKASVRHGGENVAAVLRAHGVRFIFTLVGGHISPLLVACEKLGIRVVDTRHEVTAVFAADAMARLSGTVGVAAVTAGPGLTNTVTAVKNAQMAQSPILLLGGAASTLLQNRGALQAVDQLSLFRPLCKFCVSVRRVRDIVPTLRAAMAAAQSGTPGPVFVELPVDVLYPYFMVQKEMVPAKPPKGLVGRVVSWYLENYLANLFAGAWEPQPEGPLPLDIPQASPQQVQRCVEILSRAKRPLMVLGSQALLTPTSADKLRAAVETLGVPCFLGGMARGLLGRNHPLHIRENRSAALKKADVIVLAGTVCDFRLSYGRVLSHSSKIIIVNRNREEMLLNSDIFWKPQEAVQGDVGSFVLKLVEGLQGQTWAPDWVEELREADRQKEQTFREKAAMPVAQHLNPVQVLQLVEETLPDNSILVVDGGDFVGTAAHLVQPRGPLRWLDPGAFGTLGVGAGFALGAKLCRPDAEVWCLFGDGAFGYSLIEFDTFVRHKIPVMALVGNDAGWTQISREQVPSLGSNVACGLAYTDYHKAAMGLGARGLLLSRENEDQVVKVLHDAQQQCRDGHPVVVNILIGRTDFRDGSIAV

SEQ ID NO: 2204 - protein, 112 aa, Homo sapiens
MEAYEQVQKGPLKLKGVAELGVTKRKKKKKDKDKAKLLEAMGTSKKNEEEKRRGLDKRTPAQAAFEKMQEKRQMERILKKASKTHKQRVEDFNRHLDTLTEHYDIPKVSWTK

SEQ ID NO: 2205 - protein, 2321 aa, Homo sapiens
MGPGARGRRRRRRPMSPPPPPPPVRALPLLLLLAGPGAAAPPCLDGSPCANGGRCTQLPSREAACLCPPGWVGERCQLEDPCHSGPCAGRGVCQSSVVAGTARFSCRCPRGFRGPDCSLPDPCLSSPCAHGARCSVGPDGRFLCSCPPGYQGRSCRSDVDECRVGEPCRHGGTCLNTPGSFRCQCPAGYTGPLCENPAVPCAPSPCRNGGTCRQSGDLTYDCACLPGFEGQNCEVNVDDCPGHRCLNGGTCVDGVNTYNCQCPPEWTGQFCTEDVDECQLQPNACHNGGTCFNTLGGHSCVCVNGWTGESCSQNIDDCATAVCFHGATCHDRVASFYCACPMGKTGLLCHLDDACVSNPCHEDAICDTNPVNGRAICTCPPGFTGGACDQDVDECSIGANPCEHLGRCVNTQGSFLCQCGRGYTGPRCETDVNECLSGPCRNQATCLDRIGQFTCICMAGFTGTYCEVDIDECQSSPCVNGGVCKDRVNGFSCTCPSGFSGSTCQLDVDECASTPCRNGAKCVDQPDGYECRCAEGFEGTLCDRNVDDCSPDPCHHGRCVDGIASFSCACAPGYTGTRCESQVDECRSQPCRHGGKCLDLVDKYLCRCPSGTTGVNCEVNIDDCASNPCTFGVCRDGINRYDCVCQPGFTGPLCNVEINECASSPCGEGGSCVDGENGFRCLCPPGSLPPLCLPPSHPCAHEPCSHGICYDAPGGFRCVCEPGWSGPRCSQSLARDACESQPCRAGGTCSSDGMGFHCTCPPGVQGRQCELLSPCTPNPCEHGGRCESAPGQLPVCSCPQGWQGPRCQQDVDECAGPAPCGPHGICTNLAGSFSCTCHGGYTGPSCDQDINDCDPNPCLNGGSCQDGVGSFSCSCLPGFAGPRCARDVDECLSNPCGPGTCTDHVASFTCTCPPGYGGFHCEQDLPDCSPSSCFNGGTCVDGVNSFSCLCRPGYTGAHCQHEADPCLSRPCLHGGVCSAAHPGFRCTCLESFTGPQCQTLVDWCSRQPCQNGGRCVQTGAYCLCPPGWSGRLCDIRSLPCREAAAQIGVRLEQLCQAGGQCVDEDSSHYCVCPEGRTGSHCEQEVDPCLAQPCQHGGTCRGYMGGYMCECLPGYNGDNCEDDVDECASQPCQHGGSCIDLVARYLCSCPPGTLGVLCEINEDDCGPGPPLDSGPRCLHNGTCVDLVGGFRCTCPPGYTGLRCEADINECRSGACHAAHTRDCLQDPGGGFRCLCHAGFSGPRCQTVLSPCESQPCQHGGQCRPSPGPGGGLTFTCHCAQPFWGPRCERVARSCRELQCPVGVPCQQTPRGPRCACPPGLSGPSCRSFPGSPPGASNASCAAAPCLHGGSCRPAPLAPFFRCACAQGWTGPRCEAPAAAPEVSEEPRCPRAACQAKRGDQRCDRECNSPGCGWDGGDCSLSVGDPWRQCEALQCWRLFNNSRCDPACSSPACLYDNFDCHAGGRERTCNPVYEKYCADHFADGRCDQGCNTEECGWDGLDCASEVPALLARGVLVLTVLLPPEELLRSSADFLQRLSAILRTSLRFRLDAHGQAMVFPYHRPSPGSEPRARRELAPEVIGSVVMLEIDNRLCLQSPENDHCFPDAQSAADYLGALSAVERLDFPYPLRDVRGEPLEPPEPSVPLLPLLVAGAVLLLVILVLGVMVARRKREHSTLWFPEGFSLHKDVASGHKGRREPVGQDALGMKNMAKGESLMGEVATDWMDTECPEAKRLKVEEPGMGAEEAVDCRQWTQHHLVAADIRVAPAMALTPPQGDADADGMDVNVRGPDGFTPLMLASFCGGALEPMPTEEDEADDTSASIISDLICQGAQLGARTDRTGETALHLAARYARADAAKRLLDAGADTNAQDHSGRTPLHTAVTADAQGVFQILIRNRSTDLDARMADGSTALILAARLAVEGMVEELIASHADVNAVDELGKSALHWAAAVNNVEATLALLKNGANKDMQDSKEETPLFLAAREGSYEAAKLLLDHFANREITDHLDRLPRDVAQERLHQDIVRLLDQPSGPRSPPGPHGLGPLLCPPGAFLPGLKAAQSGSKKSRRPPGKAGLGPQGPRGRGKKLTLACPGPLADSSVTLSPVDSLDSPRPFGGPPASPGGFPLEGPYAAATATAVSLAQLGGPGRAGLGRQPPGGCVLSLGLLNPVAVPLDWARLPPPAPPGPSFLLPLAPGPQLLNPGTPVSPQERPPPYLAVPGHGEEYPAAGAHSSPPKARFLRVPSEHPYLTPSPESPEHWASPSPPSLSDWSESTPSPATATGAMATTTGALPAQPLPLSVPSSLAQAQTQLGPQPEVTPKRQVLA

SEQ ID NO: 2206 - protein, 600 aa, Homo sapiens
MTAAPASPQQIRDRLLQAIDPQSNIRNMVAVLEVISSLEKYPITKEALEETRLGKLINDVRKKTKNEELAKRAKKLLRSWQKLIEPAHQHEAALRGLAGATGSANGGAHNCRPEVGAAGPPRSIHDLKSRNDLQRLPGQRLDRLGSRKRRGDQRDLGHPGPPPKVSKASHDPLVPNSSPLPTNGISGSPESFASSLDGSGHAGPEGSRLERDENDKHSGKIPVNAVRPHTSSPGLGKPPGPCLQPKASVLQQLDRVDETPGPPHPKGPPRCSFSPRNSRHEGSFARQQSLYAPKGSVPSPSPRPQALDATQVPSPLPLAQPSTPPVRRLELLPSAESPVCWLEQPESHQRLAGPGCKAGLSPAEPLLSRAGFSPDSSKADSDAASSGGSDSKKKKRYRPRDYTVNLDGQVAEAGVKPVRLKERKLTFDPMTRQIKPLTQKEPVRADSPVHMEQQSRTELDKQEAKASLQSPFEQTNWKELSRNEIIQSYLSRQSSLLSSSGAQTPGAHHFMSEYLKQEESTRQGARQLHVLVPQSPPTDLPGLTREVTQDDLDRIQASQWPGVNGCQDTQGNWYDWTQCISLDPHGDDGRLNILPYVCLD

SEQ ID NO: 2207 - protein, 361 aa, Homo sapiens
MDKFWWHAAWGLCLVPLSLAQIDLNITCRFAGVFHVEKNGRYSISRTEAADLCKAFNSTLPTMAQMEKALSIGFETCRYGFIEGHVVIPRIHPNSICAANNTGVYILTSNTSQYDTYCFNASAPPEEDCTSVTDLPNAFDGPITITIVNRDGTRYVQKGEYRTNPEDIYPSNPTDDDVSSGSSSERSSTSGGYIFYTFSTVHPIPDEDSPWITDSTDRIPATRDQDTFHPSGGSHTTHGSESDGHSHGSQEGGANTTSGPIRTPQIPEWLIILASLLALALILAVCIAVNSRRRCGQKKKLVINSGNGAVEDRKPSGLNGEASKSQEMVHLVNKESSETPDQFMTADETRNLQNVDMKIGV

SEQ ID NO: 2208 - protein, 198 aa, Homo sapiens
MAALTAEHFAALQSLLKASSKDVVRQLCQESFSSSALGLKKLLDVTCSSLSVTQEEAEELLQALHRLTRLVAFRDLSSAEAILALFPENFHQNLKNLLTKIILEHVSTWRTEAQANQISLPRLVDLDWRVDIKTSSDSISRMAVPTCLLQMKIQEDPSLCGDKPSISAVTVELSKETLDTMLDGLGRIRDQLSAVASK

SEQ ID NO: 2209 - protein, 559 aa, Homo sapiens
MSACRSFAVAICILEISILTAQYTTSYDPELTESSGSASHIDCRMSPWSEWSQCDPCLRQMFRSRSIEVFGQFNGKRCTDAVGDRRQCVPTEPCEDAEDDCGNDFQCSTGRCIKMRLRCNGDNDCGDFSDEDDCESEPRPPCRDRVVEESELARTAGYGINILGMDPLSTPFDNEFYNGLCNRDRDGNTLTYYRRPWNVASLIYETKGEKNFRTEHYEEQIEAFKSIIQEKTSNFNAAISLKFTPTETNKAEQCCEETASSISLHGKGSFRFSYSKNETYQLFLSYSSKKEKMFLHVKGEIHLGRFVMRNRDVVLTTTFVDDIKALPTTYEKGEYFAFLETYGTHYSSSGSLGGLYELIYVLDKASMKRKGVELKDIKRCLGYHLDVSLAFSEISVGAEFNKDDCVKRGEGRAVNITSENLIDDVVSLIRGGTRKYAFELKEKLLRGTVIDVTDFVNWASSINDAPVLISQKLSPIYNLVPVKMKNAHLKKQNLERAIEDYINEFSVRKCHTCQNGGTVILMDGKCLCACPFKFEGIACEISKQKISEGLPALEFPNEK

SEQ ID NO: 2210 - protein, 934 aa, Homo sapiens
MARRSVLYFILLNALINKGQACFCDHYAWTQWTSCSKTCNSGTQSRHRQIVVDKYYQENFCEQICSKQETRECNWQRCPINCLLGDFGPWSDCDPCIEKQSKVRSVLRPSQFGGQPCTAPLVAFQPCIPSKLCKIEEADCKNKFRCDSGRCIARKLECNGENDCGDNSDERDCGRTKAVCTRKYNPIPSVQLMGNGFHFLAGEPRGEVLDNSFTGGICKTVKSSRTSNPYRVPANLENVGFEVQTAEDDLKTDFYKDLTSLGHNENQQGSFSSQGGSSFSVPIFYSSKRSENINHNSAFKQAIQASHKKDSSFIRIHKVMKVLNFTTKAKDLHLSDVFLKALNHLPLEYNSALYSRIFDDFGTHYFTSGSLGGVYDLLYQFSSEELKNSGLTEEEAKHCVRIETKKRVLFAKKTKVEHRCTTNKLSEKHEGSFIQGAEKSISLIRGGRSEYGAALAWEKGSSGLEEKTFSEWLESVKENPAVIDFELAPIVDLVRNIPCAVTKRNNLRKALQEYAAKFDPCQCAPCPNNGRPTLSGTECLCVCQSGTYGENCEKQSPDYKSNAVDGQWGCWSSWSTCDATYKRSRTRECNNPAPQRGGKRCEGEKRQEEDCTFSIMENNGQPCINDDEEMKEVDLPEIEADSGCPQPVPPENGFIRNEKQLYLVGEDVEISCLTGFETVGYQYFRCLPDGTWRQGDVECQRTECIKPVVQEVLTITPFQRLYRIGESIELTCPKGFVVAGPSRYTCQGNSWTPPISNSLTCEKDTLTKLKGHCQLGQKQSGSECICMSPEEDCSHHSEDLCVFDTDSNDYFTSPACKFLAEKCLNNQQLHFLHIGSCQDGRQLEWGLERTRLSSNSTKKESCGYDTCYDWEKCSASTSKCVCLLPPQCFKGGNQLYCVKMGSSTSEKTLNICEVGTIRCANRKMEILHPGKCLA

SEQ ID NO: 2211 - protein, 491 aa, Homo sapiens
MTLTLSVLICLGLSVGPRTCVQAGTLPKPTLWAEPASVIARGKPVTLWCQGPLETEEYRLDKEGLPWARKRQNPLEPGAKAKFHIPSTVYDSAGRYRCYYETPAGWSEPSDPLELVATGVSRKPSLLIPQGSVVARGGSLTLQCRSDVGYDIFVLYKEGEHDLVQGSGQQPQAGLSQANFTLGPVSRSHGGQYRCYGAHNLSPRWSAPSDPLDILIAGLIPDIPALSVQPGPKVASGENVTLLCQSWHQIDTFFLTKEGAAHPPLCLKSKYQSYRHQAEFSMSPVTSAQGGTYRCYSAIRSYPYLLSSPSYPQELVVSGPSGDPSLSPTGSTPTPAGPEDQPLTPTGLDPQSGLGRHLGVVTGVSVAFVLLLFLLLFLLLRHRHQSKHRTSAHFYRPAGAAGPEPKDQGLQKRASPVADIQEEILNAAVKDTQPKDGVEMDAPAAASEAPQDVTYAQLHSLTLRREATEPPPSQEREPPAEPSIYAPLAIH

SEQ ID NO: 2212 - protein, 782 aa, Homo sapiens
MSGEDGPAAGPGAAAAAARERRREQLRQWGARAGAEPGPGERRARTVRFERAAEFLAACAGGDLDEARLMLRAADPGPGAELDPAAPPPARAVLDSTNADGISALHQACIDENLEVVRFLVEQGATVNQADNEGWTPLHVAASCGYLDIARYLLSHGANIAAVNSDGDLPLDLAESDAMEGLLKAEIARRGVDVEAAKRAEEELLLHDTRCWLNGGAMPEARHPRTGASALHVAAAKGYIEVMRLLLQAGYDPELRDGDGWTPLHAAAHWGVEDACRLLAEHGGGMDSLTHAGQRPCDLADEEVLSLLEELARKQEDLRNQKEASQSRGQEPQAPSSSKHRRSSVCRLSSREKISLQDLSKERRPGGAGGPPIQDEDEGEEGPTEPPPAEPRTLNGVSSPPHPSPKSPVQLEEAPFSRRFGLLKTGSSGALGPPERRTAEGAPGAGLQRSASSSWLEGTSTQAKELRLARITPTPSPKLPEPSVLSEVTKPPPCLENSSPPSRIPEPESPAKPNVPTASTAPPADSRDRRRSYQMPVRDEESESQRKARSRLMRQSRRSTQGVTLTDLKEAEKAAGKAPESEKPAQSLDPSRRPRVPGVENSDSPAQRAEAPDGQGPGPQAAREHRKVGKEWRGPAEGEEAEPADRSQESSTLEGGPSARRQRWQRDLNPEPEPESEEPDGGFRTLYAELRRENERLREALTETTLRLAQLKVELERATQRQERFAERPALLELERFERRALERKAAELEEELKALSDLRADNQRLKDENAALIRVISKLSK

SEQ ID NO: 2213 - protein, 937 aa, Homo sapiens
MAGAGGGLGVWGNLVLLGLCSWTGARAPAPNPGRNLTVETQTTSSISLSWEVPDGLDSQNSNYWVQCTGDGGTTETRNTTATNVTVDGLGPGSLYTCSVWVEKDGVNSSVGTVTTATAPNPVRNLTVEAQTNSSIALTWEVPDGPDPQNSTYGVEYTGDGGRAGTRSTAHTNITVDRLEPGCLYVFSVWVGKNGINSSRETRNATTAPNPVRNLHMETQTNSSIALCWEVPDGPYPQDYTYWVEYTGDGGGTETRNTTNTSVTAERLEPGTLYTFSVWAEKNGARGSRQNVSISTVPNAVTSLSKQDWTNSTIALRWTAPQGPGQSSYSYWVSWVREGMTDPRTQSTSGTDITLKELEAGSLYHLTVWAERNEVRGYNSTLTAATAPNEVTDLQNETQTKNSVMLWWKAPGDPHSQLYVYWVQWASKGHPRRGQDPQANWVNQTSRTNETWYKVEALEPGTLYNFTVWAERNDVASSTQSLCASTYPDTVTITSCVSTSAGYGVNLIWSCPQGGYEAFELEVGGQRGSQDRSSCGEAVSVLGLGPARSYPATITTIWDGMKVVSHSVVCHTESAGVIAGAFVGILLFLILVGLLIFFLKRRNKKKQQKPELRDLVFSSPGDIPAEDFADHVRKNERDSNCGFADEYQQLSLVGHSQSQMVASASENNAKNRYRNVLPYDWSRVPLKPIHEEPGSDYINASFMPGLWSPQEFIATQGPLPQTVGDFWRLVWEQQSHTLVMLTNCMEAGRVKCEHYWPLDSQPCTHGHLRVTLVGEEVMENWTVRELLLLQVEEQKTLSVRQFHYQAWPDHGVPSSPDTLLAFWRMLRQWLDQTMEGGPPIVHCSAGVGRTGTLIALDVLLRQLQSEGLLGPFSFVRKMRESRPLMVQTEAQYVFLHQCILRFLQQSAQAPAEKEVPYEDVENLIYENVAAIQAHKLEV

SEQ ID NO: 2214 - protein, 507 aa, Homo sapiens
MEKWYLMTVVVLIGLTVRWTVSLNSYSGAGKPPMFGDYEAQRHWQEITFNLPVKQWYFNSSDNNLQYWGLDYPPLTAYHSLLCAYVAKFINPDWIALHTSRGYESQAHKLFMRTTVLIADLLIYIPAVVLYCCCLKEISTKKKIANALCILLYPGLILIDYGHFQYNSVSLGFALWGVLGISCDCDLLGSLAFCLAINYKQMELYHALPFFCFLLGKCFKKGLKGKGFVLLVKLACIVVASFVLCWLPFFTEREQTLQVLRRLFPVDRGLFEDKVANIWCSFNVFLKIKDILPRHIQLIMSFCSTFLSLLPACIKLILQPSSKGFKFTLVSCALSFFLFSFQVHEKSILLVSLPVCLVLSEIPFMSTWFLLVSTFSMLPLLLKDELLMPSVVTTMAFFIACVTSFSIFEKTSEEELQLKSFSISVRKYLPCFTFLSRIIQYLFLISVITMVLLTLMTVTLDPPQKLPDLFSVLVCFVSCLNFLFFLVYFNIIIMWDSKSGRNQKKIS

SEQ ID NO: 2215 - protein, 819 aa, Homo sapiens
MVSWGRFICLVVVTMATLSLARPSFSLVEDTTLEPEEPPTKYQISQPEVYVAAPGESLEVRCLLKDAAVISWTKDGVHLGPNNRTVLIGEYLQIKGATPRDSGLYACTASRTVDSETWYFMVNVTDAISSGDDEDDTDGAEDFVSENSNNKRAPYWTNTEKMEKRLHAVPAANTVKFRCPAGGNPMPTMRWLKNGKEFKQEHRIGGYKVRNQHWSLIMESVVPSDKGNYTCVVENEYGSINHTYHLDVVERSPHRPILQAGLPANASTVVGGDVEFVCKVYSDAQPHIQWIKHVEKNGSKYGPDGLPYLKVLKAAGVNTTDKEIEVLYIRNVTFEDAGEYTCLAGNSIGISFHSAWLTVLPAPGREKEITASPDYLEIAIYCIGVFLIACMVVTVILCRMKNTTKKPDFSSQPAVHKLTKRIPLRRQVSAESSSSMNSNTPLVRITTRLSSTADTPMLAGVSEYELPEDPKWEFPRDKLTLGKPLGEGCFGQVVMAEAVGIDKDKPKEAVTVAVKMLKDDATEKDLSDLVSEMEMMKMIGKHKNIINLLGACTQDGPLYVIVEYASKGNLREYLRARRPPGMEYSYDINRVPEEQMTFKDLVSCTYQLARGMEYLASQKCIHRDLAARNVLVTENNVMKIADFGLARDINNIDYYKKTTNGRLPVKWMAPEALFDRVYTHQSDVWSFGVLMWEIFTLGGSPYPGIPVEELFKLLKEGHRMDKPANCTNELYMMMRDCWHAVPSQRPTFKQLVEDLDRILTLTTNEEYLDLSQPLEQYSPSYPDTRSSCSSGDDSVFSPDPMPYEPCLPQYPHINGSVKT

SEQ ID NO: 2216 - protein, 1224 aa, Homo sapiens
MLPYTVNFKVSARTLTGALNAHNKAAVDWGWQGLIAYGCHSLVVVIDSITAQTLQVLEKHKADVVKVKWARENYHHNIGSPYCLRLASADVNGKIIVWDVAAGVAQCEIQEHAKPIQDVQWLWNQDASRDLLLAIHPPNYIVLWNADTGTKLWKKSYADNILSFSFDPFDPSHLTLLTSEGIVFISDFSPSKPPSGPGKKVYISSPHSSPAHNKLATATGAKKALNKVKILITQEKPSAEFITLNDCLQLAYLPSKRNHMLLLYPREILILDLEVNQTVGVIAIERTGVPFLQVIPCFQRDGLFCLHENGCITLRVRRSYNNIFTTSNEEPDPDPVQELTYDLRSQCDAIRVTKTVRPFSMVCCPVNENAAALVVSDGRVMIWELKSAVCNRNSRNSSSGVSPLYSPVSFCGIPVGVLQNKLPDLSLDNMIGQSAIAGEEHPRGSILREVHLKFLLTGLLSGLPAPQFAIRMCPPLTTKNIKMYQPLLAVGTSNGSVLVYHLTSGLLHKELSIHSCEVKGIEWTSLTSFLSFATSTPNNMGLVRNELQLVDLPTGRSIAFRGERGNDESAIEMIKVSHLKQYLAVVFRDKPLELWDVRTCTLLREMSKNFPTITALEWSPSHNLKSLRKKQLATREAMARQTVVSDTELSIVESSVISLLQEAESKSELSQNISAREHFVFTDIDGQVYHLTVEGNSVKDSARIPPDGSMGSITCIAWKGDTLVLGDMDGNLNFWDLKGRVSRGIPTHRSWVRKIRFAPGKGNQKLIAMYNDGAEVWDTKEVQMVSSLRSGRNVTFRILDVDWCTSDKVILASDDGCIRVLEMSMKSACFRMDEQELTEPVWCPYLLVPRASLALKAFLLHQPWNGQYSLDISHVDYPENEEIKNLLQEQLNSLSNDIKKLLLDPEFTLLQRCLLVSRLYGDESELHFWTVAAHYLHSLSQEKSASTTAPKEAAPRDKLSNPLDICYDVLCENAYFQKFQLERVNLQEVKRSTYDHTRKCTDQLLLLGQTDRAVQLLLETSADNQHYYCDSLKACLVTTVTSSGPSQSTIKLVATNMIANGKLAEGVQLLCLIDKAADACRYLQTYGEWNRAAWLAKVRLNPEECADVLRRWVDHLCSPQVNQKSKALLVLLSLGCFFSVAETLHSMRYFDRAALFVEACLKYGAFEVTEDTEKLITAIYADYARSLKNLGFKQGAVLFASKAGAAGKDLLNELESPKEEPIEE

SEQ ID NO: 2217 - protein, 534 aa, Homo sapiens
MIWYILIIGILLPQSLAHPGFFTSIGQMTDLIHTEKDLVTSLKDYIKAEEDKLEQIKKWAEKLDRLTSTATKDPEGFVGHPVNAFKLMKRLNTEWSELENLVLKDMSDGFISNLTIQRQYFPNDEDQVGAAKALLRLQDTYNLDTDTISKGNLPGVKHKSFLTAEDCFELGKVAYTEADYYHTELWMEQALRQLDEGEISTIDKVSVLDYLSYAVYQQGDLDKALLLTKKLLELDPEHQRANGNLKYFEYIMAKEKDVNKSASDDQSDQKTTPKKKGVAVDYLPERQKYEMLCRGEGIKMTPRRQKKLFCRYHDGNRNPKFILAPAKQEDEWDKPRIIRFHDIISDAEIEIVKDLAKPRLSRATVHDPETGKLTTAQYRVSKSAWLSGYENPVVSRINMRIQDLTGLDVSTAEELQVANYGVGGQYEPHFDFARKDEPDAFKELGTGNRIATWLFYMSDVSAGGATVFPEVGASVWPKKGTAVFWYNLFASGEGDYSTRHAACPVLVGNKWVSNKWLHERGQEFRRPCTLSELE

SEQ ID NO: 2218 - protein, 327 aa, Homo sapiens
MSFLGGFFGPICEIDIVLNDGETRKMAEMKTEDGKVEKHYLFYDGESVSGKVNLAFKQPGKRLEHQGIRIEFVGQIELFNDKSNTHEFVNLVKELALPGELTQSRSYDFEFMQVEKPYESYIGANVRLRYFLKVTIVRRLTDLVKEYDLIVHQLATYPDVNNSIKMEVGIEDCLHIEFEYNKSKYHLKDVIVGKIYFLLVRIKIQHMELQLIKKEITGIGPSTTTETETIAKYEIMDGAPVKGESIPIRLFLAGYDPTPTMRDVNKKFSVRYFLNLVLVDEEDRRYFKQQEIILWRKAPEKLRKQRTNFHQRFESPESQASAEQPEM

SEQ ID NO: 2219 - protein, 763 aa, Homo sapiens
MAATGTAAAAATGRLLLLLLVGLTAPALALAGYIEALAANAGTGFAVAEPQIAMFCGKLNMHVNIQTGKWEPDPTGTKSCFETKEEVLQYCQEMYPELQITNVMEANQRVSIDNWCRRDKKQCKSRFVTPFKCLVGEFVSDVLLVPEKCQFFHKERMEVCENHQHWHTVVKEACLTQGMTLYSYGMLLPCGVDQFHGTEYVCCPQTKIIGSVSKEEEEEDEEEEEEEDEEEDYDVYKSEFPTEADLEDFTEAAVDEDDEDEEEGEEVVEDRDYYYDTFKGDDYNEENPTEPGSDGTMSDKEITHDVKAVCSQEAMTGPCRAVMPRWYFDLSKGKCVRFIYGGCGGNRNNFESEDYCMAVCKAMIPPTPLPTNDVDVYFETSADDNEHARFQKAKEQLEIRHRNRMDRVKKEWEEAELQAKNLPKAERQTLIQHFQAMVKALEKEAASEKQQLVETHLARVEAMLNDRRRMALENYLAALQSDPPRPHRILQALRRYVRAENKDRLHTIRHYQHVLAVDPEKAAQMKSQVMTHLHVIEERRNQSLSLLYKVPYVAQEIQEEIDELLQEQRADMDQFTASISETPVDVRVSSEESEEIPPFHPFHPFPALPENEDTQPELYHPMKKGSGVGEQDGGLIGAEEKVINSKNKVDENMVIDETLDVKEMIFNAERVGGLEEERESVGPLREDFSLSSSALIGLLVIAVAIATVIVISLVMLRKRQYGTISHGIVEVDPMLTPEERHLNKMQNHGYENPTYKYLEQMQI

SEQ ID NO: 2220 - protein, 1264 aa, Homo sapiens
MHPDLGPLCTLLYVTLTILCSSVSSDLAPYFTSEPLSAVQKLGGPVVLHCSAQPVTTRISWLHNGKTLDGNLEHVKIHQGTLTILSLNSSLLGYYQCLANNSIGAIVSGPATVSVAVLGDFGSSTKHVITAEEKSAGFIGCRVPESNPKAEVRYKIRGKWLEHSTENYLILPSGNLQILNVSLEDKGSYKCAAYNPVTHQLKVEPIGRKLLVSRPSSDDVHILHPTHSQALAVLSRSPVTLECVVSGVPAPQVYWLKDGQDIAPGSNWRRLYSHLATDSVDPADSGNYSCMAGNKSGDVKYVTYMVNVLEHASISKGLQDQIVSLGATVHFTCDVHGNPAPNCTWFHNAQPIHPSARHLTAGNGLKISGVTVEDVGMYQCVADNGIGFMHSTGRLEIENDGGFKPVIITAPVSAKVADGDFVTLSCNASGLPVPVIRWYDSHGLITSHPSQVLRSKSRKSQLSRPEGLNLEPVYFVLSQAGASSLHIQAVTQEHAGKYICEAANEHGTTQAEASLMVVPFETNTKAETVTLPDAAQNDDRSKRDGSETGLLSSFPVKVHPSAVESAPEKNASGISVPDAPIILSPPQTHTPDTYNLVWRAGKDGGLPINAYFVKYRKLDDGVGMLGSWHTVRVPGSENELHLAELEPSSLYEVLMVARSAAGEGQPAMLTFRTSKEKTASSKNTQASSPPVGIPKYPVVSEAANNNFGVVLTDSSRHSGVPEAPDRPTISTASETSVYVTWIPRANGGSPITAFKVEYKRMRTSNWLVAAEDIPPSKLSVEVRSLEPGSTYKFRVIAINHYGESFRSSASRPYQVVGFPNRFSSRPITGPHIAYTEAVSDTQIMLKWTYIPSSNNNTPIQGFYIYYRPTDSDNDSDYKRDVVEGSKQWHMIGHLQPETSYDIKMQCFNEGGESEFSNVMICETKVKRVPGASEYPVKDLSTPPNSLGSGGNVGPATSPARSSDMLYLIVGCVLGVMVLILMVFIAMCLWKNRQQNTIQKYDPPGYLYQGSDMNGQMVDYTTLSGASQINGNVHGGFLTNGGLSSGYSHLHHKVPNAVNGIVNGSLNGGLYSGHSNSLTRTHVDFEHPHHLVNGGGMYTAVPQIDPLECVNCRNCRNNNRCFTKTNSTFSSSPPPVVPVVAPYPQDGLEMKPLSHVKVPVCLTSAVPDCGQLPEESVKDNVEPVPTQRTCCQDIVNDVSSDGSEDPAEFSRGDSCAHSETEINIVSWNALILPPVPEGCAEKTMWSPPGIPLDSPTEVLQQPRET

SEQ ID NO: 2221 - protein, 486 aa, Homo sapiens
MIRRVLPHGMGRGLLTRRPGTRRGGFSLDWDGKVSEIKKKIKSILPGRSCDLLQDTSHLPPEHSDVVIVGGGVLGLSVAYWLKKLESRRGAIRVLVVERDHTYSQASTGLSVGGICQQFSLPENIQLSLFSASFLRNINEYLAVVDAPPLDLRFNPSGYLLLASEKDAAAMESNVKVQRQEGAKVSLMSPDQLRNKFPWINTEGVALASYGMEDEGWFDPWCLLQGLRRKVQSLGVLFCQGEVTRFVSSSQRMLTTDDKAVVLKRIHEVHVKMDRSLEYQPVECAIVINAAGAWSAQIAALAGVGEGPPGTLQGTKLPVEPRKRYVYVWHCPQGPGLETPLVADTSGAYFRREGLGSNYLGGRSPTEQEEPDPANLEVDHDFFQDKVWPHLALRVPAFETLKVQSAWAGYYDYNTFDQNGVVGPHPLVVNMYFATGFSGHGLQQAPGIGRAVAEMVLKGRFQTIDLSPFLFTRFYLGEKIQENNII

SEQ ID NO: 2222 - protein, 337 aa, Homo sapiens
MADAAPQLGKRKRELDVEEAHAASTEEKEAGVGNGTCAPVRLPFSGFRLQKVLRESARDKIIFLHGKVNEASGDGDGEDAVVILEKTPFQVEQVAQLLTGSPELQLQFSNDIYSTYHLFPPRQLNDVKTTVVYPATEKHLQKYLRQDLRLIRETGDDYRNITLPHLESQSLSIQWVYNILDKKAEADRIVFENPDPSDGFVLIPDLKWNQQQLDDLYLIAICHRRGIRSLRDLTPEHLPLLRNILHQGQEAILQRYRMKGDHLRVYLHYLPSYYHLHVHFTALGFEAPGSGVERAHLLAEVIENLECDPRHYQQRTLTFALRADDPLLKLLQEAQQS

SEQ ID NO: 2223 - protein, 523 aa, Homo sapiens
MVAPGLVLGLVLPLILWADRSAGIGFRFASYINNDMVLQKEPAGAVIWGFGTPGATVTVTLRQGQETIMKKVTSVKAHSDTWMVVLDPMKPGGPFEVMAQQTLEKINFTLRVHDVLFGDVWLCSGQSNMQMTVLQIFNATRELSNTAAYQSVRILSVSPIQAEQELEDLVAVDLQWSKPTSENLGHGYFKYMSAVCWLFGRHLYDTLQYPIGLIASSWGGTPIEAWSSGRSLKACGVPKQGSIPYDSVTGPSKHSVLWNAMIHPLCNMTLKGVVWYQGESNINYNTDLYNCTFPALIEDWRETFHRGSQGQTERFFPFGLVQLSSDLSKKSSDDGFPQIRWHQTADFGYVPNPKMPNTFMAVAMDLCDRDSPFGSIHPRDKQTVAYRLHLGARALAYGEKNLTFEGPLPEKIELLAHKGLLNLTYYQQIQVQKKDNKIFEISCCSDHRCKWLPASMNTVSTQSLTLAIDSCHGTVVALRYAWTTWPCEYKQCPLYHPSSALPAPPFIAFITDQGPGHQSNVAK

SEQ ID NO: 2224 - protein, 176 aa, Homo sapiens
MKPLLLAVSLGLIAALQAHHLLASDEEIQDVSGTWYLKAMTVDREFPEMNLESVTPMTLTTLEGGNLEAKVTMLISGRCQEVKAVLEKTDEPGKYTADGGKHVAYIIRSHVKDHYIFYCEGELHGKPVRGVKLVGRDPKNNLEALEDFEKAAGARGLSTESILIPRQSETCSPGSD

SEQ ID NO: 2225 - protein, 267 aa, Homo sapiens
MTLGRRLACLFLACVLPALLLGGTALASEIVGGRRARPHAWPFMVSLQLRGGHFCGATLIAPNFVMSAAHCVANVNVRAVRVVLGAHNLSRREPTRQVFAVQRIFENGYDPVNLLNDIVILQLNGSATINANVQVAQLPAQGRRLGNGVQCLAMGWGLLGRNRGIASVLQELNVTVVTSLCRRSNVCTLVRGRQAGVCFGDSGSPLVCNGLIHGIASFVRGGCASGLYPDAFAPVAQFVNWIDSIIQRSEDNPCPHPRDPDPASRTH

SEQ ID NO: 2226 - protein, 1843 aa, Homo sapiens
MENEIFTPLLEQFMTSPLVTWVKTFGPLAAGNGTNLDEYVALVDGVFLNQVMLQINPKLESQRVNKKVNNDASLRMHNLSILVRQIKFYYQETLQQLIMMSLPNVLIIGKNPFSEQGTEEVKKLLLLLLGCAVQCQKKEEFIERIQGLDFDTKAAVAAHIQEVTHNQENVFDLQWMEVTDMSQEDIEPLLKNMALHLKRLIDERDEHSETIIELSEERDGLHFLPHASSSAQSPCGSPGMKRTESRQHLSVELADAKAKIRRLRQELEEKTEQLLDCKQELEQMEIELKRLQQENMNLLSDARSARMYRDELDALREKAVRVDKLESEVSRYKERLHDIEFYKARVEELKEDNQVLLETKTMLEDQLEGTRARSDKLHELEKENLQLKAKLHDMEMERDMDRKKIEELMEENMTLEMAQKQSMDESLHLGWELEQISRTSELSEAPQKSLGHEVNELTSSRLLKLEMENQSLTKTVEELRTTVDSVEGNASKILKMEKENQRLSKKVEILENEIVQEKQSLQNCQNLSKDLMKEKAQLEKTIETLRENSERQIKILEQENEHLNQTVSSLRQRSQISAEARVKDIEKENKILHESIKETSSKLSKIEFEKRQIKKELEHYKEKGERAEELENELHHLEKENELLQKKITNLKITCEKIEALEQENSELERENRKLKKTLDSFKNLTFQLESLEKENSQLDEENLELRRNVESLKCASMKMAQLQLENKELESEKEQLKKGLELLKASFKKTERLEVSYQGLDIENQRLQKTLENSNKKIQQLESELQDLEMENQTLQKNLEELKISSKRLEQLEKENKSLEQETSQLEKDKKQLEKENKRLRQQAEIKDTTLEENNVKIGNLEKENKTLSKEIGIYKESCVRLKELEKENKELVKRATIDIKTLVTLREDLVSEKLKTQQMNNDLEKLTHELEKIGLNKERLLHDEQSTDDSRYKLLESKLESTLKKSLEIKEEKIAALEARLEESTNYNQQLRQELKTVKKNYEALKQRQDEERMVQSSPPISGEDNKWERESQETTRELLKVKDRLIEVERNNATLQAEKQALKTQLKQLETQNNNLQAQILALQRQTVSLQEQNTTLQTQNAKLQVENSTLNSQSTSLMNQNAQLLIQQSSLENENESVIKEREDLKSLYDSLIKDHEKLELLHERQASEYESLISKHGTLKSAHKNLEVEHRDLEDRYNQLLKQKGQLEDLEKMLKVEQEKMLLENKNHETVAAEYKKLCGENDRLNHTYSQLLKETEVLQTDHKNLKSLLNNSKLEQTRLEAEFSKLKEQYQQLDITSTKLNNQCELLSQLKGNLEEENRHLLDQIQTLMLQNRTLLEQNMESKDLFHVEQRQYIDKLNELRRQKEKLEEKIMDQYKFYDPSPPRRRGNWITLKMRKLIKSKKDINRERQKSLTLTPTRSDSSEGFLQLPHQDSQDSSSVGSNSLEDGQTLGTKKSSTMNDLVQSMVLAGQWTGSTENLEVPDDISTGKRRKELGAMAFSTTAINFSTVNSSAGFRSKQLVNNKDTTSFEDISPQGVSDDSSTGSRVHASRPASLDSGRTSTSNSNNNASLHEVKAGAVNNQSRPQSHSSGEFSLLHDHEAWSSSGSSPIQYLKRQTRSSPVLQHKISETLESRHHKIKTGSPGSEVVTLQQFLEESNKLTSVQIKSSSQENLLDEVMKSLSVSSDFLGKDKPVSCGLARSVSGKTPGDFYDRRTTKPEFLRPGPRKTEDTYFISSAGKPTPGTQGKIKLVKESSLSRQSKDSNPYATLPRASSVISTAEGTTRRTSIHDFLTKDSRLPISVDSPPAAADSNTTAASNVDKVQESRNSKSRSREQQSS

SEQ ID NO: 2227 - protein, 518 aa, Homo sapiens
MDFTEAYADTCSTVGLAAREGNVKVLRKLLKKGRSVDVADNRGWMPIHEAAYHNSVECLQMLINADSSENYIKMKTFEGFCALHLAASQGHWKIVQILLEAGADPNATTLEETTPLFLAVENGQIDVLRLLLQHGANVNGSHSMCGWNSLHQASFQENAEIIKLLLRKGANKECQDDFGITPLFVAAQYGKLESLSILISSGANVNCQALDKATPLFIAAQEGHTKCVELLLSSGADPDLYCNEDSWQLPIHAAAQMGHTKILDLLIPLTNRACDTGLNKVSPVYSAVFGGHEDCLEILLRNGYSPDAQACLVFGFSSPVCMAFQKDCEFFGIVNILLKYGAQINELHLAYCLKYEKFSIFRYFLRKGCSLGPWNHIYEFVNHAIKAQAKYKEWLPHLLVAGFDPLILLCNSWIDSVSIDTLIFTLEFTNWKTLAPAVERMLSARASNAWILQQHIATVPSLTHLCRLEIRSSLKSERLRSDSYISQLPLPRSLHNYLLYEDVLRMYEVPELAAIQDG

SEQ ID NO: 2228 - protein, 1861 aa, Homo sapiens
MLKAVLKKSREGGKGGKKEAGSDFGPETSPVLHLDHSADSPVSSLPTAEDTYRVSLAKGVSMSLPSSPLLPRQSHLVQSRVNKKSPGPVRKPKYVESPRVPGDAVIMPFREVAKPTEPDEHEAKADNEPSCSPAAQELLTRLGFLLGEGIPSATHITIEDKNETMCTALSQGISPCSTLTSSTASPSTDSPCSTLNSCVSKTAANKSPCETISSPSSTLESKDSGIIATITSSSENDDRSGSSLEWNKDGNLRLGVQKGVLHDRRADNCSPVAEEETTGSAESTLPKAESSAGDGPVPYSQGSSSLIMPRPNSVAATSSTKLEDLSYLDGQRNAPLRTSIRLPWHNTAGGRAQEVKARFAPYKPQDILLKPLLFEVPSITTDSVFVGRDWLFHQIEENLRNTELAENRGAVVVGNVGFGKTAIISKLVALSCHGSRMRQIASNSPGSSPKTSDPTQDLHFTPLLSPSSSTSASSTAKTPLGSISAENQRPREDAVKYLASKVVAYHYCQADNTYTCLVPEFVHSIAALLCRSHQLAAYRDLLIKEPQLQSMLSLRSCVQDPVAAFKRGVLEPLTNLRNEQKIPEEEYIILIDGLNEAEFHKPDYGDTLSSFITKIISKFPAWLKLIVTVRANFQEIISALPFVKLSLDDFPDNKDIHSDLHAYVQHRVHSSQDILSNISLNGKADATLIGKVSSHLVLRSLGSYLYLKLTLDLFQRGHLVIKSASYKVVPVSLSELYLLQCNMKFMTQSAFERALPILNVALASLHPMTDEQIFQAINAGHIQGEQGWEDFQQRMDALSCFLIKRRDKTRMFCHPSFREWLVWRADGENTAFLCEPRNGHALLAFMFSRQEGKLNRQQTMELGHHILKAHIFKGLSKKTGISSSHLQALWIGYSTEGLSAALASLRNLYTPNVKVSRLLILGGANVNYRTEVLNNAPILCVQSHLGHEEVVTLLLEFGACLDGTSENGMTALCYAAAAGHMKLVCLLTKKGVRVDHLDKKGQCALVHSALRGHGDILQYLLTCEWSPGPPQPGTLRKSHALQQALTAAASMGHSSVVQCLLGMEKEHEVEVNGTDTLWGETALTAAAGRGKLEVCELLLGHGAAVSRTNRRGVPPLFCAARQGHWQIVRLLLERGCDVNLSDKQGRTPLMVAACEGHLSTVEFLLSKGAALSSLDKEGLSALSWACLKGHRAVVQYLVEEGAAIDQTDKNGRTPLDLAAFYGDAETVLYLVEKGAVIEHVDHSGMRPLDRAIGCRNTSVVVALLRKGAKLGNAAWAMATSKPDILIILLQKLMEEGNVMYKKGKMKEAAQRYQYALRKFPREGFGEDMRPFNELRVSLYLNLSRCRRKTNDFGMAEEFASKALELKPKSYEAFYARARAKRNSRQFVAALADLQEAVKLCPTNQEVKRLLARVEEECKQLQRSQQQKQQGPLPAPLNDSENEEDTPTPGLSDHFHSEETEEEETSPQEESVSPTPRSQPSSSVPSSYIRNLQEGLQSKGRPVSPQSRAGIGKSLREPVAQPGLLLQPSKQAQIVKTSQHLGSGQSAVRNGSMKVQISSQNPPPSPMPGRIAATPAGSRTQHLEGTGTFTTRAGCGHFGDRLGPSQNVRLQCGENGPAHPLPSKTKTTERLLSHSSVAVDAAPPNQGGLATCSDVRHPASLTSSGSSGSPSSSIKMSSSTSSLTSSSSFSDGFKVQGPDTRIKDKVVTHVQSGTAEHRPRNTPFMGIMDKTARFQQQSNPPSRSWHCPAPEGLLTNTSSAAGLQSANTEKPSLMQVGGYNNQAKTCSVSTLSASVHNGAQVKELEESKCQIPVHSQENRITKTVSHLYQESISKQQPHISNEAHRSHLTAAKPKRSFIESNV

SEQ ID NO: 2229 - protein, 1722 aa, Homo sapiens
MRTGWATPRRPAGLLMLLFWFFDLAEPSGRAANDPFTIVHGNTGKCIKPVYGWIVADDCDETEDKLWKWVSQHRLFHLHSQKCLGLDITKSVNELRMFSCDSSAMLWWKCEHHSLYGAARYRLALKDGHGTAISNASDVWKKGGSEESLCDQPYHEIYTRDGNSYGRPCEFPFLIDGTWHHDCILDEDHSGPWCATTLNYEYDRKWGICLKPENGCEDNWEKNEQFGSCYQFNTQTALSWKEAYVSCQNQGADLLSINSAAELTYLKEKEGIAKIFWIGLNQLYSARGWEWSDHKPLNFLNWDPDRPSAPTIGGSSCARMDAESGLWQSFSCEAQLPYVCRKPLNNTVELTDVWTYSDTRCDAGWLPNNGFCYLLVNESNSWDKAHAKCKAFSSDLISIHSLADVEVVVTKLHNEDIKEEVWIGLKNINIPTLFQWSDGTEVTLTYWDENEPNVPYNKTPNCVSYLGELGQWKVQSCEEKLKYVCKRKGEKLNDASSDKMCPPDEGWKRHGETCYKIYEDEVPFGTNCNLTITSRFEQEYLNDLMKKYDKSLRKYFWTGLRDVDSCGEYNWATVGGRRRAVTFSNWNFLEPASPGGCVAMSTGKSVGKWEVKDCRSFKALSICKKMSGPLGPEEASPKPDDPCPEGWQSFPASLSCYKVFHAERIVRKRNWEEAERFCQALGAHLSSFSHVDEIKEFLHFLTDQFSGQHWLWIGLNKRSPDLQGSWQWSDRTPVSTIIMPNEFQQDYDIRDCAAVKVFHRPWRRGWHFYDDREFIYLRPFACDTKLEWVCQIPKGRTPKTPDWYNPDRAGIHGPPLIIEGSEYWFVADLHLNYEEAVLYCASNHSFLATITSFVGLKAIKNKIANISGDGQKWWIRISEWPIDDHFTYSRYPWHRFPVTFGEECLYMSAKTWLIDLGKPTDCSTKLPFICEKYNVSSLEKYSPDSAAKVQCSEQWIPFQNKCFLKIKPVSLTFSQASDTCHSYGGTLPSVLSQIEQDFITSLLPDMEATLWIGLRWTAYEKINKWTDNRELTYSNFHPLLVSGRLRIPENFFEEESRYHCALILNLQKSPFTGTWNFTSCSERHFVSLCQKYSEVKSRQTLQNASETVKYLNNLYKIIPKTLTWHSAKRECLKSNMQLVSITDPYQQAFLSVQALLHNSSLWIGLFSQDDELNFGWSDGKRLHFSRWAETNGQLEDCVVLDTDGFWKTVDCNDNQPGAICYYSGNETEKEVKPVDSVKCPSPVLNTPWIPFQNCCYNFIITKNRHMATTQDEVHTKCQKLNPKSHILSIRDEKENNFVLEQLLYFNYMASWVMLGITYRNKSLMWFDKTPLSYTHWRAGRPTIKNEKFLAGLSTDGFWDIQTFKVIEEAVYFHQHSILACKIEMVDYKEEYNTTLPQFMPYEDGIYSVIQKKVTWYEALNMCSQSGGHLASVHNQNGQLFLEDIVKRDGFPLWVGLSSHDGSESSFEWSDGSTFDYIPWKGQTSPGNCVLLDPKGTWKHEKCNSVKDGAICYKPTKSKKLSRLTYSSRCPAAKENGSRWIQYKGHCYKSDQALHSFSEAKKLCSKHDHSATIVSIKDEDENKFVSRLMRENNNITMRVWLGLSQHSVDQSWSWLDGSEVTFVKWENKSKSGVGRCSMLIASNETWKKVECEHGFGRVVCKVPLGPDYTAIAIIVATLSILVLMGGLIWFLFQRHRLHLAGFSSVRYAQGVNEDEIMLPSFHD

SEQ ID NO: 2230 - protein, 509 aa, Homo sapiens
MVDGVMILPVLIMIALPSPSMEDEKPKVNPKLYMCVCEGLSCGNEDHCEGQQCFSSLSINDGFHVYQKGCFQVYEQGKMTCKTPPSPGQAVECCQGDWCNRNITAQLPTKGKSFPGTQNFHLEVGLIILSVVFAVCLLACLLGVALRKFKRRNQERLNPRDVEYGTIEGLITTNVGDSTLADLLDHSCTSGSGSGLPFLVQRTVARQITLLECVGKGRYGEVWRGSWQGENVAVKIFSSRDEKSWFRETELYNTVMLRHENILGFIASDMTSRHSSTQLWLITHYHEMGSLYDYLQLTTLDTVSCLRIVLSIASGLAHLHIEIFGTQGKPAIAHRDLKSKNILVKKNGQCCIADLGLAVMHSQSTNQLDVGNNPRVGTKRYMAPEVLDETIQVDCFDSYKRVDIWAFGLVLWEVARRMVSNGIVEDYKPPFYDVVPNDPSFEDMRKVVCVDQQRPNIPNRWFSDPTLTSLAKLMKECWYQNPSARLTALRIKKTLTKIDNSLDKLKTDC

SEQ ID NO: 2231 - protein, 236 aa, Homo sapiens
MGVEGCTKCIKYLLFVFNFVFWLAGGVILGVALWLRHDPQTTNLLYLELGDKPAPNTFYVGIYILIAVGAVMMFVGFLGCYGAIQESQCLLGTFFTCLVILFACEVAAGIWGFVNKDQIAKDVKQFYDQALQQAVVDDDANNAKAVVKTFHETLDCCGSSTLTALTTSVLKNNLCPSGSNIISNLFKEDCHQKIDDLFSGKLYLIGIAAIVVAVIMIFEMILSMVLCCGIRNSSVY

SEQ ID NO: 2232 - protein, 879 aa, Homo sapiens
MKEEAFLRRRFSLCPPSSTPQKVDPRKLTRNLLLSGDNELYPLSPGKDMEPNGPSLPRDEGPPTPSSATKVPPAEYRLCNGSDKECVSPTARVTKKETLKAQKENYRQEKKRATRQLLSALTDPSVVIMADSLKIRGTLKSWTKLWCVLKPGVLLIYKTPKVGQWVGTVLLHCCELIERPSKKDGFCFKLFHPLDQSVWAVKGPKGESVGSITQPLPSSYLIFRAASESDGRCWLDALELALRCSSLLRLGTCKPGRDGEPGTSPDASPSSLCGLPASATVHPDQDLFPLNGSSLENDAFSDKSERENPEESDTETQDHSRKTESGSDQSETPGAPVRRGTTYVEQVQEELGELGEASQVETVSEENKSLMWTLLKQLRPGMDLSRVVLPTFVLEPRSFLNKLSDYYYHADLLSRAAVEEDAYSRMKLVLRWYLSGFYKKPKGIKKPYNPILGETFRCCWFHPQTDSRTFYIAEQVSHHPPVSAFHVSNRKDGFCISGSITAKSRFYGNSLSALLDGKATLTFLNRAEDYTLTMPYAHCKGILYGTMTLELGGKVTIECAKNNFQAQLEFKLKPFFGGSTSINQISGKITSGEEVLASLSGHWDRDVFIKEEGSGSSALFWTPSGEVRRQRLRQHTVPLEEQTELESERLWQHVTRAISKGDQHRATQEKFALEEAQRQRARERQESLMPWKPQLFHLDPITQEWHYRYEDHSPWDPLKDIAQFEQDGILRTLQQEAVARQTTFLGSPGPRHERSGPDQRLRKASDQPSGHSQATESSGSTPESCPELSDEEQDGDFVPGGESPCPRCRKEARRLQALHEAILSIREAQQELHRHLSAMLSSTARAAQAPTPGLLQSPRSWFLLCVFLACQLFINHILK

SEQ ID NO: 2233 - protein, 164 aa, Homo sapiens
MGDLPGLVRLSIALRIQPNDGPVFYKVDGQRFGQNRTIKLLTGSSYKVEVKIKPSTLQVENISIGGVLVPLELKSKEPDGDRVVYTGTYDTEGVTPTKSGERQPIQITMPFTDIGTFETVWQVKFYNYHKRDHCQWGSPFSVIEYECKPNETRSLMWVNKESFL

SEQ ID NO: 2234 - protein, 252 aa, Homo sapiens
MESEMETQSARAEEGFTQVTRKGGRRAKKRQAEQLSAAGEGGDAGRMDTEEARPAKRPVFPPLCGDGLLSGKEETRKIPVPANRYTPLKENWMKIFTPIVEHLGLQIRFNLKSRNVEIRTCKETKDVSALTKAADFVKAFILGFQVEDALALIRLDDLFLESFEITDVKPLKGDHLSRAIGRIAGKGGKTKFTIENVTRTRIVLADVKVHILGSFQNIKMARTAICNLILGNPPSKVYGNIRAVASRSADRF

SEQ ID NO: 2235 - protein, 588 aa, Homo sapiens
MDLEEAEEFKERCTQCAAVSWGLTDEGKYYCTSCHNVTERYQEVTNTDLIPNTQIKALNRGLKKKNNTEKGWDWYVCEGFQYILYQQAEALKNLGVGPELKNDVLHNFWKRYLQKSKQAYCKNPVYTTGRKPTVLEDNLSHSDWASEPELLSDVSCPPFLESGAESQSDIHTRKPFPVSKASQSETSVCSGSLDGVEYSQRKEKGIVKMTMPQTLAFCYLSLLWQREAITLSDLLRFVEEDHIPYINAFQHFPEQMKLYGRDRGIFGIESWPDYEDIYKKTVEVGTFLDLPRFPDITEDCYLHPNILCMKYLMEVNLPDEMHSLTCHVVKMTGMGEVDFLTFDPIAKMAKTVKYDVQAVAIIVVVLKLLFLLDDSFEWSLSNLAEKHNEKNKKDKPWFDFRKWYQIMKKAFDEKKQKWEEARAKYLWKSEKPLYYSFVDKPVAYKKREMVVNLQKQFSTLVESTATAGKKSPSSFQFNWTEEDTDRTCFHGHSLQGVLKEKGQSLLTKNSLYWLSTQKFCRCYCTHVTTYEESNYSLSYQFILNLFSFLLRIKTSLLHEEVSLVEKKLFEKKYSVKRKKSRSKKVRRH

SEQ ID NO: 2236 - protein, 1028 aa, Homo sapiens
MMFPWKQLILLSFIGCLGGELLLQGPVFIKEPSNSIFPVGSEDKKITLHCEARGNPSPHYRWQLNGSDIDMSMEHRYKLNGGNLVVINPNRNWDTGTYQCFATNSLGTIVSREAKLQFAYLENFKTKMRSTVSVREGQGVVLLCGPPPHSGELSYAWIFNEYPSFVEEDSRRFVSQETGHLYISKVEPSDVGNYTCVVTSMVTNARVLGSPTPLVLRSDGVMGEYEPKIEVQFPETLPAAKGSTVKLECFALGNPIPQINWRRSDGLPFSSKIKLRKFSGVLEIPNFQQEDAGSYECIAENSRGKNVARGRLTYYAKPHWVQLIKDVEIAVEDSLYWECRASGKPKPSYRWLKNGAALVLEERTQIENGALTISNLSVTDSGMFQCIAENKHGLVYSSAELKVVASAPDFSKNPMKKLVQVQVGSLVSLDCKPRASPRALSSWKKGDVSVQEHERISLLNDGGLKIANVTKADAGTYTCMAENQFGKANGTTHLVVTEPTRITLAPSNMDVSVGESVILPCQVQHDPLLDIIFTWYFNGALADFKKDGSHFEKVGGSSSGDLMIRNIQLKHSGKYVCMVQTGVDSVSSAADLIVRGSPGPPENVKVDEITDTTAQLSWKEGKDNHSPVISYSIQARTPFSVGWQTVTTVPEVIDGKTHTATVVELNPWVEYEFRVVASNKIGGGEPSLPSEKVRTEEAVPEVPPSEVNGGGGSRSELVITWDPVPEELQNGEGFGYVVAFRPLGVTTWIQTVVTSPDTPRYVFRNESIVPYSPYEVKVGVYNNKGEGPFSPVTTVFSAEEEPTVAPSQVSANSLSSSEIEVSWNTIPWKLSNGHLLGYEVRYWNGGGKEESSSKMKVAGNETSARLRGLKSNLAYYTAVRAYNSAGAGPFSATVNVTTKKTPPSQPPGNVVWNATDTKVLLNWEQVKAMENESEVTGYKVFYRTSSQNNVQVLNTNKTSAELVLPIKEDYIIEVKATTDGGDGTSSEQIRIPRITSMDARGSTSAISNVHPMSSYMPIVLFLIVYVLW

SEQ ID NO: 2237 - protein, 1066 aa, Homo sapiens
MGFELDRFDGDVDPDLKCALCHKVLEDPLTTPCGHVFCAGCVLPWVVQEGSCPARCRGRLSAKELNHVLPLKRLILKLDIKCAYATRGCGRVVKLQQLPEHLERCDFAPARCRHAGCGQVLLRRDVEAHMRDACDARPVGRCQEGCGLPLTHGEQRAGGHCCARALRAHNGALQARLGALHKALKKEALRAGKREKSLVAQLAAAQLELQMTALRYQKKFTEYSARLDSLSRCVAAPPGGKGEETKSLTLVLHRDSGSLGFNIIGGRPSVDNHDGSSSEGIFVSKIVDSGPAAKEGGLQIHDRIIEVNGRDLSRATHDQAVEAFKTAKEPIVVQVLRRTPRTKMFTPPSESQLVDTGTQTDITFEHIMALTKMSSPSPPVLDPYLLPEEHPSAHEYYDPNDYIGDIHQEMDREELELEEVDLYRMNSQDKLGLTVCYRTDDEDDIGIYISEIDPNSIAAKDGRIREGDRIIQINGIEVQNREEAVALLTSEENKNFSLLIARPELQLDEGWMDDDRNDFLDDLHMDMLEEQHHQAMQFTASVLQQKKHDEDGGTTDTATILSNQHEKDSGVGRTDESTRNDESSEQENNGDDATASSNPLAGQRKLTCSQDTLGSGDLPFSNESFISADCTDADYLGIPVDECERFRELLELKCQVKSATPYGLYYPSGPLDAGKSDPESVDKELELLNEELRSIELECLSIVRAHKMQQLKEQYRESWMLHNSGFRNYNTSIDVRRHELSDITELPEKSDKDSSSAYNTGESCRSTPLTLEISPDNSLRRAAEGISCPSSEGAVGTTEAYGPASKNLLSITEDPEVGTPTYSPSLKELDPNQPLESKERRASDGSRSPTPSQKLGSAYLPSYHHSPYKHAHIPAHAQHYQSYMQLIQQKSAVEYAQSQMSLVSMCKDLSSPTPSEPRMEWKVKIRSDGTRYITKRPVRDRLLRERALKIREERSGMTTDDDAVSEMKMGRYWSKEERKQHLVKAKEQRRRREFMMQSRLDCLKEQQAADDRKEMNILELSHKKMMKKRNKKIFDNWMTIQELLTHGTKSPDGTRVYNSFLSVTTV

SEQ ID NO: 2238 - protein, 451 aa, Homo sapiens
MVPEVRVLSSLLGLALLWFPLDSHARARPDMFCLFHGKRYSPGESWHPYLEPQGLMYCLRCTCSEGAHVSCYRLHCPPVHCPQPVTEPQQCCPKCVEPHTPSGLRAPPKSCQHNGTMYQHGEIFSAHELFPSRLPNQCVLCSCTEGQIYCGLTTCPEPGCPAPLPLPDSCCQACKDEASEQSDEEDSVQSLHGVRHPQDPCSSDAGRKRGPGTPAPTGLSAPLSFIPRHFRPKGAGSTTVKIVLKEKHKKACVHGGKTYSHGEVWHPAFRAFGPLPCILCTCEDGRQDCQRVTCPTEYPCRHPEKVAGKCCKICPEDKADPGHSEISSTRCPKAPGRVLVHTSVSPSPDNLRRFALEHEASDLVEIYLWKLVKDEETEAQRGEVPGPRPHSQNLPLDSDQESQEARLPERGTALPTARWPPRRSLERLPSPDPGAEGHGQSRQSDQDITKT

SEQ ID NO: 2239 - protein, 2063 aa, Homo sapiens
MADGAPRPQLYRSVSFKLLERWSGGPGLREEDTDTPGLRRRASCRPTTAARGQPSRRVSKLASGPLAAPAQPRPLRSLSPSVRQLSRRFDAPRLDDGSAGTRDGGVLPAAAEEAAEGPARGAWPSVTEMRKLFGGPGSRRPSADSESPGTPSPDGAAWEPPARESRQPPTPPPRTCFPLAGLRSARPLTGPETEGRLRRPQQQQERAQRPADGLHSWHIFSQPQAGARASCSSSSIAASYPVSRSRAASSSEEEEEGPPQLPGAQSPAYHGGHSSGSDDDRDGEGGHRWGGRPGLRPGSSLLDQDCRPDSDGLNLSSMNSAGVSGSPEPPTSPRAPREEGLREWGSGSPPCVPGPQEGLRPMSDSVGGAFRVAKVSFPSYLASPAGSRGSSRYSSTETLKDDDLWSSRGSGGWGVYRSPSFGAGEGLLRSQARTRAKGPGGTSRALRDGGFEPEKSRQRKSLSNPDIASETLTLLSFLRSDLSELRVRKPGGSSGDRGSNPLDGRDSPSAGGPVGQLEPIPIPAPASPGTRPTLKDLTATLRRAKSFTCSEKPMARRLPRTSALKSSSSELLLTGPGAEEDPLPLIVQDQYVQEARQVFEKIQRMGAQQDDGSDAPPGSPDWAGDVTRGQRSQEELSGPESSLTDEGIGADPEPPVAAFCGLGTTGMWRPLSSSSAQTNHHGPGTEDSLGGWALVSPETPPTPGALRRRRKVPPSGSGGSELSNGEAGEAYRSLSDPIPQRHRAATSEEPTGFSVDSNLLGSLSPKTGLPATSAMDEGLTSGHSDWSVGSEESKGYQEVIQSIVQGPGTLGRVVDDRIAGKAPKKKSLSDPSRRGELAGPGFEGPGGEPIREVEPMLPPSSSEPILVEQRAEPEEPGATRSRAQSERALPEALPPPATAHRNFHLDPKLADILSPRLIRRGSKKRPARSSHQELRRDEGSQDQTGSLSRARPSSRHVRHASVPATFMPIVVPEPPTSVGPPVAVPEPIGFPTRAHPTLQAPSLEDVTKQYMLNLHSGEVPAPVPVDMPCLPLAAPPSAEAKPPEAARPADEPTPASKCCSKPQVDMRKHVAMTLLDTEQSYVESLRTLMQGYMQPLKQPENSVLCDPSLVDEIFDQIPELLEHHEQFLEQVRHCMQTWHAQQKVGALLVQSFSKDVLVNIYSAYIDNFLNAKDAVRVAKEARPAFLKFLEQSMRENKEKQALSDLMIKPVQRIPRYELLVKDLLKHTPEDHPDHPLLLEAQRNIKQVAERINKGVRSAEEAERHARVLQEIEAHIEGMEDLQAPLRRFLRQEMVIEVKAIGGKKDRSLFLFTDLIVCTTLKRKSGSLRRSSMSLYTAASVIDTASKYKMLWKLPLEDADIIKGASQATNRENIQKAISRLDEDLTTLGQMSKLSESLGFPHQSLDDALRDLSAAMHRDLSEKQALCYALSFPPTKLELCATRPEGTDSYIFEFPHPDARLGFEQAFDEAKRKLASSKSCLDPEFLKAIPIMKTRSGMQFSCAAPTLNSCPEPSPEVWVCNSDGYVGQVCLLSLRAEPDVEACIAVCSARILCIGAVPGLQPRCHREPPPSLRSPPETAPEPAGPELDVEAAADEEAATLAEPGPQPCLHISIAGSGLEMTPGLGEGDPRPELVPFDSDSDDESSPSPSGTLQSQASRSTISSSFGNEETPSSKEATAETTSSEEEQEPGFLPLSGSFGPGGPCGTSPMDGRALRRSSHGSFTRGSLEDLLSVDPEAYQSSVWLGTEDGCVHVYQSSDSIRDRRNSMKLQHAASVTCILYLNNQVFVSLANGELVVYQREAGHFWDPQNFKSVTLGTQGSPITKMVSVGGRLWCGCQNRVLVLSPDTLQLEHMFYVGQDSSRCVACMVDSSLGVWVTLKGSAHVCLYHPDTFEQLAEVDVTPPVHRMLAGSDAIIRQHKAACLRITALLVCEELLWVGTSAGVVLTMPTSPGTVSCPRAPLSPTGLGQGHTGHVRFLAAVQLPDGFNLLCPTPPPPPDTGPEKLPSLEHRDSPWHRGPAPARPKMLVISGGDGYEDFRLSSGGGSSSETVGRDDSTNHLLLWRV

SEQ ID NO: 2240 - protein, 466 aa, Homo sapiens
MADQLYLENIDEFVTDQNKIVTYKWLSYTLGVHVNQAKQMLYDYVERKRKENSGAQLHVTYLVSGSLIQNGHSCHKVAVVREDKLEAVKSKLAVTASIHVYSIQKAMLKDSGPLFNTDYDILKSNLQNCSKFSAIQCAAAVPRAPAESSSSSKKFEQSHLHMSSETQANNELTTNGHGPPASKQVSQQPKGIMGMFASKAAAKTQETNKETKTEAKEVTNASAAGNKAPGKGNMMSNFFGKAAMNKFKVNLDSEQAVKEEKIVEQPTVSVTEPKLATPAGLKKSSKKAEPVKVLQKEKKRGKRVALSDDETKETENMRKKRRRIKLPESDSSEDEVFPDSPGAYEAESPSPPPPPSPPLEPVPKTEPEPPSVKSSSGENKRKRKRVLKSKTYLDGEGCIVTEKVYESESCTDSEEELNMKTSSVHRPPAMTVKKEPREERKGPKKGTAALGKANRQVSITGFFQRK

SEQ ID NO: 2241 - protein, 1254 aa, Homo sapiens
MKKHRRALALVSCLFLCSLVWLPSWRVCCKESSSASASSYYSQDDNCALENEDVQFQKKDEREGPINAESLGKSGSNLPISPKEHKLKDDSIVDVQNTESKKLSPPVVETLPTVDLHEESSNAVVDSETVENISSSSTSEITPISKLDEIEKSGTIPIAKPSETEQSETDCDVGEALDASAPIEQPSFVSPPDSLVGQHIENVSSSHGKGKITKSEFESKVSASEQGGGDPKSALNASDNLKNESSDYTKPGDIDPTSVASPKDPEDIPTFDEWKKKVMEVEKEKSQSMHASSNGGSHATKKVQKNRNNYASVECGAKILAANPEAKSTSAILIENMDLYMLNPCSTKIWFVIELCEPIQVKQLDIANYELFSSTPKDFLVSISDRYPTNKWIKLGTFHGRDERNVQSFPLDEQMYAKYVKMFIKYIKVELLSHFGSEHFCPLSLIRVFGTSMVEEYEEIADSQYHSERQELFDEDYDYPLDYNTGEDKSSKNLLGSATNAILNMVNIAANILGAKTEDLTEGNKSISENATATAAPKMPESTPVSTPVPSPEYVTTEVHTHDMEPSTPDTPKESPIVQLVQEEEEEASPSTVTLLGSGEQEDESSPWFESETQIFCSELTTICCISSFSEYIYKWCSVRVALYRQRSRTALSKGKDYLVLAQPPLLLPAESVDVSVLQPLSGELENTNIEREAETVVLGDLSSSMHQDDLVNHTVDAVELEPSHSQTLSQSLLLDITPEINPLPKIEVSESVEYEAGHIPSPVIPQESSVEIDNETEQKSESFSSIEKPSITYETNKVNELMDNIIKEDVNSMQIFTKLSETIVPPINTATVPDNEDGEAKMNIADTAKQTLISVVDSSSLPEVKEEEQSPEDALLRGLQRTATDFYAELQNSTDLGYANGNLVHGSNQKESVFMRLNNRIKALEVNMSLSGRYLEELSQRYRKQMEEMQKAFNKTIVKLQNTSRIAEEQDQRQTEAIQLLQAQLTNMTQLVSNLSATVAELKREVSDRQSYLVISLVLCVVLGLMLCMQRCRNTSQFDGDYISKLPKSNQYPSPKRCFSSYDDMNLKRRTSFPLMRSKSLQLTGKEVDPNDLYIVEPLKFSPEKKKKRCKYKIEKIETIKPEEPLHPIANGDIKGRKPFTNQRDFSNMGEVYHSSYKGPPSEGSSETSSQSEESYFCGISACTSLCNGQSQKTKTEKRALKRRRSKVQDQGKLIKTLIQTKSGSLPSLHDIIKGNKEITVGTFGVTAVSGHI

SEQ ID NO: 2242 - protein, 357 aa, Homo sapiens
MIEQQKRKGPELPLVPVKRQRHELLLGAGSGPGAGQQQATPGALLQAGPPRCSSLQAPIMLLSGHEGEVYCCKFHPNGSTLASAGFDRLILLWNVYGDCDNYATLKGHSGAVMELHYNTDGSMLFSASTDKTVAVWDSETGERVKRLKGHTSFVNSCYPARRGPQLVCTGSDDGTVKLWDIRKKAAIQTFQNTYQVLAVTFNDTSDQIISGGIDNDIKVWDLRQNKLTYTMRGHADSVTGLSLSSEGSYLLSNAMDNTVRVWDVRPFAPKERCVKIFQGNVHNFEKNLLRCSWSPDGSKIAAGSADRFVYVWDTTSRRILYKLPGHAGSINEVAFHPDEPIIISASSDKRLYMGEIQ

SEQ ID NO: 2243 - protein, 253 aa, Homo sapiens
MAASGESGTSGGGGSTEEAFMTFYSEVKQIEKRDSVLTSKNQIERLTRPGSSYFNLNPFEVLQIDPEVTDEEIKKRFRQLSILVHPDKNQDDADRAQKAFEAVDKAYKLLLDQEQKKRALDVIQAGKEYVEHTVKERKKQLKKEGKPTIVEEDDPELFKQAVYKQTMKLFAELEIKRKEREAKEMHERKRQREEEIEAQEKAKREREWQKNFEESRDGRVDSWRNFQANTKGKKEKKNRTFLRPPKVKMEQRE

SEQ ID NO: 2244 - protein, 373 aa, Homo sapiens
MWVCSTLWRVRTPARQWRGLLPASGCHGPAASSYSASAEPARVRALVYGHHGDPAKVVELKNLELAAVRGSDVRVKMLAAPINPSDINMIQGNYGFLPELPAVGGNEGVAQVVAVGSNVTGLKPGDWVIPANAGLGTWRTEAVFSEEALIQVPSDIPLQSAATLGVNPCTAYRMLMDFEQLQPGDSVIQNASNSGVGQAVIQIAAALGLRTINVVRDRPDIQKLSDRLKSLGAEHVITEEELRRPEMKNFFKDMPQPRLALNCVGGKSSTELLRQLARGGTMVTYGGMAKQPVVASVSLLIFKDLKLRGFWLSQWKKDHSPDQFKELILTLCDLIRRGQLTAPACSQVPLQDYQSALEASMKPFISSKQILTM

SEQ ID NO: 2245 - protein, 1538 aa, Homo sapiens
MEPRMESCLAQVLQKDVGKRLQVGQELIDYFSDKQKSADLEHDQTMLDKLVDGLATSWVNSSNYKVVLLGMDILSALVTRLQDRFKAQIGTVLPSLIDRLGDAKDSVREQDQTLLLKIMDQAANPQYVWDRMLGGFKHKNFRTREGICLCLIATLNASGAQTLTLSKIVPHICNLLGDPNSQVRDAAINSLVEIYRHVGERVRADLSKKGLPQSRLNVIFTKFDEVQKSGNMIQSANDKNFDDEDSVDGNRPSSASSTSSKAPPSSRRNVGMGTTRRLGSSTLGSKSSAAKEGAGAVDEEDFIKAFDDVPVVQIYSSRDLEESINKIREILSDDKHDWEQRVNALKKIRSLLLAGAAEYDNFFQHLRLLDGAFKLSAKDLRSQVVREACITLGHLSSVLGNKFDHGAEAIMPTIFNLIPNSAKIMATSGVVAVRLIIRHTHIPRLIPVITSNCTSKSVAVRRRCFEFLDLLLQEWQTHSLERHISVLAETIKKGIHDADSEARIEARKCYWGFHSHFSREAEHLYHTLESSYQKALQSHLKNSDSIVSLPQSDRSSSSSQESLNRPLSAKRSPTGSTTSRASTVSTKSVSTTGSLQRSRSDIDVNAAASAKSKVSSSSGTTPFSSAAALPPGSYASLGRIRTRRQSSGSATNVASTPDNRGRSRAKVVSQSQRSRSANPAGAGSRSSSPGKLLGSGYGGLTGGSSRGPPVTPSSEKRSKIPRSQGCSRETSPNRIGLARSSRIPRPSMSQGCSRDTSRESSRDTSPARGFPPLDRFGLGQPGRIPGSVNAMRVLSTSTDLEAAVADALKKPVRRRYEPYGMYSDDDANSDASSVCSERSYGSRNGGIPHYLRQTEDVAEVLNHCASSNWSERKEGLLGLQNLLKSQRTLSRVELKRLCEIFTRMFADPHSKRVFSMFLETLVDFIIIHKDDLQDWLFVLLTQLLKKMGADLLGSVQAKVQKALDVTRDSFPFDQQFNILMRFIVDQTQTPNLKVKVAILKYIESLARQMDPTDFVNSSETRLAVSRIITWTTEPKSSDVRKAAQIVLISLFELNTPEFTMLLGALPKTFQDGATKLLHNHLKNSSNTSVGSPSNTIGRTPSRHTSSRTSPLTSPTNCSHGGLSPSRLWGWSADGLAKHPPPFSQPNSIPTAPSHKALRRSYSPSMLDYDTENLNSEEIYSSLRGVTEAIEKFSFRSQEDLNEPIKRDGKKECDIVSRDGGAASPATEGRGGSEVEGGRTALDNKTSLLNTQPPRAFPGPRARDYNPYPYSDAINTYDKTALKEAVFDDDMEQLRDVPIDHSDLVADLLKELSNHNERVEERKGALLELLKITREDSLGVWEEHFKTILLLLLETLGDKDHSIRALALRVLREILRNQPARFKNYAELTIMKTLEAHKDSHKEVVRAAEEAASTLASSIHPEQCIKVLCPIIQTADYPINLAAIKMQTKVVERIAKESLLQLLVDIIPGLLQGYDNTESSVRKASVFCLVAIYSVIGEDLKPHLAQLTGSKMKLLNLYIKRAQTTNSNSSSSSDVSTHS

SEQ ID NO: 2246 - protein, 409 aa, Homo sapiens
MKLKQRVVLLAILLVIFIFTKVFLIDNLDTSAANREDQRAFHRMMTGLRVELAPKLDHTLQSPWEIAAQWVVPREVYPEETPELGAVMHAMATKKIIKADVGYKGTQLKALLILEGGQKVVFKPKRYSRDHVVEGEPYAGYDRHNAEVAAFHLDRILGFHRAPLVVGRFVNLRTEIKPVATEQLLSTFLTVGNNTCFYGKCYYCRETEPACADGDIMEGSVTLWLPDVWPLQKHRHPWGRTYREGKLARWEYDESYCDAVKKTSPYDSGPRLLDIIDTAVFDYLIGNADRHHYESFQDDEGASMLILLDNAKSFGNPSLDERSILAPLYQCCIIRVSTWNRLNYLKNGVLKSALKSAMAHDPISPVLSDPHLDAVDQRLLSVLATVKQCTDQFGMDTVLVEDRMPLSHL

SEQ ID NO: 2247 - protein, 870 aa, Homo sapiens
MTADKEKKRSSSERRKEKSRDAARCRRSKETEVFYELAHELPLPHSVSSHLDKASIMRLAISFLRTHKLLSSVCSENESEAEADQQMDNLYLKALEGFIAVVTQDGDMIFLSENISKFMGLTQVELTGHSIFDFTHPCDHEEIRENLSLKNGSGFGKKSKDMSTERDFFMRMKCTVTNRGRTVNLKSATWKVLHCTGQVKVYNNCPPHNSLCGYKEPLLSCLIIMCEPIQHPSHMDIPLDSKTFLSRHSMDMKFTYCDDRITELIGYHPEELLGRSAYEFYHALDSENMTKSHQNLCTKGQVVSGQYRMLAKHGGYVWLETQGTVIYNPRNLQPQCIMCVNYVLSEIEKNDVVFSMDQTESLFKPHLMAMNSIFDSSGKGAVSEKSNFLFTKLKEEPEELAQLAPTPGDAIISLDFGNQNFEESSAYGKAILPPSQPWATELRSHSTQSEAGSLPAFTVPQAAAPGSTTPSATSSSSSCSTPNSPEDYYTSLDNDLKIEVIEKLFAMDTEAKDQCSTQTDFNELDLETLAPYIPMDGEDFQLSPICPEERLLAENPQSTPQHCFSAMTNIFQPLAPVAPHSPFLLDKFQQQLESKKTEPEHRPMSSIFFDAGSKASLPPCCGQASTPLSSMGGRSNTQWPPDPPLHFGPTKWAVGDQRTEFLGAAPLGPPVSPPHVSTFKTRSAKGFGARGPDVLSPAMVALSNKLKLKRQLEYEEQAFQDLSGGDPPGGSTSHLMWKRMKNLRGGSCPLMPDKPLSANVPNDKFTQNPMRGLGHPLRHLPLPQPPSAISPGENSKSRFPPQCYATQYQDYSLSSAHKVSGMASRLLGPSFESYLLPELTRYDCEVNVPVLGSSTLLQGGDLLRALDQAT

SEQ ID NO: 2248 - protein, 314 aa, Homo sapiens
MAPPQVLAFGLLLAAATATFAAAQEECVCENYKLAVNCFVNNNRQCQCTSVGAQNTVICSKLAAKCLVMKAEMNGSKLGRRAKPEGALQNNDGLYDPDCDESGLFKAKQCNGTSMCWCVNTAGVRRTDKDTEITCSERVRTYWIIIELKHKAREKPYDSKSLRTALQKEITTRYQLDPKFITSILYENNVITIDLVQNSSQKTQNDVDIADVAYYFEKDVKGESLFHSKKMDLTVNGEQLDLDPGQTLIYYVDEKAPEFSMQGLKAGVIAVIVVVVIAVVAGIVVLVISRKKRMAKYEKAEIKEMGEMHRELNA

SEQ ID NO: 2249 - protein, 995 aa, Homo sapiens
MSSLPRRAKVQVQDVVLKDEFSSFSELSSASEEDDKEDSAWEPQKKVPRSRKQPPPKESKPKRMPRVKKNAPQISDGSEVVVVKEELNSSVAIADTALEDRKNKLDTVQTLKTAKTKQKCAAQPHTVRRTKKLKVEEETSKASNLEGESNSSETPSTSTVWGGTCKKEENDDDFTFGQSALKKIKTETYPQGQPVKFPANANSTKEEVEMNWDMVQVLSERTNIEPWVCANIIRLFNDDNTIPFIIRYRKELINNLDADSLREVQQTLEELRAVAKKVHSTIQKIKKEGKMSECLLKAMLNCKTFEELEHVSAPYKTGSKGTKAQRARQLGLEGAARALLEKPGELSLLSYIRPDVKGLSTLQDIEIGVQHILADMIAKDKDTLDFIRNLCQKRHVCIQSSLAKVSSKKVNEKDVDKFLLYQHFSCNIRNIHHHQILAINRGENLKVLTVKVNISDGVKDEFCRWCIQNRWRPRSFARPELMKILYNSLNDSFKRLIYPLLCREFRAKLTSDAEKESVMMFGRNLRQLLLTSPVPGRTLMGVDPGYKHGCKLAIISPTSQILHTDVVYLHCGQGFREAEKIKTLLLNFNCSTVVIGNGTACRETEAYFADLIMKNYFAPLDVVYCIVSEAGASIYSVSPEANKEMPGLDPNLRSAVSIARRVQDPLAELVKIEPKHIGVGMYQHDVSQTLLKATLDSVVEECVSFVGVDINICSEVLLRHIAGLNANRAKNIIEWREKNGPFINREQLKKVKGLGPKSFQQCAGFIRINQDYIRTFCSQQTETSGQIQGVAVTSSADVEVTNEKQGKKKSKTAVNVLLKPNPLDQTCIHPESYDIAMRFLSSIGGTLYEVGKPEMQQKINSFLEKEGMEKIAERLQTTVHTLQVIIDGLSQPESFDFRTDFDKPDFKRSIVCLEDLQIGTVLTGKVENATLFGIFVDIGVGKSGLIPIRNVTEAKLSKTKKRRSLGLGPGERVEVQVLNIDIPRSRITLDLIRVL

SEQ ID NO: 2250 - protein, 341 aa, Homo sapiens
MASRWGPLIGLAPCCLWLLGAVLLMDASARPANHSSTRERVANREENEILPPDHLNGVKLEMDGHLNRGFHQEVFLGKDLGGFDEDAEPRRSRRKLMVIFSKVDVNTDRKISAKEMQRWIMEKTAEHFQEAMEESKTHFRAVDPDGDGHVSWDEYKVKFLASKGHSEKEVADAIRLNEELKVDEETQEVLENLKDRWYQADSPPADLLLTEEEFLSFLHPEHSRGMLRFMVKEIVRDLDQDGDKQLSVPEFISLPVGTVENQQGQDIDDNWVKDRKKEFEELIDSNHDGIVTAEELENVPTLPLQPIGTLNSHFVRLAAELGGGKATLTCAPLARRATWTP

SEQ ID NO: 2251 - protein, 832 aa, Homo sapiens
MSEAGGAGPGGCGAGAGAGAGPGALPPQPAALPPAPPQGSPCAAAAGGSGACGPATAVAAAGTAEGPGGGGSARIAVKKAQLRSAPRAKKLEKLGVYSACKAEESCKCNGWKNPNPSPTPPRADLQQIIVSLTESCRSCSHALAAHVSHLENVSEEEMNRLLGIVLDVEYLFTCVHKEEDADTKQVYFYLFKLLRKSILQRGKPVVEGSLEKKPPFEKPSIEQGVNNFVQYKFSHLPAKERQTIVELAKMFLNRINYWHLEAPSQRRLRSPNDDISGYKENYTRWLCYCNVPQFCDSLPRYETTQVFGRTLLRSVFTVMRRQLLEQARQEKDKLPLEKRTLILTHFPKFLSMLEEEVYSQNSPIWDQDFLSASSRTSQLGIQTVINPPPVAGTISYNSTSSSLEQPNAGSSSPACKASSGLEANPGEKRKMTDSHVLEEAKKPRVMGDIPMELINEVMSTITDPAAMLGPETNFLSAHSARDEAARLEERRGVIEFHVVGNSLNQKPNKKILMWLVGLQNVFSHQLPRMPKEYITRLVFDPKHKTLALIKDGRVIGGICFRMFPSQGFTEIVFCAVTSNEQVKGYGTHLMNHLKEYHIKHDILNFLTYADEYAIGYFKKQGFSKEIKIPKTKYVGYIKDYEGATLMGCELNPRIPYTEFSVIIKKQKEIIKKLIERKQAQIRKVYPGLSCFKDGVRQIPIESIPGIRETGWKPSGKEKSKEPRDPDQLYSTLKSILQQVKSHQSAWPFMEPVKRTEAPGYYEVIRFPMDLKTMSERLKNRYYVSKKLFMADLQRVFTNCKEYNPPESEYYKCANILEKFFFSKIKEAGLIDK

SEQ ID NO: 2252 - protein, 1017 aa, Homo sapiens
MGKKSRAVPGRRPILQLSPPGPRGSTPGRDPEPEPDTEPDSTAAVPSQPAPSAATTTTTAVTAAAASDDSPSEDEQEAVQEVPRVVQNPPKPVMTTRPTAVKATGGLCLLGAYADSDDDDNDVSEKLAQSKETNGNQSTDIDSTLANFLAEIDAITAPQPAAPVGASAPPPTPPRPEPKEAATSTLSSSTSNGTDSTQTSGWQYDTQCSLAGVGIEMGDWQEVWDENTGCYYYWNTQTNEVTWELPQYLATQVQGLQHYQPSSVPGAETSFVVNTDIYSKEKTISVSSSKSGPVIAKREVKKEVNEGIQALSNSEEEKKGVAASLLAPLLPEGIKEEEERWRRKVICKEEPVSEVKETSTTVEEATTIVKPQEIMLDNIEDPSQEDLCSVVQSGESEEEEEQDTLELELVLERKKAELRALEEGDGSVSGSSPRSDISQPASQDGMRRLMSKRGKWKMFVRATSPESTSRSSSKTGRDTPENGETAIGAENSEKIDENSDKEMEVEESPEKIKVQTTPKVEEEQDLKFQIGELANTLTSKFEFLGINRQSISNFHVLLLQTETRIADWREGALNGNYLKRKLQDAAEQLKQYEINATPKGWSCHWDRDHRRYFYVNEQSGESQWEFPDGEEEEEESQAQENRDETLAKQTLKDKTGTDSNSTESSETSTGSLCKESFSGQVSSSSLMPLTPFWTLLQSNVPVLQPPLPLEMPPPPPPPPESPPPPPPPPPPAEDGEIQEVEMEDEGSEEPPAPGTEEDTPLKPSAQTTVVTSQSSVDSTISSSSSTKGIKRKATEISTAVVQRSATIGSSPVLYSQSAIATGHQAAGIGNQATGIGHQTIPVSLPAAGMGHQARGMSLQSNYLGLAAAPAIMSYAECSVPIGVTAPSLQPVQARGAVPTATIIEPPPPPPPPPPPPPPAPKMPPPEKTKKGRKDKAKKSKTKMPSLVKKWQSIQRELDEEDNSSSSEEDRESTAQKRIEEWKQQQLVSGMAERNANFEALPEDWRARLKRRKMAPNT

SEQ ID NO: 2253 - protein, 264 aa, Homo sapiens
MAAAAVARLWWRGILGASALTRGTGRPSVLLLPVRRESAGADTRPTVRPRNDVAHKQLSAFGEYVAEILPKYVQQVQVSCFNELEVCIHPDGVIPVLTFLRDHTNAQFKSLVDLTAVDVPTRQNRFEIVYNLLSLRFNSRIRVKTYTDELTPIESAVSVFKAANWYEREIWDMFGVFFANHPDLRRILTDYGFEGHPFRKDFPLSGYVELRYDDEVKRVVAEPVELAQEFRKFDLNSPWEAFPVYRQPPESLKLEAGDKKPDAK

SEQ ID NO: 2254 - protein, 213 aa, Homo sapiens
MASLFKKKTVDDVIKEQNRELRGTQRAIIRDRAALEKQEKQLELEIKKMAKIGNKEACKVLAKQLVHLRKQKTRTFAVSSKVTSMSTQTKVMNSQMKMAGAMSTTAKTMQAVNKKMDPQKTLQTMQNFQKENMKMEMTEEMINDTLDDIFDGSDDEEESQDIVNQVLDEIGIEISGKMAKAPSAARSLPSASTSKATISDEEIERQLKALGVD

SEQ ID NO: 2255 - protein, 864 aa, Homo sapiens
MGCWGQLLVWFGAAGAILCSSPGSQETFLRSSPLPLASPSPRDPKVSAPPSILEPASPLNSPGTEGSWLFSTCGASGRHGPTQTQCDGAYAGTSVVVTVGAAGQLRGVQLWRVPGPGQYLISAYGAAGGKGAKNHLSRAHGVFVSAIFSLGLGESLYILVGQQGEDACPGGSPESQLVCLGESRAVEEHAAMDGSEGVPGSRRWAGGGGGGGGATYVFRVRAGELEPLLVAAGGGGRAYLRPRDRGRTQASPEKLENRSEAPGSGGRGGAAGGGGGWTSRAPSPQAGRSLQEGAEGGQGCSEAWATLGWAAAGGFGGGGGACTAGGGGGGYRGGDASETDNLWADGEDGVSFIHPSSELFLQPLAVTENHGEVEIRRHLNCSHCPLRDCQWQAELQLAECLCPEGMELAVDNVTCMDLHKPPGPLVLMVAVVATSTLSLLMVCGVLILVKQKKWQGLQEMRLPSPELELSKLRTSAIRTAPNPYYCQVGLGPAQSWPLPPGVTEVSPANVTLLRALGHGAFGEVYEGLVIGLPGDSSPLQVAIKTLPELCSPQDELDFLMEALIISKFRHQNIVRCVGLSLRATPRLILLELMSGGDMKSFLRHSRPHLGQPSPLVMRDLLQLAQDIAQGCHYLEENHFIHRDIAARNCLLSCAGPSRVAKIGDFGMARDIYRASYYRRGDRALLPVKWMPPEAFLEGIFTSKTDSWSFGVLLWEIFSLGYMPYPGRTNQEVLDFVVGGGRMDPPRGCPGPVYRIMTQCWQHEPELRPSFASILERLQYCTQDPDVLNSLLPMELGPTPEEEGTSGLGNRSLECLRPPQPQELSPEKLKSWGGSPLGPWLSSGLKPLKSRGLQPQNLWNPTYRS

SEQ ID NO: 2256 - protein, 1972 aa, Homo sapiens
MDPTGSQLDSDFSQQDTPCLIIEDSQPESQVLEDDSGSHFSMLSRHLPNLQTHKENPVLDVVSNPEQTAGEERGDGNSGFNEHLKENKVADPVDSSNLDTCGSISQVIEQLPQPNRTSSVLGMSVESAPAVEEEKGEELEQKEKEKEEDTSGNTTHSLGAEDTASSQLGFGVLELSQSQDVEENTVPYEVDKEQLQSVTTNSGYTRLSDVDANTAIKHEEQSNEDIPIAEQSSKDIPVTAQPSKDVHVVKEQNPPPARSEDMPFSPKASVAAMEAKEQLSAQELMESGLQIQKSPEPEVLSTQEDLFDQSNKTVSSDGCSTPSREEGGCSLASTPATTLHLLQLSGQRSLVQDSLSTNSSDLVAPSPDAFRSTPFIVPSSPTEQEGRQDKPMDTSVLSEEGGEPFQKKLQSGEPVELENPPLLPESTVSPQASTPISQSTPVFPPGSLPIPSQPQFSHDIFIPSPSLEEQSNDGKKDGDMHSSSLTVECSKTSEIEPKNSPEDLGLSLTGDSCKLMLSTSEYSQSPKMESLSSHRIDEDGENTQIEDTEPMSPVLNSKFVPAENDSILMNPAQDGEVQLSQNDDKTKGDDTDTRDDISILATGCKGREETVAEDVCIDLTCDSGSQAVPSPATRSEALSSVLDQEEAMEIKEHHPEEGSSGSEVEEIPETPCESQGEELKEENMESVPLHLSLTETQSQGLCLQKEMPKKECSEAMEVETSVISIDSPQKLAILDQELEHKEQEAWEEATSEDSSVVIVDVKEPSPRVDVSCEPLEGVEKCSDSQSWEDIAPEIEPCAENRLDTKEEKSVEYEGDLKSGTAETEPVEQDSSQPSLPLVRADDPLRLDQELQQPQTQEKTSNSLTEDSKMANAKQLSSDAEAQKLGKPSAHASQSFCESSSETPFHFTLPKEGDIIPPLTGATPPLIGHLKLEPKRHSTPIGISNYPESTIATSDVMSESMVETHDPILGSGKGDSGAAPDVDDKLCLRMKLVSPETEASEESLQFNLEKPATGERKNGSTAVAESVASPQKTMSVLSCICEARQENEARSEDPPTTPIRGNLLHFPSSQGEEEKEKLEGDHTIRQSQQPMKPISPVKDPVSPASQKMVIQGPSSPQGEAMVTDVLEDQKEGRSTNKENPSKALIERPSQNNIGIQTMECSLRVPETVSAATQTIKNVCEQGTSTVDQNFGKQDATVQTERGSGEKPVSAPGDDTESLHSQGEEEFDMPQPPHGHVLHRHMRTIREVRTLVTRVITDVYYVDGTEVERKVTEETEEPIVECQECETEVSPSQTGGSSGDLGDISSFSSKASSLHRTSSGTSLSAMHSSGSSGKGAGPLRGKTSGTEPADFALPSSRGGPGKLSPRKGVSQTGTPVCEEDGDAGLGIRQGGKAPVTPRGRGRRGRPPSRTTGTRETAVPGPLGIEDISPNLSPDDKSFSRVVPRVPDSTRRTDVGAGALRRSDSPEIPFQAAAGPSDGLDASSPGNSFVGLRVVAKWSSNGYFYSGKITRDVGAGKYKLLFDDGYECDVLGKDILLCDPIPLDTEVTALSEDEYFSAGVVKGHRKESGELYYSIEKEGQRKWYKRMAVILSLEQGNRLREQYGLGPYEAVTPLTKAADISLDNLVEGKRKRRSNVSSPATPTASSSSSTTPTRKITESPRASMGVLSGKRKLITSEEERSPAKRGRKSATVKPGAVGAGEFVSPCESGDNTGEPSALEEQRGPLPLNKTLFLGYAFLLTMATTSDKLASRSKLPDGPTGSSEEEEEFLEIPPFNKQYTESQLRAGAGYILEDFNEAQCNTAYQCLLIADQHCRTRKYFLCLASGIPCVSHVWVHDSCHANQLQNYRNYLLPAGYSLEEQRILDWQPRENPFQNLKVLLVSDQQQNFLELWSEILMTGGAASVKQHHSSAHNKDIALGVFDVVVTDPSCPASVLKCAEALQLPVVSQEWVIQCLIVGERIGFKQHPKYKHDYVSH

SEQ ID NO: 2257 - protein, 479 aa, Homo sapiens
MSDVTIVKEGWVQKRGEYIKNWRPRYFLLKTDGSFIGYKEKPQDVDLPYPLNNFSVAKCQLMKTERPKPNTFIIRCLQWTTVIERTFHVDTPEEREEWTEAIQAVADRLQRQEEERMNCSPTSQIDNIGEEEMDASTTHHKRKTMNDFDYLKLLGKGTFGKVILVREKASGKYYAMKILKKEVIIAKDEVAHTLTESRVLKNTRHPFLTSLKYSFQTKDRLCFVMEYVNGGELFFHLSRERVFSEDRTRFYGAEIVSALDYLHSGKIVYRDLKLENLMLDKDGHIKITDFGLCKEGITDAATMKTFCGTPEYLAPEVLEDNDYGRAVDWWGLGVVMYEMMCGRLPFYNQDHEKLFELILMEDIKFPRTLSSDAKSLLSGLLIKDPNKRLGGGPDDAKEIMRHSFFSGVNWQDVYDKKLVPPFKPQVTSETDTRYFDEEFTAQTITITPPEKYDEDGMDCMDNERRPHFPQFSYSASGRE

SEQ ID NO: 2258 - protein, 807 aa, Homo sapiens
MAATELRGVVGPGPAAIAALGGGGAGPPVVGGGGGRGDAGPGSGAASGTVVAAAAGGPGPGAGGVAAAGPAPAPPTGGSGGSGAGGSGSAREGWLFKWTNYIKGYQRRWFVLSNGLLSYYRSKAEMRHTCRGTINLATANITVEDSCNFIISNGGAQTYHLKASSEVERQRWVTALELAKAKAVKMLAESDESGDEESVSQTDKTELQNTLRTLSSKVEDLSTCNDLIAKHGTALQRSLSELESLKLPAESNEKIKQVNERATLFRITSNAMINACRDFLMLAQTHSKKWQKSLQYERDQRIRLEETLEQLAKQHNHLERAFRGATVLPANTPGNVGSGKDQCCSGKGDMSDEDDENEFFDAPEIITMPENLGHKRTGSNISGASSDISLDEQYKHQLEETKKEKRTRIPYKPNYSLNLWSIMKNCIGKELSKIPMPVNFNEPLSMLQRLTEDLEYHELLDRAAKCENSLEQLCYVAAFTVSSYSTTVFRTSKPFNPLLGETFELDRLEENGYRSLCEQVSHHPPAAAHHAESKNGWTLRQEIKITSKFRGKYLSIMPLGTIHCIFHATGHHYTWKKVTTTVHNIIVGKLWIDQSGEIDIVNHKTGDKCNLKFVPYSYFSRDVARKVTGEVTDPSGKVHFALLGTWDEKMECFKVQPVIGENGGDARQRGHEAEESRVMLWKRNPLPKNAENMYYFSELALTLNAWESGTAPTDSRLRPDQRLMENGRWDEANAEKQRLEEKQRLSRKKREAEAMKATEDGTPYDPYKALWFERKKDPVTKELTHIYRGEYWECKEKQDWSSCPDIF

SEQ ID NO: 2259 - protein, 325 aa, Homo sapiens
MEGLEENGGVVQVGELLPCKICGRTFFPVALKKHGPICQKTATKKRKTFDSSRQRAEGTDIPTVKPLKPRPEPPKKPSNWRRKHEEFIATIRAAKGLDQALKEGGKLPPPPPPSYDPDYIQCPYCQRRFNENAADRHINFCKEQAARISNKGKFSTDTKGKPTSRTQVYKPPALKKSNSPGTASSGSSRLPQPSGAGKTVVGVPSGKVSSSSSSLGNKLQTLSPSHKGIAAPHAGANVKPRNSTPPSLARNPAPGVLTNKRKTYTESYIARPDGDCASSLNGGNIKGIEGHSPGNLPKFCHECGTKYPVEWAKFCCECGIRRMIL

SEQ ID NO: 2260 - protein, 177 aa, Homo sapiens
MFHVSFRYIFGLPPLILVLLPVASSDCDIEGKDGKQYESVLMVSIDQLLDSMKEIGSNCLNNEFNFFKRHICDANKEGMFLFRAARKLRQFLKMNSTGDFDLHLLKVSEGTTILLNCTGQVKGRKPAALGEAQPTKSLEENKSLKEQKKLNDLCFLKRLLQEIKTCWNKILMGTKEH

SEQ ID NO: 2261 - protein, 222 aa, Homo sapiens
MGLFGKTQEKPPKELVNEWSLKIRKEMRVVDRQIRDIQREEEKVKRSVKDAAKKGQKDVCIVLAKEMIRSRKAVSKLYASKAHMNSVLMGMKNQLAVLRVAGSLQKSTEVMKAMQSLVKIPEIQATMRELSKEMMKAGIIEEMLEDTFESMDDQEEMEEEAEMEIDRILFEITAGALGKAPSKVTDALPEPEPPGAMAASEDEEEEEEALEAMQSRLATLRS

SEQ ID NO: 2262 - protein, 1720 aa, Homo sapiens
MLISKNMPWRRLQGISFGMYSAEELKKLSVKSITNPRYLDSLGNPSANGLYDLALGPADSKEVCSTCVQDFSNCSGHLGHIELPLTVYNPLLFDKLYLLLRGSCLNCHMLTCPRAVIHLLLCQLRVLEVGALQAVYELERILNRFLEENPDPSASEIREELEQYTTEIVQNNLLGSQGAHVKNVCESKSKLIALFWKAHMNAKRCPHCKTGRSVVRKEHNSKLTITFPAMVHRTAGQKDSEPLGIEEAQIGKRGYLTPTSAREHLSALWKNEGFFLNYLFSGMDDDGMESRFNPSVFFLDFLVVPPSRYRPVSRLGDQMFTNGQTVNLQAVMKDVVLIRKLLALMAQEQKLPEEVATPTTDEEKDSLIAIDRSFLSTLPGQSLIDKLYNIWIRLQSHVNIVFDSEMDKLMMDKYPGIRQILEKKEGLFRKHMMGKRVDYAARSVICPDMYINTNEIGIPMVFATKLTYPQPVTPWNVQELRQAVINGPNVHPGASMVINEDGSRTALSAVDMTQREAVAKQLLTPATGAPKPQGTKIVCRHVKNGDILLLNRQPTLHRPSIQAHRARILPEEKVLRLHYANCKAYNADFDGDEMNAHFPQSELGRAEAYVLACTDQQYLVPKDGQPLAGLIQDHMVSGASMTTRGCFFTREHYMELVYRGLTDKVGRVKLLSPSILKPFPLWTGKQVVSTLLINIIPEDHIPLNLSGKAKITGKAWVKETPRSVPGFNPDSMCESQVIIREGELLCGVLDKAHYGSSAYGLVHCCYEIYGGETSGKVLTCLARLFTAYLQLYRGFTLGVEDILVKPKADVKRQRIIEESTHCGPQAVRAALNLPEAASYDEVRGKWQDAHLGKDQRDFNMIDLKFKEEVNHYSNEINKACMPFGLHRQFPENSLQMMVQSGAKGSTVNTMQISCLLGQIELEGRRPPLMASGKSLPCFEPYEFTPRAGGFVTGRFLTGIKPPEFFFHCMAGREGLVDTAVKTSRSGYLQRCIIKHLEGLVVQYDLTVRDSDGSVVQFLYGEDGLDIPKTQFLQPKQFPFLASNYEVIMKSQHLHEVLSRADPKKALHHFRAIKKWQSKHPNTLLRRGAFLSYSQKIQEAVKALKLESENRNGRSPGTQEMLRMWYELDEESRRKYQKKAAACPDPSLSVWRPDIYFASVSETFETKVDDYSQEWAAQTEKSYEKSELSLDRLRTLLQLKWQRSLCEPGEAVGLLAAQSIGEPSTQMTLNTFHFAGRGEMNVTLGIPRLREILMVASANIKTPMMSVPVLNTKKALKRVKSLKKQLTRVCLGEVLQKIDVQESFCMEEKQNKFQVYQLRFQFLPHAYYQQEKCLRPEDILRFMETRFFKLLMESIKKKNNKASAFRNVNTRRATQRDLDNAGELGRSRGEQEGDEEEEGHIVDAEAEEGDADASDAKRKEKQEEEVDYESEEEEEREGEENDDEDMQEERNPHREGARKTQEQDEEVGLGTEEDPSLPALLTQPRKPTHSQEPQGPEAMERRVQAVREIHPFIDDYQYDTEESLWCQVTVKLPLMKINFDMSSLVVSLAHGAVIYATKGITRCLLNETTNNKNEKELVLNTEGINLPELFKYAEVLDLRRLYSNDIHAIANTYGIEAALRVIEKEIKDVFAVYGIAVDPRHLSLVADYMCFEGVYKPLNRFGIRSNSSPLQQMTFETSFQFLKQATMLGSHDELRSPSACLVVGKVVRGGTGLFELKQPLR

SEQ ID NO: 2263 - protein, 145 aa, Homo sapiens
MATWALLLLAAMLLGNPGLVFSRLSPEYYDLARAHLRDEEKSCPCLAQEGPQGDLLTKTQELGRDYRTCLTIVQKLKKMVDKPTQRSVSNAATRVCRTGRSRWRDVCRNFMRRYQSRVTQGLVAGETAQQICEDLRLCIPSTGPL

SEQ ID NO: 2264 - protein, 348 aa, Homo sapiens
MYTAIPQSGSPFPGSVQDPGLHVWRVEKLKPVPVAQENQGVFFSGDSYLVLHNGPEEVSHLHLWIGQQSSRDEQGACAVLAVHLNTLLGERPVQHREVQGNESDLFMSYFPRGLKYQEGGVESAFHKTSTGAPAAIKKLYQVKGKKNIRATERALNWDSFNTGDCFILDLGQNIFAWCGGKSNILERNKARDLALAIRDSERQGKAQVEIVTDGEEPAEMIQVLGPKPALKEGNPEEDLTADKANAQAAALYKVSDATGQMNLTKVADSSPFALELLISDDCFVLDNGLCGKIYIWKGRKANEKERQAALQVAEGFISRMQYAPNTQVEILPQGHESPIFKQFFKDWK

SEQ ID NO: 2265 - protein, 894 aa, Homo sapiens
MNPGFDLSRRNPQEDFELIQRIGSGTYGDVYKARNVNTGELAAIKVIKLEPGEDFAVVQQEIIMMKDCKHPNIVAYFGSYLRRDKLWICMEFCGGGSLQDIYHVTGPLSELQIAYVSRETLQGLYYLHSKGKMHRDIKGANILLTDNGHVKLADFGVSAQITATIAKRKSFIGTPYWMAPEVAAVERKGGYNQLCDLWAVGITAIELAELQPPMFDLHPMRALFLMTKSNFQPPKLKDKMKWSNSFHHFVKMALTKNPKKRPTAEKLLQHPFVTQHLTRSLAIELLDKVNNPDHSTYHDFDDDDPEPLVAVPHRIHSTSRNVREEKTRSEITFGQVKFDPPLRKETEPHHELPDSDGFLDSSEEIYYTARSNLDLQLEYGQGHQGGYFLGANKSLLKSVEEELHQRGHVAHLEDDEGDDDESKHSTLKAKIPPPLPPKPKSIFIPQEMHSTEDENQGTIKRCPMSGSPAKPSQVPPRPPPPRLPPHKPVALGNGMSSFQLNGERDGSLCQQQNEHRGTNLSRKEKKDVPKPISNGLPPTPKVHMGACFSKVFNGCPLKIHCASSWINPDTRDQYLIFGAEEGIYTLNLNELHETSMEQLFPRRCTWLYVMNNCLLSISGKASQLYSHNLPGLFDYARQMQKLPVAIPAHKLPDRILPRKFSVSAKIPETKWCQKCCVVRNPYTGHKYLCGALQTSIVLLEWVEPMQKFMLIKHIDFPIPCPLRMFEMLVVPEQEYPLVCVGVSRGRDFNQVVRFETVNPNSTSSWFTESDTPQTNVTHVTQLERDTILVCLDCCIKIVNLQGRLKSSRKLSSELTFDFQIESIVCLQDSVLAFWKHGMQGRSFRSNEVTQEISDSTRIFRLLGSDRVVVLESRPTDNPTANSNLYILAGHENSY

SEQ ID NO: 2266 - protein, 889 aa, Homo sapiens
MRALAVLSVTLVMACTEAFFPFISRGKELLWGKPEESRVSSVLEESKRLVDTAMYATMQRNLKKRGILSPAQLLSFSKLPEPTSGVIARAAEIMETSIQAMKRKVNLKTQQSQHPTDALSEDLLSIIANMSGCLPYMLPPKCPNTCLANKYRPITGACNNRDHPRWGASNTALARWLPPVYEDGFSQPRGWNPGFLYNGFPLPPVREVTRHVIQVSNEVVTDDDRYSDLLMAWGQYIDHDIAFTPQSTSKAAFGGGADCQMTCENQNPCFPIQLPEEARPAAGTACLPFYRSSAACGTGDQGALFGNLSTANPRQQMNGLTSFLDASTVYGSSPALERQLRNWTSAEGLLRVHARLRDSGRAYLPFVPPRAPAACAPEPGIPGETRGPCFLAGDGRASEVPSLTALHTLWLREHNRLAAALKALNAHWSADAVYQEARKVVGALHQIITLRDYIPRILGPEAFQQYVGPYEGYDSTANPTVSNVFSTAAFRFGHATIHPLVRRLDASFQEHPDLPGLWLHQAFFSPWTLLRGGGLDPLIRGLLARPAKLQVQDQLMNEELTERLFVLSNSSTLDLASINLQRGRDHGLPGYNEWREFCGLPRLETPADLSTAIASRSVADKILDLYKHPDNIDVWLGGLAENFLPRARTGPLFACLIGKQMKALRDGDWFWWENSHVFTDAQRRELEKHSLSRVICDNTGLTRVPMDAFQVGKFPEDFESCDSITGMNLEAWRETFPQDDKCGFPESVENGDFVHCEESGRRVLVYSCRHGYELQGREQLTCTQEGWDFQPPLCKDSGRLPRVTWISMSLAALLIGGFAGLTSTVICRWTRTGTKSTLPISETGGGTPELRCGKHQAVGTSPQRAAAQDSEQESAGMEGRDTHRLPRAL

SEQ ID NO: 2267 - protein, 244 aa, Homo sapiens
MKERRASQKLSSKSIMDPNQNVKCKIVVVGDSQCGKTALLHVFAKDCFPENYVPTVFENYTASFEIDTQRIELSLWDTSGSPYYDNVRPLSYPDSDAVLICFDISRPETLDSVLKKWKGEIQEFCPNTKMLLVGCKSDLRTDVSTLVELSNHRQTPVSYDQGANMAKQIGAATYIECSALQSENSVRDIFHVATLACVNKTNKNVKRNKSQRATKRISHMPSRPELSAVATDLRKDKAKSCTVM

SEQ ID NO: 2268 - protein, 259 aa, Homo sapiens
MAASRLELNLVRLLSRCEAMAAEKRDPDEWRLEKYVGALEDMLQALKVHASKPASEVINEYSWKVDFLKGMLQAEKLTSSSEKALANQFLAPGRVPTTARERVPATKTVHLQSRARYTSEMRSELLGTDSAEPEMDVRKRTGVAGSQPVSEKQLAAELDLVLQRHQNLQEKLAEEMLGLARSLKTNTLAAQSVIKKDNQTLSHSLKMADQNLEKLKTESERLEQHTQKSVNWLLWAMLIIVCFIFISMILFIRIMPKLK

SEQ ID NO: 2269 - protein, 525 aa, Homo sapiens [sequence omitted]

SEQ ID NO: 2270 - protein, 780 aa, Homo sapiens
MDEQAGPGVFFSNNHPGAGGAKGLGPLAEAAAAGDGAAAAGAARAQYSLPGILHFLQHEWARFEVERAQWEVERAELQAQIAFLQGERKGQENLKKDLVRRIKMLEYALKQERAKYHKLKYGTELNQGDMKPPSYDSDEGNETEVQPQQNSQLMWKQGRQLLRQYLQEVGYTDTILDVKSKRVRALLGFSSDVTDREDDKNQDSVVNGTEAEVKETAMIAKSELTDSASVLDNFKFLESAAADFSDEDEDDDVDGREKSVIDTSTIVRKKALPDSGEDRDTKEALKEFDFLVTSEEGDNESRSAGDGTDWEKEDQCLMPEAWNVDQGVITKLKEQYKKERKGKKGVKRPNRSKLQDMLANLRDVDELPSLQPSVGSPSRPSSSRLPEHEINRADEVEALTFPPSSGKSFIMGADEALESELGLGELAGLTVANEADSLTYDIANNKDALRKTWNPKFTLRSHFDGIRALAFHPIEPVLITASEDHTLKMWNLQKTAPAKKSTSLDVEPIYTFRAHKGPVLCVVMSSNGEQCYSGGTDGLIQGWNTTNPNIDPYDSYDPSVLRGPLLGHTDAVWGLAYSAAHQRLLSCSADGTLRLWNTTEVAPALSVFNDTKELGIPASVDLVSSDPSHMVASFSKGYTSIFNMETQQRILTLESNVDTTANSSCQINRVISHPTLPISITAHEDRHIKFYDNNTGKLIHSMVAHLEAVTSLAVDPNGLYLMSGSHDCSIRLWNLESKTCIQEFTAHRKKFEESIHDVAFHPSKCYIASAGADALAKVFV

SEQ ID NO: 2271 - protein, 165 aa, Homo sapiens
MADFDEIYEEEEDEERALEEQLLKYSPDPVVVRGSGHVTVFGLSNKFESEFPSSLTGKVAPEEFKASINRVNSCLKKNLPVNVRWLLCGCLCCCCTLGCSMWPVICLSKRTRRSIEKLLEWENNRLYHKLCLHWRLSKRKCETNNMMEYVILIEFLPKTPIFRPD

SEQ ID NO: 2272 - protein, 1356 aa, Homo sapiens
MQSKVLLAVALWLCVETRAASVGLPSVSLDLPRLSIQKDILTIKANTTLQITCRGQRDLDWLWPNNQSGSEQRVEVTECSDGLFCKTLTIPKVIGNDTGAYKCFYRETDLASVIYVYVQDYRSPFIASVSDQHGVVYITENKNKTVVIPCLGSISNLNVSLCARYPEKRFVPDGNRISWDSKKGFTIPSYMISYAGMVFCEAKINDESYQSIMYIVVVVGYRIYDVVLSPSHGIELSVGEKLVLNCTARTELNVGIDFNWEYPSSKHQHKKLVNRDLKTQSGSEMKKFLSTLTIDGVTRSDQGLYTCAASSGLMTKKNSTFVRVHEKPFVAFGSGMESLVEATVGERVRIPAKYLGYPPPEIKWYKNGIPLESNHTIKAGHVLTIMEVSERDTGNYTVILTNPISKEKQSHVVSLVVYVPPQIGEKSLISPVDSYQYGTTQTLTCTVYAIPPPHHIHWYWQLEEECANEPSQAVSVTNPYPCEEWRSVEDFQGGNKIEVNKNQFALIEGKNKTVSTLVIQAANVSALYKCEAVNKVGRGERVISFHVTRGPEITLQPDMQPTEQESVSLWCTADRSTFENLTWYKLGPQPLPIHVGELPTPVCKNLDTLWKLNATMFSNSTNDILIMELKNASLQDQGDYVCLAQDRKTKKRHCVVRQLTVLERVAPTITGNLENQTTSIGESIEVSCTASGNPPPQIMWFKDNETLVEDSGIVLKDGNRNLTIRRVRKEDEGLYTCQACSVLGCAKVEAFFIIEGAQEKTNLEIIILVGTAVIAMFFWLLLVIILRTVKRANGGELKTGYLSIVMDPDELPLDEHCERLPYDASKWEFPRDRLKLGKPLGRGAFGQVIEADAFGIDKTATCRTVAVKMLKEGATHSEHRALMSELKILIHIGHHLNVVNLLGACTKPGGPLMVIVEFCKFGNLSTYLRSKRNEFVPYKTKGARFRQGKDYVGAIPVDLKRRLDSITSSQSSASSGFVEEKSLSDVEEEEAPEDLYKDFLTLEHLICYSFQVAKGMEFLASRKCIHRDLAARNILLSEKNVVKICDFGLARDIYKDPDYVRKGDARLPLKWMAPETIFDRVYTIQSDVWSFGVLLWEIFSLGASPYPGVKIDEEFCRRLKEGTRMRAPDYTTPEMYQTMLDCWHGEPSQRPTFSELVEHLGNLLQANAQQDGKDYIVLPISETLSMEEDSGLSLPTSPVSCMEEEEVCDPKFHYDNTAGISQYLQNSKRKSRPVSVKTFEDIPLEEPEVKVIPDDNQTDSGMVLASEELKTLEDRTKLSPSFGGMVPSKSRESVASEGSNQTSGYQSGYHSDDTDTTVYSSEEAELLKLIEIGVQTGSTAQILQPDSGTTLSSPPV

SEQ ID NO: 2273 - protein, 595 aa, Homo sapiens
MRVLLAALGLLFLGALRAFPQDRPFEDTCHGNPSHYYDKAVRRCCYRCPMGLFPTQQCPQRPTDCRKQCEPDYYLDEADRCTACVTCSRDDLVEKTPCAWNSSRVCECRPGMFCSTSAVNSCARCFFHSVCPAGMIVKFPGTAQKNTVCEPASPGVSPACASPENCKEPSSGTIPQAKPTPVSPATSSASTMPVRGGTRLAQEAASKLTRAPDSPSSVGRPSSDPGLSPTQPCPEGSGDCRKQCEPDYYLDEAGRCTACVSCSRDDLVEKTPCAWNSSRTCECRPGMICATSATNSCARCVPYPICAAETVTKPQDMAEKDTTFEAPPLGTQPDCNPTPENGEAPASTSPTQSLLVDSQASKTLPIPTSAPVALSSTGKPVLDAGPVLFWVILVLVVVVGSSAFLLCHRRACRKRIRQKLHLCYPVQTSQPKLELVDSRPRRSSTQLRSGASVTEPVAEERGLMSQPLMETCHSVGAAYLESLPLQDASPAGGPSSPRDLPEPRVSTEHTNNKIEKIYIMKADTVIVGTVKAELPEGRGLAGPAEPELEEELEADHTPHYPEQETEPPLGSCSDVMLSVEEEGKEDPLPTAASGK

SEQ ID NO: 2274 - protein, 1770 aa, Homo sapiens
MSGASVKVAVRVRPFNSRETSKESKCIIQMQGNSTSIINPKNPKEAPKSFSFDYSYWSHTSPEDPCFASQNRVYNDIGKEMLLHAFEGYNVCIFAYGQTGAGKSYTMMGKQEESQAGIIPQLCEELFEKINDNCNEEMSYSVEVSYMEIYCERVRDLLNPKNKGNLRVREHPLLGPYVEDLSKLAVTSYTDIADLMDAGNKARTVAATNMNETSSRSHAVFTIVFTQKKHDNETNLSTEKVSKISLVDLAGSERADSTGAKGTRLKEGANINKSLTTLGKVISALAEVSKKKKKTDFIPYRDSVLTWLLRENLGGNSRTAMVAALSPADINYDETLSTLRYADRAKQIKCNAVINEDPNAKLVRELKEEVTRLKDLLRAQGLGDIIDTSMGSLTSSPSSCSLSSQVGLTSVTSIQERIMSTPGGEEAIERLKESEKIIAELNETWEEKLRKTEAIRMEREALLAEMGVAIREDGGTLGVFSPKKTPHLVNLNEDPLMSECLLYYIKDGITRVGQADAERRQDIVLSGAHIKEEHCIFRSERSNSGEVIVTLEPCERSETYVNGKRVSQPVQLRSGNRIIMGKNHVFRFNHPEQARAEREKTPSAETPSEPVDWTFAQRELLEKQGIDMKQEMEKRLQEMEILYKKEKEEADLLLEQQRLDYESKLQALQKQVETRSLAAETTEEEEEEEEVPWTQHEFELAQWAFRKWKSHQFTSLRDLLWGNAVYLKEANAISVELKKKVQFQFVLLTDTLYSPLPPELLPTEMEKTHEDRPFPRTVVAVEVQDLKNGATHYWSLEKLKQRLDLMREMYDRAGEMASSAQDESETTVTGSDPFYDRFHWFKLVGSSPIFHGCVNERLADRTPSPTFSTADSDITELADEQQDEMEDFDDEAFVDDAGSDAGTEEGSDLFSDGHDPFYDRSPWFILVGRAFVYLSNLLYPVPLIHRVAIVSEKGEVRGFLRVAVQAIAADEEAPDYGSGIRQSGTAKISFDNEYFNQSDFSSVAMTRSGLSLEELRIVEGQGQSSEVITPPEEISRINDLDLKSSTLLDGKMVMEGFSEEIGNHLKLGSAFTFRVTVLQASGILPEYADIFCQFNFLHRHDEAFSTEPLKNNGRGSPLAFYHVQNIAVEITESFVDYIKTKPIVFEVFGHYQQHPLHLQGQELNSPPQPCRRFFPPPMPLSKPVPATKLNTMSKTSLGQSMSKYDLLVWFEISELEPTGEYIPAVVDHTAGLPCQGTFLLHQGIQRRITVTIIHEKGSELHWKDVRELVVGRIRNKPEVDEAAVDAILSLNIISAKYLKSSHNSSRTFYRFEAVWDSSLHNSLLLNRVTPYGEKIYMTLSAYLELDHCIQPAVITKDVCMVFYSRDAKISPPRSLRSLFGSGYSKSPDSNRVTGIYELSLCKMSDTGSPGMQRRRRKILDTSVAYVRGEENLAGWRPRGDSLILEHQWELEKLELLHEVEKTRHFLLLRERLGDSIPKSLSDSLSPSLSSGTLSTSTSISSQISTTTFESAITPSESSGYDSGDIESLVDREKELATKCLQLLTHTFNREFSQVHGSVSDCKLSDISPIGRDPSESSFSSATLTPSSTCPSLVDSRSNSLDQKTPEANSRASSPCPEFEQFQIVPAVETPYLARAGKNEFLNLVPDIEEIRPSSVVSKKGYLHFKEPLYSNWAKHFVVVRRPYVFIYNSDKDPVERGIINLSTAQVEYSEDQQAMVKTPNTFAVCTKHRGVLLQALNDKDMNDWLYAFNPLLAGTIRSKLSRRCPSQSKY

SEQ ID NO: 2275 - protein, 238 aa, Homo sapiens
MAARTGHTALRRVVSGCRPKSATAAGAQAPVRNGRYLASCGILMSRTLPLHTSILPKEICARTFFKITAPLINKRKEYSERRILGYSMQEMYDVVSGVEDYKHFVPWCKKSDVISKRSGYCKTRLEIGFPPVLERYTSVVTLVKPHLVKASCTDGRLFNHLETIWRFSPGLPGYPRTCTLDFSISFEFRSLLHSQLATLFFDEVVKQMVAAFERRACKLYGPETNIPRELMLHEVHHT

SEQ ID NO: 2276 - protein, 514 aa, Homo sapiens
MSISSDEVNFLVYRYLQESGFSHSAFTFGIESHISQSNINGALVPPAALISIIQKGLQYVEAEVSINEDGTLFDGRPIESLSLIDAVMPDVVQTRQQAYRDKLAQQQAAAAAAAAAAASQQGSAKNGENTANGEENGAHTIANNHTDMMEVDGDVEIPPNKAVVLRGHESEVFICAWNPVSDLLASGSGDSTARIWNLSENSTSGSTQLVLRHCIREGGQDVPSNKDVTSLDWNSEGTLLATGSYDGFARIWTKDGNLASTLGQHKGPIFALKWNKKGNFILSAGVDKTTIIWDAHTGEAKQQFPFHSAPALDVDWQSNNTFASCSTDMCIHVCKLGQDRPIKTFQGHTNEVNAIKWDPTGNLLASCSDDMTLKIWSMKQDNCVHDLQAHNKEIYTIKWSPTGPGTNNPNANLMLASASFDSTVRLWDVDRGICIHTLTKHQEPVYSVAFSPDGRYLASGSFDKCVHIWNTQTGALVHSYRGTGGIFEVCWNAAGDKVGASASDGSVCVLDLRK

SEQ ID NO: 2277 - protein, 1068 aa, Homo sapiens
MPPRPSSGELWGIHLMPPRILVECLLPNGMIVTLECLREATLITIKHELFKEARKYPLHQLLQDESSYIFVSVTQEAEREEFFDETRRLCDLRLFQPFLKVIEPVGNREEKILNREIGFAIGMPVCEFDMVKDPEVQDFRRNILNVCKEAVDLRDLNSPHSRAMYVYPPNVESSPELPKHIYNKLDKGQIIVVIWVIVSPNNDKQKYTLKINHDCVPEQVIAEAIRKKTRSMLLSSEQLKLCVLEYQGKYILKVCGCDEYFLEKYPLSQYKYIRSCIMLGRMPNLMLMAKESLYSQLPMDCFTMPSYSRRISTATPYMNGETSTKSLWVINSALRIKILCATYVNVNIRDIDKIYVRTGIYHGGEPLCDNVNTQRVPCSNPRWNEWLNYDIYIPDLPRAARLCLSICSVKGRKGAKEEHCPLAWGNINLFDYTDTLVSGKMALNLWPVPHGLEDLLNPIGVTGSNPNKETPCLELEFDWFSSVVKFPDMSVIEEHANWSVSREAGFSYSHAGLSNRLARDNELRENDKEQLKAISTRDPLSEITEQEKDFLWSHRHYCVTIPEILPKLLLSVKWNSRDEVAQMYCLVKDWPPIKPEQAMELLDCNYPDPMVRGFAVRCLEKYLTDDKLSQYLIQLVQVLKYEQYLDNLLVRFLLKKALTNQRIGHFFFWHLKSEMHNKTVSQRFGLLLESYCRACGMYLKHLNRQVEAMEKLINLTDILKQEKKDETQKVQMKFLVEQMRRPDFMDALQGFLSPLNPAHQLGNLRLEECRIMSSAKRPLWLNWENPDIMSELLFQNNEIIFKNGDDLRQDMLTLQIIRIMENIWQNQGLDLRMLPYGCLSIGDCVGLIEVVRNSHTIMQIQCKGGLKGALQFNSHTLHQWLKDKNKGEIYDAAIDLFTRSCAGYCVATFILGIGDRHNSNIMVKDDGQLFHIDFGHFLDHKKKKFGYKRERVPFVLTQDFLIVISKGAQECTKTREFERFQEMCYKAYLAIRQHANLFINLFSMMLGSGMPELQSFDDIAYIRKTLALDKTEQEALEYFMKQMNDAHHGGWTTKMDWIFHTIKQHALN

SEQ ID NO: 2278 - protein, 741 aa, Homo sapiens
MAEPVSPLKHFVLAKKAITAIFDQLLEFVTEGSHFVEATYKNPELDRIATEDDLVEMQGYKDKLSIIGEVLSRRHMKVAFFGRTSSGKSSVINAMLWDKVLPSGIGHITNCFLSVEGTDGDKAYLMTEGSDEKKSVKTVNQLAHALHMDKDLKAGCLVRVFWPKAKCALLRDDLVLVDSPGTDVTTELDSWIDKFCLDADVFVLVANSESTLMNTEKHFFHKVNERLSKPNIFILNNRWDASASEPEYMEDVRRQHMERCLHFLVEELKVVNALEAQNRIFFVSAKEVLSARKQKAQGMPESGVALAEGFHARLQEFQNFEQIFEECISQSAVKTKFEQHTIRAKQILATVKNIMDSVNLAAEDKRHYSVEEREDQIDRLDFIRNQMNLLTLDVKKKIKEVTEEVANKVSCAMTDEICRLSVLVDEFCSEFHPNPDVLKIYKSELNKHIEDGMGRNLADRCTDEVNALVLQTQQEIIENLKPLLPAGIQDKLHTLIPCKKFDLSYNLNYHKLCSDFQEDIVFRFSLGWSSLVHRFLGPRNAQRVLLGLSEPIFQLPRSLASTPTAPTTPATPDNASQEELMITLVTGLASVTSRTSMGIIIVGGVIWKTIGWKLLSVSLTMYGALYLYERLSWTTHAKERAFKQQFVNYATEKLRMIVSSTSANCSHQVKQQIATTFARLCQQVDITQKQLEEEIARLPKEIDQLEKIQNNSKLLRNKAVQLENELENFTKQFLPSSNEES

SEQ ID NO: 2279 - protein, 161 aa, Homo sapiens
MNQFGPSALINLSNFSSIKPEPASTPPQGSMANSTAVVKIPGTPGAGGRLSPENNQVLTKKKLQDLVREVDPNEQLDEDVEEMLLQIADDFIESVVTAACQLARHRKSSTLEVKDVQLHLERQWNMWIPGFGSEEIRPYKKACTTEAHKQRMALIRKTTKK

SEQ ID NO: 2280 - protein, 815 aa, Homo sapiens
MVLRSGICGLSPHRIFPSLLVVVALVGLLPVLRSHGLQLSPTASTIRSSEPPRERSIGDVTTAPPEVTPESRPVNHSVTDHGMKPRKAFPVLGIDYTHVRTPFEISLWILLACLMKIGFHVIPTISSIVPESCLLIVVGLLVGGLIKGVGETPPFLQSDVFFLFLLPPIILDAGYFLPLRQFTENLGTILIFAVVGTLWNAFFLGGLMYAVCLVGGEQINNIGLLDNLLFGSIISAVDPVAVLAVFEEIHINELLHILVFGESLLNDAVTVVLYHLFEEFANYEHVGIVDIFLGFLSFFVVALGGVLVGVVYGVIAAFTSRFTSHIRVIEPLFVFLYSYMAYLSAELFHLSGIMALIASGVVMRPYVEANISHKSHTTIKYFLKMWSSVSETLIFIFLGVSTVAGSHHWNWTFVISTLLFCLIARVLGVLGLTWFINKFRIVKLTPKDQFIIAYGGLRGAIAFSLGYLLDKKHFPMCDLFLTAIITVIFFTVFVQGMTIRPLVDLLAVKKKQETKRSINEEIHTQFLDHLLTGIEDICGHYGHHHWKDKLNRFNKKYVKKCLIAGERSKEPQLIAFYHKMEMKQAIELVESGGMGKIPSAVSTVSMQNIHPKSLPSERILPALSKDKEEEIRKILRNNLQKTRQRLRSYNRHTLVADPYEEAWNQMLLRRQKARQLEQKINNYLTVPAHKLDSPTMSRARIGSDPLAYEPKEDLPVITIDPASPQSPESVDLVNEELKGKVLGLSRDPAKVAEEDEDDDGGIMMRSKETSSPGTDDVFTPAPSDSPSSQRIQRCLSDPGPHPEPGEGEPFFPKGQ

SEQ ID NO: 2281 - protein, 309 aa, Homo sapiens
MEAARTAVLRVKRKRSAEPAEALVLACKRLRSDAVESAAQKTSEGLERAAENNVFHLVATVCSQEEPVQPLLREVLRPSRDSQQRVRRNLRASAREVRQEGRYRVLSSRRSLGTTSSGQESEYTPGNPEAAGNSGFQLLDLVHEEGEPEAASAGSCKTSDPDVILCNSVELIRERLTVSEDGPGVRRQEEQKHDDYVYDIYYLETATPGWIENILSVQPYSQEWELVNDDQEPEDIYDDEDDENSENNWRNEYPEEESSDGDEDSRGSADYNSLSEEERGSSRQRMWSKYPLDVQKEFGYDSPHDLDSD

SEQ ID NO: 2282 - protein, 152 aa, Homo sapiens
MDNVQPKIKHRPFCFSVKGHVKMLRLALTVTSMTFFIIAQAPEPYIVITGFEVTVILFFILLYVLRLDRLMKWLFWPLLDIINSLVTTVFMLIVSVLALIPETTTLTVGGGVFALVTAVCCLADGALIYRKLLFNPSGPYQKKPVHEKKEVL

SEQ ID NO: 2283 - protein, 99 aa, Homo sapiens
MDNVQPKIKHRPFCFSVKGHVKMLRLDIINSLVTTVFMLIVSVLALIPETTTLTVGGGVFALVTAVCCLADGALIYRKLLFNPSGPYQKKPVHEKKEVL

SEQ ID NO: 2284 - protein, 440 aa, Homo sapiens
MGPPGSPWQWVTLLLGLLLPPAAPFWLLNVLFPPHTTPKAELSNHTRPVILVPGCLGNQLEAKLDKPDVVNWMCYRKTEDFFTIWLDLNMFLPLGVDCWIDNTRVVYNRSSGLVSNAPGVQIRVPGFGKTYSVEYLDSSKLAGYLHTLVQNLVNNGYVRDETVRAAPYDWRLEPGQQEEYYRKLAGLVEEMHAAYGKPVFLIGHSLGCLHLLYFLLRQPQAWKDRFIDGFISLGAPWGGSIKPMLVLASGDNQGIPIMSSIKLKEEQRITTTSPWMFPSRMAWPEDHVFISTPSFNYTGRDFQRFFADLHFEEGWYMWLQSRDLLAGLPAPGVEVYCLYGVGLPTPRTYIYDHGFPYTDPVGVLYEDGDDTVATRSTELCGLWQGRQPQPVHLLPLHGIQHLNMVFSNLTLEHINAILLGAYRQGPPASPTASPEPPPPE

SEQ ID NO: 2285 - protein, 829 aa, Homo sapiens
MGLPRGPLASLLLLQVCWLQCAASEPCRAVFREAEVTLEAGGAEQEPGQALGKVFMGCPGQEPALFSTDNDDFTVRNGETVQERRSLKERNPLKIFPSKRILRRHKRDWVVAPISVPENGKGPFPQRLNQLKSNKDRDTKIFYSITGPGADSPPEGVFAVEKETGWLLLNKPLDREEIAKYELFGHAVSENGASVEDPMNISIIVTDQNDHKPKFTQDTFRGSVLEGVLPGTSVMQVTATDEDDAIYTYNGVVAYSIHSQEPKDPHDLMFTIHRSTGTISVISSGLDREKVPEYTLTIQATDMDGDGSTTTAVAVVEILDANDNAPMFDPQKYEAHVPENAVGHEVQRLTVTDLDAPNSPAWRATYLIMGGDDGDHFTITTHPESNQGILTTRKGLDFEAKNQHTLYVEVTNEAPFVLKLPTSTATIVVHVEDVNEAPVFVPPSKVVEVQEGIPTGEPVCVYTAEDPDKENQKISYRILRDPAGWLAMDPDSGQVTAVGTLDREDEQFVRNNIYEVMVLAMDNGSPPTTGTGTLLLTLIDVNDHGPVPEPRQITICNQSPVRQVLNITDKDLSPHTSPFQAQLTDDSDIYWTAEVNEEGDTVVLSLKKFLKQDTYDVHLSLSDHGNKEQLTVIRATVCDCHGHVETCPGPWKGGFILPVLGAVLALLFLLLVLLLLVRKKRKIKEPLLLPEDDTRDNVFYYGEEGGGEEDQDYDITQLHRGLEARPEVVLRNDVAPTIIPTPMYRPRPANPDEIGNFIIENLKAANTDPTAPPYDTLLVFDYEGSGSDAASLSSLTSSASDQDQDYDYLNEWGSRFKKLADMYGGGEDD

SEQ ID NO: 2286 - protein, 517 aa, Homo sapiens
MARMGLAGAAGRWWGLALGLTAFFLPGVHSQVVQVNDSMYGFIGTDVVLHCSFANPLPSVKITQVTWQKSTNGSKQNVAIYNPSMGVSVLAPYRERVEFLRPSFTDGTIRLSRLELEDEGVYICEFATFPTGNRESQLNLTVMAKPTNWIEGTQAVLRAKKGQDDKVLVATCTSANGKPPSVVSWETRLKGEAEYQEIRNPNGTVTVISRYRLVPSREAHQQSLACIVNYHMDRFKESLTLNVQYEPEVTIEGFDGNWYLQRMDVKLTCKADANPPATEYHWTTLNGSLPKGVEAQNRTLFFKGPINYSLAGTYICEATNPIGTRSGQVEVNITEFPYTPSPPEHGRRAGPVPTAIIGGVAGSILLVLIVVGGIVVALRRRRHTFKGDYSTKKHVYGNGYSKAGIPQHHPPMAQNLQYPDDSDDEKKAGPLGGSSYEEEEEEEEGGGGGERKVGGPHPKYDEDAKRPYFTVDEAEARQDGYGDRTLGYQYDPEQLDLAENMVSQNDGSFISKKEWYV

SEQ ID NO: 2287 - protein, 299 aa, Homo sapiens
MDLVLRVADYYFFTPYVYPATWPEDDIFRQAISLLIVTNVGAYILYFFCATLSYYFVFDHALMKHPQFLKNQVRREIKFTVQALPWISILTVALFLLEIRGYSKLHDDLGEFPYGLFELVVSIISFLFFTDMFIYWIHRGLHHRLVYKRLHKPHHIWKIPTPFASHAFHPIDGFLQSLPYHIYPFIFPLHKVVYLSLYILVNIWTISIHDGDFRVPQILQPFINGSAHHTDHHMFFDYNYGQYFTLWDRIGGSFKNPSSFEGKGPLSYVKEMTEGKRSSHSGNGCKNEKLFNGEFTKTE

SEQ ID NO: 2288 - protein, 511 aa, Homo sapiens
MVLLAAAVCTKAGKAIVSRQFVEMTRTRIEGLLAAFPKLMNTGKQHTFVETESVRYVYQPMEKLYMVLITTKNSNILEDLETLRLFSRVIPEYCRALEENEISEHCFDLIFAFDEIVALGYRENVNLAQIRTFTEMDSHEEKVFRAVRETQEREAKAEMRRKAKELQQARRDAERQGKKAPGFGGFGSSAVSGGSTAAMITETIIETDKPKVAPAPARPSGPSKALKLGAKGKEVDNFVDKLKSEGETIMSSSMGKRTSEATKMHAPPINMESVHMKIEEKITLTCGRDGGLQNMELHGMIMLRISDDKYGRIRLHVENEDKKGVQLQTHPNVDKKLFTAESLIGLKNPEKSFPVNSDVGVLKWRLQTTEESFIPLTINCWPSESGNGCDVNIEYELQEDNLELNDVVITIPLPSGVGAPVIGEIDGEYRHDSRRNTLEWCLPVIDAKNKSGSLEFSIAGQPNDFFPVQVSFVSKKNYCNIQVTKVTQVDGNSPVRFSTETTFLVDKYEIL

SEQ ID NO: 2289 - protein, 583 aa, Homo sapiens
MPGRTWELCLLLLLGLGLGSQEALPPPCESEIYCHGELLNQVQMAKLYQDDKQFVDMPLSIAPEQVLQTFTELSRDHNHSIPREQLQAFVHEHFQAKGQELQPWTPADWKDSPQFLQKISDAKLRAWAGQLHQLWKKLGKKMKPEVLSHPERFSLIYSEHPFIVPGGRFVEFYYWDSYWVMEGLLLSEMAETVKGMLQNFLDLVKTYGHVPNGGRVYYLQRSQPPLLTLMMDCYLTHTNDTAFLQENIETLALELDFWTKNRTVSVSLEGKNYLLNRYYVPYGGPRPESYSKDVELADTLPEGDREALWAELKAGAESGWDFSSRWLIGGPNPNSLSGIRTSKLVPVDLNAFLCQAEELMSNFYSRLGNDSQATKYRILRSQRLAALNTVLWDEQTGAWFDYDLEKKKKNREFYPSNLTPLWAGCFSDPGVADKALKYLEDNRILTYQYGIPTSLQKTGQQWDFPNAWAPLQDLVIRGLAKAPLRRAQEVAFQLAQNWIRTNFDVYSQKSAMYEKYDVSNGGQPGGGGEYEVQEGFGWTNGVVLMLLDRYGDRLTSGAKLAFLEPHCLAATLLPSLLLSLLPW

SEQ ID NO: 2290 - protein, 184 aa, Homo sapiens
MAPLLPIRTLPLILILLALLSPGAADFNISSLSGLLSPALTESLLVALPPCHLTGGNATLMVRRANDSKVVTSSFVVPPCRGRRELVSVVDSGAGFTVTRLSAYQVTNLVPGTKFYISYLVKKGTATESSREIPMSTLPRRNMESIGLGMARTGGMVVITVLLSVAMFLLVLGFIIALALGSRK

SEQ ID NO: 2291 - protein, 906 aa, Homo sapiens
MAGNVKKSSGAGGGSGSGGSGSGGLIGLMKDAFQPHHHHHHHLSPHPPGTVDKKMVEKCWKLMDKVVRLCQNPKLALKNSPPYILDLLPDTYQHLRTILSRYEGKMETLGENEYFRVFMENLMKKTKQTISLFKEGKERMYEENSQPRRNLTKLSLIFSHMLAELKGIFPSGLFQGDTFRITKADAAEFWRKAFGEKTIVPWKSFRQALHEVHPISSGLEAMALKSTIDLTCNDYISVFEFDIFTRLFQPWSSLLRNWNSLAVTHPGYMAFLTYDEVKARLQKFIHKPGSYIFRLSCTRLGQWAIGYVTADGNILQTIPHNKPLFQALIDGFREGFYLFPDGRNQNPDLTGLCEPTPQDHIKVTQEQYELYCEMGSTFQLCKICAENDKDVKIEPCGHLMCTSCLTSWQESEGQGCPFCRCEIKGTEPIVVDPFDPRGSGSLLRQGAEGAPSPNYDDDDDERADDTLFMMKELAGAKVERPPSPFSMAPQASLPPVPPRLDLLPQRVCVPSSASALGTASKAASGSLHKDKPLPVPPTLRDLPPPPPPDRPYSVGAESRPQRRPLPCTPGDCPSRDKLPPVPSSRLGDSWLPRPIPKVPVSAPSSSDPWTGRELTNRHSLPFSLPSQMEPRPDVPRLGSTFSLDTSMSMNSSPLVGPECDHPKIKPSSSANAIYSLAARPLPVPKLPPGEQCEGEEDTEYMTPSSRPLRPLDTSQSSRACDCDQQIDSCTYEAMYNIQSQAPSITESSTFGEGNLAAAHANTGPEESENEDDGYDVPKPPVPAVLARRTLSDISNASSSFGWLSLDGDPTTNVTEGSQVPERPPKPFPRRINSERKAGSCQQGSGPAASAATASPQLSSEIENLMSQGYSYQDIQKALVIAQNNIEMAKNILREFVSISSPAHVAT

SEQ ID NO: 2292 - protein, 646 aa, Homo sapiens
MGLPRLVCAFLLAACCCCPRVAGVPGEAEQPAPELVEVEVGSTALLKCGLSQSQGNLSHVDWFSVHKEKRTLIFRVRQGQGQSEPGEYEQRLSLQDRGATLALTQVTPQDERIFLCQGKRPRSQEYRIQLRVYKAPEEPNIQVNPLGIPVNSKEPEEVATCVGRNGYPIPQVIWYKNGRPLKEEKNRVHIQSSQTVESSGLYTLQSILKAQLVKEDKDAQFYCELNYRLPSGNHMKESREVTVPVFYPTEKVWLEVEPVGMLKEGDRVEIRCLADGNPPPHFSISKQNPSTREAEEETTNDNGVLVLEPARKEHSGRYECQGLDLDTMISLLSEPQELLVNYVSDVRVSPAAPERQEGSSLTLTCEAESSQDLEFQWLREETGQVLERGPVLQLHDLKREAGGGYRCVASVPSIPGLNRTQLVNVAIFGPPWMAFKERKVWVKENMVLNLSCEASGHPRPTISWNVNGTASEQDQDPQRVLSTLNVLVTPELLETGVECTASNDLGKNTSILFLELVNLTTLTPDSNTTTGLSTSTASPHTRANSTSTERKLPEPESRGVVIVAVIVCILVLAVLGAVLYFLYKKGKLPCRRSGKQEITLPPSRKSELVVEVKSDKLPEEMGLLQGSSGDKRAPGDQGEKYIDLRH

SEQ ID NO: 2293 - protein, 558 aa, Homo sapiens
MELRARGWWLLCAAAALVACARGDPASKSRSCGEVRQIYGAKGFSLSDVPQAEISGEHLRICPQGYTCCTSEMEENLANRSHAELETALRDSSRVLQAMLATQLRSFDDHFQHLLNDSERTLQATFPGAFGELYTQNARAFRDLYSELRLYYRGANLHLEETLAEFWARLLERLFKQLHPQLLLPDDYLDCLGKQAEALRPFGEAPRELRLRATRAFVAARSFVQGLGVASDVVRKVAQVPLGPECSRAVMKLVYCAHCLGVPGARPCPDYCRNVLKGCLANQADLDAEWRNLLDSMVLITDKFWGTSGVESVIGSVHTWLAEAINALQDNRDTLTAKVIQGCGNPKVNPQGPGPEEKRRRGKLAPRERPPSGTLEKLVSEAKAQLRDVQDFWISLPGTLCSEKMALSTASDDRCWNGMARGRYLPEVMGDGLANQINNPEVEVDITKPDMTIRQQIMQLKIMTNRLRSAYNGNDVDFQDASDDGSGSGSGDGCLDDLCSRKVSRKSSSSRTPLTHALPGLSEQEGQKTSAASCPQPPTFLLPLLLFLALTVARPRWR

SEQ ID NO: 2294 - protein, 1054 aa, Homo sapiens
MGEIEGTYRVLQTAGMRLGAQTPVGVSTLEPGQTLLPRMQEKHLHLRVKLLDNTMEIFDIEPKCDGQVLLTQVWKRLNLVECDYFGMEFQNTQSYWIWLEPMKPIIRQIRRPKNVVLRLAVKFFPPDPGQLQEEYTRYLFALQLKRDLLEERLTCADTTAALLTSHLLQSEIGDYDETLDREHLKVNEYLPGQQHCLEKILEFHQKHVGQTPAESDFQVLEIARKLEMYGIRFHMASDREGTKIQLAVSHMGVLVFQGTTKINTFNWSKVRKLSFKRKRFLIKLHPEVHGPYQDTLEFLLGSRDECKNFWKICVEYHTFFRLLDQPKPKAKAVFFSRGSSFRYSGRTQKQLVDYFKDSGMKRIPYERRHSKTHTSVRALTADLPKQSISFPEGLRTPASPSSANAFYSLSPSTLVPSGLPEFKDSSSSLTDPQVSYVKSPAAERRSGAVAGGPDTPSAQPLGPPALQPGPGLSTKSPQPSPSSRKSPLSLSPAFQVPLGPAEQGSSPLLSPVLSDAGGAGMDCEEPRHKRVPADEAYFIVKEILATERTYLKDLEVITVWFRSAVVKEDAMPATLMTLLFSNIDPIYEFHRGFLREVEQRLALWEGPSKAHTKGSHQRIGDILLRNMRQLKEFTSYFQRHDEVLTELEKATKRCKKLEAVYKEFELQKVCYLPLNTFLLKPIQRLLHYRLLLRRLCGHYSPGHHDYADCHDALKAITEVTTTLQHILIRLENLQKLTELQRDLVGIENLIAPGREFIREGCLHKLTKKGLQQRMFFLFSDMLLYTSKGVAGTSHFRIRGLLPLQGMLVEESDNEWSVPHCFTIYAAQKTIVVAASTRLEKEKWMLDLNSAIQAAKSGGDTAPALPGRTVCTRPPRSPNEVSLEQESEDDARGVRSSLEGHGQHRANTTMHVCWYRNTSVSRADHSAAVENQLSGYLLRKFKNSHGWQKLWVVFTNFCLFFYKTHQDDYPLASLPLLGYSVSIPREADGIHKDYVFKLQFKSHVYFFRAESKYTFERWMEVIQGASSSAGRAPSIVQDGPQPSSGLEGMVRGKEE

SEQ ID NO: 2295 - protein, 879 aa, Homo sapiens
MAGGGGDLSTRRLNECISPVANEMNHLPAHSHDLQRMFTEDQGVDDRLLYDIVFKHFKRNKVEISNAIKKTFPFLEGLRDRDLITNKMFEDSQDSCRNLVPVQRVVYNVLSELEKTFNLPVLEALFSDVNMQEYPDLIHIYKGFENVIHDKLPLQESEEEEREERSGLQLSLEQGTGENSFRSLTWPPSGSPSHAGTTPPENGLSEHPCETEQINAKRKDTTSDKDDSLGSQQTNEQCAQKAEPTESCEQIAVQVNNGDAGREMPCPLPCDEESPEAELHNHGIQINSCSVRLVDIKKEKPFSNSKVECQAQARTHHNQASDIIVISSEDSEGSTDVDEPLEVFISAPRSEPVINNDNPLESNDEKEGQEATCSRPQIVPEPMDFRKLSTFRESFKKRVIGQDHDFSESSEEEAPAEASSGALRSKHGEKAPMTSRSTSTWRIPSRKRRFSSSDFSDLSNGEELQETCSSSLRRGSGSQPQEPENKKCSCVMCFPKGVPRSQEARTESSQASDMMDTMDVENNSTLEKHSGKRRKKRRHRSKVNGLQRGRKKDRPRKHLTLNNKVQKKRWQQRGRKANTRPLKRRRKRGPRIPKDENINFKQSELPVTCGEVKGTLYKERFKQGTSKKCIQSEDKKWFTPREFEIEGDRGASKNWKLSIRCGGYTLKVLMENKFLPEPPSTRKKRILESHNNTLVDPCEEHKKKNPDASVKFSEFLKKCSETWKTIFAKEKGKFEDMAKADKAHYEREMKTYIPPKGEKKKKFKDPNAPKRPPLAFFLFCSEYRPKIKGEHPGLSIDDVVKKLAGMWNNTAAADKQFYEKKAAKLKEKYKKDIAAYRAKGKPNSAKKRVVKAEKSKKKKEEEEDEEDEQEEENEEDDDK

SEQ ID NO: 2296 - protein, 239 aa, Homo sapiens
MASEELACKLERRLRREEAEESGPQLAPLGAPAPEPKPEPEPPARAPTASADAELSAQLSRRLDINEGAARPRRCRVFNPYTEFPEFSRRLIKDLESMFKLYDAGRDGFIDLMELKLMMEKLGAPQTHLGLKSMIKEVDEDFDGKLSFREFLLIFHKAAAGELQEDSGLMALAKLSEIDVALEGVKGAKNFFEAKVQALSSASKFEAELKAEQDERKREEEERRLRQAAFQKLKANFNT

SEQ ID NO: 2297 - protein, 580 aa, Homo sapiens
MTAPAGPRGSETERLLTPNPGYGTQAGPSPAPPTPPEEEDLRRRLKYFFMSPCDKFRAKGRKPCKLMLQVVKILVVTVQLILFGLSNQLAVTFREENTIAFRHLFLLGYSDGADDTFAAYTREQLYQAIFHAVDQYLALPDVSLGRYAYVRGGGDPWTNGSGLALCQRYYHRGHVDPANDTFDIDPMVVTDCIQVDPPERPPPPPSDDLTLLESSSSYKNLTLKFHKLVNVTIHFRLKTINLQSLINNEIPDCYTFSVLITFDNKAHSGRIPISLETQAHIQECKHPSVFQHGDNSFRLLFDVVVILTCSLSFLLCARSLLRGFLLQNEFVGFMWRQRGRVISLWERLEFVNGWYILLVTSDVLTISGTIMKIGIEAKNLASYDVCSILLGTSTLLVWVGVIRYLTFFHNYNILIATLRVALPSVMRFCCCVAVIYLGYCFCGWIVLGPYHVKFRSLSMVSECLFSLINGDDMFVTFAAMQAQQGRSSLVWLFSQLYLYSFISLFIYMVLSLFIALITGAYDTIKHPGGAGAEESELQAYIAQCQDSPTSGKFRRGSGSACSLLCCCGRDPSEEHSLLVN

SEQ ID NO: 2298 - protein, 543 aa, Homo sapiens
MAVSERRGLGRGSPAEWGQRLLLVLLLGGCSGRIHQLALTGEKRADIQLNSFGFYTNGSLEVELSVLRLGLREAEEKSLLVGFSLSRVRSGRVRSYSTRDFQDCPLQKNSSSFLVLFLINTKDLQVQVRKYGEQKTLFIFPGLLPEAPSKPGLPKPQATVPRKVDGGGTSAASKPKSTPAVIQGPSGKDKDLVLGLSHLNNSYNFSFHVVIGSQAEEGQYSLNFHNCNNSVPGKEHPFDITVMIREKNPDGFLSAAEMPLFKLYMVMSACFLAAGIFWVSILCRNTYSVFKIHWLMAALAFTKSISLLFHSINYYFINSQGHPIEGLAVMYYIAHLLKGALLFITIALIGSGWAFIKYVLSDKEKKVFGIVIPMQVLANVAYIIIESREEGASDYVLWKEILFLVDLICCGAILFPVVWSIRHLQDASGTDGKVAVNLAKLKLFRHYYVMVICYVYFTRIIAILLQVAVPFQWQWLYQLLVEGSTLAFFVLTGYKFQPTGNNPYLQLPQEDEEDVQMEQVMTDSGFREGLSKVNKTASGRELL

SEQ ID NO: 2299 - protein, 277 aa, Homo sapiens
MAAGRLFLSRLRAPFSSMAKSPLEGVSSSRGLHAGRGPRRLSIEGNIAVGKSTFVKLLTKTYPEWHVATEPVATWQNIQAAGTQKACTAQSLGNLLDMMYREPARWSYTFQTFSFLSRLKVQLEPFPEKLLQARKPVQIFERSVYSDRYIFAKNLFENGSLSDIEWHIYQDWHSFLLWEFASRITLHGFIYLQASPQVCLKRLYQRAREEEKGIELAYLEQLHGQHEAWLIHKTTKLHFEALMNIPVLVLDVNDDFSEEVTKQEDLMREVNTFVKNL

SEQ ID NO: 2300 - protein, 753 aa, Homo sapiens
MRPVSVWQWSPWGLLLCLLCSSCLGSPSPSTGPEKKAGSQGLRFRLAGFPRKPYEGRVEIQRAGEWGTICDDDFTLQAAHILCRELGFTEATGWTHSAKYGPGTGRIWLDNLSCSGTEQSVTECASRGWGNSDCTHDEDAGVICKDQRLPGFSDSNVIEVEHHLQVEEVRIRPAVGWGRRPLPVTEGLVEVRLPDGWSQVCDKGWSAHNSHVVCGMLGFPSEKRVNAAFYRLLAQRQQHSFGLHGVACVGTEAHLSLCSLEFYRANDTARCPGGGPAVVSCVPGPVYAASSGQKKQQQSKPQGEARVRLKGGAHPGEGRVEVLKASTWGTVCDRKWDLHAASVVCRELGFGSAREALSGARMGQGMGAIHLSEVRCSGQELSLWKCPHKNITAEDCSHSQDAGVRCNLPYTGAETRIRLSGGRSQHEGRVEVQIGGPGPLRWGLICGDDWGTLEAMVACRQLGLGYANHGLQETWYWDSGNITEVVMSGVRCTGTELSLDQCAHHGTHITCKRTGTRFTAGVICSETASDLLLHSALVQETAYIEDRPLHMLYCAAEENCLASSARSANWPYGHRRLLRFSSQIHNLGRADFRPKAGRHSWVWHECHGHYHSMDIFTHYDILTPNGTKVAEGHKASFCLEDTECQEDVSKRYECANFGEQGITVGCWDLYRHDIDCQWIDITDVKPGNYILQVVINPNFEVAESDFTNNAMKCNCKYDGHRIWVHNCHIGDAFSEEANRRFERYPGQTSNQII

SEQ ID NO: 2301 - protein, 1073 aa, Homo sapiens
MAAAGQLCLLYLSAGLLSRLGAAFNLDTREDNVIRKYGDPGSLFGFSLAMHWQLQPEDKRLLLVGAPRAEALPLQRANRTGGLYSCDITARGPCTRIEFDNDADPTSESKEDQWMGVTVQSQGPGGKVVTCAHRYEKRQHVNTKQESRDIFGRCYVLSQNLRIEDDMDGGDWSFCDGRLRGHEKFGSCQQGVAATFTKDFHYIVFGAPGTYNWKGIVRVEQKNNTFFDMNIFEDGPYEVGGETEHDESLVPVPANSYLGFSLDSGKGIVSKDEITFVSGAPRANHSGAVVLLKRDMKSAHLLPEHIFDGEGLASSFGYDVAVVDLNKDGWQDIVIGAPQYFDRDGEVGGAVYVYMNQQGRWNNVKPIRLNGTKDSMFGIAVKNIGDINQDGYPDIAVGAPYDDLGKVFIYHGSANGINTKPTQVLKGISPYFGYSIAGNMDLDRNSYPDVAVGSLSDSVTIFRSRPVINIQKTITVTPNRIDLRQKTACGAPSGICLQVKSCFEYTANPAGYNPSISIVGTLEAEKERRKSGLSSRVQFRNQGSEPKYTQELTLKRQKQKVCMEETLWLQDNIRDKLRPIPITASVEIQEPSSRRRVNSLPEVLPILNSDEPKTAHIDVHFLKEGCGDDNVCNSNLKLEYKFCTREGNQDKFSYLPIQKGVPELVLKDQKDIALEITVTNSPSNPRNPTKDGDDAHEAKLIATFPDTLTYSAYRELRAFPEKQLSCVANQNGSQADCELGNPFKRNSNVTFYLVLSTTEVTFDTPDLDINLKLETTSNQDNLAPITAKAKVVIELLLSVSGVAKPSQVYFGGTVVGEQAMKSEDEVGSLIEYEFRVINLGKPLTNLGTATLNIQWPKEISNGKWLLYLVKVESKGLEKVTCEPQKEINSLNLTESHNSRKKREITEKQIDDNRKFSLFAERKYQTLNCSVNVNCVNIRCPLRGLDSKASLILRSRLWNSTFLEEYSKLNYLDILMRAFIDVTAAAENIRLPNAGTQVRVTVFPSKTVAQYSGVPWWIILVAILAGILMLALLVFILWKCGFFKRNKKDHYDATYHKAEIHAQPSDKERLTSDA

SEQ ID NO: 2302 - protein, 419 aa, Homo sapiens
MAGFGAMEKFLVEYKSAVEKKLAEYKCNTNTAIELKLVRFPEDLENDIRTFFPEYTHQLFGDDETAFGYKGLKILLYYIAGSLSTMFRVEYASKVDENFDCVEADDVEGKIRQIIPPGFCTNTNDFLSLLEKEVDFKPFGTLLHTYSVLSPTGGENFTFQIYKADMTCRGFREYHERLQTFLMWFIETASFIDVDDERWHYFLVFEKYNKDGATLFATVGYMTVYNYYVYPDKTRPRVSQMLILTPFQGQGHGAQLLETVHRYYTEFPTVLDITAEDPSKSYVKLRDFVLVKLCQDLPCFSREKLMQGFNEDMVIEAQQKFKINKQHARRVYEILRLLVTDMSDAEQYRSYRLDIKRRLISPYKKKQRDLAKMRKCLRPEELTNQMNQIEISMQHEQLEESFQELVEDYRRVIERLAQE

SEQ ID NO: 2303 - protein, 505 aa, Homo sapiens
MKFKLHVNSARQYKDLWNMSDDKPFLCTAPGCGQRFTNEDHLAVHKHKHEMTLKFGPARNDSVIVADQTPTPTRFLKNCEEVGLFNELASPFENEFKKASEDDIKKMPLDLSPLATPIIRSKIEEPSVVETTHQDSPLPHPESTTSDEKEVPLAQTAQPTSAIVRPASLQVPNVLLTSSDSSVIIQQAVPSPTSSTVITQAPSSNRPIVPVPGPFPLLLHLPNGQTMPVAIPASITSSNVHVPAAVPLVRPVTMVPSVPGIPGPSSPQPVQSEAKMRLKAALTQQHPPVTNGDTVKGHGSGLVRTQSEESRPQSLQQPATSTTETPASPAHTTPQTQSTSGRRRRAANEDPDEKRRKFLERNRAAASRCRQKRKVWVQSLEKKAEDLSSLNGQLQSEVTLLRNEVAQLKQLLLAHKDCPVTAMQKKSGYHTADKDDSSEDISVPSSPHTEAIQHSSVSTSNGVSSTSKAEAVATSVLTQMADQSTEPALSQIVMAPSSQSQPSGS

SEQ ID NO: 2304 - protein, 684 aa, Homo sapiens
MEENLISMREDHSFHVRYRMEASCLELALEGERLCKSGDCRAGVSFFEAAVQVGTEDLKTLSAIYSQLGNAYFYLHDYAKALEYHHHDLTLARTIGDQLGEAKASGNLGNTLKVLGNFDEAIVCCQRHLDISRELNDKVGEARALYNLGNVYHAKGKSFGCPGPQDVGEFPEEVRDALQAAVDFYEENLSLVTALGDRAAQGRAFGNLGNTHYLLGNFRDAVIAHEQRLLIAKEFGDKAAERRAYSNLGNAYIFLGEFETASEYYKKTLLLARQLKDRAVEAQSCYSLGNTYTLLQDYEKAIDYHLKHLAIAQELNDRIGEGRACWSLGNAYTALGNHDQAMHFAEKHLEISREVGDKSGELTARLNLSDLQMVLGLSYSTNNSIMSENTEIDSSLNGVRPKLGRRHSMENMELMKLTPEKVQNWNSEILAKQKPLIAKPSAKLLFVNRLKGKKYKTNSSTKVLQDASNSIDHRIPNSQRKISADTIGDEGFFDLLSRFQSNRMDDQRCCLQEKNCHTASTTTSSTPPKMMLKTSSVPVVSPNTDEFLDLLASSQSRRLDDQRASFSNLPGLRLTQNSQSVLSHLMTNDNKEADEDFFDILVKCQGSRLDDQRCAPPPATTKGPTVPDEDFFSLILRSQGKRMDEQRVLLQRDQNRDTDFGLKDFLQNNALLEFKNSGKKSADH

SEQ ID NO: 2305 - protein, 1193 aa, Homo sapiens
MPALWLGCCLCFSLLLPAARATSRREVCDCNGKSRQCIFDRELHRQTGNGFRCLNCNDNTDGIHCEKCKNGFYRHRERDRCLPCNCNSKGSLSARCDNSGRCSCKPGVTGARCDRCLPGFHMLTDAGCTQDQRLLDSKCDCDPAGIAGPCDAGRCVCKPAVTGERCDRCRSGYYNLDGGNPEGCTQCFCYGHSASCRSSAEYSVHKITSTFHQDVDGWKAVQRNGSPAKLQWSQRHQDVFSSAQRLDPVYFVAPAKFLGNQQVSYGQSLSFDYRVDRGGRHPSAHDVILEGAGLRITAPLMPLGKTLPCGLTKTYTFRLNEHPSNNWSPQLSYFEYRRLLRNLTALRIRATYGEYSTGYIDNVTLISARPVSGAPAPWVEQCICPVGYKGQFCQDCASGYKRDSARLGPFGTCIPCNCQGGGACDPDTGDCYSGDENPDIECADCPIGFYNDPHDPRSCKPCPCHNGFSCSVMPETEEVVCNNCPPGVTGARCELCADGYFGDPFGEHGPVRPCQPCQCNNNVDPSASGNCDRLTGRCLKCIHNTAGIYCDQCKAGYFGDPLAPNPADKCRACNCNPMGSEPVGCRSDGTCVCKPGFGGPNCEHGAFSCPACYNQVKIQMDQFMQQLQRMEALISKAQGGDGVVPDTELEGRMQQAEQALQDILRDAQISEGASRSLGLQLAKVRSQENSYQSRLDDLKMTVERVRALGSQYQNRVRDTHRLITQMQLSLAESEASLGNTNIPASDHYVGPNGFKSLAQEATRLAESHVESASNMEQLTRETEDYSKQALSLVRKALHEGVGSGSGSPDGAVVQGLVEKLEKTKSLAQQLTREATQAEIEADRSYQHSLRLLDSVSRLQGVSDQSFQVEEAKRIKQKADSLSSLVTRHMDEFKRTQKNLGNWKEEAQQLLQNGKSGREKSDQLLSRANLAKSRAQEALSMGNATFYEVESILKNLREFDLQVDNRKAEAEEAMKRLSYISQKVSDASDKTQQAERALGSAAADAQRAKNGAGEALEISSEIEQEIGSLNLEANVTADGALAMEKGLASLKSEMREVEGELERKELEFDTNMDAVQMVITEAQKVDTRAKNAGVTIQDTLNTLDGLLHLMDQPLSVDEEGLVLLEQKLSRAKTQINSQLRPMMSELEERARQQRGHLHLLETSIDGILADVKNLENIRDNLPPGCYNTQALEQQ

SEQ ID NO: 2306 - protein, 414 aa, Homo sapiens
MLILTKTAGVFFKPSKRKVYEFLRSFNFHPGTLFLHKIVLGIETSCDDTAAAVVDETGNVLGEAIHSQTEVHLKTGGIVPPAAQQLHRENIQRIVQEALSASGVSPSDLSAIATTIKPGLALSLGVGLSFSLQLVGQLKKPFIPIHHMEAHALTIRLTNKVEFPFLVLLISGGHCLLALVQGVSDFLLLGKSLDIAPGDMLDKVARRLSLIKHPECSTMSGGKAIEHLAKQGNRFHFDIKPPLHHAKNCDFSFTGLQHVTDKIIMKKEKEEGIEKGQILSSAADIAATVQHTMACHLVKRTHRAILFCKQRDLLPQNNAVLVASGGVASNFYIRRALEILTNATQCTLLCPPPRLCTDNGIMIAWNGIERLRAGLGILHDIEGIRYEPKCPLGVDISKEVGEASIKVPQLKMEI

SEQ ID NO: 2307 - protein, 821 aa, Homo sapiens
MDLAAAAEPGAGSQHLEVRDEVAEKCQKLFLDFLEEFQSSDGEIKYLQLAEELIRPERNTLVVSFVDLEQFNQQLSTTIQEEFYRVYPYLCRALKTFVKDRKEIPLAKDFYVAFQDLPTRHKIRELTSSRIGLLTRISGQVVRTHPVHPELVSGTFLCLDCQTVIRDVEQQFKYTQPNICRNPVCANRRRFLLDTNKSRFVDFQKVRIQETQAELPRGSIPRSLEVILRAEAVESAQAGDKCDFTGTLIVVPDVSKLSTPGARAETNSRVSGVDGYETEGIRGLRALGVRDLSYRLVFLACCVAPTNPRFGGKELRDEEQTAESIKNQMTVKEWEKVFEMSQDKNLYHNLCTSLFPTIHGNDEVKRGVLLMLFGGVPKTTGEGTSLRGDINVCIVGDPSTAKSQFLKHVEEFSPRAVYTSGKASSAAGLTAAVVRDEESHEFVIEAGALMLADNGVCCIDEFDKMDVRDQVAIHEAMEQQTISITKAGVKATLNARTSILAAANPISGHYDRSKSLKQNINLSAPIMSRFDLFFILVDECNEVTDYAIARRIVDLHSRIEESIDRVYSLDDIRRYLLFARQFKPKISKESEDFIVEQYKHLRQRDGSGVTKSSWRITVRQLESMIRLSEAMARMHCCDEVQPKHVKEAFRLLNKSIIRVETPDVNLDQEEEIQMEVDEGAGGINGHADSPAPVNGINGYNEDINQESAPKASLRLGFSEYCRISNLIVLHLRKVEEEEDESALKRSELVNWYLKEIESEIDSEEELINKKRIIEKVIHRLTHYDHVLIELTQAGLKGSTEGSESYEEDPYLVVNPNYLLED

SEQ ID NO: 2308 - protein, 981 aa, Homo sapiens
MAADSEPESEVFEITDFTTASEWERFISKVEEVLNDWKLIGNSLGKPLEKGIFTSGTWEEKSDEISFADFKFSVTHHYLVQESTDKEGKDELLEDVVPQSMQDLLGMNNDFPPRAHCLVRWYGLREFVVIAPAAHSDAVLSESKCNLLLSSVSIALGNTGCQVPLFVQIHHKWRRMYVGECQGPGVRTDFEMVHLRKVPNQYTHLSGLLDIFKSKIGCPLTPLPPVSIAIRFTYVLQDWQQYFWPQQPPDIDALVGGEVGGLEFGKLPFGACEDPISELHLATTWPHLTEGIIVDNDVYSDLDPIQAPHWSVRVRKAENPQCLLGDFVTEFFKICRRKESTDEILGRSAFEEEGKETADITHALSKLTEPASVPIHKLSVSNMVHTAKKKIRKHRGVEESPLNNDVLNTILLFLFPDAVSEKPLDGTTSTDNNNPPSESEDYNLYNQFKSAPSDSLTYKLALCLCMINFYHGGLKGVAHLWQEFVLEMRFRWENNFLIPGLASGPPDLRCCLLHQKLQMLNCCIERKKARDEGKKTSASDVTNIYPGDAGKAGDQLVPDNLKETDKEKGEVGKSWDSWSDSEEEFFECLSDTEELKGNGQESGKKGGPKEMANLRPEGRLYQHGKLTLLHNGEPLYIPVTQEPAPMTEDLLEEQSEVLAKLGTSAEGAHLRARMQSACLLSDMESFKAANPGCSLEDFVRWYSPRDYIEEEVIDEKGNVVLKGELSARMKIPSNMWVEAWETAKPIPARRQRRLFDDTREAEKVLHYLAIQKPADLARHLLPCVIHAAVLKVKEEESLENISSVKKIIKQIISHSSKVLHFPNPEDKKLEEIIHQITNVEALIARARSLKAKFGTEKCEQEEEKEDLERFVSCLLEQPEVLVTGAGRGHAGRIIHKLFVNAQRAAAMTPPEEELKRMGSPEERRQNSVSDFPPPAGREFILRTTVPRPAPYSKALPQRMYSVLTKEDFRLAGAFSSDTSFF

SEQ ID NO: 2309 - protein, 1079 aa, Homo sapiens
MPRVHNIKKSLTPHISCVTNESDNLLDFLPDRLRAKLLPFQKDGIIFALKRNGRCMVADEMGLGKTIQAIGITYFYKEEWPLLIVVPSSLRYPWTEEIEKWIPELSPEEINVIQNKTDVRRMSTSKVTVLGYGLLTADAKTLIDALNNQNFKVVIVDESHYMKSRNATRSRILLPIVQKARRAILLTGTPALGRPEELFMQIEALFPQKFGRWTDYAKRYCNAHIRYFGKRPQWDCRGASNLNELHQLLSDIMIRRLKTEVLTQLPPKVRQRIPFDLPSAAAKELNTSFEEWEKIMRTPNSGAMETVMGLITRMFKQTAIAKAGAVKDYIKMMLQNDSLKFLVFAHHLSMLQACTEAVIENKTRYIRIDGSVSSSERIHLVNQFQKDPDTRVAILSIQAAGQGLTFTAASHVVFAELYWDPGHIKQAEDRAHRIGQCSSVNIHYLIANGTLDTLMWGMLNRKAQVTGSTLNGRKEKIQAEEGDKEKWDFLQFAEAWTPNDSSEELRKEALFTHFEKEKQHDIRSFFVPQPKKRQLMTSCDESKRFREENTVVSSDPTKTAARDIIDYESDVEPETKRLKLAASEDHCSPSEETPSQSKQIRTPLVESVQEAKAQLTTPAFPVEGWQCSLCTYINNSELPYCEMCETPQGSAVMQIDSLNHIQDKNEKDDSQKDTSKKVQTISDCEKQALAQSEPGQLADSKEETPKIEKEDGLTSQPGNEQWKSSDTLPVYDTLMFCASRNTDRIHIYTKDGKQMSCNFIPLDIKLDLWEDLPASFQLKQYRSLILRFVREWSSLTAMKQRIIRKSGQLFCSPILALEEITKQQTKQNCTKRYITKEDVAVASMDKVKNVGGHVRLITKESRPRDPFTKKLLEDGACVPFLNPYTVQADLTVKPSTSKGYLQAVDNEGNPLCLRCQQPTCQTKQACKANSWDSRFCSLKCQEEFWIRSNNSYLRAKVFETEHGVCQLCNVNAQELFLRLRDAPKSQRKNLLYATWTSKLPLEQLNEMIRNPGEGHFWQVDHIKPVYGGGGQCSLDNLQTLCTVCHKERTARQAKERSQVRRQSLASKHGSDITRFLVKK

SEQ ID NO: 2310 - protein, 1099 aa, Homo sapiens
MRMSDTVTVKDETATMKDLEAEVKDTTRVENLIKSENYGKILVEKNEHCIENNIDLQRPLQSFGQTGKRSKSSSKLKLVRSLAVCEESPPPPAPEISQENQEKIQIQLTQSFEKEEKPSKDEAEKEKASDKLPRKMLSRDSSQEYTDSTGIDLHEFLVNTLKNNPRDRMMLLKLEQEILDFIGNNESPRKKFPPMTSYHRMLLHRVAAYFGLDHNVDQSGKSVIVNKTSNTRIPDQKFNEHIKDDKGEDFQKRYILKRDNSSFDKDDNQMRIRLKDDRRSKSIEEREEEYQRARDRIFSQDSLCSQENYIIDKRLQDEDASSTQQRRQIFRVNKDASGRSTNSHQSSTENELKYSEPRPWSSTDSDSSLRNLKPAVTKASSFSGISVLTRGDSSGSSKSIGRLSKTGSESSGSVGSSTGSLSHIQQPLPGTALSQSSHGAPVVYPTVSTHSSLSFDGGLNGQVASPSTSFFLLPLEAAGIPPGSILINPQTGQPFINPDGSPVVYNPPMTQQPVRSQVPGPPQPPLPAPPQQPAANHIFSQDNLGSQFSHMSLARQPSADGSDPHAAMFQSTVVLQSPQQSGYIMTAAPPPHPPPPPPPPPPPPPLPPGQPVPTAGYPASGHPVSQPVLQQQGYIQQPSPQMPACYCAPGHYHSSQPQYRPVPSVHYNSHLNQPLPQPAQQTGYQVIPNQQQNYQGIVGVQQPQSQSLVSGQPNSIGNQIQGVVIPYTSVPTYQVSLPQGSQGIPHQTYQQPVMFPNQSNQGSMPTTGMPVYYSVIPPGQQNNLSSSVGYLQHPGSEQVQFPRTTSPCSSQQLQGHQCTAGPPPPPGGGMVMMQLSVPNNPQSCAHSPPQWKQNKYYCDHQRGQKCVEFSSVDNIVQHSPQLSSPIISPAQSPAPAQLSTLKTVRPSGPPLSIMPQFSRPFVPGQGDSRYPLLGQPLQYNPPAVLHGHIPNQQGQPGSRHGNRGRRQAKKAASTDLGAGETVVGKVLEITELPDGITRMEAEKLFGELFKIGAKIRWLRDPQSQPRRHPLCCGSGDNTANPERSKPSDLASTYTVLATFPSISAAQNALKKQINSVNKFKLRTSKKHYDFHILERASSQ

SEQ ID NO: 2311 - protein, 501 aa, Homo sapiens
MPSASASRKSQEKPREIMDAAEDYAKERYGISSMIQSQEKPDRVLVRVRDLTIQKADEVVWVRARVHTSRAKGKQCFLVLRQQQFNVQALVAVGDHASKQMVKFAANINKESIVDVEGVVRKVNQKIGSCTQQDVELHVQKIYVISLAEPRLPLQLDDAVRPEAEGEEEGRATVNQDTRLDNRVIDLRTSTSQAVFRLQSGICHLFRETLINKGFVEIQTPKIISAASEGGANVFTVSYFKNNAYLAQSPQLYKQMCICADFEKVFSIGPVFRAEDSNTHRHLTEFVGLDIEMAFNYHYHEVMEEIADTMVQIFKGLQERFQTEIQTVNKQFPCEPFKFLEPTLRLEYCEALAMLREAGVEMGDEDDLSTPNEKLLGHLVKEKYDTDFYILDKYPLAVRPFYTMPDPRNPKQSNSYDMFMRGEEILSGAQRIHDPQLLTERALHHGIDLEKIKAYIDSFRFGAPPHAGGGIGLERVTMLFLGLHNVRQTSMFPRDPKRLTP

SEQ ID NO: 2312 - protein, 1927 aa, Homo sapiens
MELSWHVVFIALLSFSCWGSDWESDRNFISTAGPLTNDLLHNLSGLLGDQSSNFVAGDKDMYVCHQPLPTFLPEYFSSLHASQITHYKVFLSWAQLLPAGSTQNPDEKTVQCYRRLLKALKTARLQPMVILHHQTLPASTLRRTEAFADLFADYATFAFHSFGDLVGIWFTFSDLEEVIKELPHQESRASQLQTLSDAHRKAYEIYHESYAFQGGKLSVVLRAEDIPELLLEPPISALAQDTVDFLSLDLSYECQNEASLRQKLSKLQTIEPKVKVFIFNLKLPDCPSTMKNPASLLFSLFEAINKDQVLTIGFDINEFLSCSSSSKKSMSCSLTGSLALQPDQQQDHETTDSSPASAYQRIWEAFANQSRAERDAFLQDTFPEGFLWGASTGAFNVEGGWAEGGRGVSIWDPRRPLNTTEGQATLEVASDSYHKVASDVALLCGLRAQVYKFSISWSRIFPMGHGSSPSLPGVAYYNKLIDRLQDAGIEPMATLFHWDLPQALQDHGGWQNESVVDAFLDYAAFCFSTFGDRVKLWVTFHEPWVMSYAGYGTGQHPPGISDPGVASFKVAHLVLKAHARTWHHYNSHHRPQQQGHVGIVLNSDWAEPLSPERPEDLRASERFLHFMLGWFAHPVFVDGDYPATLRTQIQQMNRQCSHPVAQLPEFTEAEKQLLKGSADFLGLSHYTSRLISNAPQNTCIPSYDTIGGFSQHVNHVWPQTSSSWIRVVPWGIRRLLQFVSLEYTRGKVPIYLAGNGMPIGESENLFDDSLRVDYFNQYINEVLKAIKEDSVDVRSYIARSLIDGFEGPSGYSQRFGLHHVNFSDSSKSRTPRKSAYFFTSIIEKNGFLTKGAKRLLPPNTVNLPSKVRAFTFPSEVPSKAKVVWEKFSSQPKFERDLFYHGTFRDDFLWGVSSSAYQIEGAWDADGKGPSIWDNFTHTPGSNVKDNATGDIACDSYHQLDADLNMLRALKVKAYRFSISWSRIFPTGRNSSINSHGVDYYNRLINGLVASNIFPMVTLFHWDLPQALQDIGGWENPALIDLFDSYADFCFQTFGDRVKFWMTFNEPMYLAWLGYGSGEFPPGVKDPGWAPYRIAHAVIKAHARVYHTYDEKYRQEQKGVISLSLSTHWAEPKSPGVPRDVEAADRMLQFSLGWFAHPIFRNGDYPDTMKWKVGNRSELQHLATSRLPSFTEEEKRFIRATADVFCLNTYYSRIVQHKTPRLNPPSYEDDQEMAEEEDPSWPSTAMNRAAPWGTRRLLNWIKEEYGDIPIYITENGVGLTNPNTEDTDRIFYHKTYINEALKAYRLDGIDLRGYVAWSLMDNFEWLNGYTVKFGLYHVDFNNTNRPRTARASARYYTEVITNNGMPLAREDEFLYGRFPEGFIWSAASAAYQIEGAWRADGKGLSIWDTFSHTPLRVENDAIGDVACDSYHKIAEDLVTLQNLGVSHYRFSISWSRILPDGTTRYINEAGLNYYVRLIDTLLAASIQPQVTIYHWDLPQTLQDVGGWENETIVQRFKEYADVLFQRLGDKVKFWITLNEPFVIAYQGYGYGTAAPGVSNRPGTAPYIVGHNLIKAHAEAWHLYNDVYRASQGGVISITISSDWAEPRDPSNQEDVEAARRYVQFMGGWFAHPIFKNGDYNEVMKTRIRDRSLAAGLNKSRLPEFTESEKRRINGTYDFFGFNHYTTVLAYNLNYATAISSFDADRGVASIADRSWPDSGSFWLKMTPFGFRRILNWLKEEYNDPPIYVTENGVSQREETDLNDTARIYYLRTYINEALKAVQDKVDLRGYTVWSAMDNFEWATGFSERFGLHFVNYSDPSLPRIPKASAKFYASVVRCNGFPDPATGPHACLHQPDAGPTISPVRQEEVQFLGLMLGTTEAQTALYVLFSLVLLGVCGLAFLSYKYCKRSKQGKTQRSQQELSPVSSF

SEQ ID NO: 2313 - protein, 658 aa, Homo sapiens
MAEAAAAAGGTGLGAGASYGSAADRDRDPDPDRAGRRLRVLSGHLLGRPREALSTNECKARRAASAATAAPTATPAAQESGTIPKKRQEVMKWNGWGYNDSKFIFNKKGQIELTGKRYPLSGMGLPTFKEWIQNTLGVNVEHKTTSKASLNPSDTPPSVVNEDFLHDLKETNISYSQEADDRVFRAHGHCLHEIFLLREGMFERIPDIVLWPTCHDDVVKIVNLACKYNLCIIPIGGGTSVSYGLMCPADETRTIISLDTSQMNRILWVDENNLTAHVEAGITGQELERQLKESGYCTGHEPDSLEFSTVGGWVSTRASGMKKNIYGNIEDLVVHIKMVTPRGIIEKSCQGPRMSTGPDIHHFIMGSEGTLGVITEATIKIRPVPEYQKYGSVAFPNFEQGVACLREIAKQRCAPASIRLMDNKQFQFGHALKPQVSSIFTSFLDGLKKFYITKFKGFDPNQLSVATLLFEGDREKVLQHEKQVYDIAAKFGGLAAGEDNGQRGYLLTYVIAYIRDLALEYYVLGESFETSAPWDRVVDLCRNVKERITRECKEKGVQFAPFSTCRVTQTYDAGACIYFYFAFNYRGISDPLTVFEQTEAAAREEILANGGSLSHHHGVGKLRKQWLKESISDVGFGMLKSVKEYVDPNNIFGNRNLL

SEQ ID NO: 2314 - protein, 436 aa, Homo sapiens
MSSRKSKSNSLIHTECLSQVQRILRERFCRQSPHSNLFGVQVQYKHLSELLKRTALHGESNSVLIIGPRGSGKTMLINHALKELMEIEEVSENVLQVHLNGLLQINDKIALKEITRQLNLENVVGDKVFGSFAENLSFLLEALKKGDRTSSCPVIFILDEFDLFAHHKNQTLLYNLFDISQSAQTPIAVIGLTCRLDILELLEKRVKSRFSHRQIHLMNSFGFPQYVKIFKEQLSLPAEFPDKVFAEKWNENVQYLSEDRSVQEVLQKHFNISKNLRSLHMLLMLALNRVTASHPFMTAVDLMEASQLCSMDSKANIVHGLSVLEICLIIAMKHLNDIYEEEPFNFQMVYNEFQKFVQRKAHSVYNFEKPVVMKAFEHLQQLELIKPMERTSGNSQREYQLMKLLLDNTQIMNALQKYPNCPTDVRQWATSSLSWL

SEQ ID NO: 2315 - protein, 1312 aa, Homo sapiens
MKALDEPPYLTVGTDVSAKYRGAFCEAKIKTAKRLVKVKVTFRHDSSTVEVQDDHIKGPLKVGAIVEVKNLDGAYQEAVINKLTDASWYTVVFDDGDEKTLRRSSLCLKGERHFAESETLDQLPLTNPEHFGTPVIGKKTNRGRRSNHIPEEESSSSSSDEDEDDRKQIDELLGKVVCVDYISLDKKKALWFPALVVCPDCSDEIAVKKDNILVRSFKDGKFTSVPRKDVHEITSDTAPKPDAVLKQAFEQALEFHKSRTIPANWKTELKEDSSSSEAEEEEEEEDDEKEKEDNSSEEEEEIEPFPEERENFLQQLYKFMEDRGTPINKRPVLGYRNLNLFKLFRLVHKLGGFDNIESGAVWKQVYQDLGIPVLNSAAGYNVKCAYKKYLYGFEEYCRSANIEFQMALPEKVVNKQCKECENVKEIKVKEENETEIKEIKMEEERNIIPREEKPIEDEIERKENIKPSLGSKKNLLESIPTHSDQEKEVNIKKPEDNENLDDKDDDTTRVDESLNIKVEAEEEKAKSGDETNKEEDEDDEEAEEEEEEEEEEEDEDDDDNNEEEEFECYPPGMKVQVRYGRGKNQKMYEASIKDSDVEGGEVLYLVHYCGWNVRYDEWIKADKIVRPADKNVPKIKHRKKIKNKLDKEKDKDEKYSPKNCKLRRLSKPPFQTNPSPEMVSKLDLTDAKNSDTAHIKSIEITSILNGLQASESSAEDSEQEDERGAQDMDNNGKEESKIDHLTNNRNDLISKEEQNSSSLLEENKVHADLVISKPVSKSPERLRKDIEVLSEDTDYEEDEVTKKRKDVKKDTTDKSSKPQIKRGKRRYCNTEECLKTGSPGKKEEKAKNKESLCMENSSNSSSDEDEEETKAKMTPTKKYNGLEEKRKSLRTTGFYSGFSEVAEKRIKLLNNSDERLQNSRAKDRKDVWSSIQGQWPKKTLKELFSDSDTEAAASPPHPAPEEGVAEESLQTVAEEESCSPSVELEKPPPVNVDSKPIEEKTVEVNDRKAEFPSSGSNSVLNTPPTTPESPSSVTVTEGSRQQSSVTVSEPLAPNQEEVRSIKSETDSTIEVDSVAGELQDLQSEGNSSPAGFDASVSSSSSNQPEPEHPEKACTGQKRVKDAQGGGSSSKKQKRSHKATVVNNKKKGKGTNSSDSEELSAGESITKSQPVKSVSTGMKSHSTKSPARTQSPGKCGKNGDKDPDLKEPSNRLPKVYKWSFQMSDLENMTSAERITILQEKLQEIRKHYLSLKSEVASIDRRRKRLKKKERESAATSSSSSSPSSSSITAAVMLTLAEPSMSSASQNGMSVECR

SEQ ID NO: 2316 - protein, 1226 aa, Homo sapiens
MKALDEPPYLTVGTDVSAKYRGAFCEAKIKTAKRLVKVKVTFRHDSSTVEVQDDHIKGPLKVGAIVEVKNLDGAYQEAVINKLTDASWYTVVFDDGDEKTLRRSSLCLKGERHFAESETLDQLPLTNPEHFGTPVIGKKTNRGRRSNHIPEEESSSSSSDEDEDDRKQIDELLGKVVCVDYISLDKKKALWFPALVVCPDCSDEIAVKKDNILVRSFKDGKFTSVPRKDVHEITSDTAPKPDAVLKQAFEQALEFHKSRTIPANWKTELKEDSSSSEAEEEEEEEDDEKEKEDNSSEEEEEIEPFPEERENFLQQLYKFMEDRGTPINKRPVLGYRNLNLFKLFRLVHKLGGFDNIESGAVWKQVYQDLGIPVLNSAAGYNVKCAYKKYLYGFEEYCRSANIEFQMALPEKVVNKQCKECENVKEIKVKEENETEIKEIKMEEERNIIPREEKPIEDEIERKENIKPSLGSKKNLLESIPTHSDQEKEVNIKKPEDNENLDDKDDDTTRVDESLNIKVEAEEEKAKSGYDEWIKADKIVRPADKNVPKIKHRKKIKNKLDKEKDKDEKYSPKNCKLRRLSKPPFQTNPSPEMVSKLDLTDAKNSDTAHIKSIEITSILNGLQASESSAEDSEQEDERGAQDMDNNGKEESKIDHLTNNRNDLISKEEQNSSSLLEENKVHADLVISKPVSKSPERLRKDIEVLSEDTDYEEDEVTKKRKDVKKDTTDKSSKPQIKRGKRRYCNTEECLKTGSPGKKEEKAKNKESLCMENSSNSSSDEDEEETKAKMTPTKKYNGLEEKRKSLRTTGFYSGFSEVAEKRIKLLNNSDERLQNSRAKDRKDVWSSIQGQWPKKTLKELFSDSDTEAAASPPHPAPEEGVAEESLQTVAEEESCSPSVELEKPPPVNVDSKPIEEKTVEVNDRKAEFPSSGSNSVLNTPPTTPESPSSVTVTEGSRQQSSVTVSEPLAPNQEEVRSIKSETDSTIEVDSVAGELQDLQSEGNSSPAGFDASVSSSSSNQPEPEHPEKACTGQKRVKDAQGGGSSSKKQKRSHKATVVNNKKKGKGTNSSDSEELSAGESITKSQPVKSVSTGMKSHSTKSPARTQSPGKCGKNGDKDPDLKEPSNRLPKVYKWSFQMSDLENMTSAERITILQEKLQEIRKHYLSLKSEVASIDRRRKRLKKKERESAATSSSSSSPSSSSITAAVMLTLAEPSMSSASQNGMSVECR

SEQ ID NO: 2317 - protein, 1247 aa, Homo sapiens
MLASSSRIRAAWTRALLLPLLLAGPVGCLSRQELFPFGPGQGDLELEDGDDFVSPALELSGALRFYDRSDIDAVYVTTNGIIATSEPPAKESHPGLFPPTFGAVAPFLADLDTTDGLGKVYYREDLSPSITQRAAECVHRGFPEISFQPSSAVVVTWESVAPYQGPSRDPDQKGKRNTFQAVLASSDSSSYAIFLYPEDGLQFHTTFSKKENNQVPAVVAFSQGSVGFLWKSNGAYNIFANDRESVENLAKSSNSGQQGVWVFEIGSPATTNGVVPADVILGTEDGAEYDDEDEDYDLATTRLGLEDVGTTPFSYKALRRGGADTYSVPSVLSPRRAATERPLGPPTERTRSFQLAVETFHQQHPQVIDVDEVEETGVVFSYNTDSRQTCANNRHQCSVHAECRDYATGFCCSCVAGYTGNGRQCVAEGSPQRVNGKVKGRIFVGSSQVPIVFENTDLHSYVVMNHGRSYTAISTIPETVGYSLLPLAPVGGIIGWMFAVEQDGFKNGFSITGGEFTRQAEVTFVGHPGNLVIKQRFSGIDEHGHLTIDTELEGRVPQIPFGSSVHIEPYTELYHYSTSVITSSSTREYTVTEPERDGASPSRIYTYQWRQTITFQECVHDDSRPALPSTQQLSVDSVFVLYNQEEKILRYALSNSIGPVREGSPDALQNPCYIGTHGCDTNAACRPGPRTQFTCECSIGFRGDGRTCYDIDECSEQPSVCGSHTICNNHPGTFRCECVEGYQFSDEGTCVAVVDQRPINYCETGLHNCDIPQRAQCIYTGGSSYTCSCLPGFSGDGQACQDVDECQPSRCHPDAFCYNTPGSFTCQCKPGYQGDGFRCVPGEVEKTRCQHEREHILGAAGATDPQRPIPPGLFVPECDAHGHYAPTQCHGSTGYCWCVDRDGREVEGTRTRPGMTPPCLSTVAPPIHQGPAVPTAVIPLPPGTHLLFAQTGKIERLPLEGNTMRKTEAKAFLHVPAKVIIGLAFDCVDKMVYWTDITEPSIGRASLHGGEPTTIIRQDLGSPEGIAVDHLGRNIFWTDSNLDRIEVAKLDGTQRRVLFETDLVNPRGIVTDSVRGNLYWTDWNRDNPKIETSYMDGTNRRILVQDDLGLPNGLTFDAFSSQLCWVDAGTNRAECLNPSQPSRRKALEGLQYPFAVTSYGKNLYFTDWKMNSVVALDLAISKETDAFQPHKQTRLYGITTALSQCPQGHNYCSVNNGGCTHLCLATPGSRTCRCPDNTLGVDCIEQK

SEQ ID NO: 2318 - protein, 352 aa, Homo sapiens
MESGGRPSLCQFILLGTTSVVTAALYSVYRQKARVSQELKGAKKVHLGEDLKSILSEAPGKCVPYAVIEGAVRSVKETLNSQFVENCKGVIQRLTLQEHKMVWNRTTHLWNDCSKIIHQRTNTVPFDLVPHEDGVDVAVRVLKPLDSVDLGLETVYEKFHPSIQSFTDVIGHYISGERPKGIQETEEMLKVGATLTGVGELVLDNNSVRLQPPKQGMQYYLSSQDFDSLLQRQESSVRLWKVLALVFGFATCATLFFILRKQYLQRQERLRLKQMQEEFQEHEAQLLSRAKPEDRESLKSACVVCLSSFKSCVFLECGHVCSCTECYRALPEPKKCPICRQAITRVIPLYNS

SEQ ID NO: 2319 - protein, 272 aa, Homo sapiens
MSDQQLDCALDLMRRLPPQQIEKNLSDLIDLVPSLCEDLLSSVDQPLKIARDKVVGKDYLLCDYNRDGDSYRSPWSNKYDPPLEDGAMPSARLRKLEVEANNAFDQYRDLYFEGGVSSVYLWDLDHGFAGVILIKKAGDGSKKIKGCWDSIHVVEVQEKSSGRTAHYKLTSTVMLWLQTNKSGSGTMNLGGSLTRQMEKDETVSDCSPHIANIGRLVEDMENKIRSTLNEIYFGKTKDIVNGLRSVQTFADKSKQEALKNDLVEALKRKQQC

SEQ ID NO: 2320 - protein, 767 aa, Homo sapiens
MEALRESVLHLALQMSTYKRATLDEEDLVDSLSEGDAYPNGLQVNFHSPRSGQRCWAARTQVEKRLVVLVVLLAAGLVACLAALGIQYQTRSPSVCLSEACVSVTSSILSSMDPTVDPCHDFFSYACGGWIKANPVPDGHSRWGTFSNLWEHNQAIIKHLLENSTASVSEAERKAQVYYRACMNETRIEELRAKPLMELIERLGGWNITGPWAKDNFQDTLQVVTAHYRTSPFFSVYVSADSKNSNSNVIQVDQSGLGLPSRDYYLNKTENEKVLTGYLNYMVQLGKLLGGGDEEAIRPQMQQILDFETALANITIPQEKRRDEELIYHKVTAAELQTLAPAINWLPFLNTIFYPVEINESEPIVVYDKEYLEQISTLINTTDRCLLNNYMIWNLVRKTSSFLDQRFQDADEKFMEVMYGTKKTCLPRWKFCVSDTENNLGFALGPMFVKATFAEDSKSIATEIILEIKKAFEESLSTLKWMDEETRKSAKEKADAIYNMIGYPNFIMDPKELDKVFNDYTAVPDLYFENAMRFFNFSWRVTADQLRKAPNRDQWSMTPPMVNAYYSPTKNEIVFPAGILQAPFYTRSSPKALNFGGIGVVVGHELTHAFDDQGREYDKDGNLRPWWKNSSVEAFKRQTECMVEQYSNYSVNGEPVNGRHTLGENIADNGGLKAAYRAYQNWVKKNGAEHSLPTLGLTNNQLFFLGFAQVWCSVRTPESSHEGLITDPHSPSRFRVIGSLSNSKEFSEHFRCPPGSPMNPPHKCEVW

SEQ ID NO: 2321 - protein, 1585 aa, Homo sapiens
MNSQPQTRSPFFQRPQIQPPRATIPNSSPSIRPGAQTPTAVYQANQHIMMVNHLPMPYPVPQGPQYCIPQYRHSGPPYVGPPQQYPVQPPGPGPFYPGPGPGDFPNAYGTPFYPSQPVYQSAPIIVPTQQQPPPAKREKKTIRIRDPNQGGKDITEEIMSGGGSRNPTPPIGRPTSTPTPPQQLPSQVPEHSPVVYGTVESAHLAASTPVTAASDQKQEEKPKPDPVLKSPSPVLRLVLSGEKKEQEGQTSETTAIVSIAELPLPPSPTTVSSVARSTIAAPTSSALSSQPIFTTAIDDRCELSSPREDTIPIPSLTSCTETSDPLPTNENDDDICKKPCSVAPNDIPLVSSTNLINEINGVSEKLSATESIVEIVKQEVLPLTLELEILENPPEEMKLECIPAPITPSTVPSFPPTPPTPPASPPHTPVIVPAAATTVSSPSAAITVQRVLEEDESIRTCLSEDAKEIQNKIEVEADGQTEEILDSQNLNSRRSPVPAQIAITVPKTWKKPKDRTRTTEEMLEAELELKAEEELSIDKVLESEQDKMSQGFHPERDPSDLKKVKAVEENGEEAEPVRNGAESVSEGEGIDANSGSTDSSGDGVTFPFKPESWKPTDTEGKKQYDREFLLDFQFMPACIQKPEGLPPISDVVLDKINQPKLPMRTLDPRILPRGPDFTPAFADFGRQTPGGRGVPLLNVGSRRSQPGQRREPRKIITVSVKEDVHLKKAENAWKPSQKRDSQADDPENIKTQELFRKVRSILNKLTPQMFNQLMKQVSGLTVDTEERLKGVIDLVFEKAIDEPSFSVAYANMCRCLVTLKVPMADKPGNTVNFRKLLLNRCQKEFEKDKADDDVFEKKQKELEAASAPEERTRLHDELEEAKDKARRRSIGNIKFIGELFKLKMLTEAIMHDCVVKLLKNHDEESLECLCRLLTTIGKDLDFEKAKPRMDQYFNQMEKIVKERKTSSRIRFMLQDVIDLRLCNWVSRRADQGPKTIEQIHKEAKIEEQEEQRKVQQLMTKEKRRPGVQRVDEGGWNTVQGAKNSRVLDPSKFLKITKPTIDEKIQLVPKAQLGSWGKGSSGGAKASETDALRSSASSLNRFSALQPPAPSGSTPSTPVEFDSRRTLTSRGSMGREKNDKPLPSATARPNTFMRGGSSKDLLDNQSQEEQRREMLETVKQLTGGVDVERNSTEAERNKTRESAKPEISAMSAHDKAALSEEELERKSKSIIDEFLHINDFKEAMQCVEELNAQGLLHVFVRVGVESTLERSQITRDHMGQLLYQLVQSEKLSKQDFFKGFSETLELADDMAIDIPHIWLYLAELVTPMLKEGGISMRELTIEFSKPLLPVGRAGVLLSEILHLLCKQMSHKKVGALWREADLSWKDFLPEGEDVHNFLLEQKLDFIESDSPCSSEALSKKELSAEELYKRLEKLIIEDKANDEQIFDWVEANLDEIQMSSPTFLRALMTAVCKAAIIADSSTFRVDTAVIKQRVPILLKYLDSDTEKELQALYALQASIVKLDQPANLLRMFFDCLYDEEVISEDAFYKWESSKDPAEQNGKGVALKSVTAFFTWLREAEEESEDN

SEQ ID NO: 2322 - protein, 517 aa, Homo sapiens
MELEELGIREECGVFGCIASGEWPTQLDVPHVITLGLVGLQHRGQESAGIVTSDGSSVPTFKSHKGMGLVNHVFTEDNLKKLYVSNLGIGHTRYATTGKCELENCQPFVVETLHGKIAVAHNGELVNAARLRKKLLRHGIGLSTSSDSEMITQLLAYTPPQEQDDTPDWVARIKNLMKEAPTAYSLLIMHRDVIYAVRDPYGNRPLCIGRLIPVSDINDKEKKTSETEGWVVSSESCSFLSIGARYYREVLPGEIVEISRHNVQTLDIISRSEGNPVAFCIFEYVYFARPDSMFEDQMVYTVRYRCGQQLAIEAPVDADLVSTVPESATPAALAYAGKCGLPYVEVLCKNRYVGRTFIQPNMRLRQLGVAKKFGVLSDNFKGKRIVLVDDSIVRGNTISPIIKLLKESGAKEVHIRVASPPIKYPCFMGINIPTKEELIANKPEFDHLAEYLGANSVVYLSVEGLVSSVQEGIKFKKQKEKKHDIMIQENGNGLECFEKSGHCTACLTGKYPVELEW

SEQ ID NO: 2323 - protein, 425 aa, Homo sapiens
MATAEVLNIGKKLYEGKTKEVYELLDSPGKVLLQSKDQITAGNAARKNHLEGKAAISNKITSCIFQLLQEAGIKTAFTRKCGETAFIAPQCEMIPIEWVCRRIATGSFLKRNPGVKEGYKFYPPKVELFFKDDANNDPQWSEEQLIAAKFCFAGLLIGQTEVDIMSHATQAIFEILEKSWLPQNCTLVDMKIEFGVDVTTKEIVLADVIDNDSWRLWPSGDRSQQKDKQSYRDLKEVTPEGLQMVKKNFEWVAERVELLLKSESQCRVVVLMGSTSDLGHCEKIKKACGNFGIPCELRVTSAHKGPDETLRIKAEYEGDGIPTVFVAVAGRSNGLGPVMSGNTAYPVISCPPLTPDWGVQDVWSSLRLPSGLGCSTVLSPEGSAQFAAQIFGLSNHLVWSKLRASILNTWISLKQADKKIRECNL

SEQ ID NO: 2324 - protein, 318 aa, Homo sapiens
MAPWAEAEHSALNPLRAVWLTLTAAFLLTLLLQLLPPGLLPGCAIFQDLIRYGKTKCGEPSRPAACRAFDVPKRYFSHFYIISVLWNGFLLWCLTQSLFLGAPFPSWLHGLLRILGAAQFQGGELALSAFLVLVFLWLHSLRRLFECLYVSVFSNVMIHVVQYCFGLVYYVLVGLTVLSQVPMDGRNAYITGKNLLMQARWFHILGMMMFIWSSAHQYKCHVILGNLRKNKAGVVIHCNHRIPFGDWFEYVSSPNYLAELMIYVSMAVTFGFHNLTWWLVVTNVFFNQALSAFLSHQFYKSKFVSYPKHRKAFLPFLF

SEQ ID NO: 2325 - protein, 698 aa, Homo sapiens
MLPARLPFRLLSLFLRGSAPTAARHGLREPLLERRCAAASSFQHSSSLGRELPYDPVDTEGFGEGGDMQERFLFPEYILDPEPQPTREKQLQELQQQQEEEERQRQQRREERRQQNLRARSREHPVVGHPDPALPPSGVNCSGCGAELHCQDAGVPGYLPREKFLRTAEADGGLARTVCQRCWLLSHHRRALRLQVSREQYLELVSAALRRPGPSLVLYMVDLLDLPDALLPDLPALVGPKQLIVLGNKVDLLPQDAPGYRQRLRERLWEDCARAGLLLAPGHQGPQRPVKDEPQDGENPNPPNWSRTVVRDVRLISAKTGYGVEELISALQRSWRYRGDVYLVGATNAGKSTLFNTLLESDYCTAKGSEAIDRATISPWPGTTLNLLKFPICNPTPYRMFKRHQRLKKDSTQAEEDLSEQEQNQLNVLKKHGYVVGRVGRTFLYSEEQKDNIPFEFDADSLAFDMENDPVMGTHKSTKQVELTAQDVKDAHWFYDTPGITKENCILNLLTEKEVNIVLPTQSIVPRTFVLKPGMVLFLGAIGRIDFLQGNQSAWFTVVASNILPVHITSLDRADALYQKHAGHTLLQIPMGGKERMAGFPPLVAEDIMLKEGLGASEAVADIKFSSAGWVSVTPNFKDRLHLRGYTPEGTVLTVRPPLLPYIVNIKGQRIKKSVAYKTKKPPSLMYNVRKKKGKINV

SEQ ID NO: 2326 - protein, 420 aa, Homo sapiens
MSGRPRTTSFAESCKPVQQPSAFGSMKVSRDKDGSKVTTVVATPGQGPDRPQEVSYTDTKVIGNGSFGVVYQAKLCDSGELVAIKKVLQDKRFKNRELQIMRKLDHCNIVRLRYFFYSSGEKKDEVYLNLVLDYVPETVYRVARHYSRAKQTLPVIYVKLYMYQLFRSLAYIHSFGICHRDIKPQNLLLDPDTAVLKLCDFGSAKQLVRGEPNVSYICSRYYRAPELIFGATDYTSSIDVWSAGCVLAELLLGQPIFPGDSGVDQLVEIIKVLGTPTREQIREMNPNYTEFKFPQIKAHPWTKVFRPRTPPEAIALCSRLLEYTPTARLTPLEACAHSFFDELRDPNVKLPNGRDTPALFNFTTQELSSNPPLATILIPPHARIQAAASTPTNATAASDANTGDRGQTNNAASASASNST

SEQ ID NO: 2327 - protein, 288 aa, Homo sapiens
MGHTRRQGTSPSKCPYLNFFQLLVLAGLSHFCSGVIHVTKEVKEVATLSCGHNVSVEELAQTRIYWQKEKKMVLTMMSGDMNIWPEYKNRTIFDITNNLSIVILALRPSDEGTYECVVLKYEKDAFKREHLAEVTLSVKADFPTPSISDFEIPTSNIRRIICSTSGGFPEPHLSWLENGEELNAINTTVSQDPETELYAVSSKLDFNMTTNHSFMCLIKYGHLRVNQTFNWNTTKQEHFPDNLLPSWAITLISVNGIFVICCLTYCFAPRCRERRRNERLRRESVRPV

SEQ ID NO: 2328 - protein, 239 aa, Homo sapiens
MQDPNADTEWNDILRKKGILPPKESLKELEEEAEEEQRILQQSVVKTYEDMTLEELEDHEDEFNEEDERAIEMYRRRRLAEWKATKLKNKFGEVLEISGKDYVQEVTKAGEGLWVILHLYKQGIPLCALINQHLSGLARKFPDVKFIKAISTTCIPNYPDRNLPTIFVYLEGDIKAQFIGPLVFGGMNLTRDELEWKLSESGAIMTDLEENPKKPIEDVLLSSVRRSVLMKRDSDSEGD

SEQ ID NO: 2329 - protein, 226 aa, Homo sapiens
MEADASVDMFSKVLEHQLLQTTKLVEEHLDSEIQKLDQMDEDELERLKEKRLQALRKAQQQKQEWLSKGHGEYREIPSERDFFQEVKESENVVCHFYRDSTFRCKILDRHLAILSKKHLETKFLKLNVEKAPFLCERLHIKVIPTLALLKDGKTQDYVVGFTDLGNTDDFTTETLEWRLGSSDILNYSGNLMEPPFQNQKKFGTNFTKLEKKTIRGKKYDSDSDDD

SEQ ID NO: 2330 - protein, 575 aa, Homo sapiens
MWSLLLCGLSIALPLSVTADGCKDIFMKNEILSASQPFAFNCTFPPITSGEVSVTWYKNSSKIPVSKIIQSRIHQDETWILFLPMEWGDSGVYQCVIKGRDSCHRIHVNLTVFEKHWCDTSIGGLPNLSDEYKQILHLGKDDSLTCHLHFPKSCVLGPIKWYKDCNEIKGERFTVLETRLLVSNVSAEDRGNYACQAILTHSGKQYEVLNGITVSITERAGYGGSVPKIIYPKNHSIEVQLGTTLIVDCNVTDTKDNTNLRCWRVNNTLVDDYYDESKRIREGVETHVSFREHNLYTVNITFLEVKMEDYGLPFMCHAGVSTAYIILQLPAPDFRAYLIGGLIALVAVAVSVVYIYNIFKIDIVLWYRSAFHSTETIVDGKLYDAYVLYPKPHKESQRHAVDALVLNILPEVLERQCGYKLFIFGRDEFPGQAVANVIDENVKLCRRLIVIVVPESLGFGLLKNLSEEQIAVYSALIQDGMKVILIELEKIEDYTVMPESIQYIKQKHGAIRWHGDFTEQSQCMKTKFWKTVRYHMPPRRCRPFPPVQLLQHTPCYRTAGPELGSRRKKCTLTTG

SEQ ID NO: 2331 - protein, 125 aa, Homo sapiens [sequence omitted]

SEQ ID NO: 2332 - protein, 599 aa, Homo sapiens
MLCLGWIFLWLVAGERIKGFNISGCSTKKLLWTYSTRSEEEFVLFCDLPEPQKSHFCHRNRLSPKQVPEHLPFMGSNDLSDVQWYQQPSNGDPLEDIRKSYPHIIQDKCTLHFLTPGVNNSGSYICRPKMIKSPYDVACCVKMILEVKPQTNASCEYSASHKQDLLLGSTGSISCPSLSCQSDAQSPAVTWYKNGKLLSVERSNRIVVDEVYDYHQGTYVCDYTQSDTVSSWTVRAVVQVRTIVGDTKLKPDILDPVEDTLEVELGKPLTISCKARFGFERVFNPVIKWYIKDSDLEWEVSVPEAKSIKSTLKDEIIERNIILEKVTQRDLRRKFVCFVQNSIGNTTQSVQLKEKRGVVLLYILLGTIGTLVAVLAASALLYRHWIEIVLLYRTYQSKDQTLGDKKDFDAFVSYAKWSSFPSEATSSLSEEHLALSLFPDVLENKYGYSLCLLERDVAPGGVYAEDIVSIIKRSRRGIFILSPNYVNGPSIFELQAAVNLALDDQTLKLILIKFCYFQEPESLPHLVKKALRVLPTVTWRGLKSVPPNSRFWAKMRYHMPVKNSQGFTWNQLRITSRIFQWKGLSRTETTGRSSQPKEW

SEQ ID NO: 2333 - protein, 770 aa, Homo sapiens
MRLLGAAAVAALGRGRAPASLGWQRKQVNWKACRWSSSGVIPNEKIRNIGISAHIDSGKTTLTERVLYYTGRIAKMHEVKGKDGVGAVMDSMELERQRGITIQSAATYTMWKDVNINIIDTPGHVDFTIEVERALRVLDGAVLVLCAVGGVQCQTMTVNRQMKRYNVPFLTFINKLDRMGSNPARALQQMRSKLNHNAAFMQIPMGLEGNFKGIVDLIEERAIYFDGDFGHFLRDFLPLLWNWDRRSGSQIVRYGEIPAELRAAATDHRQELIECVANSDEQLGEMFLEEKIPSISDLKLAIRRATLKRSFTPVFLGSALKNKGVQPLLDAVLEYLPNPSEVQNYAILNKEDDSKEKTKILMNSSRDNSHPFVGLAFKLEVGRFGQLTYVRSYQGELKKGDTIYNTRTRKKVRLQRLARMHADMMEDVEEVYAGDICALFGIDCASGDTFTDKANSGLSMESIHVPDPVISIAMKPSNKNDLEKFSKGIGRFTREDPTFKVYFDTENKETVISGMGELHLEIYAQRLEREYGCPCITGKPKVAFRETITAPVPFDFTHKKQSGGAGQYGKVIGVLEPLDPEDYTKLEFSDETFGSNIPKQFVPAVEKGFLDACEKGPLSGHKLSGLRFVLQDGAHHMVDSNEISFIRAGEGALKQALANATLCILEPIMAVEVVAPNEFQGQVIAGINRRHGVITGQDGVEDYFTLYADVPLNDMFGYSTELRSCTEGKGEYTMEYSRYQPCLPSTQEDVINKYLEATGQLPVKKGKAKN

SEQ ID NO: 2334 - protein, 222 aa, Homo sapiens
MEIPPTNYPASRAALVAQNYINYQQGTPHRVFEVQKVKQASMEDIPGRGHKYHLKFAVEEIIQKQVKVNCTAEVLYPSTGQETAPEVNFTFEGETGKNPDEEDNTFYQRLKSMKEPLEAQNIPDNFGNVSPEMTLVLHLAWVACGYIIWQNSTEDTWYKMVKIQTVKQVQRNDDFIELDYTILLHNIASQEIIPWQMQVLWHPQYGTKVKHNSRLPKEVQLE

SEQ ID NO: 2335 - protein, 465 aa, Homo sapiens
MEEEDEEARALLAGGPDEADRGAPAAPGALPALCDPSRLAHRLLVLLLMCFLGFGSYFCYDNPAALQTQVKRDMQVNTTKFMLLYAWYSWPNVVLCFFGGFLIDRVFGIRWGTIIFSCFVCIGQVVFALGGIFNAFWLMEFGRFVFGIGGESLAVAQNTYAVSWFKGKELNLVFGLQLSMARIGSTVNMNLMGWLYSKIEALLGSAGHTTLGITLMIGGITCILSLICALALAYLDQRAERILHKEQGKTGEVIKLTDVKDFSLPLWLIFIICVCYYVAVFPFIGLGKVFFTEKFGFSSQAASAINSVVYVISAPMSPVFGLLVDKTGKNIIWVLCAVAATLVSHMMLAFTMWNPWIAMCLLGLSYSLLACALWPMVAFVVPEHQLGTAYGFMQSIQNLGLAIISIIAGMILDSRGYLFLEVFFIACVSLSLLSVVLLYLVNRAQGGNLNYSARQREEIKFSHTE

SEQ ID NO: 2336 - protein, 1657 aa, Homo sapiens
MDSKKRSSTEAEGSKERGLVHIWQAGSFPITPERLPGWGGKTVLQAALGVKHGVLLTEDGEVYSFGTLPWRSGPVEICPSSPILENALVGQYVITVATGSFHSGAVTDNGVAYMWGENSAGQCAVANQQYVPEPNPVSIADSEASPLLAVRILQLACGEEHTLALSISREIWAWGTGCQLGLITTAFPVTKPQKVEHLAGRVVLQVACGAFHSLALVQCLPSQDLKPVPERCNQCSQLLITMTDKEDHVIISDSHCCPLGVTLTESQAENHASTALSPSTETLDRQEEVFENTLVANDQSVATELNAVSAQITSSDAMSSQQNVMGTTEISSARNIPSYPDTQAVNEYLRKLSDHSVREDSEHGEKPVPSQPLLEEAIPNLHSPPTTSTSALNSLVVSCASAVGVRVAATYEAGALSLKKVMNFYSTTPCETGAQAGSSAIGPEGLKDSREEQVKQESMQGKKSSSLVDIREEETEGGSRRLSLPGLLSQVSPRLLRKAARVKTRTVVLTPTYSGEADALLPSLRTEVWTWGKGKEGQLGHGDVLPRLQPLCVKCLDGKEVIHLEAGGYHSLALTAKSQVYSWGSNTFGQLGHSDFPTTVPRLAKISSENGVWSIAAGRDYSLFLVDTEDFQPGLYYSGRQDPTEGDNLPENHSGSKTPVLLSCSKLGYISRVTAGKDSYLALVDKNIMGYIASLHELATTERRFYSKLSDIKSQILRPLLSLENLGTTTTVQLLQEVASRFSKLCYLIGQHGASLSSFLHGVKEARSLVILKHSSLFLDSYTEYCTSITNFLVMGGFQLLAKPAIDFLNKNQELLQDLSEVNDENTQLMEILNTLFFLPIRRLHNYAKVLLKLATCFEVASPEYQKLQDSSSCYECLALHLGRKRKEAEYTLGFWKTFPGKMTDSLRKPERRLLCESSNRALSLQHAGRFSVNWFILFNDALVHAQFSTHHVFPLATLWAEPLSEEAGGVNGLKITTPEEQFTLISSTPQEKTKWLRAISQAVDQALRGMSDLPPYGSGSSVQRQEPPISRSAKYTFYKDPRLKDATYDGRWLSGKPHGRGVLKWPDGKMYSGMFRNGLEDGYGEYRIPNKAMNKEDHYVGHWKEGKMCGQGVYSYASGEVFEGCFQDNMRHGHGLLRSGKLTSSSPSMFIGQWVMDKKAGYGVFDDITRGEKYMGMWQDDVCQGNGVVVTQFGLYYEGNFHLNKMMGNGVLLSEDDTIYEGEFSDDWTLSGKGTLTMPNGDYIEGYFSGEWGSGIKITGTYFKPSLYESDKDRPKVFRKLGNLAVPADEKWKAVFDECWRQLGCEGPGQGEVWKAWDNIAVALTTSRRQHRDSPEILSRSQTQTLESLEFIPQHVGAFSVEKYDDIRKYLIKACDTPLHPLGRLVETLVAVYRMTYVGVGANRRLLQEAVKEIKSYLKRIFQLVRFLFPELPEEGSTIPLSAPLPTERKSFCTGKSDSRSESPEPGYVVTSSGLLLPVLLPRLYPPLFMLYALDNDREEDIYWECVLRLNKQPDIALLGFLGVQRKFWPATLSILGESKKVLPTTKDACFASAVECLQQISTTFTPSDKLKVIQQTFEEISQSVLASLHEDFLWSMDDLFPVFLYVVLRARIRNLGSEVHLIEDLMDPYLQHGEQGIMFTTLKACYYQIQREKLN

SEQ ID NO: 2337 - protein, 529 aa, Homo sapiens
MLVLFETSVGYAIFKVLNEKKLQEVDSLWKEFETPEKANKIVKLKHFEKFQDTAEALAAFTALMEGKINKQLKKVLKKIVKEAHEPLAVADAKLGGVIKEKLNLSCIHSPVVNELMRGIRSQMDGLIPGVEPREMAAMCLGLAHSLSRYRLKFSADKVDTMIVQAISLLDDLDKELNNYIMRCREWYGWHFPELGKIISDNLTYCKCLQKVGDRKNYASAKLSELLPEEVEAEVKAAAEISMGTEVSEEDICNILHLCTQVIEISEYRTQLYEYLQNRMMAIAPNVTVMVGELVGARLIAHAGSLLNLAKHAASTVQILGAEKALFRALKSRRDTPKYGLIYHASLVGQTSPKHKGKISRMLAAKTVLAIRYDAFGEDSSSAMGVENRAKLEARLRTLEDRGIRKISGTGKALAKTEKYEHKSEVKTYDPSGDSTLPTCSKKRKIEQVDKEDEITEKKAKKAKIKVKVEEEEEEKVAEEEETSVKKKKKRGKKKHIKEEPLSEEEPCTSTAIASPEKKKKKKKKRENED

SEQ ID NO: 2338 - protein, 245 aa, Homo sapiens
MNGRADFREPNAEVPRPIPHIGPDYIPTEEERRVFAECNDESFWFRSVPLAATSMLITQGLISKGILSSHPKYGSIPKLILACIMGYFAGKLSYVKTCQEKFKKLENSPLGEALRSGQARRSSPPGHYYQKSKYDSSVSGQSSFVTSPAADNIEMLPHYEPIPFSSSMNESAPTGITDHIVQGPDPNLEESPKRKNITYEELRNKNRESYEVSLTQKTDPSVRPMHERVPKKEVKVNKYGDTWDE

SEQ ID NO: 2339 - protein, 581 aa, Homo sapiens [sequence omitted]

SEQ ID NO: 2340 - protein, 554 aa, Homo sapiens [sequence omitted]

SEQ ID NO: 2341 - protein, 255 aa, Homo sapiens
MDDREDLVYQAKLAEQAERYDEMVESMKKVAGMDVELTVEERNLLSVAYKNVIGARRASWRIISSIEQKEENKGGEDKLKMIREYRQMVETELKLICCDILDVLDKHLIPAANTGESKVFYYKMKGDYHRYLAEFATGNDRKEAAENSLVAYKAASDIAMTELPPTHPIRLGLALNFSVFYYEILNSPDRACRLAKAAFDDAIAELDTLSEESYKDSTLIMQLLRDNLTLWTSDMQGDGEEQNKEALQDVEDENQ

SEQ ID NO: 2342 - protein, 1050 aa, Homo sapiens
MLCWGYWSLGQPGISTNLQGIVAEPQVCGFISDRSVKEVACGGNHSVFLLEDGEVYTCGLNTKGQLGHEREGNKPEQIGALADQHIIHVACGESHSLALSDRGQLFSWGAGSDGQLGLMTTEDSVAVPRLIQKLNQQTILQVSCGNWHCLALAADGQFFTWGKNSHGQLGLGKEFPSQASPQRVRSLEGIPLAQVAAGGAHSFALSLSGAVFGWGMNNAGQLGLSDEKDRESPCHVKLLRTQKVVYISCGEEHTAVLTKSGGVFTFGAGSCGQLGHDSMNDEVNPRRVLELMGSEVTQIACGRQHTLAFVPSSGLIYAFGCGARGQLGTGHTCNVKCPSPVKGYWAAHSGQLSARADRFKYHIVKQIFSGGDQTFVLCSKYENYSPAVDFRTMNQAHYTSLINDETIAVWRQKLSEHNNANTINGVVQILSSAACWNGSFLEKKIDEHFKTSPKIPGIDLNSTRVLFEKLMNSQHSMILEQILNSFESCLIPQLSSSPPDVEAMRIYLILPEFPLLQDSKYYITLTIPLAMAILRLDTNPSKVLDNWWSQVCPKYFMKLVNLYKGAVLYLLRGRKTFLIPVLFNNYITAALKLLEKLYKVNLKVKHVEYDTFYIPEISNLVDIQEDYLMWFLHQAGMKARPSIIQDTVTLCSYPFIFDAQAKTKMLQTDAELQMQVAVNGANLQNVFMLLTLEPLLARSPFLVLHVRRNNLVGDALRELSIHSDIDLKKPLKVIFDGEEAVDAGGVTKEFFLLLLKELLNPIYGMFTYYQDSNLLWFSDTCFVEHNWFHLIGITCGLAIYNSTVVDLHFPLALYKKLLNVKPGLEDLKELSPTEGRSLQELLDYPGEDVEETFCLNFTICRESYGVIEQKKLIPGGDNVTVCKDNRQEFVDAYVNYVFQISVHEWYTAFSSGFLKVCGGKVLELFQPSELRAMMVGNSNYNWEELEETAIYKGDYSATHPTVKLFWETFHEFPLEKKKKFLLFLTGSDRIPIYGMASLQIVIQSTASGEEYLPVAHTCYNLLDLPKYSSKEILSARLTQALDNYEGFSLA

SEQ ID NO: 2343 - protein, 1040 aa, Homo sapiens
MIVLLLFALLWMVEGVFSQLHYTVQEEQEHGTFVGNIAEDLGLDITKLSARGFQTVPNSRTPYLDLNLETGVLYVNEKIDREQICKQSPSCVLHLEVFLENPLELFQVEIEVLDINDNPPSFPEPDLTVEISESATPGTRFPLESAFDPDVGTNSLRDYEITPNSYFSLDVQTQGDGNRFAELVLEKPLDREQQAVHRYVLTAVDGGGGGGVGEGGGGGGGAGLPPQQQRTGTALLTIRVLDSNDNVPAFDQPVYTVSLPENSPPGTLVIQLNATDPDEGQNGEVVYSFSSHISPRARELFGLSPRTGRLEVSGELDYEESPVYQVYVQAKDLGPNAVPAHCKVLVRVLDANDNAPEISFSTVKEAVSEGAAPGTVVALFSVTDRDSEENGQVQCELLGDVPFRLKSSFKNYYTIVTEAPLDREAGDSYTLTVVARDRGEPALSTSKSIQVQVSDVNDNAPRFSQPVYDVYVTENNVPGAYIYAVSATDRDEGANAQLAYSILECQIQGMSVFTYVSINSENGYLYALRSFDYEQLKDFSFQVEARDAGSPQALAGNATVNILIVDQNDNAPAIVAPLPGRNGTPAREVLPRSAEPGYLLTRVAAVDADDGENARLTYSIVRGNEMNLFRMDWRTGELRTARRVPAKRDPQRPYELVIEVRDHGQPPLSSTATLVVQLVDGAVEPQGGGGSGGGGSGEHQRPSRSGGGETSLDLTLILIIALGSVSFIFLLAMIVLAVRCQKEKKLNIYTCLASDCCLCCCCCGGGGSTCCGRQARARKKKLSKSDIMLVQSSNVPSNPAQVPIEESGGFGSHHHNQNYCYQVCLTPESAKTDLMFLKPCSPSRSTDTEHNPCGAIVTGYTDQQPDIISNGSILSNETKHQRAELSYLVDRPRRVNSSAFQEADIVSSKDSGHGDSEQGDSDHDATNRAQSAGMDLFSNCTEECKALGHSDRCWMPSFVPSDGRQAADYRSNLHVPGMDSVPDTEVFETPEAQPGAERSFSTFGKEKALHSTLERKELDGLLTNTRAPYKPPYLTRKRIC

SEQ ID NO: 2344 - protein, 2098 aa, Homo sapiens
MATDDKTSPTLDSANDLPRSPTSPSHLTHFKPLTPDQDEPPFKSAYSSFVNLFRFNKERAEGGQGEQQPLSGSWTSPQLPSRTQSVRSPTPYKKQLNEELQRRSSALDTRRKAEPTFGGHDPRTAVQLRSLSTVLKRLKEIMEGKSQDSDLKQYWMPDSQCKECYDCSEKFTTFRRRHHCRLCGQIFCSRCCNQEIPGKFMGYTGDLRACTYCRKIALSYAHSTDSNSIGEDLNALSDSACSVSVLDPSEPRTPVGSRKASRNIFLEDDLAWQSLIHPDSSNTPLSTRLVSVQEDAGKSPARNRSASITNLSLDRSGSPMVPSYETSVSPQANRTYVRTETTEDERKILLDSVQLKDLWKKICHHSSGMEFQDHRYWLRTHPNCIVGKELVNWLIRNGHIATRAQAIAIGQAMVDGRWLDCVSHHDQLFRDEYALYRPLQSTEFSETPSPDSDSVNSVEGHSEPSWFKDIKFDDSDTEQIAEEGDDNLANSASPSKRTSVSSFQSTVDSDSAASISLNVELDNVNFHIKKPSKYPHVPPHPADQKEYLISDTGGQQLSISDAFIKESLFNRRVEEKSKELPFTPLGWHHNNLELLREENGEKQAMERLLSANHNHMMALLQQLLHSDSLSSSWRDIIVSLVCQVVQTVRPDVKNQDDDMDIRQFVHIKKIPGGKKFDSVVVNGFVCTKNIAHKKMSSCIKNPKILLLKCSIEYLYREETKFTCIDPIVLQEREFLKNYVQRIVDVRPTLVLVEKTVSRIAQDMLLEHGITLVINVKSQVLERISRMTQGDLVMSMDQLLTKPHLGTCHKFYMQIFQLPNEQTKTLMFFEGCPQHLGCTIKLRGGSDYELARVKEILIFMICVAYHSQLEISFLMDEFAMPPTLMQNPSFHSLIEGRGHEGAVQEQYGGGSIPWDPDIPPESLPCDDSSLLELRIVFEKGEQENKNLPQAVASVKHQEHSTTACPAGLPCAFFAPVPESLLPLPVDDQQDALGSEQPETLQQTVVLQDPKSQIRAFRDPLQDDTGLYVTEEVTSSEDKRKTYSLAFKQELKDVILCISPVITFREPFLLTEKGMRCSTRDYFAEQVYWSPLLNKEFKEMENRRKKQLLRDLSGLQGMNGSIQAKSIQVLPSHELVSTRIAEHLGDSQSLGRMLADYRARGGRIQPKNSDPFAHSKDASSTSSGQSGSKNEGDEERGLILSDAVWSTKVDCLNPINHQRLCVLFSSSSAQSSNAPSACVSPWIVTMEFYGKNDLTLGIFLERYCFRPSYQCPSMFCDTPMVHHIRRFVHGQGCVQIILKELDSPVPGYQHTILTYSWCRICKQVTPVVALSNESWSMSFAKYLELRFYGHQYTRRANAEPCGHSIHHDYHQYFSYNQMVASFSYSPIRLLEVCVPLPKIFIKRQAPLKVSLLQDLKDFFQKVSQVYVAIDERLASLKTDTFSKTREEKMEDIFAQKEMEEGEFKNWIEKMQARLMSSSVDTPQQLQSVFESLIAKKQSLCEVLQAWNNRLQDLFQQEKGRKRPSVPPSPGRLRQGEESKISAMDASPRNISPGLQNGEKEDRFLTTLSSQSSTSSTHLQLPTPPEVMSEQSVGGPPELDTASSSEDVFDGHLLGSTDSQVKEKSTMKAIFANLLPGNSYNPIPFPFDPDKHYLMYEHERVPIAVCEKEPSSIIAFALSCKEYRNALEELSKATQWNSAEEGLPTNSTSDSRPKSSSPIRLPEMSGGQTNRTTETEPQPTKKASGMLSFFRGTAGKSPDLSSQKRETLRGADSAYYQVGQTGKEGTENQGVEPQDEVDGGDTQKKQLINPHVELQFSDANAKFYCRLYYAGEFHKMREVILDSSEEDFIRSLSHSSPWQARGGKSGAAFYATEDDRFILKQMPRLEVQSFLDFAPHYFNYITNAVQQKRPTALAKILGVYRIGYKNSQNNTEKKLDLLVMENLFYGRKMAQVFDLKGSLRNRNVKTDTGKESCDVVLLDENLLKMVRDNPLYIRSHSKAVLRTSIHSDSHFLSSHLIIDYSLLVGRDDTSNELVVGIIDYIRTFTWDKKLEMVVKSTGILGGQGKMPTVVSPELYRTRFCEAMDKYFLMVPDHWTGLGLNC

SEQ ID NO: 2345 - protein, 406 aa, Homo sapiens
MAAAVRQDLAQLMNSSGSHKDLAGKYRQILEKAIQLSGAEQLEALKAFVEAMVNENVSLVISRQLLTDFCTHLPNLPDSTAKEIYHFTLEKIQPRVISFEEQVASIRQHLASIYEKEEDWRNAAQVLVGIPLETGQKQYNVDYKLETYLKIARLYLEDDDPVQAEAYINRASLLQNESTNEQLQIHYKVCYARVLDYRRKFIEAAQRYNELSYKTIVHESERLEALKHALHCTILASAGQQRSRMLATLFKDERCQQLAAYGILEKMYLDRIIRGNQLQEFAAMLMPHQKATTADGSSILDRAVIEHNLLSASKLYNNITFEELGALLEIPAAKAEKIASQMITEGRMNGFIDQIDGIVHFETREALPTWDKQIQSLCFQVNNLLEKISQTAPEWTAQAMEAQMAQ

SEQ ID NO: 2346 - protein, 969 aa, Homo sapiens
MVKLVLLSIVLLKVTVPKLSNDLLQLDFMPIHRGILAIAWSMADPELLLSCGKDAKILCSNPNTGEVLYELPTNTQWCFDIQWCPRNPAVLSAASFDGRISVYSIMGGSTDGLRQKQVDKLSSSFGNLDPFGTGQPLPPLQIPQQTAQHSIVLPLKKPPKWIRRPVGASFSFGGKLVTFENVRMPSHQGAEQQQQQHHVFISQVVTEKEFLSRSDQLQQAVQSQGFINYCQKKIDASQTEFEKNVWSFLKVNFEDDSRGKYLELLGYRKEDLGKKHIKEEKEESEFLPSSGGTFNISVSGDIDGLITQALLTGNFESAVDLCLHDNRMADAIILAIAGGQELLARTQKKYFAKSQSKITRLITAVVMKNWKEIVESCDLKNWREALAAVLTYAKPDEFSALCDLLGTRLENEGDSLLQTQACLCYICAGNVEKLVACWTKAQDGSHPLSLQDLIEKVVILRKAVQLTQAMDTSTVGVLLAAKMSQYANLLAAQGSIAAALAFLPDNTNQPNIMQLRDRLCRAQGEPVAGHESPKIPYEKQQLPKGRPGPVAGHHQMPRVQTQQYYPHVRIAPTVTTWSNKTPTALPSHPPAASPSDTQGENPPPPGFIMHGNVNPNAAGQLPTSPGHMHTQVPPYPQPQPYQPAQPYPFGTGGSAMYRPQQPVAPPTSNAYPNTPYISSASSYTGQSQLYAAQHQASSPTSSPATSFPPPPSSGASFQHGGPGAPPSSSAYALPPGTTGPQNGWNDPPALNRVPKKKKMPENFMPPVPITSPIMNPLGDPQSQMLQQQPSAPVPLSSQSSFPQPHLPGGQPFHGVQQPLGQTGMPPSFSKPNIEGAPGAPIGNTFQHVQSLPTKKITKKPIPDEHLILKTTFEDLIQRCLSSATDPQTKRKLDDASKRLEFLYDKLREQTLSPTITSGLHNIARSIETRNYSEGLTMHTHIVSTSNFSETSAFMPVLKVVLTQANKLGV

SEQ ID NO: 2347 - protein, 434 aa, Homo sapiens
MEGAELAGKILSTWLTLVLGFILLPSVFGVSLGISEIYMKILVKTLEWATIRIEKGTPKESILKNSASVGIIQRDESPMEKGLSGLRGRDFELSDVFYFSKKGLEAIVEDEVTQRFSSEELVSWNLLTRTNVNFQYISLRLTMVWVLGVIVRYCVLLPLRVTLAFIGISLLVIGTTLVGQLPDSSLKNWLSELVHLTCCRICVRALSGTIHYHNKQYRPQKGGICVANHTSPIDVLILTTDGCYAMVGQVHGGLMGIIQRAMVKACPHVWFERSEMKDRHLVTKRLKEHIADKKKLPILIFPEGTCINNTSVMMFKKGSFEIGGTIHPVAIKYNPQFGDAFWNSSKYNMVSYLLRMMTSWAIVCDVWYMPPMTREEGEDAVQFANRVKSAIAIQGGLTELPWDGGLKRAKVKDIFKEEQQKNYSKMIVGNGSLS

SEQ ID NO: 2348 - protein, 768 aa, Homo sapiens
MSNLSKGTGSRKDTKMRIRAFPMTMDEKYVNSIWDLLKNAIQEIQRKNNSGLSFEELYRNAYTMVLHKHGEKLYTGLREVVTEHLINKVREDVLNSLNNNFLQTLNQAWNDHQTAMVMIRDILMYMDRVYVQQNNVENVYNLGLIIFRDQVVRYGCIRDHLRQTLLDMIARERKGEVVDRGAIRNACQMLMILGLEGRSVYEEDFEAPFLEMSAEFFQMESQKFLAENSASVYIKKVEARINEEIERVMHCLDKSTEEPIVKVVERELISKHMKTIVEMENSGLVHMLKNGKTEDLGCMYKLFSRVPNGLKTMCECMSSYLREQGKALVSEEGEGKNPVDYIQGLLDLKSRFDRFLLESFNNDRLFKQTIAGDFEYFLNLNSRSPEYLSLFIDDKLKKGVKGLTEQEVETILDKAMVLFRFMQEKDVFERYYKQHLARRLLTNKSVSDDSEKNMISKLKTECGCQFTSKLEGMFRDMSISNTTMDEFRQHLQATGVSLGGVDLTVRVLTTGYWPTQSATPKCNIPPAPRHAFEIFRRFYLAKHSGRQLTLQHHMGSADLNATFYGPVKKEDGSEVGVGGAQVTGSNTRKHILQVSTFQMTILMLFNNREKYTFEEIQQETDIPERELVRALQSLACGKPTQRVLTKEPKSKEIENGHIFTVNDQFTSKLHRVKIQTVAAKQGESDPERKETRQKVDDDRKHEIEAAIVRIMKSRKKMQHNVLVAEVTQQLKARFLPSPVVIKKRIEGLIEREYLARTPEDRKVYTYVA

SEQ ID NO: 2349 - protein, 619 aa, Homo sapiens
MYGFVNHALELLVIRNYGPEVWEDIKKEAQLDEEGQFLVRIIYDDSKTYDLVAAASKVLNLNAGEILQMFGKMFFVFCQESGYDTILRVLGSNVREFLQNLDALHDHLATIYPGMRAPSFRCTDAEKGKGLILHYYSEREGLQDIVIGIIKTVAQQIHGTEIDMKVIQQRNEECDHTQFLIEEKESKEEDFYEDLDRFEENGTQESRISPYTFCKAFPFHIIFDRDLVVTQCGNAIYRVLPQLQPGNCSLLSVFSLVRPHIDISFHGILSHINTVFVLRSKEGLLDVEKLECEDELTGTEISCLRLKGQMIYLPEADSILFLCSPSVMNLDDLTRRGLYLSDIPLHDATRDLVLLGEQFREEYKLTQELEILTDRLQLTLRALEDEKKKTDTLLYSVLPPSVANELRHKRPVPAKRYDNVTILFSGIVGFNAFCSKHASGEGAMKIVNLLNDLYTRFDTLTDSRKNPFVYKVETVGDKYMTVSGLPEPCIHHARSICHLALDMMEIAGQVQVDGESVQITIGIHTGEVVTGVIGQRMPRYCLFGNTVNLTSRTETTGEKGKINVSEYTYRCLMSPENSDPQFHLEHRGPVSMKGKKEPMQVWFLSRKNTGTEETKQDDD

SEQ ID NO: 2350 - protein, 883 aa, Homo sapiens
MQKIMHISVLLSPVLWGLIFGVSSNSIQIGGLFPRGADQEYSAFRVGMVQFSTSEFRLTPHIDNLEVANSFAVTNAFCSQFSRGVYAIFGFYDKKSVNTITSFCGTLHVSFITPSFPTDGTHPFVIQMRPDLKGALLSLIEYYQWDKFAYLYDSDRGLSTLQAVLDSAAEKKWQVTAINVGNINNDKKDEMYRSLFQDLELKKERRVILDCERDKVNDIVDQVITIGKHVKGYHYIIANLGFTDGDLLKIQFGGANVSGFQIVDYDDSLVSKFIERWSTLEEKEYPGAHTTTIKYTSALTYDAVQVMTEAFRNLRKQRIEISRRGNAGDCLANPAVPWGQGVEIERALKQVQVEGLSGNIKFDQNGKRINYTINIMELKTNGPRKIGYWSEVDKMVVTLTELPSGNDTSGLENKTVVVTTILESPYVMMKKNHEMLEGNERYEGYCVDLAAEIAKHCGFKYKLTIVGDGKYGARDADTKIWNGMVGELVYGKADIAIAPLTITLVREEVIDFSKPFMSLGISIMIKKPQKSKPGVFSFLDPLAYEIWMCIVFAYIGVSVVLFLVSRFSPYEWHTEEFEDGRETQSSESTNEFGIFNSLWFSLGAFMQQGCDISPRSLSGRIVGGVWWFFTLIIISSYTANLAAFLTVERMVSPIESAEDLSKQTEIAYGTLDSGSTKEFFRRSKIAVFDKMWTYMRSAEPSVFVRTTAEGVARVRKSKGKYAYLLESTMNEYIEQRKPCDTMKVGGNLDSKGYGIATPKGSSLRNAVNLAVLKLNEQGLLDKLKNKWWYDKGECGSGGGDSKEKTSALSLSNVAGVFYILVGGLGLAMLVALIEFCYKSRAEAKRMKVAKNAQNINPSSSQNSQNFATYKEGYNVYGIESVKI

SEQ ID NO: 2351 - protein, 497 aa, Homo sapiens
MKFLLTTAFLILISLWVEEAYSKEKSSKKGKGKKKQYLCPSQQSAEDLARVPANSTSNILNRLLVSYDPRIRPNFKGIPVDVVVNIFINSFGSIQETTMDYRVNIFLRQKWNDPRLKLPSDFRGSDALTVDPTMYKCLWKPDLFFANEKSANFHDVTQENILLFIFRDGDVLVSMRLSITLSCPLDLTLFPMDTQRCKMQLESFGYTTDDLRFIWQSGDPVQLEKIALPQFDIKKEDIEYGNCTKYYKGTGYYTCVEVIFTLRRQVGFYMMGVYAPTLLIVVLSWLSFWINPDASAARVPLGIFSVLSLASECTTLAAELPKVSYVKALDVWLIACLLFGFASLVEYAVVQVMLNNPKRVEAEKARIAKAEQADGKGGNVAKKNTVNGTGTPVHISTLQVGETRCKKVCTSKSDLRSNDFSIVGSLPRDFELSNYDCYGKPIEVNNGLGKSQAKNNKKPPPAKPVIPTAAKRIDLYARALFPFCFLFFNVIYWSIYL

SEQ ID NO: 2352 - protein, 1114 aa, Homo sapiens
MAPTLLQKLFNKRGSSGSSAAASAQGRAPKEGPAFSWSCSEFDLNEIRLIVYQDCDRRGRQVLFDSKAVQKIEEVTAQKTEDVPIKISAKCCQGSSSVSSSSSSSISSHSSSGGSSHHAKEQLPKYQYTRPASDVNMLGEMMFGSVAMSYKGSTLKIHYIRSPPQLMISKVFSARMGSFCGSTNNLQDSFEYINQDPNLGKLNTNQNSLGPCRTGSNLAHSTPVDMPSRGQNEDRDSGIARSASLSSLLITPFPSPSSSTSSSSSYQRRWLRSQTTSLENGIIPRRSTDETFSLAEETCSSNPAMVRRKKIAISIIFSLCEKEEAQRNFQDFFFSHFPLFESHMNRLKSAIEKAMISCRKIAESSLRVQFYVSRLMEALGEFRGTIWNLYSVPRIAEPVWLTMMSGTLEKNQLCQRFLKEFTLLIEQINKNQFFAALLTAVLTYHLAWVPTVMPVDHPPIKAFSEKRTSQSVNMLAKTHPYNPLWAQLGDLYGAIGSPVRLTRTVVVGKQKDLVQRILYVLTYFLRCSELQENQLTWSGNHGEGDQVLNGSKIITALEKGEVEESEYVVITVRNEPALVPPILPPTAAERHNPWPTGFPECPEGTDSRDLGLKPDKEANRRPEQGSEACSAGCLGPASDASWKPQNAFCGDEKNKEAPQDGSSRLPSCEVLGAGMKMDQQAVCELLKVEMPTRLPDRSVAWPCPDRHLREKPSLEKVTFQIGSFASPESDFESRMKKMEERVKACGPSLEASEAADVAQDPQVSRSPFKPGFQENVCCPQNRLSEGDEGESDKGFAEDRGSRNDMAADIAGQLSHAADLGTASHGAGGTGGRRLEATRGLYVKAAEGPVLEPVAPRCVQRGPGLVAGANIPCGDDNKKANFRTEGDIPRNESSDSALGDSDDEACASAMLDLGHGGDRTGGSLEVELPLPRSQSISTQNVRNFGRSLLAGYCPTYMPDLVLHGTGSDEKLKQCLVADLVHTVHHPVLDEPIAEAVCIIADTDKWSVQVATSQRKVTDNMKLGQDVLVSSQVSSLLQSILQLYKLHLPADFCIMHLEDRLQEMYLKSKMLSEYLRGHTRVHVKELGVVLGIESNDLPLLTAIASTHSPYVAQILL

SEQ ID NO: 2353 - protein, 574 aa, Homo sapiens
MEPNSLRTKVPAFLSDLGKATLRGIRKCPRCGTYNGTRGLSCKNKTCGTIFRYGARKQPSVEAVKIITGSDLQVYSVRQRDRGPDYRCFVELGVSETTIQTVDGTIITQLSSGRCYVPSCLKAATQGVVENQCQHIKLAVNCQAEATPLTLKSSVLNAMQASPETKQTIWQLATEPTGPLVQRITKNILVVKCKASQKHSLGYLHTSFVQKVSGKSLPERRFFCSCQTLKSHKSNASKDETAQRCIHFFACICAFASDETLAQEFSDFLNFDSSGLKEIIVPQLGCHSESTVSACESTASKSKKRRKDEVSGAQMNSSLLPQDAVSSNLRKSGLKKPVVASSLKRQACGQLLDEAQVTLSFQDWLASVTERIHQTMHYQFDGKPEPLVFHIPQSFFDALQQRISIGSAKKRLPNSTTAFVRKDALPLGTFSKYTWHITNILQVKQILDTPEMPLEITRSFIQNRDGTYELFKCPKVEVESIAETYGRIEKQPVLRPLELKTFLKVGNTSPDQKEPTPFIIEWIPDILPQSKIGELRIKFEYGHHRNGHVAEYQDQRPPLDQPLELAPLTTITFP

SEQ ID NO: 2354 - protein, 293 aa, Homo sapiens
MGRVVAELVSSLLGLWLLLCSCGCPEGAELRAPPDKIAIIGAGIGGTSAAYYLRQKFGKDVKIDLFEREEVGGRLATMMVQGQEYEAGGSVIHPLNLHMKRFVKDLGLSAVQASGGLLGIYNGETLVFEESNWFIINVIKLVWRYGFQSLRMHMWVEDVLDKFMRIYRYQSHDYAFSSVEKLLHALGGDDFLGMLNRTLLETLQKAGFSEKFLNEMIAPVMRVNYGQSTDINAFVGAVSLSCSDSGLWAVEGGNKLVCSGLLQASKSNLISGSVMYIEEKTKTKYTVLGLCPL

SEQ ID NO: 2355 - protein, 1978 aa, Homo sapiens
MSRPRFNPRGDFPLQRPRAPNPSGMRPPGPFMRPGSMGLPRFYPAGRARGIPHRFAGHESYQNMGPQRMNVQVTQHRTDPRLTKEKLDFHEAQQKKGKPHGSRWDDEPHISASVAVKQSSVTQVTEQSPKVQSRYTKESASSILASFGLSNEDLEELSRYPDEQLTPENMPLILRDIRMRKMGRRLPNLPSQSRNKETLGSEAVSSNVIDYGHASKYGYTEDPLEVRIYDPEIPTDEVENEFQSQQNISASVPNPNVICNSMFPVEDVFRQMDFPGESSNNRSFFSVESGTKMSGLHISGGQSVLEPIKSVNQSINQTVSQTMSQSLIPPSMNQQPFSSELISSVSQQERIPHEPVINSSNVHVGSRGSKKNYQSQADIPIRSPFGIVKASWLPKFSHADAQKMKRLPTPSMMNDYYAASPRIFPHLCSLCNVECSHLKDWIQHQNTSTHIESCRQLRQQYPDWNPEILPSRRNEGNRKENETPRRRSHSPSPRRSRRSSSSHRFRRSRSPMHYMYRPRSRSPRICHRFISRYRSRSRSRSPYRIRNPFRGSPKCFRSVSPERMSRRSVRSSDRKKALEDVVQRSGHGTEFNKQKHLEAADKGHSPAQKPKTSSGTKPSVKPTSATKSDSNLGGHSIRCKSKNLEDDTLSECKQVSDKAVSLQRKLRKEQSLHYGSVLLITELPEDGCTEEDVRKLFQPFGKVNDVLIVPYRKEAYLEMEFKEAITAIMKYIETTPLTIKGKSVKICVPGKKKAQNKEVKKKTLESKKVSASTLKRDADASKAVEIVTSTSAAKTGQAKASVAKVNKSTGKSASSVKSVVTVAVKGNKASIKTAKSGGKKSLEAKKTGNVKNKDSNKPVTIPENSEIKTSIEVKATENCAKEAISDAALEATENEPLNKETEEMCVMLVSNLPNKGYSVEEVYDLAKPFGGLKDILILSSHKKAYIEINRKAAESMVKFYTCFPVLMDGNQLSISMAPENMNIKDEEAIFITLVKENDPEANIDTIYDRFVHLDNLPEDGLQCVLCVGLQFGKVDHHVFISNRNKAILQLDSPESAQSMYSFLKQNPQNIGDHMLTCSLSPKIDLPEVQIEHDPELEKESPGLKNSPIDESEVQTATDSPSVKPNELEEESTPSIQTETLVQQEEPCEEEAEKATCDSDFAVETLELETQGEEVKEEIPLVASASVSIEQFTENAEECALNQQMFNSDLEKKGAEIINPKTALLPSDSVFAEERNLKGILEESPSEAEDFISGITQTMVEAVAEVEKNETVSEILPSTCIVTLVPGIPTGDEKTVDKKNISEKKGNMDEKEEKEFNTKETRMDLQIGTEKAEKNEGRMDAEKVEKMAAMKEKPAENTLFKAYPNKGVGQANKPDETSKTSILAVSDVSSSKPSIKAVIVSSPKAKATVSKTENQKSFPKSVPRDQINAEKKLSAKEFGLLKPTSARSGLAESSSKFKPTQSSLTRGGSGRISALQGKLSKLDYRDITKQSQETEARPSIMKRDDSNNKTLAEQNTKNPKSTTGRSSKSKEEPLFPFNLDEFVTVDEVIEEVNPSQAKQNPLKGKRKETLKNVPFSELNLKKKKGKTSTPRGVEGELSFVTLDEIGEEEDAAAHLAQALVTVDEVIDEEELNMEEMVKNSNSLFTLDELIDQDDCISHSEPKDVTVLSVAEEQDLLKQERLVTVDEIGEVEELPLNESADITFATLNTKGNEGDTVRDSIGFISSQVPEDPSTLVTVDEIQDDSSDLHLVTLDEVTEEDEDSLADFNNLKEELNFVTVDEVGEEEDGDNDLKVELAQSKNDHPTDKKGNRKKRAVDTKKTKLESLSQVGPVNENVMEEDLKTMIERHLTAKTPTKRVRIGKTLPSEKAVVTEPAKGEEAFQMSEVDEESGLKDSEPERKRKKTEDSSSGKSVASDVPEELDFLVPKAGFFCPICSLFYSGEKAMTNHCKSTRHKQNTEKFMAKQRKEKEQNEAEERSSR

SEQ ID NO: 2356 - protein, 303 aa, Homo sapiens
MSVIFFACVVRVRDGLPLSASTDFYHTQDFLEWRRRLKSLALRLAQYPGRGSAEGCDFSIHFSSFGDVACMAICSCQCPAAMAFCFLETLWWEFTASYDTTCIGLASRPYAFLEFDSIIQKVKWHFNYVSSSQMECSLEKIQEELKLQPPAVLTLEDTDVANGVMNGHTPMHLEPAPNFRMEPVTALGILSLILNIMCAALNLIRGVHLAEHSLQVAHEEIGNILAFLVPFVACIFQCYLYLFYSPARTMKVVLMLLFICLGNMYLHGLRNLWQILFHIGVAFLSSYQILTRQLQEKQSDCGV

SEQ ID NO: 2357 - protein, 788 aa, Homo sapiens
MTIHQFLLLFLFWVCLPHFCSPEIMFRRTPVPQQRILSSRVPRSDGKILHRQKRGWMWNQFFLLEEYTGSDYQYVGKLHSDQDKGDGSLKYILSGDGAGTLFIIDEKTGDIHATRRIDREEKAFYTLRAQAINRRTLRPVEPESEFVIKIHDINDNEPTFPEEIYTASVPEMSVVGTSVVQVTATDADDPSYGNSARVIYSILQGQPYFSVEPETGIIRTALPNMNRENREQYQVVIQAKDMGGQMGGLSGTTTVNITLTDVNDNPPRFPQNTIHLRVLESSPVGTAIGSVKATDADTGKNAEVEYRIIDGDGTDMFDIVTEKDTQEGIITVKKPLDYESRRLYTLKVEAENTHVDPRFYYLGPFKDTTIVKISIEDVDEPPVFSRSSYLFEVHEDIEVGTIIGTVMARDPDSISSPIRFSLDRHTDLDRIFNIHSGNGSLYTSKPLDRELSQWHNLTVIAAEINNPKETTRVAVFVRILDVNDNAPQFAVFYDTFVCENARPGQLIQTISAVDKDDPLGGQKFFFSLAAVNPNFTVQDNEDNTARILTRKNGFNRHEISTYLLPVVISDNDYPIQSSTGTLTIRVCACDSQGNMQSCSAEALLLPAGLSTGALIAILLCIIILLVIVVLFAALKRQRKKEPLILSKEDIRDNIVSYNDEGGGEEDTQAFDIGTLRNPAAIEEKKLRRDIIPETLFIPRRTPTAPDNTDVRDFINERLKEHDLDPTAPPYDSLATYAYEGNDSIAESLSSLESGTTEGDQNYDYLREWGPRFNKLAEMYGGGESDKDS

SEQ ID NO: 2358 - protein, 275 aa, Homo sapiens
MGLSNILFVMAFLLSGAAPLKIQAYFNETADLPCQFANSQNQSLSELVVFWQDQENLVLNEVYLGKEKFDSVHSKYMGRTSFDSDSWTLRLHNLQIKDKGLYQCIIHHKKPTGMIRIHQMNSELSVLANFSQPEIVPISNITENVYINLTCSSIHGYPEPKKMSVLLRTKNSTIEYDGVMQKSQDNVTELYDVSISLSVSFPDVTSNMTIFCILETDKTRLLSSPFSIGTNTMEREESEQTKKREKIHIPERSDEAQRVFKSSKTSSCDKSDTCF

SEQ ID NO: 2359 - protein, 471 aa, Homo sapiens
MDGTETRQRRLDSCGKPGELGLPHPLSTGGLPVASEDGALRAPESQSVTPKPLETEPSRETTWSIGLQVTVPFMFAGLGLSWAGMLLDYFQANTGQIDDPQEQHRVISSNLALIQVQATVVGLLAAVAALLLGVVSREEVDVAKVELLCASSVLTAFLAAFALGVLMVCIVIGARKLGVNPDNIATPIAASLGDLITLSILALVSSFFYRHKDSRYLTPLVCLSFAALTPVWVLIAKQSPPIVKILKFGWFPIILAMVISSFGGLILSKTVSKQQYKGMAIFTPVICGVGGNLVAIQTSRISTYLHMWSAPGVLPLQMKKFWPNPCSTFCTSEINSMSARVLLLLVVPGHLIFFYIIYLVEGQSVINSQTFVVLYLLAGLIQVTILLYLAEVMVRLTWHQALDPDNHCIPYLTGLGDLLGSSSVGHTAAVPRRCTASPGWGLIQPFICTQHLIVSLLSFYFPFCLLAKTSI

SEQ ID NO: 2360 - protein, 98 aa, Homo sapiens
MIPGGLSEAKPATPEIQEIVDKVKPQLEEKTNETYGKLEAVQYKTQVVAGTNYYIKVRAGDNKYMHLKVFKSLPGQNEDLVLTGYQVDKNKDDELTGF

SEQ ID NO: 2361 - protein, 1079 aa, Homo sapiens
MEDEAVLDRGASFLKHVCDEEEVEGHHTIYIGVHVPKSYRRRRRHKRKTGHKEKKEKERISENYSDKSDIENADESSSSILKPLISPAAERIRFILGEEDDSPAPPQLFTELDELLAVDGQEMEWKETARWIKFEEKVEQGGERWSKPHVATLSLHSLFELRTCMEKGSIMLDREASSLPQLVEMIVDHQIETGLLKPELKDKVTYTLLRKHRHQTKKSNLRSLADIGKTVSSASRMFTNPDNGSPAMTHRNLTSSSLNDISDKPEKDQLKNKFMKKLPRDAEASNVLVGEVDFLDTPFIAFVRLQQAVMLGALTEVPVPTRFLFILLGPKGKAKSYHEIGRAIATLMSDEVFHDIAYKAKDRHDLIAGIDEFLDEVIVLPPGEWDPAIRIEPPKSLPSSDKRKNMYSGGENVQMNGDTPHDGGHGGGGHGDCEELQRTGRFCGGLIKDIKRKAPFFASDFYDALNIQALSAILFIYLATVTNAITFGGLLGDATDNMQGVLESFLGTAVSGAIFCLFAGQPLTILSSTGPVLVFERLLFNFSKDNNFDYLEFRLWIGLWSAFLCLILVATDASFLVQYFTRFTEEGFSSLISFIFIYDAFKKMIKLADYYPINSNFKVGYNTLFSCTCVPPDPANISISNDTTLAPEYLPTMSSTDMYHNTTFDWAFLSKKECSKYGGNLVGNNCNFVPDITLMSFILFLGTYTSSMALKKFKTSPYFPTTARKLISDFAIILSILIFCVIDALVGVDTPKLIVPSEFKPTSPNRGWFVPPFGENPWWVCLAAAIPALLVTILIFMDQQITAVIVNRKEHKLKKGAGYHLDLFWVAILMVICSLMALPWYVAATVISIAHIDSLKMETETSAPGEQPKFLGVREQRVTGTLVFILTGLSVFMAPILKFIPMPVLYGVFLYMGVASLNGVQFMDRLKLLLMPLKHQPDFIYLRHVPLRRVHLFTFLQVLCLALLWILKSTVAAIIFPVMILALVAVRKGMDYLFSQHDLSFLDDVIPEKDKKKKEDEKKKKKKKGSLDSDNDDSDCPYSEKVPSIKIPMDIMEQQPFLSDSKPSDRERSPTFLERHTSC

SEQ ID NO: 2362 - protein, 715 aa, Homo sapiens
MDLILNRMDYLQVGVTSQKTMKLIPASRHRATQKVVIGDHDGVVMCFGMKKGEAAAVFKTLPGPKIARLELGGVINTPQEKIFIAAASEIRGFTKRGKQFLSFETNLTESIKAMHISGSDLFLSASYIYNHYCDCKDQHYYLSGDKINDVICLPVERLSRITPVLACQDRVLRVLQGSDVMYAVEVPGPPTVLALHNGNGGDSGEDLLFGTSDGKLALIQITTSKPVRKWEIQNEKKRGGILCIDSFDIVGDGVKDLLVGRDDGMVEVYSFDNANEPVLRFDQMLSESVTSIQGGCVGKDSYDEIVVSTYSGWVTGLTTEPIHKESGPGEELKINQEMQNKISSLRNELEHLQYKVLQERENYQQSSQSSKAKSAVPSFGINDKFTLNKDDASYSLILEVQTAIDNVLIQSDVPIDLLDVDKNSAVVSFSSCDSESNDNFLLATYRCQADTTRLELKIRSIEGQYGTLQAYVTPRIQPKTCQVRQYHIKPLSLHQRTHFIDHDRPMNTLTLTGQFSFAEVHSWVVFCLPEVPEKPPAGECVTFYFQNTFLDTQLESTYRKGEGVFKSDNISTISILKDVLSKEATKRKINLNISYEINEVSVKHTLKLIHPKLEYQLLLAKKVQLIDALKELQIHEGNTNFLIPEYHCILEEADHLQEEYKKQPAHLERLYGMITDLFIDKFKFKGTNVKTKVPLLLEILDSYDQNALISFFDAA

SEQ ID NO: 2363 - protein, 5005 aa, Homo sapiens
MDQRKNESIVPSITQLEDFLTEHNSNVVWLLVATILSCGWIIYLTYYNSRNVGLILTLVLNRLYKHGYIHIGSFSFSVLSGKVMVREIYYITEDMSIRIQDGFIIFRWWKMYNPKQKQHDPKAETRLYITVNDFEFHVYNRSDLYGRLQELFGLEPTIIPPKKDDDKTREIGRTRTQSKIERVKVKTESQDPTSSWRSLIPVIKVNVSTGRLAFGNHYQPQTLCINFDDAFLTYTTKPPSSHLDQFMHIVKGKLENVRVMLVPSPRYVGLQNDEPPRLMGEGFVVMQSNDVDIYYYMDEPGLVPEETEENIEGEMSSEDCKLQDLPPCWGLDIVCGKGTDFNYGPWADRQRDCLWKFFFPPDYQVLKVSEIAQPGRPRQILAFELRMNIIADATIDLLFTKNRETNAVHVNVGAGSYLEINIPMTVEENGYTPAIKGQLLHVDATTSMQYRTLLEAEMLAFHINASYPRIWNMPQTWQCELEVYKATYHFIFAQKNFFTDLIQDWSSDSPPDIFSFVPYTWNFKIMFHQFEMIWAANQHNWIDCSTKQQENVYLAACGETLNIDFSLPFTDFVPATCNTKFSLRGEDVDLHLFLPDCHPSKYSLFMLVKNCHPNKMIHDTGIPAECQSGQKTVKPKWRNVTQEKSGWVECWTVPSVMLTIDYTWHPIYPQKADEQLKQSLSEMEETMLSVLRPSQKTSDRVVSSPSTSSRPPIDPSELPPDKLHVEMELSPDSQITLYGPLLNAFLCIKENYFGEDDMYMDFEEVISSPVLSLSTSSSSGWTAVGMENDKKENEGSAKSIHPLALRPWDITVLVNLYKVHGRLPVHGTTDGPECPTAFLERLCFEMKKGFRETMLQLILSPLNVFVSDNYQQRPPVDEVLREGHINLSGLQLRAHAMFSAEGLPLGSDSLEYAWLIDVQAGSLTAKVTAPQLACLLEWGQTFVFHVVCREYELERPKSVIICQHGIDRRFCESKLSCIPGPCPTSDDLKYTMIRLAVDGADIYIVEHGCATNIKMGAIRVANCNLHNQSVGEGISAAIQDFQVRQYIEQLNNCRIGLQPAVLRRAYWLEAGSANLGLITVDIALAADHHSKHEAQRHFLETHDARTKRLWFLWPDDILKNKRCRNKCGCLGGCRFFGGTVTGLDFFKLEELTPSSSSAFSSTSAESDMYYGQSLLQPGEWIITKEIPKIIDGNVNGMKRKEWENKSVGIEVERKTQHLSLQVPLRSHSSSSSSEENSSSSAAQPLLAGEKESPSSVADDHLVQKEFLHGTKRDDGQASIPTEISGNSPVSPNTQDKSVGQSPLRSPLKRQASVCSTRLGSTKSLTAAFYGDKQPVTVGVQFSSDVSRSDENVLDSPKQRRSFGSFPYTPSADSNSFHQYRSMDSSMSMADSEAYFSAAEEFEPISSDEGPGTYPGRKKKKKQTQQIDYSRGSIYHSVEGPLTGHGESIQDSRTLPFKTHPSQASFVSALGGEDDVIEHLYIVEGEKTVESEQITPQQPVMNCYQTYLTQFQVINWSVKHPTNKRTSKSSLHRPLDLDTPTSEESSSSFEQLSVPTFKVIKQGLTANSLLDRGMQLSGSTSNTPYTPLEKKLADNTDDETLTEEWTLDQPVSQTRTTAIVEVKGTVDIVLTPLVAEALDRYIEAMVHCASTRHPAAIVDDLHAKVLREAVQNSKTTFSENLSSKQDIRGTKTEQSTIGTTNQGQAQTNLTMKQDNVTIKGLQTNVSIPKVNLCLLQASVEESPTTAPSRSVTHVSLVALCFDRIATQVRMNRGVVEETSNNAEPGRTSNFDRYVHATKMQPQSSGSLRSNAGAEKGKEIAAKLNIHRVHGQLRGLDTTDIGTCAITAIPFEKSKVLFTLEELDEFTFVDETDQQAVPDVTRIGPSQEKWGWIMFECGLENLTIKGGRQSGAVLYNSFGIMGKASDTERGGVLTSNNSSDSPTGSGYNTDVSDDNLPCDRTSPSSDLNGNSVSDEQDEGVESDDLKKDLPLMPPPPDSCSMKLTIKEIWFSFAAPTNVRSHTHAFSRQLNLLSTATPAVGAWLVPIDQLKSSLNKLETEGTLRICAVMGCIMTEALENKSVHFPLRSKYNRLTKVARFLQENPSCLLCNILHHYLHQANYSIIDDATMSDGLPALVTLKKGLVALARQWMKFIVVTPAFKGVSLHRPAQPLKPQIAMDHEHEDGLGLDNGGGLQSDTSADGAEFEFDAATVSEHTMLLEGTANRPPPGSSGPVTGAEIMRKLSKTHTHSDSALKIKGIHPYHSLSYTSGDTATDSPVHVGRAGMPVKDSPRKESLLSYLTGSFPSLHNLLEGTPQRSSAAVKSSSLTRTGNTVATDMLSEHPLLSEPSSVSFYNWMSNAVGNRGSVLQESPVTKSGHNSLPTGVAPNLPTIPSASDFNTVLSSDQNTLDGTHSQHSTSQDDVAGVEEANQGFPAVQLADAQVVFKPLLSHTGIQSQDTMPFCYRMYFGEHLSFSGTLDCLRADIVDSDTAKERKGKRARRQGHVNLPPLEFKPALMLGTFSISAVVMEKSVCTPQNSTSALSFHDLSKRYYNTFHCNFTISCQSISQHVDMALVRLIHQFSTMIDDIKATQTDIKLSRYTAGSASPTPTFKTRKHRDFRSSDFSRSSRGSLNGGNRVNNAKNKRTNNENNKKESRNKNSLGRSERRTSKVSRKGSKDVVDHMTIHMDDSDSITVSEQSEPSAECWQNMYKLLNFYSLISDPTGILEKSSETFGPAGVRSPTEPTCKVVFENEQDNSSLTKTQRKRSLVTSEPQHVTLIVFGIGMVNRTHLEADIGGLTMESELKRIHGSFTLKEKMKDVLHQKMTETCATAHIGGVNIVLLEGITPNIQLEDFPTSPTSTAKQEFLTVVKCSIAKSQALYSAQRGLKTNNAAVFKVGAISINIPQHPATLHSMMVRSSHQLSKQISDLIRQPSTAPQPVKEDIATPLPSEKTPTSVNQTPVETNEFPQLPEGLEKKPIVLKFSAMLDGIAIGAALLPSLKAEYKMGRMRSHGMTGAQTRFTFELPNHRLRFTSKVSATDMSTIPPSASLNLPPVTMSGKYIMEEHDSYSDQVWSIDELPSKQGYYLQGNYLRCVAEVGSFEHNLTTDLLNHLVFVQKVFMKEVNEVIQKVSGGEQPIPLWNEHDGTADGDKPKILLYSLNLQFKGIQVTATTPSMRAVRFETGLIELELSNRLQTKASPGSSSYLKLFGKCQVDLNLALGQIVKHQVYEEAGSDFHQVAYFKTRIGLRNALREEISGSSDREAVLITLNRPIVYAQPVAFDRAVLFWLNYKAAYDNWNEQRMALHKDIHMATKEVVDMLPGIQQTSAQAFGTLFLQLTVNDLGICLPITNTAQSNHTGDLDTGSALVLTIESTLITACSSESLVSKGHFKNFCIRFADGFETSWDDWKPEIHGDLVMNACVVPDGTYEVCSRTTGQAAAESSSAGTWTLNVLWKMCGIDVHMDPNIGKRLNALGNTLTTLTGEEDIDDIADLNSVNIADLSDEDEVDTMSPTIHTEATDYRRQAASASQPGELRGRKIMKRIVDIRELNEQAKVIDDLKKLGASEGTINQEIQRYQQLESVAVNDIRRDVRKKLRRSSMRAASLKDKWGLSYKPSYSRSKSISASGRPPLKRMERASSRVGETEELPEIRVDAASPGPRVTFNIQDTFPEETELDLLSVTIEGPSHYSSNSEGSCSVFSSPKTPGGFSPGIPFQTEEGRRDDSLSSTSEDSEKDEKDEDHERERFYIYRKPSHTSRKKATGFAAVHQLFTERWPTTPVNRSLSGTATERNIDFELDIRVEIDSGKCVLHPTTLLQEHDDISLRRSYDRSSRSLDQDSPSKKKKFQTNYASTTHLMTGKKVPSSLQTKPSDLETTVFYIPGVDVKLHYNSKTLKTESPNASRGSSLPRTLSKESKLYGMKDSATSPPSPPLPSTVQSKTNTLLPPQPPPIPAAKGKGSGGVKTAKLYAWVALQSLPEEMVISPCLLDFLEKALETIPITPVERNYTAVSSQDEDMGHFEIPDPMEESTTSLVSSSTSAYSSFPVDVVVYVRVQPSQIKFSCLPVSRVECMLKLPSLDLVFSSNRGELETLGTTYPAETLSPGGNATQSGTKTSASKTGIPGSSGLGSPLGRSRHSSSQSDLTSSSSSSSGLSFTACMSDFSLYVFHPYGAGKQKTAVSGLTPGSGGLGNVDEEPTSVTGRKDSLSINLEFVKVSLSRIRRSGGASFFESQSVSKSASKMDTTLINISAVCDIGSASFKYDMRRLSEILAFPRAWYRRSIARRLFLGDQTINLPTSGPGTPDSIEGVSQHLSPESSRKAYCKTWEQPSQSASFTHMPQSPNVFNEHMTNSTMSPGTVGQSLKSPASIRSRSVSDSSVPRRDSLSKTSTPFNKSNKAASQQGTPWETLVVFAINLKQLNVQMNMSNVMGNTTWTTSGLKSQGRLSVGSNRDREISMSVGLGRSQLDSKGGVVGGTIDVNALEMVAHISEHPNQQPSHKIQITMGSTEARVDYMGSSILMGIFSNADLKLQDEWKVNLYNTLDSSITDKSEIFVHGDLKWDIFQVMISRSTTPDLIKIGMKLQEFFTQQFDTSKRALSTWGPVPYLPPKTMTSNLEKSSQEQLLDAAHHRHWPGVLKVVSGCHISLFQIPLPEDGMQFGGSMSLHGNHMTLACFHGPNFRSKSWALFHLEEPNIAFWTEAQKIWEDGSSDHSTYIVQTLDFHLGHNTMVTKPCGALESPMATITKITRRRHENPPHGVASVKEWFNYVTATRNEELNLLRNVDANNTENSTTVKNSSLLSGFRGGSSYNHETETIFALPRMQLDFKSIHVQEPQEPSLQDASLKPKVECSVVTEFTDHICVTMDAELIMFLHDLVSAYLKEKEKAIFPPRILSTRPGQKSPIIIHDDNSSDKDREDSITYTTVDWRDFMCNTWHLEPTLRLISWTGRKIDPVGVDYILQKLGFHHARTTIPKWLQRGVMDPLDKVLSVLIKKLGTALQDEKEKKGKDKEEH

SEQ ID NO: 2364 - protein, 538 aa, Homo sapiens
MNLELLESFGQNYPEEADGTLDCISMALTCTFNRWGTLLAVGCNDGRIVIWDFLTRGIAKIISAHIHPVCSLCWSRDGHKLVSASTDNIVSQWDVLSGDCDQRFRFPSPILKVQYHPRDQNKVLVCPMKSAPVMLTLSDSKHVVLPVDDDSDLNVVASFDRRGEYIYTGNAKGKILVLKTDSQDLVASFRVTTGTSNTTAIKSIEFARKGSCFLINTADRIIRVYDGREILTCGRDGEPEPMQKLQDLVNRTPWKKCCFSGDGEYIVAGSARQHALYIWEKSIGNLVKILHGTRGELLLDVAWHPVRPIIASISSGVVSIWAQNQVENWSAFAPDFKELDENVEYEERESEFDIEDEDKSEPEQTGADAAEDEEVDVTSVDPIAAFCSSDEELEDSKALLYLPIAPEVEDPEENPYGPPPDAVQTSLMDEGASSEKKRQSSADGSQPPKKKPKTTNIELQGVPNDEVHPLLGVKGDGKSKKKQAGRPKGSKGKEKDSPFKPKLYKGDRGLPLEGSAKGKVQAELSQPLTAGGAISELL

SEQ ID NO: 2365 - protein, 429 aa, Homo sapiens
MTAALAVVTTSGLEDGVPRSRGEGTGEVVLERGPGAAYHMFVVMEDLVEKLKLLRYEEEFLRKSNLKAPSRHYFALPTNPGEQFYMFCTLAAWLINKAGRPFEQPQEYDDPNATISNILSELRSFGRTADFPPSKLKSGYGEHVCYVLDCFAEEALKYIGFTWKRPIYPVEELEEESVAEDDAELTLNKVDEEFVEEETDNEENFIDLNVLKAQTYHLDMNETAKQEDILESTTDAAEWSLEVERVLPQLKVTIRTDNKDWRIHVDQMHQHRSGIESALKETKGFLDKLHNEITRTLEKISSREKYINNQLENLVQEYRAAQAQLSEAKERYQQGNGGVTERTRLLSEVMEELEKVKQEMEEKGSSMTDGAPLVKIKQSLTKLKQETVEMDIRIGIVEHTLLQSKLKEKSNMTRNMHATVIPEPATGFY

SEQ ID NO: 2366 - protein, 257 aa, Homo sapiens
MEACVSSLLVLALGALSVGSSFGTQIIGGREVIPHSRPYMASLQRNGSHLCGGVLVHPKWVLTAAHCLAQRMAQLRLVLGLHTLDSPGLTFHIKAAIQHPRYKPVPALENDLALLQLDGKVKPSRTIRPLALPSKRQVVAAGTRCSMAGWGLTHQGGRLSRVLRELDLQVLDTRMCNNSRFWNGSLSPSMVCLAADSKDQAPCKGDSGGPLVCGKGRVLARVLSFSSRVCTDIFKPPVATAVAPYVSWIRKVTGRSA

SEQ ID NO: 2367 - protein, 1649 aa, Homo sapiens
MDDDSLDELVARSPGPDGHPQVGPADPAGDFEESSVGSSGDSGDDSDSEHGDGTDGEDEGASEEEDLEDRSGSEDSEDDGETLLEVAGTQGKLEAAGSFNSDDDAESCPICLNAFRDQAVGTPENCAHYFCLDCIVEWSKNANSCPVDRTLFKCICIRAQFGGKILRKIPVENTKASEEEEDPTFCEVCGRSDREDRLLLCDGCDAGYHMECLDPPLQEVPVDEWFCPECAAPGVVLAADAGPVSEEEVSLLLADVVPTTSRLRPRAGRTRAIARTRQSERVRATVNRNRISTARRVQHTPGRLGSSLLDEAIEAVATGLSTAVYQRPLTPRTPARRKRKTRRRKKVPGRKKTPSGPSAKSKSSATRSKKRQHRVKKRRGKKVKSEATTRSRIARTLGLRRPVHSSCIPSVLKPVEPSLGLLRADIGAASLSLFGDPYELDPFDSSEELSANPLSPLSAKRRALSRSALQSHQPVARPVSVGLSRRRLPAAVPEPDLEEEPVPDLLGSILSGQSLLMLGSSDVIIHRDGSLSAKRAAPVSFQRNSGSLSRGEEGFKGCLQPRALPSGSPAQGPSGNRPQSTGLSCQGRSRTPARTAGAPVRLDLPAAPGAVQARNLSNGSVPGFRQSHSPWFNGTNKHTLPLASAASKISSRDSKPPCRSVVPGPPLKPAPRRTDISELPRIPKIRRDDGGGRRDAAPAHGQSIEIPSACISRLTGREGTGQPGRGTRAESEASSRVPREPGVHTGSSRPPAPSSHGSLAPLGPSRGKGVGSTFESFRINIPGNMAHSSQLSSPGFCNTFRPVDDKEQRKENPSPLFSIKKTKQLRSEVYDPSDPTGSDSSAPGSSPERSGPGLLPSEITRTISINSPKAQTVQAVRCVTSYTVESIFGTEPEPPLGPSSAMSKLRGAVAAEGASDTEREEPTESQGLAARLRRPSPPEPWDEEDGASCSTFFGSEERTVTCVTVVEPEAPPSPDVLQAATHRVVELRPPSRSRSTSSSRSRKKAKRKRVSREHGRTRSGTRSESRDRSSRSASPSVGEERPRRQRSKAKSRRSSSDRSSSRERAKRKKAKDKSREHRRGPWGHSRRTSRSRSGSPGSSSYEHYESRKKKKRRSASRPRGRECSPTSSLERLCRHKHQRERSHERPDRKESVAWPRDRRKRRSRSPSSEHRAREHRRPRSREKWPQTRSHSPERKGAVREASPAPLAQGEPGREDLPTRLPALGEAHVSPEVATADKAPLQAPPVLEVAAECEPDDLDLDYGDSVEAGHVFDDFSSDAVFIQLDDMSSPPSPESTDSSPERDFPLKPALPPASLAVAAIQREVSLMHDEDPSQPPPLPEGTQEPHLLRPDAAEKAEAPSSPDVAPAGKEDSPSASGRVQEAARPEEVVSQTPLLRSRALVKRVTWNLQESESSAPAEDRAPRAPLHRPQKPREGAWDMEDVAPTGVRQVFSELPFPSHVLPEPGFPDTDPSQVYSPGLPPAPAQPSSIPPCALVSQPTVQFILQGSLPLVGCGAAQTLAPVPAALTPASEPASQATAASNSEEKTPAPRLAAEKTKKEEYMKKLHMQERAVEEVKLAIKPFYQKREVTKEEYKDILRKAVQKICHSKSGEINPVKVANLVKAYVDKYRHMRRHKKPEAGEEPPTQGAEG

SEQ ID NO: 2368 - protein, 199 aa, Homo sapiens
MNCVCRLVLVVLSLWPDTAVAPGPPPGPPRVSPDPRAELDSTVLLTRSLLADTRQLAAQLRDKFPADGDHNLDSLPTLAMSAGALGALQLPGVLTRLRADLLSYLRHVQWLRRAGGSSLKTLEPELGTLQARLDRLLRRLQLLMSRLALPQPPPDPPAPPLAPPSSAWGGIRAAHAILGGLHLTLDWAVRGLLLLKTRL

SEQ ID NO: 2369 - protein, 502 aa, Homo sapiens
MLLRSAGKLNVGTKKEDGESTAPTPRPKVLRCKCHHHCPEDSVNNICSTDGYCFTMIEEDDSGLPVVTSGCLGLEGSDFQCRDTPIPHQRRSIECCTERNECNKDLHPTLPPLKNRDFVDGPIHHRALLISVTVCSLLLVLIILFCYFRYKRQETRPRYSIGLEQDETYIPPGESLRDLIEQSQSSGSGSGLPLLVQRTIAKQIQMVKQIGKGRYGEVWMGKWRGEKVAVKVFFTTEEASWFRETEIYQTVLMRHENILGFIAADIKGTGSWTQLYLITDYHENGSLYDYLKSTTLDAKSMLKLAYSSVSGLCHLHTEIFSTQGKPAIAHRDLKSKNILVKKNGTCCIADLGLAVKFISDTNEVDIPPNTRVGTKRYMPPEVLDESLNRNHFQSYIMADMYSFGLILWEVARRCVSGGIVEEYQLPYHDLVPSDPSYEDMREIVCIKKLRPSFPNRWSSDECLRQMGKLMTECWAHNPASRLTALRVKKTLAKMSESQDIKL

SEQ ID NO: 2370 - protein, 346 aa, Homo sapiens
MARKSNLPVLLVPFLLCQALVRCSSPLPLVVNTWPFKNATEAAWRALASGGSALDAVESGCAMCEREQCDGSVGFGGSPDELGETTLDAMIMDGTTMDVGAVGDLRRIKNAIGVARKVLEHTTHTLLVGESATTFAQSMGFINEDLSTTASQALHSDWLARNCQPNYWRNVIPDPSKYCGPYKPPGILKQDIPIHKETEDDRGHDTIGMVVIHKTGHIAAGTSTNGIKFKIHGRVGDSPIPGAGAYADDTAGAAAATGNGDILMRFLPSYQAVEYMRRGEDPTIACQKVISRIQKHFPEFFGAVICANVTGSYGAACNKLSTFTQFSFMVYNSEKNQPTEEKVDCI

SEQ ID NO: 2371 - protein, 335 aa, Homo sapiens
MAEGGSPDGRAGPGSAGRNLKEWLREQFCDHPLEHCEDTRLHDAAYVGDLQTLRSLLQEESYRSRINEKSVWCCGWLPCTPLRIAATAGHGSCVDFLIRKGAEVDLVDVKGQTALYVAVVNGHLESTQILLEAGADPNGSRHHRSTPVYHASRVGRADILKALIRYGADVDVNHHLTPDVQPRFSRRLTSLVVCPLYISAAYHNLQCFRLLLLAGANPDFNCNGPVNTQGFYRGSPGCVMDAVLRHGCEAAFVSLLVEFGANLNLVKWESLGPESRGRRKVDPEALQVFKEARSVPRTLLCLCRVAVRRALGKHRLHLIPSLPLPDPIKKFLLHE

SEQ ID NO: 2372 - protein, 1065 aa, Homo sapiens
MKILILGIFLFLCSTPAWAKEKHYYIGIIETTWDYASDHGEKKLISVDTEHSNIYLQNGPDRIGRLYKKALYLQYTDETFRTTIEKPVWLGFLGPIIKAETGDKVYVHLKNLASRPYTFHSHGITYYKEHEGAIYPDNTTDFQRADDKVYPGEQYTYMLLATEEQSPGEGDGNCVTRIYHSHIDAPKDIASGLIGPLIICKKDSLDKEKEKHIDREFVVMFSVVDENFSWYLEDNIKTYCSEPEKVDKDNEDFQESNRMYSVNGYTFGSLPGLSMCAEDRVKWYLFGMGNEVDVHAAFFHGQALTNKNYRIDTINLFPATLFDAYMVAQNPGEWMLSCQNLNHLKAGLQAFFQVQECNKSSSKDNIRGKHVRHYYIAAEEIIWNYAPSGIDIFTKENLTAPGSDSAVFFEQGTTRIGGSYKKLVYREYTDASFTNRKERGPEEEHLGILGPVIWAEVGDTIRVTFHNKGAYPLSIEPIGVRFNKNNEGTYYSPNYNPQSRSVPPSASHVAPTETFTYEWTVPKEVGPTNADPVCLAKMYYSAVEPTKDIFTGLIGPMKICKKGSLHANGRQKDVDKEFYLFPTVFDENESLLLEDNIRMFTTAPDQVDKEDEDFQESNKMHSMNGFMYGNQPGLTMCKGDSVVWYLFSAGNEADVHGIYFSGNTYLWRGERRDTANLFPQTSLTLHMWPDTEGTFNVECLTTDHYTGGMKQKYTVNQCRRQSEDSTFYLGERTYYIAAVEVEWDYSPQREWEKELHHLQEQNVSNAFLDKGEFYIGSKYKKVVYRQYTDSTFRVPVERKAEEEHLGILGPQLHADVGDKVKIIFKNMATRPYSIHAHGVQTESSTVTPTLPGETLTYVWKIPERSGAGTEDSACIPWAYYSTVDQVKDLYSGLIGPLIVCRRPYLKVFNPRRKLEFALLFLVFDENESWYLDDNIKTYSDHPEKVNKDDEEFIESNKMHAINGRMFGNLQGLTMHVGDEVNWYLMGMGNEIDLHTVHFHGHSFQYKHRGVYSSDVFDIFPGTYQTLEMFPRTPGIWLLHCHVTDHIHAGMETTYTVLQNEDTKSG

SEQ ID NO: 2373 - protein, 380 aa, Homo sapiens
MKKSIGILSPGVALGMAGSAMSSKFFLVALAIFFSFAQVVIEANSWWSLGMNNPVQMSEVYIIGAQPLCSQLAGLSQGQKKLCHLYQDHMQYIGEGAKTGIKECQYQFRHRRWNCSTVDNTSVFGRVMQIGSRETAFTYAVSAAGVVNAMSRACREGELSTCGCSRAARPKDLPRDWLWGGCGDNIDYGYRFAKEFVDARERERIHAKGSYESARILMNLHNNEAGRRTVYNLADVACKCHGVSGSCSLKTCWLQLADFRKVGDALKEKYDSAAAMRLNSRGKLVQVNSRFNSPTTQDLVYIDPSPDYCVRNESTGSLGTQGRLCNKTSEGMDGCELMCCGRGYDQFKTVQTERCHCKFHWCCYVKCKKCTEIVDQFVCK

SEQ ID NO: 2374 - protein, 1384 aa, Homo sapiens
MMHLRLFCILLAAVSGAEGWGYYGCDEELVGPLYARSLGASSYYSLLTAPRFARLHGISGWSPRIGDPNPWLQIDLMKKHRIRAVATQGSFNSWDWVTRYMLLYGDRVDSWTPFYQRGHNSTFFGNVNESAVVRHDLHFHFTARYIRIVPLAWNPRGKIGLRLGLYGCPYKADILYFDGDDAISYRFPRGVSRSLWDVFAFSFKTEEKDGLLLHAEGAQGDYVTLELEGAHLLLHMSLGSSPIQPRPGHTTVSAGGVLNDQHWHYVRVDRFGRDVNFTLDGYVQRFILNGDFERLNLDTEMFIGGLVGAARKNLAYRHNFRGCIENVIFNRVNIADLAVRRHSRITFEGKVAFRCLDPVPHPINFGGPHNFVQVPGFPRRGRLAVSFRFRTWDLTGLLLFSRLGDGLGHVELTLSEGQVNVSIAQSGRKKLQFAAGYRLNDGFWHEVNFVAQENHAVISIDDVEGAEVRVSYPLLIRTGTSYFFGGCPKPASRWDCHSNQTAFHGCMELLKVDGQLVNLTLVEGRRLGFYAEVLFDTCGITDRCSPNMCEHDGRCYQSWDDFICYCELTGYKGETCHTPLYKESCEAYRLSGKTSGNFTIDPDGSGPLKPFVVYCDIRENRAWTVVRHDRLWTTRVTGSSMERPFLGAIQYWNASWEEVSALANASQHCEQWIEFSCYNSRLLNTAGGYPYSFWIGRNEEQHFYWGGSQPGIQRCACGLDRSCVDPALYCNCDADQPQWRTDKGLLTFVDHLPVTQVVIGDTNRSTSEAQFFLRPLRCYGDRNSWNTISFHTGAALRFPPIRANHSLDVSFYFRTSAPSGVFLENMGGPYCQWRRPYVRVELNTSRDVVFAFDVGNGDENLTVHSDDFEFNDDEWHLVRAEINVKQARLRVDHRPWVLRPMPLQTYIWMEYDQPLYVGSAELKRRPFVGCLRAMRLNGVTLNLEGRANASEGTSPNCTGHCAHPRLPCFHGGRCVERYSYYTCDCDLTAFDGPYCNHDIGGFFEPGTWMRYNLQSALRSAAREFSHMLSRPVPGYEPGYIPGYDTPGYVPGYHGPGYRLPDYPRPGRPVPGYRGPVYNVTGEEVSFSFSTSSAPAVLLYVSSFVRDYMAVLIKDDGTLQLRYQLGTSPYVYQLTTRPVTDGQPHSINITRVYRNLFIQVDYFPLTEQKFSLLVDSQLDSPKALYLGRVMETGVIDPEIQRYNTPGFSGCLSGVRFNNVAPLKTHFRTPRPMTAELAEALRVQGELSESNCGAMPRLVSEVPPELDPWYLPPDFPYYHDEGWVAILLGFLVAFLLLGLVGMLVLFYLQNHRYKGSYHTNEPKAAHEYHPGSKPPLPTSGPAQVPTPTAAPNQAPASAPAPAPTPAPAPGPRDQNLPQILEESRSE

SEQ ID NO: 2375 - protein, 534 aa, Homo sapiens
MKQEGSARRRGADKAKPPPGGGEQEPPPPPAPQDVEMKEEAATGGGSTGEADGKTAAAAAEHSQRELDTVTLEDIKEHVKQLEKAVSGKEPRFVLRALRMLPSTSRRLNHYVLYKAVQGFFTSNNATRDFLLPFLEEPMDTEADLQFRPRTGKAASTPLLPEVEAYLQLLVVIFMMNSKRYKEAQKISDDLMQKISTQNRRALDLVAAKCYYYHARVYEFLDKLDVVRSFLHARLRTATLRHDADGQATLLNLLLRNYLHYSLYDQAEKLVSKSVFPEQANNNEWARYLYYTGRIKAIQLEYSEARRTMTNALRKAPQHTAVGFKQTVHKLLIVVELLLGEIPDRLQFRQPSLKRSLMPYFLLTQAVRTGNLAKFNQVLDQFGEKFQADGTYTLIIRLRHNVIKTGVRMISLSYSRISLADIAQKLQLDSPEDAEFIVAKAIRDGVIEASINHEKGYVQSKEMIDIYSTREPQLAFHQRISFCLDIHNMSVKAMRFPPKSYNKDLESAEERREREQQDLEFAKEMAEDDDDSFP

SEQ ID NO: 2376 - protein, 703 aa, Homo sapiens
MADRRRQRASQDTEDEESGASGSDSGGSPLRGGGSCSGSAGGGGSGSLPSQRGGRTGALHLRRVESGGAKSAEESECESEDGIEGDAVLSDYESAEDSEGEEGEYSEEENSKVELKSEANDAVNSSTKEEKGEEKPDTKSTVTGERQSGDGQESTEPVENKVGKKGPKHLDDDEDRKNPAYIPRKGLFFEHDLRGQTQEEEVRPKGRQRKLWKDEGRWEHDKFREDEQAPKSRQELIALYGYDIRSAHNPDDIKPRRIRKPRYGSPPQRDPNWNGERLNKSHRHQGLGGTLPPRTFINRNAAGTGRMSAPRNYSRSGGFKEGRAGFRPVEAGGQHGGRSGETVKHEISYRSRRLEQTSVRDPSPEADAPVLGSPEKEEAASEPPAAAPDAAPPPPDRPIEKKSYSRARRTRTKVGDAVKLAEEVPPPPEGLIPAPPVPETTPTPPTKTGTWEAPVDSSTSGLEQDVAQLNIAEQNWSPGQPSFLQPRELRGMPNHIHMGAGPPPQFNRMEEMGVQGGRAKRYSSQRQRPVPEPPAPPVHISIMEGHYYDPLQFQGPIYTHGDSPAPLPPQGMLVQPGMNLPHPGLHPHQTPAPLPNPGLYPPPVSMSPGQPPPQQLLAPTYFSAPGVMNFGNPSYPYAPGALPPPPPPHLYPNTQAPSQVYGGVTYYNPAQQQVQPKPSPPRRTPQPVTIKPPPPEVVSRGSS

SEQ ID NO: 2377 - protein, 838 aa, Homo sapiens
MGELFRSEEMTLAQLFLQSEAAYCCVSELGELGKVQFRDLNPDVNVFQRKFVNEVRRCEEMDRKLRFVEKEIRKANIPIMDTGENPEVPFPRDMIDLEANFEKIENELKEINTNQEALKRNFLELTELKFILRKTQQFFDEAELHHQQMADPDLLEESSSLLEPSEMGRGTPLRLGFVAGVINRERIPTFERMLWRVCRGNVFLRQAEIENPLEDPVTGDYVHKSVFIIFFQGDQLKNRVKKICEGFRASLYPCPETPQERKEMASGVNTRIDDLQMVLNQTEDHRQRVLQAAAKNIRVWFIKVRKMKAIYHTLNLCNIDVTQKCLIAEVWCPVTDLDSIQFALRRGTEHSGSTVPSILNRMQTNQTPPTYNKTNKFTYGFQNIVDAYGIGTYREINPAPYTIITFPFLFAVMFGDFGHGILMTLFAVWMVLRESRILSQKNENEMFSTVFSGRYIILLMGVFSMYTGLIYNDCFSKSLNIFGSSWSVRPMFTYNWTEETLRGNPVLQLNPALPGVFGGPYPFGIDPIWNIATNKLTFLNSFKMKMSVILGIIHMLFGVSLSLFNHIYFKKPLNIYFGFIPEIIFMTSLFGYLVILIFYKWTAYDAHTSENAPSLLIHFINMFLFSYPESGYSMLYSGQKGIQCFLVVVALLCVPWMLLFKPLVLRRQYLRRKHLGTLNFGGIRVGNGPTEEDAEIIQHDQLSTHSEDADEFDFGDTMVHQAIHTIEYCLGCISNTASYLRLWALSLAHAQLSEVLWTMVIHIGLSVKSLAGGLVLFFFFTAFATLTVAILLIMEGLSAFLHALRLHWVEFQNKFYSGTGFKFLPFSFEHIREGKFEE

SEQ ID NO: 2378 - protein, 770 aa, Homo sapiens
MAQWNQLQQLDTRYLEQLHQLYSDSFPMELRQFLAPWIESQDWAYAASKESHATLVFHNLLGEIDQQYSRFLQESNVLYQHNLRRIKQFLQSRYLEKPMEIARIVARCLWEESRLLQTAATAAQQGGQANHPTAAVVTEKQQMLEQHLQDVRKRVQDLEQKMKVVENLQDDFDFNYKTLKSQGDMQDLNGNNQSVTRQKMQQLEQMLTALDQMRRSIVSELAGLLSAMEYVQKTLTDEELADWKRRQQIACIGGPPNICLDRLENWITSLAESQLQTRQQIKKLEELQQKVSYKGDPIVQHRPMLEERIVELFRNLMKSAFVVERQPCMPMHPDRPLVIKTGVQFTTKVRLLVKFPELNYQLKIKVCIDKDSGDVAALRGSRKFNILGTNTKVMNMEESNNGSLSAEFKHLTLREQRCGNGGRANCDASLIVTEELHLITFETEVYHQGLKIDLETHSLPVVVISNICQMPNAWASILWYNMLTNNPKNVNFFTKPPIGTWDQVAEVLSWQFSSTTKRGLSIEQLTTLAEKLLGPGVNYSGCQITWAKFCKENMAGKGFSFWVWLDNIIDLVKKYILALWNEGYIMGFISKERERAILSTKPPGTFLLRFSESSKEGGVTFTWVEKDISGKTQIQSVEPYTKQQLNNMSFAEIIMGYKIMDATNILVSPLVYLYPDIPKEEAFGKYCRPESQEHPEADPGSAAPYLKTKFICVTPTTCSNTIDLPMSPRTLDSLMQFGNNGEGAEPSAGGQFESLTFDMELTSECATSPM

SEQ ID NO: 2379 - protein, 1086 aa, Homo sapiens
MANLLKTVVTGCSCPLLSNLGSCKGLRVKKDFLRTFYTHQELWCKAPVKPGIPYKQLTVGVPKEIFQNEKRVALSPAGVQNLVKQGFNVVVESGAGEASKFSDDHYRVAGAQIQGAKEVLASDLVVKVRAPMVNPTLGVHEADLLKTSGTLISFIYPAQNPELLNKLSQRKTTVLAMDQVPRVTIAQGYDALSSMANIAGYKAVVLAANHFGRFFTGQITAAGKVPPAKILIVGGGVAGLASAGAAKSMGAIVRGFDTRAAALEQFKSLGAEPLEVDLKESGEGQGGYAKEMSKEFIEAEMKLFAQQCKEVDILISTALIPGKKAPVLFNKEMIESMKEGSVVVDLAAEAGGNFETTKPGELYIHKGITHIGYTDLPSRMATQASTLYSNNITKLLKAISPDKDNFYFDVKDDFDFGTMGHVIRGTVVMKDGKVIFPAPTPKNIPQGAPVKQKTVAELEAEKAATITPFRKTMSTASAYTAGLTGILGLGIAAPNLAFSQMVTTFGLAGIVGYHTVWGVTPALHSPLMSVTNAISGLTAVGGLALMGGHLYPSTTSQGLAALAAFISSVNIAGGFLVTQRMLDMFKRPTDPPEYNYLYLLPAGTFVGGYLAALYSGYNIEQIMYLGSGLCCVGALAGLSTQGTARLGNALGMIGVAGGLAATLGVLKPGPELLAQMSGAMALGGTIGLTIAKRIQISDLPQLVAAFHSLVGLAAVLTCIAEYIIEYPHFATDAAANLTKIVAYLGTYIGGVTFSGSLIAYGKLQGLLKSAPLLLPGRHLLNAGLLAASVGGIIPFMVDPSFTTGITCLGSVSALSAVMGVTLTAAIGGADMPVVITVLNSYSGWALCAEGFLLNNNLLTIVGALIGSSGAILSYIMCVAMNRSLANVILGGYGTTSTAGGKPMEISGTHTEINLDNAIDMIREANSIIITPGYGLCAAKAQYPIADLVKMLTEQGKKVRFGIHPVAGRMPGQLNVLLAEAGVPYDIVLEMDEINHDFPDTDLVLVIGANDTVNSAAQEDPNSIIAGMPVLEVWKSKQVIVMKRSLGVGYAAVDNPIFYKPNTAMLLGDAKKTCDALQAKVRESYQK

SEQ ID NO: 2380 - protein, 662 aa, Homo sapiens
MALITLRKNLYRLSDFQMHRALAALKNKPLNHVHKVVKERLCPWLCSRQPEPFGVKFHHAHCKKFHSKNGNDLHPLGGPVFSQVSDCDRLEQNVKNEESQMFYRRLSNLTSSEEVLSFISTMETLPDTMAAGALQRICEVEKKDGDQGLPKEILENSIFQALCFQFEKEPSQLSNTSLVTALQALILLHVDPQSSLLLNLVAECQNRLRKGGMEVRNLCILGESLITLHSSGCVTLELIINQLQGEKLETFTPEDIVALYRILQACTEKVDEHQTFLNKINNFSLSIVSNLSPKLISQMLTALVVLDQSQAFPLIIKLGKYVVRHVPHFTNEELRRVLEAFIYFGHHDTFFTKALEHRVAAVCLTLDPEVVCRVMEYCSRELILSKPILNAVAETFVCQTEKFSPRQISALMEPFGKLNYLPPNASALFRKLENVLFTHFNYFPPKSLLKLLHSCSLNECHPVNFLAKIFKPLFLQRLQGKESHLDTLSRAQLTQLFLASVLECPFYKGPKLLPKYQVKSFLTPCCSLETPVDSQLYRYVKIGLTNLLGARLYFAPKVLTPYCYTIDVEIKLDEEGFVLPSTANEDIHKRIALCIDGPKRFCSNSKHLLGKEAIKQRHLQLLGYQVVQIPYHEIGMLKSRRELVEYLQRKLFSQNTVHWLQE

SEQ ID NO: 2381 - protein, 767 aa, Homo sapiens
MGRRSRGRRLQQQQRPEDAEDGAEGGGKRGEAGWEGGYPEIVKENKLFEHYYQELKIVPEGEWGQFMDALREPLPATLRITGYKSHAKEILHCLKNKYFKELEDLEVDGQKVEVPQPLSWYPEELAWHTNLSRKILRKSPHLEKFHQFLVSETESGNISRQEAVSMIPPLLLNVRPHHKILDMCAAPGSKTTQLIEMLHADMNVPFPEGFVIANDVDNKRCYLLVHQAKRLSSPCIMVVNHDASSIPRLQIDVDGRKEILFYDRILCDVPCSGDGTMRKNIDVWKKWTTLNSLQLHGLQLRIATRGAEQLAEGGRMVYSTCSLNPIEDEAVIASLLEKSEGALELADVSNELPGLKWMPGITQWKVMTKDGQWFTDWDAVPHSRHTQIRPTMFPPKDPEKLQAMHLERCLRILPHHQNTGGFFVAVLVKKSSMPWNKRQPKLQGKSAETRESTQLSPADLTEGKPTDPSKLESPSFTGTGDTEIAHATEDLENNGSKKDGVCGPPPSKKMKLFGFKEDPFVFIPEDDPLFPPIEKFYALDPSFPRMNLLTRTTEGKKRQLYMVSKELRNVLLNNSEKMKVINTGIKVWCRNNSGEEFDCAFRLAQEGIYTLYPFINSRIITVSMEDVKILLTQENPFFRKLSSETYSQAKDLAKGSIVLKYEPDSANPDALQCPIVLCGWRGKASIRTFVPKNERLHYLRMMGLEVLGEKKKEGVILTNESAASTGQPDNDVTEGQRAGEPNSPDAEEANSPDVTAGCDPAGVHPPR

SEQ ID NO: 2382 - protein, 405 aa, Homo sapiens
MDTIFLWSLLLLFFGSQASRCSAQKNTEFAVDLYQEVSLSHKDNIIFSPLGITLVLEMVQLGAKGKAQQQIRQTLKQQETSAGEEFFVLKSFFSAISEKKQEFTFNLANALYLQEGFTVKEQYLHGNKEFFQSAIKLVDFQDAKACAEMISTWVERKTDGKIKDMFSGEEFGPLTRLVLVNAIYFKGDWKQKFRKEDTQLINFTKKNGSTVKIPMMKALLRTKYGYFSESSLNYQVLELSYKGDEFSLIIILPAEGMDIEEVEKLITAQQILKWLSEMQEEEVEISLPRFKVEQKVDFKDVLYSLNITEIFSGGCDLSGITDSSEVYVSQVTQKVFFEINEDGSEAATSTGIHIPVIMSLAQSQFIANHPFLFIMKHNPTESILFMGRVTNPDTQEIKGRDLDSL

SEQ ID NO: 2383 - protein, 469 aa, Homo sapiens
MVISESMDILFRIRGGLDLAFQLATPNEIFLKKALKHVLSDLSTKLSSNALVFRICHSSVYIWPSSDINTIPGELTDASACKNILRFIQFEPEEDIKRKFMRKKDKKLSDMHQIVNIDLMLEMSTSLAAVTPIIERESGGHHYVNMTLPVDAVISVAPEETWGKVRKLLVDAIHNQLTDMEKCILKYMKGTSIVVPEPLHFLLPGKKNLVTISYPSGIPDGQLQAYRKELHDLFNLPHDRPYFKRSNAYHFPDEPYKDGYIRNPHTYLNPPNMETGMIYVVQGIYGYHHYMQDRIDDNGWGCAYRSLQTICSWFKHQGYTERSIPTHREIQQALVDAGDKPATFVGSRQWIGSIEVQLVLNQLIGITSKILFVSQGSEIASQGRELANHFQSEGTPVMIGGGVLAHTILGVAWNEITGQIKFLILDPHYTGAEDLQVILEKGWCGWKGPDFWNKDAYYNLCLPQRPNMI

SEQ ID NO: 2384 - protein, 638 aa, Homo sapiens
MILFKQATYFISLFATVSCGCLTQLYENAFFRGGDVASMYTPNAQYCQMRCTFHPRCLLFSFLPASSINDMEKRFGCFLKDSVTGTLPKVHRTGAVSGHSLKQCGHQISACHRDIYKGVDMRGVNFNVSKVSSVEECQKRCTSNIRCQFFSYATQTFHKAEYRNNCLLKYSPGGTPTAIKVLSNVESGFSLKPCALSEIGCHMNIFQHLAFSDVDVARVLTPDAFVCRTICTYHPNCLFFTFYTNVWKIESQRNVCLLKTSESGTPSSSTPQENTISGYSLLTCKRTLPEPCHSKIYPGVDFGGEELNVTFVKGVNVCQETCTKMIRCQFFTYSLLPEDCKEEKCKCFLRLSMDGSPTRIAYGTQGSSGYSLRLCNTGDNSVCTTKTSTRIVGGTNSSWGEWPWQVSLQVKLTAQRHLCGGSLIGHQWVLTAAHCFDGLPLQDVWRIYSGILNLSDITKDTPFSQIKEIIIHQNYKVSEGNHDIALIKLQAPLNYTEFQKPICLPSKGDTSTIYTNCWVTGWGFSKEKGEIQNILQKVNIPLVTNEECQKRYQDYKITQRMVCAGYKEGGKDACKGDSGGPLVCKHNGMWRLVGITSWGEGCARREQPGVYTKVAEYMDWILEKTQSSDGKAQMQSPA

SEQ ID NO: 2385 - protein, 571 aa, Homo sapiens
MIFLYQVVHFILFTSVSGECVTQLLKDTCFEGGDITTVFTPSAKYCQVVCTYHPRCLLFTFTAESPSEDPTRWFTCVLKDSVTETLPRVNRTAAISGYSFKQCSHQISNICLLKHTQTGTPTRITKLDKVVSGFSLKSCALSNLACIRDIFPNTVFADSNIDSVMAPDAFVCGRICTHHPGCLFFTFFSQEWPKESQRNLCLLKTSESGLPSTRIKKSKALSGFSLQSCRHSIPVFCHSSFYHDTDFLGEELDIVAAKSHEACQKLCTNAVRCQFFTYTPAQASCNEGKGKCYLKLSSNGSPTKILHGRGGISGYTLRLCKMDNECTTKIKPRIVGGTASVRGEWPWQVTLHTTSPTQRHLCGGSIIGNQWILTAAHCFYGVESPKILRVYSGILNQSEIKEDTSFFGVQEIIIHDQYKMAESGYDIALLKLETTVNYTDSQRPICLPSKGDRNVIYTDCWVTGWGYRKLRDKIQNTLQKAKIPLVTNEECQKRYRGHKITHKMICAGYREGGKDACKGDSGGPLSCKHNEVWHLVGITSWGEGCAQRERPGVYTNVVEYVDWILEKTQAV

SEQ ID NO: 2386 - protein, 234 aa, Homo sapiens
MPSGCHSSPPSGLRGDMASLVPLSPYLSPTVLLLVSCDLGFVRADRPPSPVNVTVTHLRANSATVSWDVPEGNIVIGYSISQQRQNGPGQRVIREVNTTTRACALWGLAEDSDYTVQVRSIGLRGESPPGPRVHFRTLKGSDRLPSNSSSPGDITVEGLDGERPLQTGEVVIIVVVLLMWAAVIGLFCRQYDIIKDNDSNNNPKEKGKGPEQSPQGRPVGTRQKKSPSINTIDV

SEQ ID NO: 2387 - protein, 2225 aa, Homo sapiens
MAALVLEDGSVLRGQPFGAAVSTAGEVVFQTGMVGYPEALTDPSYKAQILVLTYPLIGNYGIPPDEMDEFGLCKWFESSGIHVAALVVGECCPTPSHWSATRTLHEWLQQHGIPGLQGVDTRELTKKLREQGSLLGKLVQNGTEPSSLPFLDPNARPLVPEVSIKTPRVFNTGGAPRILALDCGLKYNQIRCLCQRGAEVTVVPWDHALDSQEYEGLFLSNGPGDPASYPSVVSTLSRVLSEPNPRPVFGICLGHQLLALAIGAKTYKMRYGNRGHNQPCLLVGSGRCFLTSQNHGFAVETDSLPADWAPLFTNANDGSNEGIVHNSLPFFSVQFHPEHQAGPSDMELLFDIFLETVKEATAGNPGGQTVRERLTERLCPPGIPTPGSGLPPPRKVLILGSGGLSIGQAGEFDYSGSQAIKALKEENIQTLLINPNIATVQTSQGLADKVYFLPITPHYVTQVIRNERPDGVLLTFGGQTALNCGVELTKAGVLARYGVRVLGTPVETIELTEDRRAFAARMAEIGEHVAPSEAANSLEQAQAAAERLGYPVLVRAAFALGGLGSGFASNREELSALVAPAFAHTSQVLVDKSLKGWKEIEYEVVRDAYGNCVTVCNMENLDPLGIHTGESIVVAPSQTLNDREYQLLRQTAIKVTQHLGIVGECNVQYALNPESEQYYIIEVNARLSRSSALASKATGYPLAYVAAKLALGIPLPELRNSVTGGTAAFEPSVDYCVVKIPRWDLSKFLRVSTKIGSCMKSVGEVMGIGRSFEEAFQKALRMVDENCVGFDHTVKPVSDMELETPTDKRIFVVAAALWAGYSVDRLYELTRIDRWFLHRMKRIIAHAQLLEQHRGQPLPPDLLQQAKCLGFSDKQIALAVLSTELAVRKLRQELGICPAVKQIDTVAAEWPAQTNYLYLTYWGTTHDLTFRTPHVLVLGSGVYRIGSSVEFDWCAVGCIQQLRKMGYKTIMVNYNPETVSTDYDMCDRLYFDEISFEVVMDIYELENPEGVILSMGGQLPNNMAMALHRQQCRVLGTSPEAIDSAENRFKFSRLLDTIGISQPQWRELSDLESARQFCQTVGYPCVVRPSYVLSGAAMNVAYTDGDLERFLSSAAAVSKEHPVVISKFIQEAKEIDVDAVASDGVVAAIAISEHVENAGVHSGDATLVTPPQDITAKTLERIKAIVHAVGQELQVTGPFNLQLIAKDDQLKVIECNVRVSRSFPFVSKTLGVDLVALATRVIMGEEVEPVGLMTGSGVVGVKVPQFSFSRLAGADVVLGVEMTSTGEVAGFGESRCEAYLKAMLSTGFKIPKKNILLTIGSYKNKSELLPTVRLLESLGYSLYASLGTADFYTEHGVKVTAVDWHFEEAVDGECPPQRSILEQLAEKNFELVINLSMRGAGGRRLSSFVTKGYRTRRLAADFSVPLIIDIKCTKLFVEALGQIGPAPPLKVHVDCMTSQKLVRLPGLIDVHVHLREPGGTHKEDFASGTAAALAGGITMVCAMPNTRPPIIDAPALALAQKLAEAGARCDFALFLGASSENAGTLGTVAGSAAGLKLYLNETFSELRLDSVVQWMEHFETWPSHLPIVAHAEQQTVAAVLMVAQLTQRSVHICHVARKEEILLIKAAKARGLPVTCEVAPHHLFLSHDDLERLGPGKGEVRPELGSRQDVEALWENMAVIDCFASDHAPHTLEEKCGSRPPPGFPGLETMLPLLLTAVSEGRLSLDDLLQRLHHNPRRIFHLPPQEDTYVEVDLEHEWTIPSHMPFSKAHWTPFEGQKVKGTVRRVVLRGEVAYIDGQVLVPPGYGQDVRKWPQGAVPQLPPSAPATSEMTTTPERPRRGIPGLPDGRFHLPPRIHRASDPGLPAEEPKEKSSRKVAEPELMGTPDGTCYPPPPVPRQASPQNLGTPGLLHPQTSPLLHSLVGQHILSVQQFTKDQMSHLFNVAHTLRMMVQKERSLDILKGKVMASMFYEVSTRTSSSFAAAMARLGGAVLSFSEATSSVQKGESLADSVQTMSCYADVVVLRHPQPGAVELAAKHCRRPVINAGDGVGEHPTQALLDIFTIREELGTVNGMTITMVGDLKHGRTVHSLACLLTQYRVSLRYVAPPSLRMPPTVRAFVASRGTKQEEFESIEEALPDTDVLYMTRIQKERFGSTQEYEACFGQFILTPHIMTRAKKKMVVMHPMPRVNEISVEVDSDPRAAYFRQAENGMYIRMALLATVLGRF

SEQ ID NO: 2388 - protein, 267 aa, Homo sapiens
MPRSCCSRSGALLLALLLQASMEVRGWCLESSQCQDLTTESNLLECIRACKPDLSAETPMFPGNGDEQPLTENPRKYVMGHFRWDRFGRRNSSSSGSSGAGQKREDVSAGEDCGPLPEGGPEPRSDGAKPGPREGKRSYSMEHFRWGKPVGKKRRPVKVYPNGAEDESAEAFPLEFKRELTGQRLREGDGPDGPADDGAGAQADLEHSLLVAAEKKDEGPYRMEHFRWGSPPKDKRYGGFMTSEKSQTPLVTLFKNAIIKNAYKKGE

SEQ ID NO: 2389 - protein, 200 aa, Homo sapiens
MAKKTYDLLFKLLLIGDSGVGKTCVLFRFSDDAFNTTFISTIGIDFKIKTVELQGKKIKLQIWDTAGQERFHTITTSYYRGAMGIMLVYDITNGKSFENISKWLRNIDEHANEDVERMLLGNKCDMDDKRVVPKGKGEQIAREHGIRFFETSAKANINIEKAFLTLAEDILRKTPVKEPNSENVDISSGGGVTGWKSKCC

SEQ ID NO: 2390 - protein, 793 aa, Homo sapiens
MASKTKASEALKVVARCRPLSRKEEAAGHEQILTMDVKLGQVTLRNPRAAPGELPKTFTFDAVYDASSKQADLYDETVRPLIDSVLQGFNGTVFAYGQTGTGKTYTMQGTWVEPELRGVIPNAFEHIFTHISRSQNQQYLVRASYLEIYQEEIRDLLSKEPGKRLELKENPETGVYIKDLSSFVTKNVKEIEHVMNLGNQTRAVGSTHMNEVSSRSHAIFIITVECSERGSDGQDHIRVGKLNLVDLAGSERQNKAGPNTAGGAATPSSGGGGGGGGSGGGAGGERPKEASKINLSLSALGNVIAALAGNRSTHIPYRDSKLTRLLQDSLGGNAKTIMVATLGPASHSYDESLSTLRFANRAKNIKNKPRVNEDPKDTLLREFQEEIARLKAQLEKRGMLGKRPRRKSSRRKKAVSAPPGYPEGPVIEAWVAEEEDDNNNNHRPPQPILESALEKNMENYLQEQKERLEEEKAAIQDDRSLVSEEKQKLLEEKEKMLEDLRREQQATELLAAKYKAMESKLLIGGRNIMDHTNEQQKMLELKRQEIAEQKRREREMQQEMMLRDEETMELRGTYTSLQQEVEVKTKKLKKLYAKLQAVKAEIQDQHDEYIRVRQDLEEAQNEQTRELKLKYLIIENFIPPEEKNKIMNRLFLDCEEEQWKFQPLVPAGVSSSQMKKRPTSAVGYKRPISQYARVAMAMGSHPRYRAENIMFLELDVSPPAVFEMEFSHDQEQDPRALHMERLMRLDSFLERPSTSKVRKSRSWCQSPQRPPPSTTHASLASASLRPATVADHE

SEQ ID NO: 2391 - protein, 539 aa, Homo sapiens
MGRAGGGGPGRGPPPLLLFLGAALVLASGAVPAREAGSAVEAEELVKGSPAWEPPANDTREEAGPPAAGEDEASWTAPGGELAGPEEVLQESAAVTGTAWLEADSPGLGGVTAEAGSGDAQALPATLQAPHEVLGQSIMPPAIPEATEASGPPSPTPGDKLSPASELPKESPLEVWLNLGGSTPDPQGPELTYPFQGTLEPQPASDIIDIDYFEGLDGEGRGADLGSFPGSPGTSENHPDTEGETPSWSLLDLYDDFTPFDESDFYPTTSFYDDLDEEEEEEEDDKDAVGGGDLEDENELLVPTGKPGLGPGTGQPTSRWHAVPPQHTLGSVPGSSIALRPRPGEPGRDLASSENGTECRSGFVRHNGSCRSVCDLFPSYCHNGGQCYLVENIGAFCRCNTQDYIWHKGMRCESIITDFQVMCVAVGSAALVLLLLFMMTVFFAKKLYLLKTENTKLRRTNKFRTPSELHNDNFSLSTIAEGSHPNDDPSAPHKIQEVLKSCLKEEESFNIQNSMSPKLEGGKGDQADLDVNCLQNNLT

SEQ ID NO: 2392 - protein, 1035 aa, Homo sapiens
MGGPAAPRGAGRLRALLLALVVAGIPAGAYNLDPQRPVHFQGPADSFFGYAVLEHFHDNTRWVLVGAPKADSKYSPSVKSPGAVFKCRVHTNPDRRCTELDMARGKNRGTSCGKTCREDRDDEWMGVSLARQPKADGRVLACAHRWKNIYYEADHILPHGFCYIIPSNLQAKGRTLIPCYEEYKKKYGEEHGSCQAGIAGFFTEELVVMGAPGSFYWAGTIKVLNLTDNTYLKLNDEVIMNRRYTYLGYAVTAGHFSHPSTIDVVGGAPQDKGIGKVYIFRADRRSGTLIKIFQASGKKMGSYFGSSLCAVDLNGDGLSDLLVGAPMFSEIRDEGQVTVYINRGNGALEEQLALTGDGAYNAHFGESIASLDDLDNDGFPDVAIGAPKEDDFAGAVYIYHGDAGGIVPQYSMKLSGQKINPVLRMFGQSISGGIDMDGNGYPDVTVGAFMSDSVVLLRARPVITVDVSIFLPGSINITAPQCHDGQQPVNCLNVTTCFSFHGKHVPGEIGLNYVLMADVAKKEKGQMPRVYFVLLGETMGQVTEKLQLTYMEETCRHYVAHVKRRVQDVISPIVFEAAYSLSEHVTGEEERELPPLTPVLRWKKGQKIAQKNQTVFERNCRSEDCAADLQLQGKLLLSSMDEKTLYLALGAVKNISLNISISNLGDDAYDANVSFNVSRELFFINMWQKEEMGISCELLESDFLKCSVGFPFMRSKSKYEFSVIFDTSHLSGEEEVLSFIVTAQSGNTERSESLHDNTLVLMVPLMHEVDTSITGIMSPTSFVYGESVDAANFIQLDDLECHFQPINITLQVYNTGPSTLPGSSVSISFPNRLSSGGAEMFHVQEMVVGQEKGNCSFQKNPTPCIIPQEQENIFHTIFAFFTKSGRKVLDCEKPGISCLTAHCNFSALAKEESRTIDIYMLLNTEILKKDSSSVIQFMSRAKVKVDPALRVVEIAHGNPEEVTVVFEALHNLEPRGYVVGWIIAISLLVGILIFLLLAVLLWKMGFFRRRYKEIIEAEKNRKENEDSWDWVQKNQ

SEQ ID NO: 2393 - protein, 504 aa, Homo sapiens
MTPSPLLLLLLPPLLLGAFPPAAAARGPPKMADKVVPRQVARLGRTVRLQCPVEGDPPPLTMWTKDGRTIHSGWSRFRVLPQGLKVKQVEREDAGVYVCKATNGFGSLSVNYTLVVLDDISPGKESLGPDSSSGGQEDPASQQWARPRFTQPSKMRRRVIARPVGSSVRLKCVASGHPRPDITWMKDDQALTRPEAAEPRKKKWTLSLKNLRPEDSGKYTCRVSNRAGAINATYKVDVIQRTRSKPVLTGTHPVNTTVDFGGTTSFQCKVRSDVKPVIQWLKRVEYGAEGRHNSTIDVGGQKFVVLPTGDVWSRPDGSYLNKLLITRARQDDAGMYICLGANTMGYSFRSAFLTVLPDPKPPGPPVASSSSATSLPWPVVIGIPAGAVFILGTLLLWLCQAQKKPCTPAPAPPLPGHRPPGTARDRSGDKDLPSLAALSAGPGVGLCEEHGSPAAPQHLLGPGPVAGPKLYPKLYTDIHTHTHTHSHTHSHVEGKVHQHIHYQC

SEQ ID NO: 2394 - protein, 768 aa, Homo sapiens
MNGDSRAAVVTSPPPTTAPHKERYFDRVDENNPEYLRERNMAPDLRQDFNMMEQKKRVSMILQSPAFCEELESMIQEQFKKGKNPTGLLALQQIADFMTTNVPNVYPAAPQGGMAALNMSLGMVTPVNDLRGSDSIAYDKGEKLLRCKLAAFYRLADLFGWSQLIYNHITTRVNSEQEHFLIVPFGLLYSEVTASSLVKINLQGDIVDRGSTNLGVNQAGFTLHSAIYAARPDVKCVVHIHTPAGAAVSAMKCGLLPISPEALSLGEVAYHDYHGILVDEEEKVLIQKNLGPKSKVLILRNHGLVSVGESVEEAFYYIHNLVVACEIQVRTLASAGGPDNLVLLNPEKYKAKSRSPGSPVGEGTGSPPKWQIGEQEFEALMRMLDNLGYRTGYPYRYPALREKSKKYSDVEVPASVTGYSFASDGDSGTCSPLRHSFQKQQREKTRWLNSGRGDEASEEGQNGSSPKSKTKVWTNITHDHVKPLLQSLSSGVCVPSCITNCLWTKEDGHRTSTSAVPNLFVPLNTNPKEVQEMRNKIREQNLQDIKTAGPQSQVLCGVVMDRSLVQGELVTASKAIIEKEYQPHVIVSTTGPNPFTTLTDRELEEYRREVERKQKGSEENLDEAREQKEKSPPDQPAVPHPPPSTPIKLEEDLVPEPTTGDDSDAATFKPTLPDLSPDEPSEALGFPMLEKEEEAHRPPSPTEAPTEASPEPAPDPAPVAEEAAPSAVEEGAAADPGSDGSPGKSPSKKKKKFRTPSFLKKSKKKSDS

SEQ ID NO: 2395 - protein, 504 aa, Homo sapiens
MSQPRTPEQALDTPGDCPPGRRDEDAGEGIQCSQRMLSFSDALLSIIATVMILPVTHTEISPEQQFDRSVQRLLATRIAVYLMTFLIVTVAWAAHTRLFQVVGKTDDTLALLNLACMMTITFLPYTFSLMVTFPDVPLGIFLFCVCVIAIGVVQALIVGYAFHFPHLLSPQIQRSAHRALYRRHVLGIVLQGPALCFAAAIFSLFFVPLSYLLMVTVILLPYVSKVTGWCRDRLLGHREPSAHPVEVFSFDLHEPLSKERVEAFSDGVYAIVATLLILDICEDNVPDPKDVKERFSGSLVAALSATGPRFLAYFGSFATVGLLWFAHHSLFLHVRKATRAMGLLNTLSLAFVGGLPLAYQQTSAFARQPRDELERVRVSCTIIFLASIFQLAMWTTALLHQAETLQPSVWFGGREHVLMFAKLALYPCASLLAFASTCLLSRFSVGIFHLMQIAVPCAFLLLRLLVGLALATLRVLRGLARPEHPPPAPTGQDDPQSQLLPAPC

SEQ ID NO: 2396 - protein, 285 aa, Homo sapiens
MFDKTRLPYVALDVLCVLLASMPMAVLKLGQIYPFQRGFFCKDNSINYPYHDSTVTSTVLILVGVGLPISSIILGETLSVYCNLLHSNSFIRNNYIATIYKAIGTFLFGAAASQSLTDIAKYSIGRLRPHFLDVCDPDWSKINCSDGYIEYYICRGNAERVKEGRLSFYSGHSSFSMYCMLFVALYLQARMKGDWARLLRPTLQFGLVAVSIYVGLSRVSDYKHHWSDVLTGLIQGALVAILVAVYVSDFFKERTSFKERKEEDSHTTLHETPTTGNHYPSNHQP

SEQ ID NO: 2397 - protein, 540 aa, Homo sapiens
MARKQNRNSKELGLVPLTDDTSHAGPPGPGRALLECDHLRSGVPGGRRRKDWSCSLLVASLAGAFGSSFLYGYNLSVVNAPTPYIKAFYNESWERRHGRPIDPDTLTLLWSVTVSIFAIGGLVGTLIVKMIGKVLGRKHTLLANNGFAISAALLMACSLQAGAFEMLIVGRFIMGIDGGVALSVLPMYLSEISPKEIRGSLGQVTAIFICIGVFTGQLLGLPELLGKESTWPYLFGVIVVPAVVQLLSLPFLPDSPRYLLLEKHNEARAVKAFQTFLGKADVSQEVEEVLAESRVQRSIRLVSVLELLRAPYVRWQVVTVIVTMACYQLCGLNAIWFYTNSIFGKAGIPPAKIPYVTLSTGGIETLAAVFSGLVIEHLGRRPLLIGGFGLMGLFFGTLTITLTLQDHAPWVPYLSIVGILAIIASFCSGPGGIPFILTGEFFQQSQRPAAFIIAGTVNWLSNFAVGLLFPFIQKSLDTYCFLVFATICITGAIYLYFVLPETKNRTYAEISQAFSKRNKAYPPEEKIDSAVTDGKINGRP

SEQ ID NO: 2398 - protein, 1228 aa, Homo sapiens
MKGARLFVLLSSLWSGGIGLNNSKHSWTIPEDGNSQKTMPSASVPPNKIQSLQILPTTRVMSAEIATTPEARTSEDSLLKSTLPPSETSAPAEGVRNQTLTSTEKAEGVVKLQNLTLPTNASIKFNPGAESVVLSNSTLKFLQSFARKSNEQATSLNTVGGTGGIGGVGGTGGVGNRAPRETYLSRGDSSSSQRTDYQKSNFETTRGKNWCAYVHTRLSPTVILDNQVTYVPGGKGPCGWTGGSCPQRSQKISNPVYRMQHKIVTSLDWRCCPGYSGPKCQLRAQEQQSLIHTNQAESHTAVGRGVAEQQQQQGCGDPEVMQKMTDQVNYQAMKLTLLQKKIDNISLTVNDVRNTYSSLEGKVSEDKSREFQSLLKGLKSKSINVLIRDIVREQFKIFQNDMQETVAQLFKTVSSLSEDLESTRQIIQKVNESVVSIAAQQKFVLVQENRPTLTDIVELRNHIVNVRQEMTLTCEKPIKELEVKQTHLEGALEQEHSRSILYYESLNKTLSKLKEVHEQLLSTEQVSDQKNAPAAESVSNNVTEYMSTLHENIKKQSLMMLQMFEDLHIQESKINNLTVSLEMEKESLRGECEDMLSKCRNDFKFQLKDTEENLHVLNQTLAEVLFPMDNKMDKMSEQLNDLTYDMEILQPLLEQGASLRQTMTYEQPKEAIVIRKKIENLTSAVNSLNFIIKELTKRHNLLRNEVQGRDDALERRINEYALEMEDGLNKTMTIINNAIDFIQDNYALKETLSTIKDNSEIHHKCTSDMETILTFIPQFHRLNDSIQTLVNDNQRYNFVLQVAKTLAGIPRDEKLNQSNFQKMYQMFNETTSQVRKYQQNMSHLEEKLLLTTKISKNFETRLQDIESKVTQTLIPYYISVKKGSVVTNERDQALQLQVLNSRFKALEAKSIHLSINFFSLNKTLHEVLTMCHNASTSVSELNATIPKWIKHSLPDIQLLQKGLTEFVEPIIQIKTQAALSNLTCCIDRSLPGSLANVVKSQKQVKSLPKKINALKKPTVNLTTVLIGRTQRNTDNIIYPEEYSSCSRHPCQNGGTCINGRTSFTCACRHPFTGDNCTIKLVEENALAPDFSKGSYRYAPMVAFFASHTYGMTIPGPILFNNLDVNYGASYTPRTGKFRIPYLGVYVFKYTIESFSAHISGFLVVDGIDKLAFESENINSEIHCDRVLTGDALLELNYGQEVWLRLAKGTIPAKFPPVTTFSGYLLYRT

SEQ ID NO: 2399 - protein, 630 aa, Homo sapiens
MLGMYVPDRFSLKSSRVQDGMGLYTARRVRKGEKFGPFAGEKRMPEDLDENMDYRLMWEVRGSKGEVLYILDATNPRHSNWLRFVHEAPSQEQKNLAAIQEGENIFYLAVEDIETDTELLIGYLDSDMEAEEEEQQIMTVIKEGEVENSRRQSTAGRKDRLGCKEDYACPQCESSFTSEDILAEHLQTLHQKPTEEKEFKCKNCGKKFPVKQALQRHVLQCTAKSSLKESSRSFQCSVCNSSFSSASSFEQHQETCRGDARFVCKADSCGKRLKSKDALKRHQENVHTGDPKKKLICSVCNKKCSSASSLQEHRKIHEIFDCQECMKKFISANQLKRHMITHSEKRPYNCEICNKSFKRLDQVGAHKVIHSEDKPYKCKLCGKGFAHRNVYKNHKKTHSEERPFQCEECKALFRTPFSLQRHLLIHNSERTFKCHHCDATFKRKDTLNVHVQVVHERHKKYRCELCNKAFVTPSVLRSHKKTHTGEKEKICPYCGQKFASSGTLRVHIRSHTGERPYQCPYCEKGFSKNDGLKMHIRTHTREKPYKCSECSKAFSQKRGLDEHKRTHTGEKPFQCDVCDLAFSLKKMLIRHKMTHNPNRPLAECQFCHKKFTRNDYLKVHMDNIHGVADS

SEQ ID NO: 2400 - protein, 545 aa, Homo sapiens
MAEASSLGRQSPRVVSCLEHSLCPGEPGLQTTAVVSMGSGDHQFNLAEILSQNYSVRGECEEASRCPDKPKEELEKDFISQSNDMPFDELLALYGYEASDPISDRESEGGDVAPNLPDMTLDKEQIAKDLLSGEEEEETQSSADDLTPSVTSHEASDLFPNRSGSRFLADEDREPGSSASSDTEEDSLPANKCKKEIMVGPQFQADLSNLHLNRHCEKIYENEDQLLWDPSVLPEREVEEFLYRAVKRRWHEMAGPQLPEGEAVKDSEQALYELVKCNFNVEEALRRLRFNVKVIRDGLCAWSEEECRNFEHGFRVHGKNFHLIQANKVRTRSVGECVEYYYLWKKSERYDYFAQQTRLGRRKYVPSGTTDADQDLDGSDPDGPGRPRPEQDTLTGMRTDPLSVDGTAGGLDEPGVASDGLPSSEPGPCSFQQLDESPAVPLSHRPPALADPASYQPAVTAPEPDASPRLAVDFALPKELPLISSHVDLSGDPEETVAPAQVALSVTEFGLIGIGDVNPFLAAHPTCPAPGLHSEPLSHCNVMTC

SEQ ID NO: 2401 - protein, 280 aa, Homo sapiens
MCPPQAQAEVGPTMTEKAEMVCAPSPAPAPPPKPASPGPPQVEEVGHRGGSSPPRLPPGVPVISLGHSRPPGVAMPTTELGTLRPPLLQLSTLGTAPPTLALHYHPHPFLNSVYIGPAGPFSIFPSSRLKRRPSHCELDLAEGHQPQKVARRVFTNSRERWRQQNVNGAFAELRKLLPTHPPDRKLSKNEVLRLAMKYIGFLVRLLRDQAAALAAGPTPPGPRKRPVHRVPDDGARRGSGRRAEAAARSQPAPPADPDGSPGGAARPIKMEQTALSPEVR

SEQ ID NO: 2402 - protein, 717 aa, Homo sapiens
MSVDKAELCGSLLTWLQTFHVPSPCASPQDLSSGLAVAYVLNQIDPSWFNEAWLQGISEDPGPNWKLKVSNLKMVLRSLVEYSQDVLAHPVSEEHLPDVSLIGEFSDPAELGKLLQLVLGCAISCEKKQDHIQRIMTLEESVQHVVMEAIQELMTKDTPDSLSPETYGNFDSQSRRYYFLSEEAEEGDELQQRCLDLERQLMLLSEEKQSLAQENAGLRERMGRPEGEGTPGLTAKKLLLLQSQLEQLQEENFRLESGREDERLRCAELEREVAELQHRNQALTSLAQEAQALKDEMDELRQSSERAGQLEATLTSCRRRLGELRELRRQVRQLEERNAGHAERTRQLEDELRRAGSLRAQLEAQRRQVQELQGQRQEEAMKAEKWLFECRNLEEKYESVTKEKERLLAERDSLREANEELRCAQLQPRGLTQADPSLDPTSTPVDNLAAEILPAELRETLLRLQLENKRLCRQEAADRERQEELQRHLEDANRARHGLETQHRLNQQQLSELRAQVEDLQKALQEQGGKTEDSILLKRKLEEHLQKLHEADLELQRKREYIEELEPPTDSSTARRIEELQHNLQKKDADLRAMEERYRRYVDKARMVMQTMEPKQRPAAGAPPELHSLRTQLRERDVRIRHLEMDFEKSRSQREQEEKLLISAWYNMGMALQQRAGEERAPAHAQSFLAQQRLATNSRRGPLGRLASLNLRPTDKH

SEQ ID NO: 2403 - protein, 1745 aa, Homo sapiens
MGNRRDLGQPRAGLCLLLAALQLLPGTQADPVDVLKALGVQGGQAGVPEGPGFCPQRTPEGDRAFRIGQASTLGIPTWELFPEGHFPENFSLLITLRGQPANQSVLLSIYDERGARQLGLALGPALGLLGDPFRPLPQQVNLTDGRWHRVAVSIDGEMVTLVADCEAQPPVLGHGPRFISIAGLTVLGTQDLGEKTFEGDIQELLISPDPQAAFQACERYLPDCDNLAPAATVAPQGEPETPRPRRKGKGKGRKKGRGRKGKGRKKNKEIWTSSPPPDSAENQTSTDIPKTETPAPNLPPTPTPLVVTSTVTTGLNATILERSLDPDSGTELGTLETKAAREDEEGDDSTMGPDFRAAEYPSRTQFQIFPGAGEKGAKGEPAVIEKGQQFEGPPGAPGPQGVVGPSGPPGPPGFPGDPGPPGPAGLPGIPGIDGIRGPPGTVIMMPFQFAGGSFKGPPVSFQQAQAQAVLQQTQLSMKGPPGPVGLTGRPGPVGLPGHPGLKGEEGAEGPQGPRGLQGPHGPPGRVGKMGRPGADGARGLPGDTGPKGDRGFDGLPGLPGEKGQRGDFGHVGQPGPPGEDGERGAEGPPGPTGQAGEPGPRGLLGPRGSPGPTGRPGVTGIDGAPGAKGNVGPPGEPGPPGQQGNHGSQGLPGPQGLIGTPGEKGPPGNPGIPGLPGSDGPLGHPGHEGPTGEKGAQGPPGSAGPPGYPGPRGVKGTSGNRGLQGEKGEKGEDGFPGFKGDVGLKGDQGKPGAPGPRGEDGPEGPKGQAGQAGEEGPPGSAGEKGKLGVPGLPGYPGRPGPKGSIGFPGPLGPIGEKGKSGKTGQPGLEGERGPPGSRGERGQPGATGQPGPKGDVGQDGAPGIPGEKGLPGLQGPPGFPGPKGPPGHQGKDGRPGHPGQRGELGFQGQTGPPGPAGVLGPQGKTGEVGPLGERGPPGPPGPPGEQGLPGLEGREGAKGELGPPGPLGKEGPAGLRGFPGPKGGPGDPGPTGLKGDKGPPGPVGANGSPGERGPLGPAGGIGLPGQSGSEGPVGPAGKKGSRGERGPPGPTGKDGIPGPLGPLGPPGAAGPSGEEGDKGDVGAPGHKGSKGDKGDAGPPGQPGIRGPAGHPGPPGADGAQGRRGPPGLFGQKGDDGVRGFVGVIGPPGLQGLPGPPGEKGEVGDVGSMGPHGAPGPRGPQGPTGSEGTPGLPGGVGQPGAVGEKGERGDAGDPGPPGAPGIPGPKGDIGEKGDSGPSGAAGPPGKKGPPGEDGAKGSVGPTGLPGDLGPPGDPGVSGIDGSPGEKGDPGDVGGPGPPGASGEPGAPGPPGKRGPSGHMGREGREGEKGAKGEPGPDGPPGRTGPMGARGPPGRVGPEGLRGIPGPVGEPGLLGAPGQMGPPGPLGPSGLPGLKGDTGPKGEKGHIGLIGLIGPPGEAGEKGDQGLPGVQGPPGPKGDPGPPGPIGSLGHPGPPGVAGPLGQKGSKGSPGSMGPRGDTGPAGPPGPPGAPAELHGLRRRRRFVPVPLPVVEGGLEEVLASLTSLSLELEQLRRPPGTAERPGLVCHELHRNHPHLPDGEYWIDPNQGCARDSFRVFCNFTAGGETCLYPDKKFEIVKLASWSKEKPGGWYSTFRRGKKFSYVDADGSPVNVVQLNFLKLLSATARQNFTYSCQNAAAWLDEATGDYSHSARFLGTNGEELSFNQTTAATVSVPQDGCRLRKGQTKTLFEFSSSRAGFLPLWDVAATDFGQTNQKFGFELGPVCFSS

SEQ ID NO: 2404 - protein, 532 aa, Homo sapiens
MAPSSPRPALPALLVLLGALFPGPGNAQTSVSPSKVILPRGGSVLVTCSTSCDQPKLLGIETPLPKKELLLPGNNRKVYELSNVQEDSQPMCYSNCPDGQSTAKTFLTVYWTPERVELAPLPSWQPVGKNLTLRCQVEGGAPRANLTVVLLRGEKELKREPAVGEPAEVTTTVLVRRDHHGANFSCRTELDLRPQGLELFENTSAPYQLQTFVLPATPPQLVSPRVLEVDTQGTVVCSLDGLFPVSEAQVHLALGDQRLNPTVTYGNDSFSAKASVSVTAEDEGTQRLTCAVILGNQSQETLQTVTIYSFPAPNVILTKPEVSEGTEVTVKCEAHPRAKVTLNGVPAQPLGPRAQLLLKATPEDNGRSFSCSATLEVAGQLIHKNQTRELRVLYGPRLDERDCPGNWTWPENSQQTPMCQAWGNPLPELKCLKDGTFPLPIGESVTVTRDLEGTYLCRARSTQGEVTRKVTVNVLSPRYEIVIITVVAAAVIMGTAGLSTYLYNRQRKIKKYRLQQAQKGTPMKPNTQATPP

SEQ ID NO: 2405 - protein, 454 aa, Homo sapiens
MWPLTVPPPLLLLLCSGLAGQTLFQNPEEGWQLYTSAQAPDGKCICTAVIPAQSTCSRDGRSRELRQLMEKVQNVSQSMEVLELRTYRDLQYVRGMETLMRSLDARLRAADGSLSAKSFQELKDRMTELLPLSSVLEQYKADTRTIVRLREEVRNLSGSLAAIQEEMGAYGYEDLQQRVMALEARLHACAQKLGCGKLTGVSNPITVRAMGSRFGSWMTDTMAPSADSRVWYMDGYYKGRRVLEFRTLGDFIKGQNFIQHLLPQPWAGTGHVVYNGSLFYNKYQSNVVVKYHFRSRSVLVQRSLPGAGYNNTFPYSWGGFSDMDFMVDESGLWAVYTTNQNAGNIVVSRLDPHTLEVMRSWDTGYPKRSAGEAFMICGVLYVTNSHLAGAKVYFAYFTNTSSYEYTDVPFHNQYSHISMLDYNPRERALYTWNNGHQVLYNVTLFHVISTSGDP

SEQ ID NO: 2406 - protein, 827 aa, Homo sapiens
MRGCLRLALLCALPWLLLAASPGHPAKSPRQPPAPRRDPFDAARGADFDHVYSGVVNLSTENIYSFNYTSQPDQVTAVRVYVNSSSENLNYPVLVVVRQQKEVLSWQVPLLFQGLYQRSYNYQEVSRTLCPSEATNETGPLQQLIFVDVASMAPLGAQYKLLVTKLKHFQLRTNVAFHFTASPSQPQYFLYKFPKDVDSVIIKVVSEMAYPCSVVSVQNIMCPVYDLDHNVEFNGVYQSMTKKAAITLQKKDFPGEQFFVVFVIKPEDYACGGSFFIQEKENQTWNLQRKKNLEVTIVPSIKESVYVKSSLFSVFIFLSFYLGCLLVGFVHYLRFQRKSIDGSFGSNDGSGNMVASHPIAASTPEGSNYGTIDESSSSPGRQMSSSDGGPPGQSDTDSSVEESDFDTMPDIESDKNIIRTKMFLYLSDLSRKDRRIVSKKYKIYFWNIITIAVFYALPVIQLVITYQTVVNVTGNQDICYYNFLCAHPLGVLSAFNNILSNLGHVLLGFLFLLIVLRRDILHRRALEAKDIFAVEYGIPKHFGLFYAMGIALMMEGVLSACYHVCPNYSNFQFDTSFMYMIAGLCMLKLYQTRHPDINASAYSAYASFAVVIMVTVLGVVFGKNDVWFWVIFSAIHVLASLALSTQIYYMGRFKIDLGIFRRAAMVFYTDCIQQCSRPLYMDRMVLLVVGNLVNWSFALFGLIYRPRDFASYMLGIFICNLLLYLAFYIIMKLRSSEKVLPVPLFCIVATAVMWAAALYFFFQNLSSWEGTPAESREKNRECILLDFFDDHDIWHFLSATALFFSFLVLLTLDDDLDVVRRDQIPVF

SEQ ID NO: 2407 - protein, 481 aa, Homo sapiens
MEDPSEPDRLASADGGSPEEEEDGEREPLLPRIAWAHPRRGAPGSAVRLLDAAGEEGEAGDEELPLPPGDVGVSRSSSAELDRSRPAVSVTIGTSEMNAFLDDPEFADIMLRAEQAIEVGIFPERISQGSSGSYFVKDPKRKIIGVFKPKSEEPYGQLNPKWTKYVHKVCCPCCFGRGCLIPNQGYLSEAGAYLVDNKLHLSIVPKTKVVWLVSETFNYNAIDRAKSRGKKYALEKVPKVGRKFHRIGLPPKIGSFQLFVEGYKEAEYWLRKFEADPLPENIRKQFQSQFERLVILDYIIRNTDRGNDNWLVRYEKQKCEKEIDHKESKWIDDEEFLIKIAAIDNGLAFPFKHPDEWRAYPFHWAWLPQAKVPFSEEIRNLILPYISDMNFVQDLCEDLYELFKTDKGFDKATFESQMSVMRGQILNLTQALRDGKSPFQLVQIPCVIVERSQGGSQGRIVHLSNSFTQTVNCRKPFFSSW

SEQ ID NO: 2408 - protein, 526 aa, Homo sapiens
MLQEESDLSLIIAQIVQKLKGSNLYSQLERQAWASLQRPEIKLESLKEDIKEFFKISGWEKKLQNAVYSELSVFPLPSHPAAPPEHLKEPLVYMRKAQGSWEKRILKSLNSMCTELSIPLARKRPVGEQKELLNKWNEMGTDEPDLSLFRPVYAPKDFLEVLINLRNPNYENGDSLSFRTHLGLIQVPLKVKDIPELKECFVELGLNIGQLGIDDSTQVPPELFENEHVRIGQKVLAEQDSAAAQQYIRQGSPTALRAELWALILNISSQPEDVLYYEQLKTNVIQHDLLVDSLIYKDVKLTASNDDYYFVFEDYLYQVLLCFSRDTSVLSHFAFNSASPPKSYIRGKLGLEEYAVFYPPNGVIPFHGFSMYVAPLCFLYHEPSKLYQIFREMYVRFFFRLHSISSHPSGIVSLCLLFETLLQTYLPQLFYHLREIGAQPLRISFKWMVRAFSGYLATDQLLLLWDRILGYNSLEILAVLAAAVFAFRAVNLMEVTSLAAAEAVLADLSTLKVMPLLQIFLFATVT

SEQ ID NO: 2409 - protein, 507 aa, Homo sapiens
MAFNFGAPSGTSGTAAATAAPAGGFGGFGTTSTTAGSAFSFSAPTNTGTTGLFGGTQNKGFGFGTGFGTTTGTSTGLGTGLGTGLGFGGFNTQQQQQTTLGGLFSQPTQAPTQSNQLINTASALSAPTLLGDERDAILAKWNQLQAFWGTGKGYFNNNIPPVEFTQENPFCRFKAVGYSCMPSNKDEDGLVVLVFNKKETEIRSQQQQLVESLHKVLGGNQTLTVNVEGTKTLPDDQTEVVIYVVERSPNGTSRRVPATTLYAHFEQANIKTQLQQLGVTLSMTRTELSPAQIKQLLQNPPAGVDPIIWEQAKVDNPDSEKLIPVPMVGFKELLRRLKVQDQMTKQHQTRLDIISEDISELQKNQTTSVAKIAQYKRKLMDLSHRTLQVLIKQEIQRKSGYAIQADEEQLRVQLDTIQGELNAPTQFKGRLNELMSQIRMQNHFGAVRSEERYYIDADLLREIKQHLKQQQEGLSHLISIIKDDLEDIKLVEHGLNETIHIRGGVFS

SEQ ID NO: 2410 - protein, 429 aa, Homo sapiens
MAVAVGRPSNEELRNLSLSGHVGFDSLPDQLVNKSTSQGFCFNILCVGETGIGKSTLMDTLFNTKFESDPATHNEPGVRLKARSYELQESNVRLKLTIVDTVGFGDQINKDDSYKPIVEYIDAQFEAYLQEELKIKRSLFNYHDTRIHACLYFIAPTGHSLKSLDLVTMKKLDSKVNIIPIIAKADTIAKNELHKFKSKIMSELVSNGVQIYQFPTDEETVAEINATMSVHLPFAVVGSTEEVKIGNKMAKARQYPWGVVQVENENHCDFVKLREMLIRVNMEDLREQTHTRHYELYRRCKLEEMGFKDTDPDSKPFSLQETYEAKRNEFLGELQKKEEEMRQMFVMRVKEKEAELKEAEKELHEKFDLLKRTHQEEKKKVEDKKKELEEEVNNFQKKKAAAQLLQSQAQQSGAQQTKKDKDKKNASFT

SEQ ID NO: 2411 - protein, 478 aa, Homo sapiens
MGRCCFYTAGTLSLLLLVTSVTLLVARVFQKAVDQSIEKKIVLRNGTEAFDSWEKPPLPVYTQFYFFNVTNPEEILRGETPRVEEVGPYTYRELRNKANIQFGDNGTTISAVSNKAYVFERDQSVGDPKIDLIRTLNIPVLTVIEWSQVHFLREIIEAMLKAYQQKLFVTHTVDELLWGYKDEILSLIHVFRPDISPYFGLFYEKNGTNDGDYVFLTGEDSYLNFTKIVEWNGKTSLDWWITDKCNMINGTDGDSFHPLITKDEVLYVFPSDFCRSVYITFSDYESVQGLPAFRYKVPAEILANTSDNAGFCIPEGNCLGSGVLNVSICKNGAPIIMSFPHFYQADERFVSAIEGMHPNQEDHETFVDINPLTGIILKAAKRFQINIYVKKLDDFVETGDIRTMVFPVMYLNESVHIDKETASRLKSMINTTLIITNIPYIIMALGVFFGLVFTWLACKGQGSMDEGTADERAPLIRT

SEQ ID NO: 2412 - protein, 973 aa, Homo sapiens
MNFLRGVMGGQSAGPQHTEAETIQKLCDRVASSTLLDDRRNAVRALKSLSKKYRLEVGIQAMEHLIHVLQTDRSDSEIIGYALDTLYNIISNEEEEEVDDVEEENSTRQSEDLGSQFTEIFIKQQENVTLLLSLLEEFDFHVRWPGVKLLTSLLKQLGPQVQQIILVSPMGVSRLMDLLADSREVIRNDGVLLLQALTRSNGAIQKIVAFENAFERLLDIISEEGNSDGGIVVEDCLILLQNLLKNNNSNQNFFKEGSYIQRMKPWFEVGDENSGWSAQKVTNLHLMLQLVRVLVSPTNPPGATSSCQKAMFQCGLLQQLCTILMATGVPADILTETINTVSEVIRGCQVNQDYFASVNAPSNPPRPAIVVLLMSMVNERQPFVLRCAVLYCFQCFLYKNQKGQGEIVSTLLPSTIDATGNSVSAGQLLCGGLFSTDSLSNWCAAVALAHALQENATQKEQLLRVQLATSIGNPPVSLLQQCTNILSQGDKIDRRGSKIQTRVGLLMLLCTWLSNCPIAVTHFLHNSANVPFLTGQIAENLGEEEQLVQGLCALLLGISIYFNDNSLESYMKEKLKQLIEKRIGKENFIEKLGFISKHELYSRASQKPQPNFPSPEYMIFDHEFTKLVKELEGVITKAIYKSSEEDKKEEEVKKTLEQHDNIVTHYKNMIREQDLQLEELRQQVSTLKCQNEQLQTAVTQQVSQIQQHKDQYNLLKIQLGKDNQHQGSYSEGAQMNGIQPEEIGRLREEIEELKRNQELLQSQLTEKDSMIENMKSSQTSGTNEQSSAIVSARDSEQVAELKQELATLKSQLNSQSVEITKLQTEKQELLQKTEAFAKSVEVQGETETIIATKTTDVEGRLSALLQETKELKNEIKALSEERTAIKEQLDSSNSTIAILQTEKDKLELEITDSKKEQDDLLVLLADQDQKILSLKNKLKDLGHPVEEEDELESGDQEDEDDESEDPGKDLDHI

SEQ ID NO: 2413 - protein, 533 aa, Homo sapiens
MGPRGAASLPRGPGPRRLLLPVVLPLLLLLLLAPPGSGAGASRPPHLVFLLADDLGWNDVGFHGSRIRTPHLDALAAGGVLLDNYYTQPLCTPSRSQLLTGRYQIRTGLQHQIIWPCQPSCVPLDEKLLPQLLKEAGYTTHMVGKWHLGMYRKECLPTRRGFDTYFGYLLGSEDYYSHERCTLIDALNVTRCALDFRDGEEVATGYKNMYSTNIFTKRAIALITNHPPEKPLFLYLALQSVHEPLQVPEEYLKPYDFIQDKNRHHYAGMVSLMDEAVGNVTAALKSSGLWNNTVFIFSTDNGGQTLAGGNNWPLRGRKWSLWEGGVRGVGFVASPLLKQKGVKNRELIHISDWLPTLVKLARGHTNGTKPLDGFDVWKTISEGSPSPRIELLHNIDPNFVDSSPCPRNSMAPAKDDSSLPEYSAFNTSVHAAIRHGNWKLLTGYPGCGYWFPPPSQYNVSEIPSSDPPTKTLWLFDIDRDPEERHDLSREYPHIVTKLLSRLQFYHKHSVPVYFPAQDPRCDPKATGVWGPWM

SEQ ID NO: 2414 - protein, 495 aa, Homo sapiens
MDSLAESRWPPGLAVMKTIDDLLRCGICFEYFNIAMIIPQCSHNYCSLCIRKFLSYKTQCPTCCVTVTEPDLKNNRILDELVKSLNFARNHLLQFALESPAKSPASSSSKNLAVKVYTPVASRQSLKQGSRLMDNFLIREMSGSTSELLIKENKSKFSPQKEASPAAKTKETRSVEEIAPDPSEAKRPEPPSTSTLKQVTKVDCPVCGVNIPESHINKHLDSCLSREEKKESLRSSVHKRKPLPKTVYNLLSDRDLKKKLKEHGLSIQGNKQQLIKRHQEFVHMYNAQCDALHPKSAAEIVREIENIEKTRMRLEASKLNESVMVFTKDQTEKEIDEIHSKYRKKHKSEFQLLVDQARKGYKKIAGMSQKTVTITKEDESTEKLSSVCMGQEDNMTSVTNHFSQSKLDSPEELEPDREEDSSSCIDIQEVLSSSESDSCNSSSSDIIRDLLEEEEAWEASHKNDLQDTEISPRQNRRTRAAESAEIEPRNKRNRN

SEQ ID NO: 2415 - protein, 1083 aa, Homo sapiens
MPTNFTVVPVEAHADGGGDETAERTEAPGTPEGPEPERPSPGDGNPRENSPFLNNVEVEQESFFEGKNMALFEEEMDSNPMVSSLLNKLANYTNLSQGVVEHEEDEESRRREAKAPRMGTFIGVYLPCLQNILGVILFLRLTWIVGVAGVLESFLIVAMCCTCTMLTAISMSAIATNGVVPAGGSYYMISRSLGPEFGGAVGLCFYLGTTFAGAMYILGTIEIFLTYISPGAAIFQAEAAGGEAAAMLHNMRVYGTCTLVLMALVVFVGVKYVNKLALVFLACVVLSILAIYAGVIKSAFDPPDIPVCLLGNRTLSRRSFDACVKAYGIHNNSATSALWGLFCNGSQPSAACDEYFIQNNVTEIQGIPGAASGVFLENLWSTYAHAGAFVEKKGVPSVPVAEESRASALPYVLTDIAASFTLLVGIYFPSVTGIMAGSNRSGDLKDAQKSIPTGTILAIVTTSFIYLSCIVLFGACIEGVVLRDKFGEALQGNLVIGMLAWPSPWVIVIGSFFSTCGAGLQSLTGAPRLLQAIARDGIVPFLQVFGHGKANGEPTWALLLTVLICETGILIASLDSVAPILSMFFLMCYLFVNLACAVQTLLRTPNWRPRFKFYHWTLSFLGMSLCLALMFICSWYYALSAMLIAGCIYKYIEYRGAEKEWGDGIRGLSLNAARYALLRVEHGPPHTKNWRPQVLVMLNLDAEQAVKHPRLLSFTSQLKAGKGLTIVGSVLEGTYLDKHMEAQRAEENIRSLMSTEKTKGFCQLVVSSSLRDGMSHLIQSAGLGGLKHNTVLMAWPASWKQEDNPFSWKNFVDTVRDTTAAHQALLVAKNVDSFPQNQERFGGGHIDVWWIVHDGGMLMLLPFLLRQHKVWRKCRMRIFTVAQVDDNSIQMKKDLQMFLYHLRISAEVEVVEMVENDISAFTYERTLMMEQRSQMLKQMQLSKNEQEREAQLIHDRNTASHTAAAARTQAPPTPDKVQMTWTREKLIAEKYRSRDTSLSGFKDLFSMKPDQSNVRRMHTAVKLNGVVLNKSQDAQLVLLNMPGPPKNRQGDENYMEFLEVLTEGLNRVLLVRGGGREVITIYS

SEQ ID NO: 2416 - protein, 664 aa, Homo sapiens
MSGVRGLSRLLSARRLALAKAWPTVLQTGTRGFHFTVDGNKRASAKVSDSISAQYPVVDHEFDAVVVGAGGAGLRAAFGLSEAGFNTACVTKLFPTRSHTVAAQGGINAALGNMEEDNWRWHFYDTVKGSDWLGDQDAIHYMTEQAPAAVVELENYGMPFSRTEDGKIYQRAFGGQSLKFGKGGQAHRCCCVADRTGHSLLHTLYGRSLRYDTSYFVEYFALDLLMENGECRGVIALCIEDGSIHRIRAKNTVVATGGYGRTYFSCTSAHTSTGDGTAMITRAGLPCQDLEFVQFHPTGIYGAGCLITEGCRGEGGILINSQGERFMERYAPVAKDLASRDVVSRSMTLEIREGRGCGPEKDHVYLQLHHLPPEQLATRLPGISETAMIFAGVDVTKEPIPVLPTVHYNMGGIPTNYKGQVLRHVNGQDQIVPGLYACGEAACASVHGANRLGANSLLDLVVFGRACALSIEESCRPGDKVPPIKPNAGEESVMNLDKLRFADGSIRTSELRLSMQKSMQNHAAVFRVGSVLQEGCGKISKLYGDLKHLKTFDRGMVWNTDLVETLELQNLMLCALQTIYGAEARKESRGAHAREDYKVRIDEYDYSKPIQGQQKKPFEEHWRKHTLSYVDVGTGKVTLEYRPVIDKTLNEADCATVPPAIRSY

SEQ ID NO: 2417 - protein, 191 aa, Homo sapiens
MAAYSYRPGPGAGPGPAAGAALPDQSFLWNVFQRVDKDRSGVISDTELQQALSNGTWTPFNPVTVRSIISMFDRENKAGVNFSEFTGVWKYITDWQNVFRTYDRDNSGMIDKNELKQALSGFGYRLSDQFHDILIRKFDRQGRGQIAFDDFIQGCIVLQRLTDIFRRYDTDQDGWIQVSYEQYLSMVFSIV

SEQ ID NO: 2418 - protein, 1706 aa, Homo sapiens
MGVPKFYRWISERYPCLSEVVKEHQIPEFDNLYLDMNGIIHQCSHPNDDDVHFRISDDKIFTDIFHYLEVLFRIIKPRKVFFMAVDGVAPRAKMNQQRGRRFRSAKEAEDKIKKAIEKGETLPTEARFDSNCITPGTEFMARLHEHLKYFVNMKISTDKSWQGVTIYFSGHETPGEGEHKIMEFIRSEKAKPDHDPNTRHCLYGLDADLIMLGLTSHEAHFSLLREEVRFGGKKTQRVCAPEETTFHLLHLSLMREYIDYEFSVLKEKITFKYDIERIIDDWILMGFLVGNDFIPHLPHLHINHDALPLLYGTYVTILPELGGYINESGHLNLPRFEKYLVKLSDFDREHFSEVFVDLKWFESKVGNKYLNEAAGVAAEEARNYKEKKKLKGQENSLCWTALDKNEGEMITSKDNLEDETEDDDLFETEFRQYKRTYYMTKMGVDVVSDDFLADQAACYVQAIQWILHYYYHGVQSWSWYYPYHYAPFLSDIHNISTLKIHFELGKPFKPFEQLLAVLPAASKNLLPACYQHLMTNEDSPIIEYYPPDFKTDLNGKQQEWEAVVLIPFIDEKRLLEAMETCNHSLKKEERKRNQHSECLMCWYDRDTEFIYPSPWPEKFPAIERCCTRYKIISLDAWRVDINKNKITRIDQKALYFCGFPTLKHIRHKFFLKKSGVQVFQQSSRGENMMLEILVDAESDELTVENVASSVLGKSVFVNWPHLEEARVVAVSDGETKFYLEEPPGTQKLYSGRTAPPSKVVHLGDKEQSNWAKEVQGISEHYLRRKGIIINETSAVVYAQLLTGRKYQINQNGEVRLEKQWSKQVVPFVYQTIVKDIRAFDSRFSNIKTLDDLFPLRSMVFMLGTPYYGCTGEVQDSGDVITEGRIRVIFSIPCEPNLDALIQNQHKYSIKYNPGYVLASRLGVSGYLVSRFTGSIFIGRGSRRNPHGDHKANVGLNLKFNKKNEEVPGYTKKVGSEWMYSSAAEQLLAEYLERAPELFSYIAKNSQEDVFYEDDIWPGENENGAEKVQEIITWLKGHPVSTLSRSSCDLQILDAAIVEKIEEEVEKCKQRKNNKKVRVTVKPHLLYRPLEQQHGVIPDRDAEFCLFDRVVNVRENFSVPVGLRGTIIGIKGANREADVLFEVLFDEEFPGGLTIRCSPGRGYRLPTSALVNLSHGSRSETGNQKLTAIVKPQPAVHQHSSSSSVSSGHLGALNHSPQSLFVPTQVPTKDDDEFCNIWQSLQGSGKMQYFQPTIQEKGAVLPQEISQVNQHHKSGFNDNSVKYQQRKHDPHRKFKEECKSPKAECWSQKMSNKQPNSGIENFLASLNISKENEVQSSHHGEPPSEEHLSPQSFAMGTRMLKEILKIDGSNTVDHKNEIKQIANEIPVSSNRRDEYGLPSQPKQNKKLASYMNKPHSANEYHNVQSMDNMCWPAPSQIPPVSTPVTELSRICSLVGMPQPDFSFLRMPQTMTVCQVKLSNGLLVHGPQCHSENEAKEKAALFALQQLGSLGMNFPLPSQVFANYPSAVPPGTIPPAFPPPTGWDHYGSNYALGAANIMPSSSHLFGSMPWGPSVPVPGKPFHHTLYSGTMPMAGGIPGGVHNQFIPLQVTKKRVANKKNFENKEAQSSQATPVQTSQPDSSNIVKVSPRESSSASLKSSPIAQPASSFQVETASQGHSISHHKSTPISSSRRKSRKLAVNFGVSKPSE

SEQ ID NO: 2419 - protein, 217 aa, Homo sapiens
MAAQCVRLARRSLPALALSLRPSPRLLCTATKQKNSGQNLEEDMGQSEQKADPPATEKTLLEEKVKLEEQLKETVEKYKRALADTENLRQRSQKLVEEAKLYGIQAFCKDLLEVADVLEKATQCVPKEEIKDDNPHLKNLYEGLVMTEVQIQKVFTKHGLLKLNPVGAKFDPYEHEALFHTPVEGKEPGTVALVSKVGYKLHGRTLRPALVGVVKEA

SEQ ID NO: 2420 - protein, 1150 aa, Homo sapiens
MAATYRLVVSTVNHYSSVVIDRRFEQAIHYCTGTCHTFTHGIDCIVVHHSVCADLLHIPVSQFKDADLNSMFLPHENGLSSAEGDYPQQAFTGIPRVKRGSTFQNTYNLKDIAGEAISFASGKIKEFSFEKLKNSNHAAYRKGRKVKSDSFNRRSVDLDLLCGHYNNDGNAPSFGLLRSSSVEEKPLSHRNSLDTNLTSMFLQNFSEEDLVTQILEKHKIDNFSSGTDIKMCLDILLKCSEDLKKCTDIIKQCIKKKSGSSISEGSGNDTISSSETVYMNVMTRLASYLKKLPFEFMQSGNNEALDLTELISNMPSLQLTPFSPVFGTEQPPKYEDVVQLSASDSGRFQTIELQNDKPNSRKMDTVQSIPNNSTNSLYNLEVNDPRTLKAVQVQSQSLTMNPLENVSSDDLMETLYIEEESDGKKALDKGQKTENGPSHELLKVNEHRAEFPEHATHLKKCPTPMQNEIGKIFEKSFVNLPKEDCKSKVSKFEEGDQRDFTNSSSQEEIDKLLMDLESFSQKMETSLREPLAKGKNSNFLNSHSQLTGQTLVDLEPKSKVSSPIEKVSPSCLTRIIETNGHKIEEEDRALLLRILESIEDFAQELVECKSSRGSLSQEKEMMQILQETLTTSSQANLSVCRSPVGDKAKDTTSAVLIQQTPEVIKIQNKPEKKPGTPLPPPATSPSSPRPLSPVPHVNNVVNAPLSINIPRFYFPEGLPDTCSNHEQTLSRIETAFMDIEEQKADIYEMGKIAKVCGCPLYWKAPMFRAAGGEKTGFVTAQSFIAMWRKLLNNHHDDASKFICLLAKPNCSSLEQEDFIPLLQDVVDTHPGLTFLKDAPEFHSRYITTVIQRIFYTVNRSWSGKITSTEIRKSNFLQTLALLEEEEDINQITDYFSYEHFYVIYCKFWELDTDHDLYISQADLSRYNDQASSSRIIERIFSGAVTRGKTIQKEGRMSYADFVWFLISEEDKRNPTSIEYWFRCMDVDGDGVLSMYELEYFYEEQCERMEAMGIEPLPFHDLLCQMLDLVKPAVDGKITLRDLKRCRMAHIFYDTFFNLEKYLDHEQRDPFAVQKDVENDGPEPSDWDRFAAEEYETLVAEESAQAQFQEGFEDYETDEPASPSEFGNKSNKILSASLPEKCGKLQSVDEE

SEQ ID NO: 2421 - protein, 258 aa, Homo sapiens
MAETEERSLDNFFAKRDKKKKKERSNRAASAAGAAGSAGGSSGAAGAAGGGAGAGTRPGDGGTASAGAAGPGAATKAVTKDEDEWKELEQKEVDYSGLRVQAMQISSEKEEDDNEKRQDPGDNWEEGGGGGGGMEKSSGPWNKTAPVQAPPAPVIVTETPEPAMTSGVYRPPGARLTTTRKTPQGPPEIYSDTQFPSLQSTAKHVESRKDKEMEKSFEVVRHKNRGRDEVSKNQALKLQLDNQYAVLENQKSSHSQYN

SEQ ID NO: 2422 - protein, 348 aa, Homo sapiens [sequence omitted]

SEQ ID NO: 2423 - protein, 657 aa, Homo sapiens
MRLKIGFILRSLLVVGSFLGLVVLWSSLTPRPDDPSPLSRMREDRDVNDPMPNRGGNGLAPGEDRFKPVVPWPHVEGVEVDLESIRRINKAKNEQEHHAGGDSQKDIMQRQYLTFKPQTFTYHDPVLRPGILGNFEPKEPEPPGVVGGPGEKAKPLVLGPEFKQAIQASIKEFGFNMVASDMISLDRSVNDLRQEECKYWHYDENLLTSSVVIVFHNEGWSTLMRTVHSVIKRTPRKYLAEIVLIDDFSNKEHLKEKLDEYIKLWNGLVKVFRNERREGLIQARSIGAQKAKLGQVLIYLDAHCEVAVNWYAPLVAPISKDRTICTVPLIDVINGNTYEIIPQGGGDEDGYARGAWDWSMLWKRVPLTPQEKRLRKTKTEPYRSPAMAGGLFAIEREFFFELGLYDPGLQIWGGENFEISYKIWQCGGKLLFVPCSRVGHIYRLEGWQGNPPPIYVGSSPTLKNYVRVVEVWWDEYKDYFYASRPESQALPYGDISELKKFREDHNCKSFKWFMEEIAYDITSHYPLPPKNVDWGEIRGFETAYCIDSMGKTNGGFVELGPCHRMGGNQLFRINEANQLMQYDQCLTKGADGSKVMITHCNLNEFKEWQYFKNLHRFTHIPSGKCLDRSEVLHQVFISNCDSSKTTQKWEMNNIHSV

SEQ ID NO: 2424 - protein, 318 aa, Homo sapiens
MAAQGCAASRLLQLLLQLLLLLLLLAAGGARARWRGEGTSAHLRDIFLGRCAEYRALLSPEQRNKNCTAIWEAFKVALDKDPCSVLPSDYDLFINLSRHSIPRDKSLFWENSHLLVNSFADNTRRFMPLSDVLYGRVADFLSWCRQKNDSGLDYQSCPTSEDCENNPVDSFWKRASIQYSKDSSGVIHVMLNGSEPTGAYPIKGFFADYEIPNLQKEKITRIEIWVMHEIGGPNVESCGEGSMKVLEKRLKDMGFQYSCINDYRPVKLLQCVDHSTHPDCALKSAAAATQRKAPSLYTEQRAGLIIPLFLVLASRTQL

SEQ ID NO: 2425 - protein, 358 aa, Homo sapiens
MAPQNLSTFCLLLLYLIGAVIAGRDFYKILGVPRSASIKDIKKAYRKLALQLHPDRNPDDPQAQEKFQDLGAAYEVLSDSEKRKQYDTYGEEGLKDGHQSSHGDIFSHFFGDFGFMFGGTPRQQDRNIPRGSDIIVDLEVTLEEVYAGNFVEVVRNKPVARQAPGKRKCNCRQEMRTTQLGPGRFQMTQEVVCDECPNVKLVNEERTLEVEIEPGVRDGMEYPFIGEGEPHVDGEPGDLRFRIKVVKHPIFERRGDDLYTNVTISLVESLVGFEMDITHLDGHKVHISRDKITRPGAKLWKKGEGLPNFDNNNIKGSLIITFDVDFPKEQLTEEAREGIKQLLKQGSVQKVYNGLQGY

SEQ ID NO: 2426 - protein, 382 aa, Homo sapiens
MGLLLPLALCILVLCCGAMSPPQLALNPSALLSRGCNDSDVLAVAGFALRDINKDRKDGYVLRLNRVNDAQEYRRGGLGSLFYLTLDVLETDCHVLRKKAWQDCGMRIFFESVYGQCKAIFYMNNPSRVLYLAAYNCTLRPVSKKKIYMTCPDCPSSIPTDSSNHQVLEAATESLAKYNNENTSKQYSLFKVTRASSQWVVGPSYFVEYLIKESPCTKSQASSCSLQSSDSVPVGLCKGSLTRTHWEKFVSVTCDFFESQAPATGSENSAVNQKPTNLPKVEESQQKNTPPTDSPSKAGPRGSVQYLPDLDDKNSQEKGPQEAFPVHLDLTTNPQGETLDISFLFLEPMEEKLVVLPFPKEKARTAECPGPAQNASPLVLPP

SEQ ID NO: 2427 - protein, 185 aa, Homo sapiens
MAPKGSSKQQSEEDLLLQDFSRNLSAKSSALFFGNAFIVSAIPIWLYWRIWHMDLIQSAVLYSVMTLVSTYLVAFAYKNVKFVLKHKVAQKREDAVSKEVTRKLSEADNRKMSRKEKDERILWKKNEVADYEATTFSIFYNNTLFLVVVIVASFFILKNFNPTVNYILSISASSGLIALLSTGSK

SEQ ID NO: 2428 - protein, 313 aa, Homo sapiens
METGPEDPSSMPEESSPRRTPQSIPYQDLPHLVNADGQYLFCRYWKPTGTPKALIFVSHGAGEHSGRYEELARMLMGLDLLVFAHDHVGHGQSEGERMVVSDFHVFVRDVLQHVDSMQKDYPGLPVFLLGHSMGGAIAILTAAERPGHFAGMVLISPLVLANPESATTFKVLAAKVLNLVLPNLSLGPIDSSVLSRNKTEVDIYNSDPLICRAGLKVCFGIQLLNAVSRVERALPKLTVPFLLLQGSADRLCDSKGAYLLMELAKSQDKTLKIYEGAYHVLHKELPEVTNSVFHEINMWVSQRTATAGTASPP

SEQ ID NO: 2429 - protein, 904 aa, Homo sapiens
MAESSESFTMASSPAQRRRGNDPLTSSPGRSSRRTDALTSSPGRDLPPFEDESEGLLGTEGPLEEEEDGEELIGDGMERDYRAIPELDAYEAEGLALDDEDVEELTASQREAAERAMRQRDREAGRGLGRMRRGLLYDSDEEDEERPARKRRQVERATEDGEEDEEMIESIENLEDLKGHSVREWVSMAGPRLEIHHRFKNFLRTHVDSHGHNVFKERISDMCKENRESLVVNYEDLAAREHVLAYFLPEAPAELLQIFDEAALEVVLAMYPKYDRITNHIHVRISHLPLVEELRSLRQLHLNQLIRTSGVVTSCTGVLPQLSMVKYNCNKCNFVLGPFCQSQNQEVKPGSCPECQSAGPFEVNMEETIYQNYQRIRIQESPGKVAAGRLPRSKDAILLADLVDSCKPGDEIELTGIYHNNYDGSLNTANGFPVFATVILANHVAKKDNKVAVGELTDEDVKMITSLSKDQQIGEKIFASIAPSIYGHEDIKRGLALALFGGEPKNPGGKHKVRGDINVLLCGDPGTAKSQFLKYIEKVSSRAIFTTGQGASAVGLTAYVQRHPVSREWTLEAGALVLADRGVCLIDEFDKMNDQDRTSIHEAMEQQSISISKAGIVTSLQARCTVIAAANPIGGRYDPSLTFSENVDLTEPIISRFDILCVVRDTVDPVQDEMLARFVVGSHVRHHPSNKEEEGLANGSAAEPAMPNTYGVEPLPQEVLKKYIIYAKERVHPKLNQMDQDKVAKMYSDLRKESMATGSIPITVRHIESMIRMAEAHARIHLRDYVIEDDVNMAIRVMLESFIDTQKFSVMRSMRKTFARYLSFRRDNNELLLFILKQLVAEQVTYQRNRFGAQQDTIEVPEKDLVDKARQINIHNLSAFYDSELFRMNKFSHDLKRKMILQQF

SEQ ID NO: 2430 - protein, 207 aa, Homo sapiens
MTSRKKVLLKVIILGDSGVGKTSLMNQYVNKKFSNQYKATIGADFLTKEVMVDDRLVTMQIWDTAGQERFQSLGVAFYRGADCCVLVFDVTAPNTFKTLDSWRDEFLIQASPRDPENFPFVVLGNKIDLENRQVATKRAQAWCYSKNNIPYFETSAKEAINVEQAFQTIARNALKQETEVELYNEFPEPIKLDKNDRAKASAESCSC

SEQ ID NO: 2431 - protein, 1074 aa, Homo sapiens
MIPICPVVSFTYVPSRLGEDAKMATGNYFGFTHSGAAAAAAAAQYSQQPASGVAYSHPTTVASYTVHQAPVAAHTVTAAYAPAAATVAVARPAPVAVAAAATAAAYGGYPTAHTATDYGYTQRQQEAPPPPPPATTQNYQDSYSYVRSTAPAVAYDSKQYYQQPTATAAAVAAAAQPQPSVAETYYQTAPKAGYSQGATQYTQAQQTRQVTAIKPATPSPATTTFSIYPVSSTVQPVAAAATVVPSYTQSATYSTTAVTYSGTSYSGYEAAVYSAASSYYQQQQQQQKQAAAAAAAAAATAAWTGTTFTKKAPFQNKQLKPKQPPKPPQIHYCDVCKISCAGPQTYKEHLEGQKHKKKEAALKASQNTSSSNSSTRGTQNQLRCELCDVSCTGADAYAAHIRGAKHQKVVKLHTKLGKPIPSTEPNVVSQATSSTAVSASKPTASPSSIAANNCTVNTSSVATSSMKGLTTTGNSSLNSTSNTKVSAVPTNMAAKKTSTPKINFVGGNKLQSTGNKAEDIKGTECVKSTPVTSAVQIPEVKQDTVSEPVTPASLAALQSDVQPVGHDYVEEVRNDEGKVIRFHCKLCECSFNDPNAKEMHLKGRRHRLQYKKKVNPDLQVEVKPSIRARKIQEEKMRKQMQKEEYWRRREEEERWRMEMRRYEEDMYWRRMEEEQHHWDDRRRMPDGGYPHGPPGPLGLLGVRPGMPPQPQGPAPLRRPDSSDDRYVMTKHATIYPTEEELQAVQKIVSITERALKLVSDSLSEHEKNKNKEGDDKKEGGKDRALKGVLRVGVLAKGLLLRGDRNVNLVLLCSEKPSKTLLSRIAENLPKQLAVISPEKYDIKCAVSEAAIILNSCVEPKMQVTITLTSPIIREENMREGDVTSGMVKDPPDVLDRQKCLDALAALRHAKWFQARANGLQSCVIIIRILRDLCQRVPTWSDFPSWAMELLVEKAISSASSPQSPGDALRRVFECISSGIILKGSPGLLDPCEKDPFDTLATMTDQQREDITSSAQFALRLLAFRQIHKVLGMDPLPQMSQRFNIHNNRKRRRDSDGVDGFEAEGKKDKKDYDNF

SEQ ID NO: 2432 - protein, 298 aa, Homo sapiens
MTSLTQRSSGLVQRRTEASRNAADKERAAGGGAGSSEDDAQSRRDEQDDDDKGDSKETRLTLMEEVLLLGLKDREGYTSFWNDCISSGLRGCMLIELALRGRLQLEACGMRRKSLLTRKVICKSDAPTGDVLLDEALKHVKETQPPETVQNWIELLSGETWNPLKLHYQLRNVRERLAKNLVEKGVLTTEKQNFLLFDMTTHPLTNNNIKQRLIKKVQEAVLDKWVNDPHRMDRRLLALIYLAHASDVLENAFAPLLDEQYDLATKRVRQLLDLDPEVECLKANTNEVLWAVVAAFTK

SEQ ID NO: 2433 - protein, 790 aa, Homo sapiens
MRTYRYFLLLFWVGQPYPTLSTPLSKRTSGFPAKKRALELSGNSKNELNRSKRSWMWNQFFLLEEYTGSDYQYVGKLHSDQDRGDGSLKYILSGDGAGDLFIINENTGDIQATKRLDREEKPVYILRAQAINRRTGRPVEPESEFIIKIHDINDNEPIFTKEVYTATVPEMSDVGTFVVQVTATDADDPTYGNSAKVVYSILQGQPYFSVESETGIIKTALLNMDRENREQYQVVIQAKDMGGQMGGLSGTTTVNITLTDVNDNPPRFPQSTYQFKTPESSPPGTPIGRIKASDADVGENAEIEYSITDGEGLDMFDVITDQETQEGIITVKKLLDFEKKKVYTLKVEASNPYVEPRFLYLGPFKDSATVRIVVEDVDEPPVFSKLAYILQIREDAQINTTIGSVTAQDPDAARNPVKYSVDRHTDMDRIFNIDSGNGSIFTSKLLDRETLLWHNITVIATEINNPKQSSRVPLYIKVLDVNDNAPEFAEFYETFVCEKAKADQLIQTLHAVDKDDPYSGHQFSFSLAPEAASGSNFTIQDNKDNTAGILTRKNGYNRHEMSTYLLPVVISDNDYPVQSSTGTVTVRVCACDHHGNMQSCHAEALIHPTGLSTGALVAILLCIVILLVTVVLFAALRRQRKKEPLIISKEDIRDNIVSYNDEGGGEEDTQAFDIGTLRNPEAIEDNKLRRDIVPEALFLPRRTPTARDNTDVRDFINQRLKENDTDPTAPPYDSLATYAYEGTGSVADSLSSLESVTTDADQDYDYLSDWGPRFKKLADMYGGVDSDKDS

SEQ ID NO: 2434 - protein, 127 aa, Homo sapiens
MPKSKELVSSSSSGSDSDSEVDKKLKRKKQVAPEKPVKKQKTGETSRALSSSKQSSSSRDDNMFQIGKMRYVSVRDFKGKVLIDIREYWMDPEGEMKPGRKGISLNPEQWSQLKEQISDIDDAVRKL

SEQ ID NO: 2435 - protein, 541 aa, Homo sapiens
MPSLLVLTFSPCVLLGWALLAGGTGGGGVGGGGGGAGIGGGRQEREALPPQKIEVLVLLPQDDSYLFSLTRVRPAIEYALRSVEGNGTGRRLLPPGTRFQVAYEDSDCGNRALFSLVDRVAAARGAKPDLILGPVCEYAAAPVARLASHWDLPMLSAGALAAGFQHKDSEYSHLTRVAPAYAKMGEMMLALFRHHHWSRAALVYSDDKLERNCYFTLEGVHEVFQEEGLHTSIYSFDETKDLDLEDIVRNIQASERVVIMCASSDTIRSIMLVAHRHGMTSGDYAFFNIELFNSSSYGDGSWKRGDKHDFEAKQAYSSLQTVTLLRTVKPEFEKFSMEVKSSVEKQGLNMEDYVNMFVEGFHDAILLYVLALHEVLRAGYSKKDGGKIIQQTWNRTFEGIAGQVSIDANGDRYGDFSVIAMTDVEAGTQEVIGDYFGKEGRFEMRPNVKYPWGPLKLRIDENRIVEHTNSSPCKSSGGLEESAVTGIVVGALLGAGLLMAFYFFRKKYRITIERRTQQEESNLGKHRELREDSIRSHFSVA

SEQ ID NO: 2436 - protein, 3396 aa, Homo sapiens
MFINIKSILWMCSTLIVTHALHKVKVGKSPPVRGSLSGKVSLPCHFSTMPTLPPSYNTSEFLRIKWSKIEVDKNGKDLKETTVLVAQNGNIKIGQDYKGRVSVPTHPEAVGDASLTVVKLLASDAGLYRCDVMYGIEDTQDTVSLTVDGVVFHYRAATSRYTLNFEAAQKACLDVGAVIATPEQLFAAYEDGFEQCDAGWLADQTVRYPIRAPRVGCYGDKMGKAGVRTYGFRSPQETYDVYCYVDHLDGDVFHLTVPSKFTFEEAAKECENQDARLATVGELQAAWRNGFDQCDYGWLSDASVRHPVTVARAQCGGGLLGVRTLYRFENQTGFPPPDSRFDAYCFKPKEATTIDLSILAETASPSLSKEPQMVSDRTTPIIPLVDELPVIPTEFPPVGNIVSFEQKATVQPQAITDSLATKLPTPTGSTKKPWDMDDYSPSASGPLGKLDISEIKEEVLQSTTGVSHYATDSWDGVVEDKQTQESVTQIEQIEVGPLVTSMEILKHIPSKEFPVTETPLVTARMILESKTEKKMVSTVSELVTTGHYGFTLGEEDDEDRTLTVGSDESTLIFDQIPEVITVSKTSEDTIHTHLEDLESVSASTTVSPLIMPDNNGSSMDDWEERQTSGRITEEFLGKYLSTTPFPSQHRTEIELFPYSGDKILVEGISTVIYPSLQTEMTHRRERTETLIPEMRTDTYTDEIQEEITKSPFMGKTEEEVFSGMKLSTSLSEPIHVTESSVEMTKSFDFPTLITKLSAEPTEVRDMEEDFTATPGTTKYDENITTVLLAHGTLSVEAATVSKWSWDEDNTTSKPLESTEPSASSKLPPALLTTVGMNGKDKDIPSFTEDGADEFTLIPDSTQKQLEEVTDEDIAAHGKFTIRFQPTTSTGIAEKSTLRDSTTEEKVPPITSTEGQVYATMEGSALGEVEDVDLSKPVSTVPQFAHTSEVEGLAFVSYSSTQEPTTYVDSSHTIPLSVIPKTDWGVLVPSVPSEDEVLGEPSQDILVIDQTRLEATISPETMRTTKITEGTTQEEFPWKEQTAEKPVPALSSTAWTPKEAVTPLDEQEGDGSAYTVSEDELLTGSERVPVLETTPVGKIDHSVSYPPGAVTEHKVKTDEVVTLTPRIGPKVSLSPGPEQKYETEGSSTTGFTSSLSPFSTHITQLMEETTTEKTSLEDIDLGSGLFEKPKATELIEFSTIKVTVPSDITTAFSSVDRLHTTSAFKPSSAITKKPPLIDREPGEETTSDMVIIGESTSHVPPTTLEDIVAKETETDIDREYFTTSSPPATQPTRPPTVEDKEAFGPQALSTPQPPASTKFHPDINVYIIEVRENKTGRMSDLSVIGHPIDSESKEDEPCSEETDPVHDLMAEILPEFPDIIEIDLYHSEENEEEEEECANATDVTTTPSVQYINGKHLVTTVPKDPEAAEARRGQFESVAPSQNFSDSSESDTHPFVIAKTELSTAVQPNESTETTESLEVTWKPETYPETSEHFSGGEPDVFPTVPFHEEFESGTAKKGAESVTERDTEVGHQAHEHTEPVSLFPEESSGEIAIDQESQKIAFARATEVTFGEEVEKSTSVTYTPTIVPSSASAYVSEEEAVTLIGNPWPDDLLSTKESWVEATPRQVVELSGSSSIPITEGSGEAEEDEDTMFTMVTDLSQRNTTDTLITLDTSRIITESFFEVPATTIYPVSEQPSAKVVPTKFVSETDTSEWISSTTVEEKKRKEEEGTTGTASTFEVYSSTQRSDQLILPFELESPNVATSSDSGTRKSFMSLTTPTQSEREMTDSTPVFTETNTLENLGAQTTEHSSIHQPGVQEGLTTLPRSPASVFMEQGSGEAAADPETTTVSSFSLNVEYAIQAEKEVAGTLSPHVETTFSTEPTGLVLSTVMDRVVAENITQTSREIVISERLGEPNYGAEIRGFSTGFPLEEDFSGDFREYSTVSHPIAKEETVMMEGSGDAAFRDTQTSPSTVPTSVHISHISDSEGPSSTMVSTSAFPWEEFTSSAEGSGEQLVTVSSSVVPVLPSAVQKFSGTASSIIDEGLGEVGTVNEIDRRSTILPTAEVEGTKAPVEKEEVKVSGTVSTNFPQTIEPAKLWSRQEVNPVRQEIESETTSEEQIQEEKSFESPQNSPATEQTIFDSQTFTETELKTTDYSVLTTKKTYSDDKEMKEEDTSLVNMSTPDPDANGLESYTTLPEATEKSHFFLATALVTESIPAEHVVTDSPIKKEESTKHFPKGMRPTIQESDTELLFSGLGSGEEVLPTLPTESVNFTEVEQINNTLYPHTSQVESTSSDKIEDFNRMENVAKEVGPLVSQTDIFEGSGSVTSTTLIEILSDTGAEGPTVAPLPFSTDIGHPQNQTVRWAEEIQTSRPQTITEQDSNKNSSTAEINETTTSSTDFLARAYGFEMAKEFVTSAPKPSDLYYEPSGEGSGEVDIVDSFHTSATTQATRQESSTTFVSDGSLEKHPEVPSAKAVTADGFPTVSVMLPLHSEQNKSSPDPTSTLSNTVSYERSTDGSFQDRFREFEDSTLKPNRKKPTENIIIDLDKEDKDLILTITESTILEILPELTSDKNTIIDIDHTKPVYEDILGMQTDIDTEVPSEPHDSNDESNDDSTQVQEIYEAAVNLSLTEETFEGSADVLASYTQATHDESMTYEDRSQLDHMGFHFTTGIPAPSTETELDVLLPTATSLPIPRKSATVIPEIEGIKAEAKALDDMFESSTLSDGQAIADQSEIIPTLGQFERTQEEYEDKKHAGPSFQPEFSSGAEEALVDHTPYLSIATTHLMDQSVTEVPDVMEGSNPPYYTDTTLAVSTFAKLSSQTPSSPLTIYSGSEASGHTEIPQPSALPGIDVGSSVMSPQDSFKEIHVNIEATFKPSSEEYLHITEPPSLSPDTKLEPSEDDGKPELLEEMEASPTELIAVEGTEILQDFQNKTDGQVSGEAIKMFPTIKTPEAGTVITTADEIELEGATQWPHSTSASATYGVEAGVVPWLSPQTSERPTLSSSPEINPETQAALIRGQDSTIAASEQQVAARILDSNDQATVNPVEFNTEVATPPFSLLETSNETDFLIGINEESVEGTAIYLPGPDRCKMNPCLNGGTCYPTETSYVCTCVPGYSGDQCELDFDECHSNPCRNGATCVDGFNTFRCLCLPSYVGALCEQDTETCDYGWHKFQGQCYKYFAHRRTWDAAERECRLQGAHLTSILSHEEQMFVNRVGHDYQWIGLNDKMFEHDFRWTDGSTLQYENWRPNQPDSFFSAGEDCVVIIWHENGQWNDVPCNYHLTYTCKKGTVACGQPPVVENAKTFGKMKPRYEINSLIRYHCKDGFIQRHLPTIRCLGNGRWAIPKITCMNPSAYQRTYSMKYFKNSSSAKDNSINTSKHDHRWSRRWQESRR

SEQ ID NO: 2437 - protein, 1137 aa, Homo sapiens
MSRRKPASGGLAASSSAPARQAVLSRFFQSTGSLKSTSSSTGAADQVDPGAAAAAAAAAAAAPPAPPAPAFPPQLPPHIATEIDRRKKRPLENDGPVKKKVKKVQQKEGGSDLGMSGNSEPKKCLRTRNVSKSLEKLKEFCCDSALPQSRVQTESLQERFAVLPKCTDFDDISLLHAKNAVSSEDSKRQINQKDTTLFDLSQFGSSNTSHENLQKTASKSANKRSKSIYTPLELQYIEMKQQHKDAVLCVECGYKYRFFGEDAEIAARELNIYCHLDHNFMTASIPTHRLFVHVRRLVAKGYKVGVVKQTETAALKAIGDNRSSLFSRKLTALYTKSTLIGEDVNPLIKLDDAVNVDEIMTDTSTSYLLCISENKENVRDKKKGNIFIGIVGVQPATGEVVFDSFQDSASRSELETRMSSLQPVELLLPSALSEQTEALIHRATSVSVQDDRIRVERMDNIYFEYSHAFQAVTEFYAKDTVDIKGSQIISGIVNLEKPVICSLAAIIKYLKEFNLEKMLSKPENFKQLSSKMEFMTINGTTLRNLEILQNQTDMKTKGSLLWVLDHTKTSFGRRKLKKWVTQPLLKLREINARLDAVSEVLHSESSVFGQIENHLRKLPDIERGLCSIYHKKCSTQEFFLIVKTLYHLKSEFQAIIPAVNSHIQSDLLRTVILEIPELLSPVEHYLKILNEQAAKVGDKTELFKDLSDFPLIKKRKDEIQGVIDEIRMHLQEIRKILKNPSAQYVTVSGQEFMIEIKNSAVSCIPTDWVKVGSTKAVSRFHSPFIVENYRHLNQLREQLVLDCSAEWLDFLEKFSEHYHSLCKAVHHLATVDCIFSLAKVAKQGDYCRPTVQEERKIVIKNGRHPVIDVLLGEQDQYVPNNTDLSEDSERVMIITGPNMGGKSSYIKQVALITIMAQIGSYVPAEEATIGIVDGIFTRMGAADNIYKGQSTFMEELTDTAEIIRKATSQSLVILDELGRGTSTHDGIAIAYATLEYFIRDVKSLTLFVTHYPPVCELEKNYSHQVGNYHMGFLVSEDESKLDPGAAEQVPDFVTFLYQITRGIAARSYGLNVAKLADVPGEILKKAAHKSKELEGLINTKRKRLKYFAKLWTMHNAQDLQKWTEEFNMEETQTSLLH

SEQ ID NO: 2438 - protein, 729 aa, Homo sapiens
MGDYGFGVLVQSNTGNKSAFPVRFHPHLQPPHHHQNATPSPAAFINNNTAANGSSAGSAWLFPAPATHNIQDEILGSEKAKSQQQEQQDPLEKQQLSPSPGQEAGILPETEKAKSEENQGDNSSENGNGKEKIRIESPVLTGFDYQEATGLGTSTQPLTSSASSLTGFSNWSAAIAPSSSTIINEDASFFHQGGVPAASANNGALLFQNFPHHVSPGFGGSFSPQIGPLSQHHPHHPHFQHHHSQHQQQRRSPASPHPPPFTHRNAAFNQLPHLANNLNKPPSPWSSYQSPSPTPSSSWSPGGGGYGGWGGSQGRDHRRGLNGGITPLNSISPLKKNFASNHIQLQKYARPSSAFAPKSWMEDSLNRADNIFPFPDRPRTFDMHSLESSLIDIMRAENDTIKGRLNYSYPGSDSSLLINARTYGRRRGQSSLFPMEDGFLDDGRGDQPLHSGLGSPHCFSHQNGERVERYSRKVFVGGLPPDIDEDEITASFRRFGPLIVDWPHKAESKSYFPPKGYAFLLFQDESSVQALIDACIEEDGKLYLCVSSPTIKDKPVQIRPWNLSDSDFVMDGSQPLDPRKTIFVGGVPRPLRAVELAMIMDRLYGGVCYAGIDTDPELKYPKGAGRVAFSNQQSYIAAISARFVQLQHGEIDKRVEVKPYVLDDQLCDECQGARCGGKFAPFFCANVTCLQYYCEYCWAAIHSRAGREFHKPLVKEGGDRPRHISFRWN

SEQ ID NO: 2439 - protein, 302 aa, Homo sapiens
MCAERLGQFMTLALVLATFDPARGTDATNPPEGPQDRSSQQKGRLSLQNTAEIQHCLVNAGDVGCGVFECFENNSCEIRGLHGICMTFLHNAGKFDAQGKSFIKDALKCKAHALRHRFGCISRKCPAIREMVSQLQRECYLKHDLCAAAQENTRVIVEMIHFKDLLLHEPYVDLVNLLLTCGEEVKEAITHSVQVQCEQNWGSLCSILSFCTSAIQKPPTAPPERQPQVDRTKLSRAHHGEAGHHLPEPSSRETGRGAKGERGSKSHPNAHARGRVGGLGAQGPSGSSEWEDEQSEYSDIRR

SEQ ID NO: 2440 - protein, 145 aa, Homo sapiens
MKFNPFVTSDRSKNRKRHFNAPSHVRRKIMSSPLSKELRQKYNVRSMPIRKDDEVQVVRGHYKGQQIGKVVQVYRKKYVIYIERVQREKANGTTVHVGIHPSKVVITRLKLDKDRKKILERKAKSRQVGKEKGKYKEELIEKMQE

SEQ ID NO: 2441 - protein, 654 aa, Homo sapiens
MERSGPSEVTGSDASGPDPQLAVTMGFTGFGKKARTFDLEAMFEQTRRTAVERSRKTLEAREKEEEMNREKELRRQNEDIEPTSSRSNVVRDCSKSSSRDTSSSESEQSSDSSDDELIGPPLPPKMVGKPVNFMEEDILGPLPPPLNEEEEEAEEEEEEEEEEENPVHKIPDSHEITLKHGTKTVSALGLDPSGARLVTGGYDYDVKFWDFAGMDASFKAFRSLQPCECHQIKSLQYSNTGDMILVVSGSSQAKVIDRDGFEVMECIKGDQYIVDMANTKGHTAMLHTGSWHPKIKGEFMTCSNDATVRTWEVENPKKQKSVFKPRTMQGKKVIPTTCTYSRDGNLIAAACQNGSIQIWDRNLTVHPKFHYKQAHDSGTDTSCVTFSYDGNVLASRGGDDSLKLWDIRQFNKPLFSASGLPTMFPMTDCCFSPDDKLIVTGTSIQRGCGSGKLVFFERRTFQRVYEIDITDASVVRCLWHPKLNQIMVGTGNGLAKVYYDPNKSQRGAKLCVVKTQRKAKQAETLTQDYIITPHALPMFREPRQRSTRKQLEKDRLDPLKSHKPEPPVAGPGRGGRVGTHGGTLSSYIVKNIALDKTDDSNPREAILRHAKAAEDSPYWVSPAYSKTQPKTMFAQVESDDEEAKNEPEWKKRKI

SEQ ID NO: 2442 - protein, 980 aa, Homo sapiens
MKSLKAKFRKSDTNEWNKNDDRLLQAVENGDAEKVASLLGKKGASATKHDSEGKTAFHLAAAKGHVECLRVMITHGVDVTAQDTTGHSALHLAAKNSHHECIRKLLQSKCPAESVDSSGKTALHYAAAQGCLQAVQILCEHKSPINLKDLDGNIPLLLAVQNGHSEICHFLLDHGADVNSRNKSGRTALMLACEIGSSNAVEALIKKGADLNLVDSLGYNALHYSKLSENAGIQSLLLSKISQDADLKTPTKPKQHDQVSKISSERSGTPKKRKAPPPPISPTQLSDVSSPRSITSTPLSGKESVFFAEPPFKAEISSIRENKDRLSDSTTGADSLLDISSEADQQDLLSLLQAKVASLTLHNKELQDKLQAKSPKEAEADLSFDSYHSTQTDLGPSLGKPGETSPPDSKSSPSVLIHSLGKSTTDNDVRIQQLQEILQDLQKRLESSEAERKQLQVELQSRRAELVCLNNTEISENSSDLSQKLKETQSKYEEAMKEVLSVQKQMKLGLVSPESMDNYSHFHELRVTEEEINVLKQDLQNALEESERNKEKVRELEEKLVEREKGTVIKPPVEEYEEMKSSYCSVIENMNKEKAFLFEKYQEAQEEIMKLKDTLKSQMTQEASDEAEDMKEAMNRMIDELNKQVSELSQLYKEAQAELEDYRKRKSLEDVTAEYIHKAEHEKLMQLTNVSRAKAEDALSEMKSQYSKVLNELTQLKQLVDAQKENSVSITEHLQVITTLRTAAKEMEEKISNLKEHLASKEVEVAKLEKQLLEEKAAMTDAMVPRSSYEKLQSSLESEVSVLASKLKESVKEKEKVHSEVVQIRSEVSQVKREKENIQTLLKSKEQEVNELLQKFQQAQEELAEMKRYAESSSKLEEDKDKKINEMSKEVTKLKEALNSLSQLSYSTSSSKRQSQQLEALQQQVKQLQNQLAECKKQHQEVISVYRMHLLYAVQGQMDEDVQKVLKQILTMCKNQSQKK

SEQ ID NO: 2443 - protein, 723 aa, Homo sapiens
MFEEKASSPSGKMGGEEKPIGAGEEKQKEGGKKKNKEGSGDGGRAELNPWPEYIYTRLEMYNILKAEHDSILAEKAEKDSKPIKVTLPDGKQVDAESWKTTPYQIACGISQGLADNTVIAKVNNVVWDLDRPLEEDCTLELLKFEDEEAQAVYWHSSAHIMGEAMERVYGGCLCYGPPIENGFYYDMYLEEGGVSSNDFSSLEALCKKIIKEKQAFERLEVKKETLLAMFKYNKFKCRILNEKVNTPTTTVYRCGPLIDLCRGPHVRHTGKIKALKIHKNSSTYWEGKADMETLQRIYGISFPDPKMLKEWEKFQEEAKNRDHRKIGRDQELYFFHELSPGSCFFLPKGAYIYNALIEFIRSEYRKRGFQEVVTPNIFNSRLWMTSGHWQHYSENMFSFEVEKELFALKPMNCPGHCLMFDHRPRSWRELPLRLADFGVLHRNELSGALTGLTRVRRFQQDDAHIFCAMEQIEDEIKGCLDFLRTVYSVFGFSFKLNLSTRPEKFLGDIEVWDQAEKQLENSLNEFGEKWELNSGDGAFYGPKIDIQIKDAIGRYHQCATIQLDFQLPIRFNLTYVSHDGDDKKRPVIVHRAILGSVERMIAILTENYGGKWPFWLSPRQVMVVPVGPTCDEYAQKVRQQFHDAKFMADIDLDPGCTLNKKIRNAQLAQYNFILVVGEKEKISGTVNIRTRDNKVHGERTISETIERLQQLKEFRSKQAEEEF

SEQ ID NO: 2444 - protein, 542 aa, Homo sapiens
MTKSNGEEPKMGGRMERFQQGVRKRTLLAKKKVQNITKEDVKSYLFRNAFVLLTVTAVIVGTILGFTLRPYRMSYREVKYFSFPGELLMRMLQMLVLPLIISSLVTGMAALDSKASGKMGMRAVVYYMTTTIIAVVIGIIIVIIIHPGKGTKENMHREGKIVRVTAADAFLDLIRNMFPPNLVEACFKQFKTNYEKRSFKVPIQANETLVGAVINNVSEAMETLTRITEELVPVPGSVNGVNALGLVVFSMCFGFVIGNMKEQGQALREFFDSLNEAIMRLVAVIMWYAPVGILFLIAGKIVEMEDMGVIGGQLAMYTVTVIVGLLIHAVIVLPLLYFLVTRKNPWVFIGGLLQALITALGTSSSSATLPITFKCLEENNGVDKRVTRFVLPVGATINMDGTALYEALAAIFIAQVNNFELNFGQIITISITATAASIGAAGIPQAGLVTMVIVLTSVGLPTDDITLIIAVDWFLDRLRTTTNVLGDSLGAGIVEHLSRHELKNRDVEMGNSVIEENEMKKPYQLIAQDNETEKPIDSETKM

SEQ ID NO: 2445 - protein, 2201 aa, Homo sapiens
MGAMTQLLAGVFLAFLALATEGGVLKKVIRHKRQSGVNATLPEENQPVVFNHVYNIKLPVGSQCSVDLESASGEKDLAPPSEPSESFQEHTVDGENQIVFTHRINIPRRACGCAAAPDVKELLSRLEELENLVSSLREQCTAGAGCCLQPATGRLDTRPFCSGRGNFSTEGCGCVCEPGWKGPNCSEPECPGNCHLRGRCIDGQCICDDGFTGEDCSQLACPSDCNDQGKCVNGVCICFEGYAGADCSREICPVPCSEEHGTCVDGLCVCHDGFAGDDCNKPLCLNNCYNRGRCVENECVCDEGFTGEDCSELICPNDCFDRGRCINGTCYCEEGFTGEDCGKPTCPHACHTQGRCEEGQCVCDEGFAGVDCSEKRCPADCHNRGRCVDGRCECDDGFTGADCGELKCPNGCSGHGRCVNGQCVCDEGYTGEDCSQLRCPNDCHSRGRCVEGKCVCEQGFKGYDCSDMSCPNDCHQHGRCVNGMCVCDDGYTGEDCRDRQCPRDCSNRGLCVDGQCVCEDGFTGPDCAELSCPNDCHGQGRCVNGQCVCHEGFMGKDCKEQRCPSDCHGQGRCVDGQCICHEGFTGLDCGQHSCPSDCNNLGQCVSGRCICNEGYSGEDCSEVSPPKDLVVTEVTEETVNLAWDNEMRVTEYLVVYTPTHEGGLEMQFRVPGDQTSTIIQELEPGVEYFIRVFAILENKKSIPVSARVATYLPAPEGLKFKSIKETSVEVEWDPLDIAFETWEIIFRNMNKEDEGEITKSLRRPETSYRQTGLAPGQEYEISLHIVKNNTRGPGLKRVTTTRLDAPSQIEVKDVTDTTALITWFKPLAEIDGIELTYGIKDVPGDRTTIDLTEDENQYSIGNLKPDTEYEVSLISRRGDMSSNPAKETFTTGLDAPRNLRRVSQTDNSITLEWRNGKAAIDSYRIKYAPISGGDHAEVDVPKSQQATTKTTLTGLRPGTEYGIGVSAVKEDKESNPATINAATELDTPKDLQVSETAETSLTLLWKTPLAKFDRYRLNYSLPTGQWVGVQLPRNTTSYVLRGLEPGQEYNVLLTAEKGRHKSKPARVKASTEQAPELENLTVTEVGWDGLRLNWTAADQAYEHFIIQVQEANKVEAARNLTVPGSLRAVDIPGLKAATPYTVSIYGVIQGYRTPVLSAEASTGETPNLGEVVVAEVGWDALKLNWTAPEGAYEYFFIQVQEADTVEAAQNLTVPGGLRSTDLPGLKAATHYTITIRGVTQDFSTTPLSVEVLTEEVPDMGNLTVTEVSWDALRLNWTTPDGTYDQFTIQVQEADQVEEAHNLTVPGSLRSMEIPGLRAGTPYTVTLHGEVRGHSTRPLAVEVVTEDLPQLGDLAVSEVGWDGLRLNWTAADNAYEHFVIQVQEVNKVEAAQNLTLPGSLRAVDIPGLEAATPYRVSIYGVIRGYRTPVLSAEASTAKEPEIGNLNVSDITPESFNLSWMATDGIFETFTIEIIDSNRLLETVEYNISGAERTAHISGLPPSTDFIVYLSGLAPSIRTKTISATATTEALPLLENLTISDINPYGFTVSWMASENAFDSFLVTVVDSGKLLDPQEFTLSGTQRKLELRGLITGIGYEVMVSGFTQGHQTKPLRAEIVTEAEPEVDNLLVSDATPDGFRLSWTADEGVFDNFVLKIRDTKKQSEPLEITLLAPERTRDITGLREATEYEIELYGISKGRRSQTVSAIATTAMGSPKEVIFSDITENSATVSWRAPTAQVESFRITYVPITGGTPSMVTVDGTKTQTRLVKLIPGVEYLVSIIAMKGFEESEPVSGSFTTALDGPSGLVTANITDSEALARWQPAIATVDSYVISYTGEKVPEITRTVSGNTVEYALTDLEPATEYTLRIFAEKGPQKSSTITAKFTTDLDSPRDLTATEVQSETALLTWRPPRASVTGYLLVYESVDGTVKEVIVGPDTTSYSLADLSPSTHYTAKIQALNGPLRSNMIQTIFTTIGLLYPFPKDCSQAMLNGDTTSGLYTIYLNGDKAEALEVFCDMTSDGGGWIVFLRRKNGRENFYQNWKAYAAGFGDRREEFWLGLDNLNKITAQGQYELRVDLRDHGETAFAVYDKFSVGDAKTRYKLKVEGYSGTAGDSMAYHNGRSFSTFDKDTDSAITNCALSYKGAFWYRNCHRVNLMGRYGDNNHSQGVNWFHWKGHEHSIQFAEMKLRPSNFRNLEGRRKRA

SEQ ID NO: 2446 - protein, 352 aa, Homo sapiens
MRSLGALLLLLSACLAVSAGPVPTPPDNIQVQENFNISRIYGKWYNLAIGSTCPWLKKIMDRMTVSTLVLGEGATEAEISMTSTRWRKGVCEETSGAYEKTDTDGKFLYHKSKWNITMESYVVHTNYDEYAIFLTKKFSRHHGPTITAKLYGRAPQLRETLLQDFRVVAQGVGIPEDSIFTMADRGECVPGEQEPEPILIPRVRRAVLPQEEEGSGGGQLVTEVTKKEDSCQLGYSAGPCMGMTSRYFYNGTSMACETFQYGGCMGNGNNFVTEKECLQTCRTVAACNLPIVRGPCRAFIQLWAFDAVKGKCVLFPYGGCQGNGNKFYSEKECREYCGVPGDGDEELLRFSN

SEQ ID NO: 2447 - protein, 414 aa, Homo sapiens
MVLGKVKSLTISFDCLNDSNVPVYSSGDTVSGRVNLEVTGEIRVKSLKIHARGHAKVRWTESRNAGSNTAYTQNYTEEVEYFNHKDILIGHERDDDNSEEGFHTIHSGRHEYAFSFELPQTPLATSFEGRHGSVRYWVKAELHRPWLLPVKLKKEFTVFEHIDINTPSLLSPQAGTKEKTLCCWFCTSGPISLSAKIERKGYTPGESIQIFAEIENCSSRMVVPKAAIYQTQAFYAKGKMKEVKQLVANLRGESLSSGKTETWNGKLLKIPPVSPSILDCSIIRVEYSLMVYVDIPGAMDLFLNLPLVIGTIPLHPFGSRTSSVSSQCSMNMNWLSLSLPERPEAPPSYAEVVTEEQRRNNLAPVSACDDFERALQGPLFAYIQEFRFLPPPLYSEIDPNPDQSADDRPSCPSR

SEQ ID NO: 2448 - protein, 957 aa, Homo sapiens
MNFAEREGSKRYCIQTKHVAILCAVVVGVGLIVGLAVGLTRSCDSSGDGGPGTAPAPSHLPSSTASPSGPPAQDQDICPASEDESGQWKNFRLPDFVNPVHYDLHVKPLLEEDTYTGTVSISINLSAPTRYLWLHLRETRITRLPELKRPSGDQVQVRRCFEYKKQEYVVVEAEEELTPSSGDGLYLLTMEFAGWLNGSLVGFYRTTYTENGQVKSIVATDHEPTDARKSFPCFDEPNKKATYTISITHPKEYGALSNMPVAKEESVDDKWTRTTFEKSVPMSTYLVCFAVHQFDSVKRISNSGKPLTIYVQPEQKHTAEYAANITKSVFDYFEEYFAMNYSLPKLDKIAIPDFGTGAMENWGLITYRETNLLYDPKESASSNQQRVATVVAHELVHQWFGNIVTMDWWEDLWLNEGFASFFEFLGVNHAETDWQMRDQMLLEDVLPVQEDDSLMSSHPIIVTVTTPDEITSVFDGISYSKGSSILRMLEDWIKPENFQKGCQMYLEKYQFKNAKTSDFWAALEEASRLPVKEVMDTWTRQMGYPVLNVNGVKNITQKRFLLDPRANPSQPPSDLGYTWNIPVKWTEDNITSSVLFNRSEKEGITLNSSNPSGNAFLKINPDHIGFYRVNYEVATWDSIATALSLNHKTFSSADRASLIDDAFALARAQLLDYKVALNLTKYLKREENFLPWQRVISAVTYIISMFEDDKELYPMIEEYFQGQVKPIADSLGWNDAGDHVTKLLRSSVLGFACKMGDREALNNASSLFEQWLNGTVSLPVNLRLLVYRYGMQNSGNEISWNYTLEQYQKTSLAQEKEKLLYGLASVKNVTLLSRYLDLLKDTNLIKTQDVFTVIRYISYNSYGKNMAWNWIQLNWDYLVNRYTLNNRNLGRIVTIAEPFNTELQLWQMESFFAKYPQAGAGEKPREQVLETVKNNIEWLKQHRNTIREWFFNLLESG

SEQ ID NO: 2449 - protein, 1207 aa, Homo sapiens
MLLTLIILLPVVSKFSFVSLSAPQHWSCPEGTLAGNGNSTCVGPAPFLIFSHGNSIFRIDTEGTNYEQLVVDAGVSVIMDFHYNEKRIYWVDLERQLLQRVFLNGSRQERVCNIEKNVSGMAINWINEEVIWSNQQEGIITVTDMKGNNSHILLSALKYPANVAVDPVERFIFWSSEVAGSLYRADLDGVGVKALLETSEKITAVSLDVLDKRLFWIQYNREGSNSLICSCDYDGGSVHISKHPTQHNLFAMSLFGDRIFYSTWKMKTIWIANKHTGKDMVRINLHSSFVPLGELKVVHPLAQPKAEDDTWEPEQKLCKLRKGNCSSTVCGQDLQSHLCMCAEGYALSRDRKYCEDVNECAFWNHGCTLGCKNTPGSYYCTCPVGFVLLPDGKRCHQLVSCPRNVSECSHDCVLTSEGPLCFCPEGSVLERDGKTCSGCSSPDNGGCSQLCVPLSPVSWECDCFPGYDLQLDEKSCAASGPQPFLLFANSQDIRHMHFDGTDYGTLLSQQMGMVYALDHDPVENKIYFAHTALKWIERANMDGSQRERLIEEGVDVPEGLAVDWIGRRFYWTDRGKSLIGRSDLNGKRSKIITKENISQPRGIAVHPMAKRLFWTDTGINPRIESSSLQGLGRLVIASSDLIWPSGITIDFLTDKLYWCDAKQSVIEMANLDGSKRRRLTQNDVGHPFAVAVFEDYVWFSDWAMPSVMRVNKRTGKDRVRLQGSMLKPSSLVVVHPLAKPGADPCLYQNGGCEHICKKRLGTAWCSCREGFMKASDGKTCLALDGHQLLAGGEVDLKNQVTPLDILSKTRVSEDNITESQHMLVAEIMVSDQDDCAPVGCSMYARCISEGEDATCQCLKGFAGDGKLCSDIDECEMGVPVCPPASSKCINTEGGYVCRCSEGYQGDGIHCLDIDECQLGEHSCGENASCTNTEGGYTCMCAGRLSEPGLICPDSTPPPHLREDDHHYSVRNSDSECPLSHDGYCLHDGVCMYIEALDKYACNCVVGYIGERCQYRDLKWWELRHAGHGQQQKVIVVAVCVVVLVMLLLLSLWGAHYYRTQKLLSKNPKNPYEESSRDVRSRRPADTEDGMSSCPQPWFVVIKEHQDLKNGGQPVAGEDGQAADGSMQPTSWRQEPQLCGMGTEQGCWIPVSSDKGSCPQVMERSFHMPSYGTQTLEGGVEKPHSLLSANPLWQQRALDPPHQMELTQ

SEQ ID NO: 2450 - protein, 624 aa, Homo sapiens
MEIPGSLCKKVKLSNNAQNWGMQRATNVTYQAHHVSRNKRGQVVGTRGGFRGCTVWLTGLSGAGKTTVSMALEEYLVCHGIPCYTLDGDNIRQGLNKNLGFSPEDREENVRRIAEVAKLFADAGLVCITSFISPYTQDRNNARQIHEGASLPFFEVFVDAPLHVCEQRDVKGLYKKARAGEIKGFTGIDSEYEKPEAPELVLKTDSCDVNDCVQQVVELLQERDIVPVDASYEVKELYVPENKLHLAKTDAETLPALKINKVDMQWVQVLAEGWATPLNGFMREREYLQCLHFDCLLDGGVINLSVPIVLTATHEDKERLDGCTAFALMYEGRRVAILRNPEFFEHRKEERCARQWGTTCKNHPYIKMVMEQGDWLIGGDLQVLDRVYWNDGLDQYRLTPTELKQKFKDMNADAVFAFQLRNPVHNGHALLMQDTHKQLLERGYRRPVLLLHPLGGWTKDDDVPLMWRMKQHAAVLEEGVLNPETTVVAIFPSPMMYAGPTEVQWHCRARMVAGANFYIVGRDPAGMPHPETGKDLYEPSHGAKVLTMAPGLITLEIVPFRVAAYNKKKKRMDYYDSEHHEDFEFISGTRMRKLAREGQKPPEGFMAPKAWTVLTEYYKSLEKA

SEQ ID NO: 2451 - protein, 1268 aa, Homo sapiens
MSAPAGSSHPAASARIPPKFGGAAVSGAAAPAGPGAGPAPHQQNGPAQNQMQVPSGYGLHHQNYIAPSGHYSQGPGKMTSLPLDTQCGDYYSALYTVPTQNVTPNTVNQQPGAQQLYSRGPPAPHIVGSTLGSFQGAASSASHLHTSASQPYSSFVNHYNSPAMYSASSSVASQGFPSTCGHYAMSTVSNAAYPSVSYPSLPAGDTYGQMFTSQNAPTVRPVKDNSFSGQNTAISHPSPLPPLPSQQHHQQQSLSGYSTLTWSSPGLPSTQDNLIRNHTGSLAVANNNPTITVADSLSCPVMQNVQPPKSSPVVSTVLSGSSGSSSTRTPPTANHPVEPVTSVTQPSELLQQKGVQYGEYVNNQASSAPTPLSSTSDDEEEEEEDEEAGVDSSSTTSSASPMPNSYDALEGGSYPDMLSSSASSPAPDPAPEPDPASAPAPASAPAPVVPQPSKMAKPFGYGYPTLQPGYQNATAPLISGVQPSNPVYSGFQQYPQQYPGVNQLSSSIGGLSLQSSPQPESLRPVNLTQERNILPMTPVWAPVPNLNADLKKLNCSPDSFRCTLTNIPQTQALLNKAKLPLGLLLHPFRDLTQLPVITSNTIVRCRSCRTYINPFVSFIDQRRWKCNLCYRVNDVPEEFMYNPLTRSYGEPHKRPEVQNSTVEFIASSDYMLRPPQPAVYLFVLDVSHNAVEAGYLTILCQSLLENLDKLPGDSRTRIGFMTFDSTIHFYNLQEGLSQPQMLIVSDIDDVFLPTPDSLLVNLYESKELIKDLLNALPNMFTNTRETHSALGPALQAAFKLMSPTGGRVSVFQTQLPSLGAGLLQSREDPNQRSSTKVVQHLGPATDFYKKLALDCSGQQTAVDLFLLSSQYSDLASLACMSKYSAGCIYYYPSFHYTHNPSQAEKLQKDLKRYLTRKIGFEAVMRIRCTKGLSMHTFHGNFFVRSTDLLSLANINPDAGFAVQLSIEESLTDTSLVCFQTALLYTSSKGERRIRVHTLCLPVVSSLADVYAGVDVQAAICLLANMAVDRSVSSSLSDARDALVNAVVDSLSAYGSTVSNLQHSALMAPSSLKLFPLYVLALLKQKAFRTGTSTRLDDRVYAMCQIKSQPLVHLMKMIHPNLYRIDRLTDEGAVHVNDRIVPQPPLQKLSAEKLTREGAFLMDCGSVFYIWVGKGCDNNFIEDVLGYTNFASIPQKMTHLPELDTLSSERARSFITWLRDSRPLSPILHIVKDESPAKAEFFQHLIEDRTEAAFSYYEFLLHVQQQICK

SEQ ID NO: 2452 - protein, 127 aa, Homo sapiens
MKDPSRSSTSPSIINEDVIINGHSHEDDNPFAEYMWMENEEEFNRQIEEELWEEEFIERCFQEMLEEEEEHEWFIPARDLPQTMDQIQDQFNDLVISDGSSLEDLVVKSNLNPNAKEFVPGVKYGNI

SEQ ID NO: 2453 - protein, 461 aa, Homo sapiens
MAPQSLPSSRMAPLGMLLGLLMAACFTFCLSHQNLKEFALTNPEKSSTKETERKETKAEEELDAEVLEVFHPTHEWQALQPGQAVPAGSHVRLNLQTGEREAKLQYEDKFRNNLKGKRLDINTNTYTSQDLKSALAKFKEGAEMESSKEDKARQAEVKRLFRPIEELKKDFDELNVVIETDMQIMVRLINKFNSSSSSLEEKIAALFDLEYYVHQMDNAQDLLSFGGLQVVINGLNSTEPLVKEYAAFVLGAAFSSNPKVQVEAIEGGALQKLLVILATEQPLTAKKKVLFALCSLLRHFPYAQRQFLKLGGLQVLRTLVQEKGTEVLAVRVVTLLYDLVTEKMFAEEEAELTQEMSPEKLQQYRQVHLLPGLWEQGWCEITAHLLALPEHDAREKVLQTLGVLLTTCRDRYRQDPQLGRTLASLQAEYQVLASLELQDGEDEGYFQELLGSVNSLLKELR

SEQ ID NO: 2454 - protein, 658 aa, Homo sapiens
MGRRRAPAGGSLGRALMRHQTQRSRSHRHTDSWLHTSELNDGYDWGRLNLQSVTEQSSLDDFLATAELAGTEFVAEKLNIKFVPAEARTGLLSFEESQRIKKLHEENKQFLCIPRRPNWNQNTTPEELKQAEKDNFLEWRRQLVRLEEEQKLILTPFERNLDFWRQLWRVIERSDIVVQIVDARNPLLFRCEDLECYVKEMDANKENVILINKADLLTAEQRSAWAMYFEKEDVKVIFWSALAGAIPLNGDSEEEANRDDRQSNTTKFGHSSFDQAEISHSESEHLPARDSPSLSENPTTDEDDSEYEDCPEEEEDDWQTCSEEDGPKEEDCSQDWKESSTADSEARSRKTPQKRQIHNFSHLVSKQELLELFKELHTGRKVKDGQLTVGLVGYPNVGKSSTINTIMGNKKVSVSATPGHTKHFQTLYVEPGLCLCDCPGLVMPSFVSTKAEMTCSGILPIDQMRDHVPPVSLVCQNIPRHVLEATYGINIITPREDEDPHRPPTSEELLTAYGYMRGFMTAHGQPDQPRSARYILKDYVSGKLLYCHPPPGRDPVTFQHQHQRLLENKMNSDEIKMQLGRNKKAKQIENIVDKTFFHQENVRALTKGVQAVMGYKPGSGVVTASTASSENGAGKPWKKHGNRNKKEKSRRLYKHLDM

SEQ ID NO: 2455 - protein, 178 aa, Homo sapiens
MADGKAGDEKPEKSQRAGAAGGPEEEAEKPVKTKTVSSSNGGESSSRSAEKRSAEEEAADLPTKPTKISKFGFAIGSQTTKKASAISIKLGSSKPKETVPTLAPKTLSVAAAFNEDEDSEPEEMPPEAKMRMKNIGRDTPTSAGPNSFNKGKHGFSDNQKLWERNIKSHLGNVHDQDN

SEQ ID NO: 2456 - protein, 1060 aa, Homo sapiens
MLIEDVDALKSWLAKLLEPICDADPSALANYVVALVKKDKPEKELKAFCADQLDVFLQKETSGFVDKLFESLYTKNYLPLLEPVKPEPKPLVQEKEEIKEEVFQEPAEEERDGRKKKYPSPQKTRSESSERRTREKKREDGKWRDYDRYYERNELYREKYDWRRGRSKSRSKSRGLSRSRSRSRGRSKDRDPNRNVEHRERSKFKSERNDLESSYVPVSAPPPNSSEQYSSGAQSIPSTVTVIAPAHHSENTTESWSNYYNNHSSSNSFGRNLPPKRRCRDYDERGFCVLGDLCQFDHGNDPLVVDEVALPSMIPFPPPPPGLPPPPPPGMLMPPMPGPGPGPGPGPGPGPGPGPGPGHSMRLPVPQGHGQPPPSVVLPIPRPPITQSSLINSRDQPGTSAVPNLASVGTRLPPPLPQNLLYTVSERQPMYSREHGAAASERLQLGTPPPLLAARLVPPRNLMGSSIGYHTSVSSPTPLVPDTYEPDGYNPEAPSITSSGRSQYRQFFSRTQTQRPNLIGLTSGDMDVNPRAANIVIQTEPPVPVSINSNITRVVLEPDSRKRAMSGLEGPLTKKPWLGKQGNNNQNKPGFLRKNQYTNTKLEVKKIPQELNNITKLNEHFSKFGTIVNIQVAFKGDPEAALIQYLTNEEARKAISSTEAVLNNRFIRVLWHRENNEQPTLQSSAQLLLQQQQTLSHLSQQHHHLPQHLHQQQVLVAQSAPSTVHGGIQKMMSKPQTSGAYVLNKVPVKHRLGHAGGNQSDASHLLNQSGGAGEDCQIFSTPGHPKMIYSSSNLKTPSKLCSGSKSHDVQEVLKKKQEAMKLQQDMRKKRQEVLEKQIECQKMLISKLEKNKNMKPEERANIMKTLKELGEKISQLKDELKTSSAVSTPSKVKTKTEAQKELLDTELDLHKRLSSGEDTTELRKKLSQLQVEAARLGILPVGRGKTMSSQGRGRGRGRGGRGRGSLNHMVVDHRPKALTVGGFIEEEKEDLLQHFSTANQGPKFKDRRLQISWHKPKVPSISTETEEEEVKEEETETSDLFLPDDDDEDEDEYESRSWRR

SEQ ID NO: 2457 - protein, 828 aa, Homo sapiens
MDESALTLGTIDVSYLPHSSEYSVGRCKHTSEEWGECGFRPTIFRSATLKWKESLMSRKRPFVGRCCYSCTPQSWDKFFNPSIPSLGLRNVIYINETHTRHRGWLARRLSYVLFIQERDVHKGMFATNVTENVLNSSRVQEAIAEVAAELNPDGSAQQQSKAVNKVKKKAKRILQEMVATVSPAMIRLTGWVLLKLFNSFFWNIQIHKGQLEMVKAATETNLPLLFLPVHRSHIDYLLLTFILFCHNIKAPYIASGNNLNIPIFSTLIHKLGGFFIRRRLDETPDGRKDVLYRALLHGHIVELLRQQQFLEIFLEGTRSRSGKTSCARAGLLSVVVDTLSTNVIPDILIIPVGISYDRIIEGHYNGEQLGKPKKNESLWSVARGVIRMLRKNYGCVRVDFAQPFSLKEYLESQSQKPVSALLSLEQALLPAILPSRPSDAADEGRDTSINESRNATDESLRRRLIANLAEHILFTASKSCAIMSTHIVACLLLYRHRQGIDLSTLVEDFFVMKEEVLARDFDLGFSGNSEDVVMHAIQLLGNCVTITHTSRNDEFFITPSTTVPSVFELNFYSNGVLHVFIMEAIIACSLYAVLNKRGLGGPTSTPPNLISQEQLVRKAASLCYLLSNEGTISLPCQTFYQVCHETVGKFIQYGILTVAEHDDQEDISPSLAEQQWDKKLPEPLSWRSDEEDEDSDFGEEQRDCYLKVSQSKEHQQFITFLQRLLGPLLEAYSSAAIFVHNFSGPVPEPEYLQKLHKYLITRTERNVAVYAESATYCLVKNAVKMFKDIGVFKETKQKRVSVLELSSTFLPQCNRQKLLEYILSFVVL

SEQ ID NO: 2458 - protein, 440 aa, Homo sapiens
MNYSLHLAFVCLSLFTERMCIQGSQFNVEVGRSDKLSLPGFENLTAGYNKFLRPNFGGEPVQIALTLDIASISSISESNMDYTATIYLRQRWMDQRLVFEGNKSFTLDARLVEFLWVPDTYIVESKKSFLHEVTVGNRLIRLFSNGTVLYALRITTTVACNMDLSKYPMDTQTCKLQLESWGYDGNDVEFTWLRGNDSVRGLEHLRLAQYTIERYFTLVTRSQQETGNYTRLVLQFELRRNVLYFILETYVPSTFLVVLSWVSFWISLDSVPARTCIGVTTVLSMTTLMIGSRTSLPNTNCFIKAIDVYLGICFSFVFGALLEYAVAHYSSLQQMAAKDRGTTKEVEEVSITNIINSSISSFKRKISFASIEISSDNVDYSDLTMKTSDKFKFVFREKMGRIVDYFTIQNPSNVDHYSKLLFPLIFMLANVFYWAYYMYF

SEQ ID NO: 2459 - protein, 757 aa, Homo sapiens
MDSLFVEEVAASLVREFLSRKGLKKTCVTMDQERPRSDLSINNRNDLRKVLHLEFLYKENKAKENPLKTSLELITRYFLDHFGNTANNFTQDTPIPALSVPKKNNKVPSRCSETTLVNIYDLSDEDAGWRTSLSETSKARHDNLDGDVLGNFVSSKRPPHKSKPMQTVPGETPVLTSAWEKIDKLHSEPSLDVKRMGENSRPKSGLIVRGMMSGPIASSPQDSFHRHYLRRSSPSSSSTQPQEESRKVPELFVCTQQDILASSNSSPSRTSLGQLSELTVERQKTTASSPPHLPSKRLPPWDRARPRDPSEDTPAVDGSTDTDRMPLKLYLPGGNSRMTQERLERAFKRQGSQPAPVRKNQLLPSDKVDGELGALRLEDVEDELIREEVILSPVPSVLKLQTASKPIDLSVAKEIKTLLFGSSFCCFNEEWKLQSFSFSNTASLKYGIVQNKGGPCGVLAAVQGCVLQKLLFEGDSKADCAQGLQPSDAHRTRCLVLALADIVWRAGGRERAVVALASRTQQFSPTGKYKADGVLETLTLHSLTCYEDLVTFLQQSIHQFEVGPYGCILLTLSAILSRSTELIRQDFDVPTSHLIGAHGYCTQELVNLLLTGKAVSNVFNDVVELDSGDGNITLLRGIAARSDIGFLSLFEHYNMCQVGCFLKTPRFPIWVVCSESHFSILFSLQPGLLRDWRTERLFDLYYYDGLANQQEQIRLTIDTTQTISEDTDNDLVPPLELCIRTKWKGASVNWNGSDPIL

SEQ ID NO: 2460 - protein, 148 aa, Homo sapiens
MFRRPVLQVLRQFVRHESETTTSLVLERSLNRVHLLGRVGQDPVLRQVEGKNPVTIFSLATNEMWRSGDSEVYQLGDVSQKTTWHRISVFRPGLRDVAYQYVKKGSRIYLEGKIDYGEYMDKNNVRRQATTIIADNIIFLSDQTKEKE

SEQ ID NO: 2461 - protein, 842 aa, Homo sapiens
MVTVGNYCEAEGPVGPAWMQDGLSPCFFFTLVPSTRMALGTLALVLALPCRRRERPAGADSLSWGAGPRISPYVLQLLLATLQAALPLAGLAGRVGTARGAPLPSYLLLASVLESLAGACGLWLLVVERSQARQRLAMGIWIKFRHSPGLLLLWTVAFAAENLALVSWNSPQWWWARADLGQQVQFSLWVLRYVVSGGLFVLGLWAPGLRPQSYTLQVHEEDQDVERSQVRSAAQQSTWRDFGRKLRLLSGYLWPRGSPALQLVVLICLGLMGLERALNVLVPIFYRNIVNLLTEKAPWNSLAWTVTSYVFLKFLQGGGTGSTGFVSNLRTFLWIRVQQFTSRRVELLIFSHLHELSLRWHLGRRTGEVLRIADRGTSSVTGLLSYLVFNVIPTLADIIIGIIYFSMFFNAWFGLIVFLCMSLYLTLTIVVTEWRTKFRRAMNTQENATRARAVDSLLNFETVKYYNAESYEVERYREAIIKYQGLEWKSSASLVLLNQTQNLVIGLGLLAGSLLCAYFVTEQKLQVGDYVLFGTYIIQLYMPLNWFGTYYRMIQTNFIDMENMFDLLKEETEVKDLPGAGPLRFQKGRIEFENVHFSYADGRETLQDVSFTVMPGQTLALVGPSGAGKSTILRLLFRFYDISSGCIRIDGQDISQVTQASLRSHIGVVPQDTVLFNDTIADNIRYGRVTAGNDEVEAAAQAAGIHDAIMAFPEGYRTQVGERGLKLSGGEKQRVAIARTILKAPGIILLDEATSALDTSNERAIQASLAKVCANRTTIVVAHRLSTVVNADQILVIKDGCIVERGRHEALLSRGGVYADMWQLQQGQEETSEDTKPQTMER

SEQ ID NO: 2462 - protein, 303 aa, Homo sapiens
MASWAKGRSYLAPGLLQGQVAIVTGGATGIGKAIVKELLELGSNVVIASRKLERLKSAADELQANLPPTKQARVIPIQCNIRNEEEVNNLVKSTLDTFGKINFLVNNGGGQFLSPAEHISSKGWHAVLETNLTGTFYMCKAVYSSWMKEHGGSIVNIIVPTKAGFPLAVHSGAARAGVYNLTKSLALEWACSGIRINCVAPGVIYSQTAVENYGSWGQSFFEGSFQKIPAKRIGVPEEVSSVVCFLLSPAASFITGQSVDVDGGRSLYTHSYEVPDHDNWPKGAGDLSVVKKMKETFKEKAKL

SEQ ID NO: 2463 - protein, 283 aa, Homo sapiens
MAVPPTYADLGKSARDVFTKGYGFGLIKLDLKTKSENGLEFTSSGSANTETTKVTGSLETKYRWTEYGLTFTEKWNTDNTLGTEITVEDQLARGLKLTFDSSFSPNTGKKNAKIKTGYKREHINLGCDMDFDIAGPSIRGALVLGYEGWLAGYQMNFETAKSRVTQSNFAVGYKTDEFQLHTNVNDGTEFGGSIYQKVNKKLETAVNLAWTAGNSNTRFGIAAKYQIDPDACFSAKVNNSSLIGLGYTQTLKPGIKLTLSALLDGKNVNAGGHKLGLGLEFQA

SEQ ID NO: 2464 - protein, 152 aa, Homo sapiens
MSTPARRRLMRDFKRLQEDPPVGVSGAPSENNIMQWNAVIFGPEGTPFEDGTFKLVIEFSEEYPNKPPTVRFLSKMFHPNVYADGSICLDILQNRWSPTYDVSSILTSIQSLLDEPNPNSPANSQAAQLYQENKREYEKRVSAIVEQSWNDS

SEQ ID NO: 2465 - protein, 842 aa, Homo sapiens
MKPGGFWLHLTLLGASLPAALGWMDPGTSRGPDVGVGESQAEEPRSFEVTRREGLSSHNELLASCGKKFCSRGSRCVLSRKTGEPECQCLEACRPSYVPVCGSDGRFYENHCKLHRAACLLGKRITVIHSKDCFLKGDTCTMAGYARLKNVLLALQTRLQPLQEGDSRQDPASQKRLLVESLFRDLDADGNGHLSSSELAQHVLKKQDLDEDLLGCSPGDLLRFDDYNSDSSLTLREFYMAFQVVQLSLAPEDRVSVTTVTVGLSTVLTCAVHGDLRPPIIWKRNGLTLNFLDLEDINDFGEDDSLYITKVTTIHMGNYTCHASGHEQLFQTHVLQVNVPPVIRVYPESQAQEPGVAASLRCHAEGIPMPRITWLKNGVDVSTQMSKQLSLLANGSELHISSVRYEDTGAYTCIAKNEVGVDEDISSLFIEDSARKTLANILWREEGLSVGNMFYVFSDDGIIVIHPVDCEIQRHLKPTEKIFMSYEEICPQREKNATQPCQWVSAVNVRNRYIYVAQPALSRVLVVDIQAQKVLQSIGVDPLPAKLSYDKSHDQVWVLSWGDVHKSRPSLQVITEASTGQSQHLIRTPFAGVDDFFIPPTNLIINHIRFGFIFNKSDPAVHKVDLETMMPLKTIGLHHHGCVPQAMAHTHLGGYFFIQCRQDSPASAARQLLVDSVTDSVLGPNGDVTGTPHTSPDGRFIVSAAADSPWLHVQEITVRGEIQTLYDLQINSGISDLAFQRSFTESNQYNIYAALHTEPDLLFLELSTGKVGMLKNLKEPPAGPAQPWGGTHRIMRDSGLFGQYLLTPARESLFLINGRQNTLRCEVSGIKGGTTVVWVGEV

SEQ ID NO: 2466 - protein, 1163 aa, Homo sapiens
MNREDRNVLRMKERERRNQEIQQGEDAFPPSSPLFAEPYKVTSKEDKLSSRIQSMLGNYDEMKDFIGDRSIPKLVAIPKPTVPPSADEKSNPNFFEQRHGGSHQSSKWTPVGPAPSTSQSQKRSSGLQSGHSSQRTSAGSSSGTNSSGQRHDRESYNNSGSSSRKKGQHGSEHSKSRSSSPGKPQAVSSLNSSHSRSHGNDHHSKEHQRSKSPRDPDANWDSPSRVPFSSGQHSTQSFPPSLMSKSNSMLQKPTAYVRPMDGQESMEPKLSSEHYSSQSHGNSMTELKPSSKAHLTKLKIPSQPLDASASGDVSCVDEILKEMTHSWPPPLTAIHTPCKTEPSKFPFPTKESQQSNFGTGEQKRYNPSKTSNGHQSKSMLKDDLKLSSSEDSDGEQDCDKTMPRSTPGSNSEPSHHNSEGADNSRDDSSSHSGSESSSGSDSESESSSSDSEANEPSQSASPEPEPPPTNKWQLDNWLNKVNPHKVSPASSVDSNIPSSQGYKKEGREQGTGNSYTDTSGPKETSSATPGRDSKTIQKGSESGRGRQKSPAQSDSTTQRRTVGKKQPKKAEKAAAEEPRGGLKIESETPVDLASSMPSSRHKAATKGSRKPNIKKESKSSPRPTAEKKKYKSTSKSSQKSREIIETDTSSSDSDESESLPPSSQTPKYPESNRTPVKPSSVEEEDSFFRQRMFSPMEEKELLSPLSEPDDRYPLIVKIDLNLLTRIPGKPYKETEPPKGEKKNVPEKHTREAQKQASEKVSNKGKRKHKNEDDNRASESKKPKTEDKNSAGHKPSSNRESSKQSAAKEKDLLPSPAGPVPSKDPKTEHGSRKRTISQSSSLKSSSNSNKETSGSSKNSSSTSKQKKTEGKTSSSSKEVKEKAPSSSSNCPPSAPTLDSSKPRRTKLVFDDRNYSADHYLQEAKKLKHNADALSDRFEKAVYYLDAVVSFIECGNALEKNAQESKSPFPMYSETVDLIKYTMKLKNYLAPDATAADKRLTVLCLRCESLLYLRLFKLKKENALKYSKTLTEHLKNSYNNSQAPSPGLGSKAVGMPSPVSPKLSPGNSGNYSSGASSASASGSSVTIPQKIHQMAASYVQVTSNFLYATEIWDQAEQLSKEQKEFFAELDKVMGPLIFNASIMTDLVRYTRQGLHWLRQDAKLIS

SEQ ID NO: 2467 - protein, 1698 aa, Homo sapiens
MVGELRYREFRVPLGPGLHAYPDELIRQRVGHDGHPEYQIRWLILRRGDEGDGGSGQVDCKAEHILLWMSKDEIYANCHKMLGEDGQVIGPSQESAGEVGALDKSVLEEMETDVKSLIQRALRQLEECVGTIPPAPLLHTVHVLSAYASIEPLTGVFKDPRVLDLLMHMLSSPDYQIRWSAGRMIQALSSHDAGTRTQILLSLSQQEAIEKHLDFDSRCALLALFAQATLSEHPMSFEGIQLPQVPGRVLFSLVKRYLHVTSLLDQLNDSAAEPGAQNTSAPEELSGERGQLELEFSMAMGTLISELVQAMRWDQASDRPRSSARSPGSIFQPQLADVSPGLPAAQAQPSFRRSRRFRPRSEFASGNTYALYVRDTLQPGMRVRMLDDYEEISAGDEGEFRQSNNGVPPVQVFWESTGRTYWVHWHMLEILGFEEDIEDMVEADEYQGAVASRVLGRALPAWRWRPMTELYAVPYVLPEDEDTEECEHLTLAEWWELLFFIKKLDGPDHQEVLQILQENLDGEILDDEILAELAVPIELAQDLLLTLPQRLNDSALRDLINCHVYKKYGPEALAGNQAYPSLLEAQEDVLLLDAQAQAKDSEDAAKVEAKEPPSQSPNTPLQRLVEGYGPAGKILLDLEQALSSEGTQENKVKPLLLQLQRQPQPFLALMQSLDTPETNRTLHLTVLRILKQLVDFPEALLLPWHEAVDACMACLRSPNTDREVLQELIFFLHRLTSVSRDYAVVLNQLGARDAISKALEKHLGKLELAQELRDMVFKCEKHAHLYRKLITNILGGCIQMVLGQIEDHRRTHQPINIPFFDVFLRYLCQGSSVEVKEDKCWEKVEVSSNPHRASKLTDHNPKTYWESNGSAGSHYITLHMRRGILIRQLTLLVASEDSSYMPARVVVCGGDSTSSLHTELNSVNVMPSASRVILLENLTRFWPIIQIRIKRCQQGGIDTRIRGLEILGPKPTFWPVFREQLCRHTRLFYMVRAQAWSQDMAEDRRSLLHLSSRLNGALRQEQNFADRFLPDDEAAQALGKTCWEALVSPVVQNITSPDEDGISPLGWLLDQYLECQEAVFNPQSRGPAFFSRVRRLTHLLVHVEPCEAPPPVVATPRPKGRNRSHDWSSLATRGLPSSIMRNLTRCWRAVVEKQVNNFLTSSWRDDDFVPRYCEHFNILQNSSSELFGPRAAFLLALQNGCAGALLKLPFLKAAHVSEQFARHIDQQIQGSRIGGAQEMERLAQLQQCLQAVLIFSGLEIATTFEHYYQHYMADRLLGVVSSWLEGAVLEQIGPCFPNRLPQQMLQSLSTSKELQRQFHVYQLQQLDQELLKLEDTEKKIQVGLGASGKEHKSEKEEEAGAAAVVDVAEGEEEEEENEDLYYEGAMPEVSVLVLSRHSWPVASICHTLNPRTCLPSYLRGTLNRYSNFYNKSQSHPALERGSQRRLQWTWLGWAELQFGNQTLHVSTVQMWLLLYLNDLKAVSVESLLAFSGLSADMLNQAIGPLTSSRGPLDLHEQKDIPGGVLKIRDGSKEPRSRWDIVRLIPPQTYLQAEGEDGQNLEKRRNLLNCLIVRILKAHGDEGLHIDQLVCLVLEAWQKGPCPPRGLVSSLGKGSACSSTDVLSCILHLLGKGTLRRHDDRPQVLSYAVPVTVMEPHTESLNPGSSGPNPPLTFHTLQIRSRGVPYASCTATQSFSTFR

SEQ ID NO: 2468 - protein, 212 aa, Homo sapiens
MGVTCVSQMPVAEGKSVQQTVELLTRKLEMLGAEKQGTFCVDCETYHTAASTLGSQGQTGKLMYVMHNSEYPLSCFALFENGPCLIADTNFDVLMVKLKGFFQSAKASKIETRGTRYQYCDFLVKVGTVTMGPSARGISVEVEYGPCVVASDCWSLLLEFLQSFLGSHTPGAPAVFGNRHDAVYGPADTMVQYMELFNKIRKQQQVPVAGIR

SEQ ID NO: 2469 - protein, 1204 aa, Homo sapiens
MAMDQVNALCEQLVKAVTVMMDPNSTQRYRLEALKFCEEFKEKCPICVPCGLRLAEKTQVAIVRHFGLQILEHVVKFRWNGMSRLEKVYLKNSVMELIANGTLNILEEENHIKDALSRIVVEMIKREWPQHWPDMLIELDTLSKQGETQTELVMFILLRLAEDVVTFQTLPPQRRRDIQQTLTQNMERIFSFLLNTLQENVNKYQQVKTDTSQESKAQANCRVGVAALNTLAGYIDWVSMSHITAENCKLLEILCLLLNEQELQLGAAECLLIAVSRKGKLEDRKPLMVLFGDVAMHYILSAAQTADGGGLVEKHYVFLKRLCQVLCALGNQLCALLGADSDVETPSNFGKYLESFLAFTTHPSQFLRSSTQMTWGALFRHEILSRDPLLLAIIPKYLRASMTNLVKMGFPSKTDSPSCEYSRFDFDSDEDFNAFFNSSRAQQGEVMRLACRLDPKTSFQMAGEWLKYQLSTFLDAGSVNSCSAVGTGEGSLCSVFSPSFVQWEAMTLFLESVITQMFRTLNREEIPVNDGIELLQMVLNFDTKDPLILSCVLTNVSALFPFVTYRPEFLPQVFSKLFSSVTFETVEESKAPRTRAVRNVRRHACSSIIKMCRDYPQLVLPNFDMLYNHVKQLLSNELLLTQMEKCALMEALVLISNQFKNYERQKVFLEELMAPVASIWLSQDMHRVLSDVDAFIAYVGTDQKSCDPGLEDPCGLNRARMSFCVYSILGVVKRTCWPTDLEEAKAGGFVVGYTSSGNPIFRNPCTEQILKLLDNLLALIRTHNTLYAPEMLAKMAEPFTKALDMLDAEKSAILGLPQPLLELNDSPVFKTVLERMQRFFSTLYENCFHILGKAGPSMQQDFYTVEDLATQLLSSAFVNLNNIPDYRLRPMLRVFVKPLVLFCPPEHYEALVSPILGPLFTYLHMRLSQKWQVINQRSLLCGEDEAADENPESQEMLEEQLVRMLTREVMDLITVCCVSKKGADHSSAPPADGDDEEMMATEVTPSAMAELTDLGKCLMKHEDVCTALLITAFNSLAWKDTLSCQRTTSQLCWPLLKQVLSGTLLADAVTWLFTSVLKGLQMHGQHDGCMASLVHLAFQIYEALRPRYLEIRAVMEQIPEIQKDSLDQFDCKLLNPSLQKVADKRRKDQFKRLIAGCIGKPLGEQFRKEVHIKNLPSLFKKTKPMLETEVLDNDGGGLATIFEP

SEQ ID NO: 2470 - protein, 508 aa, Homo sapiens
MLPTQAGAAAALGRGSALGGSLNRTPTGRPGGGGGTRGANGGRVPGNGAGLGPGRLEREAAAAAATTPAPTAGALYSGSEGDSESGEEEELGAERRGLKRSLSEMEIGMVVGGPEASAAATGGYGPVSGAVSGAKPGKKTRGRVKIKMEFIDNKLRRYTTFSKRKTGIMKKAYELSTLTGTQVLLLVASETGHVYTFATRKLQPMITSETGKALIQTCLNSPDSPPRSDPTTDQRMSATGFEETDLTYQVSESDSSGETKDTLKPAFTVTNLPGTTSTIQTAPSTSTTMQVSSGPSFPITNYLAPVSASVSPSAVSSANGTVLKSTGSGPVSSGGLMQLPTSFTLMPGGAVAQQVPVQAIQVHQAPQQASPSRDSSTDLTQTSSSGTVTLPATIMTSSVPTTVGGHMMYPSPHAVMYAPTSGLGDGSLTVLNAFSQAPSTMQVSHSQVQEPGGVPQVFLTASSGTVQIPVSAVQLHQMAVIGQQAGSSSNLTELQVVNLDTAHSTKSE

SEQ ID NO: 2471 - protein, 751 aa, Homo sapiens
MAFRTICVLVGVFICSICVKGSSQPQARVYLTFDELRETKTSEYFSLSHHPLDYRILLMDEDQDRIYVGSKDHILSLNINNISQEALSVFWPASTIKVEECKMAGKDPTHGCGNFVRVIQTFNRTHLYVCGSGAFSPVCTYLNRGRRSEDQVFMIDSKCESGKGRCSFNPNVNTVSVMINEELFSGMYIDFMGTDAAIFRSLTKRNAVRTDQHNSKWLSEPMFVDAHVIPDGTDPNDAKVYFFFKEKLTDNNRSTKQIHSMIARICPNDTGGLRSLVNKWTTFLKARLVCSVTDEDGPETHFDELEDVFLLETDNPRTTLVYGIFTTSSSVFKGSAVCVYHLSDIQTVFNGPFAHKEGPNHQLISYQGRIPYPRPGTCPGGAFTPNMRTTKEFPDDVVTFIRNHPLMYNSIYPIHKRPLIVRIGTDYKYTKIAVDRVNAADGRYHVLFLGTDRGTVQKVVVLPTNNSVSGELILEELEVFKNHAPITTMKISSKKQQLYVSSNEGVSQVSLHRCHIYGTACADCCLARDPYCAWDGHSCSRFYPTGKRRSRRQDVRHGNPLTQCRGFNLKAYRNAAEIVQYGVKNNTTFLECAPKSPQASIKWLLQKDKDRRKEVKLNERIIATSQGLLIRSVQGSDQGLYHCIATENSFKQTIAKINFKVLDSEMVAVVTDKWSPWTWASSVRALPFHPKDIMGAFSHSEMQMINQYCKDTRQQHQQGDESQKMRGDYGKLKALINSRKSRNRRNQLPES

SEQ ID NO: 2472 - protein, 771 aa, Homo sapiens [sequence omitted]

SEQ ID NO: 2473 - protein, 923 aa, Homo sapiens
MERGLPLLCAVLALVLAPAGAFRNDKCGDTIKIESPGYLTSPGYPHSYHPSEKCEWLIQAPDPYQRIMINFNPHFDLEDRDCKYDYVEVFDGENENGHFRGKFCGKIAPPPVVSSGPFLFIKFVSDYETHGAGFSIRYEIFKRGPECSQNYTTPSGVIKSPGFPEKYPNSLECTYIVFVPKMSEIILEFESFDLEPDSNPPGGMFCRYDRLEIWDGFPDVGPHIGRYCGQKTPGRIRSSSGILSMVFYTDSAIAKEGFSANYSVLQSSVSEDFKCMEALGMESGEIHSDQITASSQYSTNWSAERSRLNYPENGWTPGEDSYREWIQVDLGLLRFVTAVGTQGAISKETKKKYYVKTYKIDVSSNGEDWITIKEGNKPVLFQGNTNPTDVVVAVFPKPLITRFVRIKPATWETGISMRFEVYGCKITDYPCSGMLGMVSGLISDSQITSSNQGDRNWMPENIRLVTSRSGWALPPAPHSYINEWLQIDLGEEKIVRGIIIQGGKHRENKVFMRKFKIGYSNNGSDWKMIMDDSKRKAKSFEGNNNYDTPELRTFPALSTRFIRIYPERATHGGLGLRMELLGCEVEAPTAGPTTPNGNLVDECDDDQANCHSGTGDDFQLTGGTTVLATEKPTVIDSTIQSEFPTYGFNCEFGWGSHKTFCHWEHDNHVQLKWSVLTSKTGPIQDHTGDGNFIYSQADENQKGKVARLVSPVVYSQNSAHCMTFWYHMSGSHVGTLRVKLRYQKPEEYDQLVWMAIGHQGDHWKEGRVLLHKSLKLYQVIFEGEIGKGNLGGIAVDDISINNHISQEDCAKPADLDKKNPEIKIDETGSTPGYEGEGEGDKNISRKPGNVLKTLDPILITIIAMSALGVLLGAVCGVVLYCACWHNGMSERNLSALENYNFELVDGVKLKKDKLNTQSTYSEA

SEQ ID NO: 2474 - protein, 300 aa, Homo sapiens
MSKCARKKYIKTNPRQMTMETVESQHDGSITASLTESKSAHVQTQTGQNSIPALAQVAAIAETDESAESEGVIDSHKRREILSRRPSYRKILNELSSDVPGVPKIEEERSEEEGTPPSIATMAVPTSIYQTSTGQYIAIAQGGTIQISNPGSDGVQGLQALTMTNSGAPPPGATIVQYAAQSADGTQQFFVPGSQVVVQAATGDMPTYQIRAPTAALPQGVVMAASPGSLHSPQQLAEEATRKRELRLMKNREAAKECRRRKKEYVKCLESRVAVLEVQNKKLIEELETLKDICSPKTDY

SEQ ID NO: 2475 - protein, 2611 aa, Homo sapiens
MKILLIIFVLIIWTETLADQSPGPGPVYADVVFLVDSSDHLGPKSFPFVKTFINKMINSLPIEANKYRVALAQYSDEFHSEFHLSTFKGRSPMLNHLKKNFQFIGGSLQIGKALQEAHRTYFSAPINGRDRKQFPPILVVLASAESEDEVEEASKALQKDGVKIISVGVQKASEENLKAMATSHFHFNLRTIRDLSTFSQNMTQIIKDVTKYKEGAVDADMQVHFPISCQKDSLADLVFLVDESLGTGGNLRHLQTFLENITSSMDVKENCMRLGLMSYSNSAKTISFLKSSTTQSEFQQQIKNLSIQVGKSNTGAAIDQMRRDGFSESYGSRRAQGVPQIAVLVTHRPSDDEVHDAALNLRLEDVNVFALSIQGANNTQLEEIVSYPPEQTISTLKSYADLETYSTKFLKKLQNEIWSQISTYAEQRNLDKTGCVDTKEADIHFLIDGSSSIQEKQFEQIKRFMLEVTEMFSIGPDKVRVGVVQYSDDTEVEFYITDYSNDIDLRKAIFNIKQLTGGTYTGKALDYILQIIKNGMKDRMSKVPCYLIVLTDGMSTDRVVEPAKRLRAEQITVHAVGIGAANKIELQEIAGKEERVSFGQNFDALKSIKNEVVREICAEKGCEDMKADIMFLVDSSWSIGNENFRKMKIFMKNLLTKIQIGADKTQIGVVQFSDKTKEEFQLNRYFTQQEISDAIDRMSLINEGTLTGKALNFVGQYFTHSKGARLGAKKFLILITDGVAQDDVRDPARILRGKDVTIFSVGVYNANRSQLEEISGDSSLVFHVENFDHLKALERKLIFRVCALHDCKRITLLDVVFVLDHSGSIKKQYQDHMINLTIHLVKKADVGRDRVQFGALKYSDQPNILFYLNTYSNRSAIIENLRKRRDTGGNTYTAKALKHANALFTEEHGSRIKQNVKQMLIVITDGESHDHDQLNDTALELRNKGITIFAVGVGKANQKELEGMAGNKNNTIYVDNFDKLKDVFTLVQERMCTEAPEVCHLQEADVIFLCDGSDRVSNSDFVTMTTFLSDLIDNFDIQSQRMKIGMAQFGSNYQSIIELKNSLTKTQWKTQIQNVSKSGGFPRIDFALKKVSNMFNLHAGGRRNAGVPQTLVVITSGDPRYDVADAVKTLKDLGICVLVLGIGDVYKEHLLPITGNSEKIITFQDFDKLKNVDVKKRIIREICQSCGKTNCFMDIVVGFDISTHVQGQPLFQGHPQLESYLPGILEDISSIKGVSCGAGTEAQVSLAFKVNSDQGFPAKFQIYQKAVFDSLLQVNVSGPTHLNAQFLRSLWDTFKDKSASRGQVLLIFSDGLQSESNIMLENQSDRLREAGLDALLVVSLNTTAHHEFSSFEFGKRFDYRTHLTIGMRELGKKLSQYLGNIAERTCCCTFCKCPGIPGPHGTRGLQAMKGSQGLKGSRGHRGEDGNPGVRGDTGPQGDKGIAGCPGAWGQKGLKGFSGPKGGHGDDGIDGLDGEEGCHGFPGIKGEKGDPGSQGSPGSRGAPGQYGEKGFPGDPGNPGQNNNIKGQKGSKGEQGRQGRSGQKGVQGSPSSRGSRGREGQRGLRGVSGEPGNPGPTGTLGAEGLQGPQGSQGNPGRKGEKGSQGQKGPQGSPGLMGAKGSTGRPGLLGKKGEPGLPGDLGPVGQTGQRGRQGDSGIPGYGQMGRKGVKGPRGFPGDAGQKGDIGNPGIPGGPGPKGFRGLALTVGLKGEEGSRGLPGPPGQRGIKGMAGQPVYSQCDLIRFLREHSLFKNAYPTELVFALDNSYDVTEESFNKTRDIITSIVNDLNIRENNCPVGARVAMVSYNSGTSYLIRWSDYNRKKQLLQQLSQIKYQDTTEPRDVGNAMRFVTRNVFKRTYAGANVRRVAVFFSNGQTASRSSIITATMEFSALDISPTVFAFDERVFLEAFGFDNTGTFQVIPVPPNGENQTLERLRRCALCYDKCFPNACIREAFLPEDSYMDVVFLIDNSRNIAKDEFKAVKALVSSVIDNFNIASDPLISDSGDRIALLSYSPWESSRRKMGTVKTEFDFITYDNQLLMKNHIQTSFQQLNGEATIGRALLWTTENLFPETPYLRKHKVIFVVSAGENYERKEFVKMMALRAKCQGYVIFVISLGSTRKDDMEELASYPLDQHLIQLGRIHKPDLNYIAKFLKPFLYSVRRGFNQYPPPMLEDACRLINLGGENIQNDGFQFVTELQEDFLGGNGFIGQELNSGRESPFVKTEDNGSDYLVYLPSQMFEPQKLMINYEKDQKSAEIASLTSGHENYGRKEEPDHTYEPGDVSLQEYYMDVAFLIDASQRVGSDEFKEVKAFITSVLDYFHIAPTPLTSTLGDRVAVLSYSPPGYMPNTEECPVYLEFDLVTYNSIHQMKHHLQDSQQLNGDVFIGHALQWTIDNVFVGTPNLRKNKVIFVISAGETNSLDKDVLRNVSLRAKCQGYSIFVFSFGPKHNDKELEELASHPLDHHLVQLGRTHKPDWNYIIKFVKPFVHLIRRAINKYPTEDMKATCVNMTSPNPENGGTENTVLLLPGIYEIKTENGDLFDEFDSQAQHLLVLGNNHSSGSETATDLMQKLYLLFSTEKLAMKDKEKAHLEEISALVVDKQQEKEDKEMEATDI

SEQ ID NO: 2476 - protein, 923 aa, Homo sapiens
MEGAKPTLQLVYQAVQALYHDPDPSGKERASFWLGELQRSVHAWEISDQLLQIRQDVESCYFAAQTMKMKIQTSFYELPTDSHASLRDSLLTHIQNLKDLSPVIVTQLALAIADLALQMPSWKGCVQTLVEKYSNDVTSLPFLLEILTVLPEEVHSRSLRIGANRRTEIIEDLAFYSSTVVSLLMTCVEKAGTDEKMLMKVFRCLGSWFNLGVLDSNFMANNKLLALLFEVLQQDKTSSNLHEAASDCVCSALYAIENVETNLPLAMQLFQGVLTLETAYHMAVAREDLDKVLNYCRIFTELCETFLEKIVCTPGQGLGDLRTLELLLICAGHPQYEVVEISFNFWYRLGEHLYKTNDEVIHGIFKAYIQRLLHALARHCQLEPDHEGVPEETDDFGEFRMRVSDLVKDLIFLIGSMECFAQLYSTLKEGNPPWEVTEAVLFIMAAIAKSVDPENNPTLVEVLEGVVRLPETVHTAVRYTSIELVGEMSEVVDRNPQFLDPVLGYLMKGLCEKPLASAAAKAIHNICSVCRDHMAQHFNGLLEIARSLDSFLLSPEAAVGLLKGTALVLARLPLDKITECLSELCSVQVMALKKLLSQEPSNGISSDPTVFLDRLAVIFRHTNPIVENGQTHPCQKVIQEIWPVLSETLNKHRADNRIVERCCRCLRFAVRCVGKGSAALLQPLVTQMVNVYHVHQHSCFLYLGSILVDEYGMEEGCRQGLLDMLQALCIPTFQLLEQQNGLQNHPDTVDDLFRLATRFIQRSPVTLLRSQVVIPILQWAIASTTLDHRDANCSVMRFLRDLIHTGVANDHEEDFELRKELIGQVMNQLGQQLVSQLLHTCCFCLPPYTLPDVAEVLWEIMQVDRPTFCRWLENSLKGLPKETTVGAVTVTHKQLTDFHKQVTSAEECKQVCWALRDFTRLFR

SEQ ID NO: 2477 - protein, 747 aa, Homo sapiens
MTSFQEVPLQTSNFAHVIFQNVAKSYLPNAHLECHYTLTPYIHPHPKDWVGIFKVGWSTARDYYTFLWSPMPEHYVEGSTVNCVLAFQGYYLPNDDGEFYQFCYVTHKGEIRGASTPFQFRASSPVEELLTMEDEGNSDMLVVTTKAGLLELKIEKTMKEKEELLKLIAVLEKETAQLREQVGRMERELNHEKERCDQLQAEQKGLTEVTQSLKMENEEFKKRFSDATSKAHQLEEDIVSVTHKAIEKETELDSLKDKLKKAQHEREQLECQLKTEKDEKELYKVHLKNTEIENTKLMSEVQTLKNLDGNKESVITHFKEEIGRLQLCLAEKENLQRTFLLTTSSKEDTCFLKEQLRKAEEQVQATRQEVVFLAKELSDAVNVRDRTMADLHTARLENEKVKKQLADAVAELKLNAMKKDQDKTDTLEHELRREVEDLKLRLQMAADHYKEKFKECQRLQKQINKLSDQSANNNNVFTKKTGNQQKVNDASVNTDPATSASTVDVKPSPSAAEADFDIVTKGQVCEMTKEIADKTEKYNKCKQLLQDEKAKCNKYADELAKMELKWKEQVKIAENVKLELAEVQDNYKELKRSLENPAERKMEDGADGAFYPDEIQRPPVRVPSWGLEDNVVCSQPARNFSRPDGLEDSEDSKEDENVPTAPDPPSQHLRGHGTGFCFDSSFDVHKKCPLCELMFPPNYDQSKFEEHVESHWKVCPMCSEQFPPDYDQQVFERHVQTHFDQNVLNFD

SEQ ID NO: 2478 - protein, 476 aa, Homo sapiens
MVGAMWKVIVSLVLLMPGPCDGLFRSLYRSVSMPPKGDSGQPLFLTPYIEAGKIQKGRELSLVGPFPGLNMKSYAGFLTVNKTYNSNLFFWFFPAQIQPEDAPVVLWLQGGPGGSSMFGLFVEHGPYVVTSNMTLRDRDFPWTTTLSMLYIDNPVGTGFSFTDDTHGYAVNEDDVARDLYSALIQFFQIFPEYKNNDFYVTGESYAGKYVPAIAHLIHSLNPVREVKINLNGIAIGDGYSDPESIIGGYAEFLYQIGLLDEKQKKYFQKQCHECIEHIRKQNWFEAFEILDKLLDGDLTSDPSYFQNVTGCSNYYNFLRCTEPEDQLYYVKFLSLPEVRQAIHVGNQTFNDGTIVEKYLREDTVQSVKPWLTEIMNNYKVLIYNGQLDIIVAAALTERSLMGMDWKGSQEYKKAEKKVWKIFKSDSEVAGYIRQAGDFHQVIIRGGGHILPYDQPLRAFDMINRFIYGKGWDPYVG

SEQ ID NO: 2479 - protein, 336 aa, Homo sapiens
MAASLRLLGAASGLRYWSRRLRPAAGSFAAVCSRSVASKTPVGFIGLGNMGNPMAKNLMKHGYPLIIYDVFPDACKEFQDAGEQVVSSPADVAEKADRIITMLPTSINAIEAYSGANGILKKVKKGSLLIDSSTIDPAVSKELAKEVEKMGAVFMDAPVSGGVGAARSGNLTFMVGGVEDEFAAAQELLGCMGSNVVYCGAVGTGQAAKICNNMLLAISMIGTAEAMNLGIRLGLDPKLLAKILNMSSGRCWSSDTYNPVPGVMDGVPSANNYQGGFGTTLMAKDLGLAQDSATSTKSPILLGSLAHQIYRMMCAKGYSKKDFSSVFQFLREEETF

SEQ ID NO: 2480 - protein, 1346 aa, Homo sapiens
MKSPRRTTLCLMFIVIYSSKAALNWNYESTIHPLSLHEHEPAGEEALRQKRAVATKSPTAEEYTVNIEISFENASFLDPIKAYLNSLSFPIHGNNTDQITDILSINVTTVCRPAGNEIWCSCETGYGWPRERCLHNLICQERDVFLPGHHCSCLKELPPNGPFCLLQEDVTLNMRVRLNVGFQEDLMNTSSALYRSYKTDLETAFRKGYGILPGFKGVTVTGFKSGSVVVTYEVKTTPPSLELIHKANEQVVQSLNQTYKMDYNSFQAVTINESNFFVTPEIIFEGDTVSLVCEKEVLSSNVSWRYEEQQLEIQNSSRFSIYTALFNNMTSVSKLTIHNITPGDAGEYVCKLILDIFEYECKKKIDVMPIQILANEEMKVMCDNNPVSLNCCSQGNVNWSKVEWKQEGKINIPGTPETDIDSSCSRYTLKADGTQCPSGSSGTTVIYTCEFISAYGARGSANIKVTFISVANLTITPDPISVSEGQNFSIKCISDVSNYDEVYWNTSAGIKIYQRFYTTRRYLDGAESVLTVKTSTREWNGTYHCIFRYKNSYSIATKDVIVHPLPLKLNIMVDPLEATVSCSGSHHIKCCIEEDGDYKVTFHTGSSSLPAAKEVNKKQVCYKHNFNASSVSWCSKTVDVCCHFTNAANNSVWSPSMKLNLVPGENITCQDPVIGVGEPGKVIQKLCRFSNVPSSPESPIGGTITYKCVGSQWEEKRNDCISAPINSLLQMAKALIKSPSQDEMLPTYLKDLSISIDKAEHEISSSPGSLGAIINILDLLSTVPTQVNSEMMTHVLSTVNVILGKPVLNTWKVLQQQWTNQSSQLLHSVERFSQALQSGDSPPLSFSQTNVQMSSMVIKSSHPETYQQRFVFPYFDLWGNVVIDKSYLENLQSDSSIVTMAFPTLQAILAQDIQENNFAESLVMTTTVSHNTTMPFRISMTFKNNSPSGGETKCVFWNFRLANNTGGWDSSGCYVEEGDGDNVTCICDHLTSFSILMSPDSPDPSSLLGILLDIISYVGVGFSILSLAACLVVEAVVWKSVTKNRTSYMRHTCIVNIAASLLVANTWFIVVAAIQDNRYILCKTACVAATFFIHFFYLSVFFWMLTLGLMLFYRLVFILHETSRSTQKAIAFCLGYGCPLAISVITLGATQPREVYTRKNVCWLNWEDTKALLAFAIPALIIVVVNITITIVVITKILRPSIGDKPCKQEKSSLFQISKSIGVLTPLLGLTWGFGLTTVFPGTNLVFHIIFAILNVFQGLFILLFGCLWDLKVQEALLNKFSLSRWSSQHSKSTSLGSSTPVFSMSSPISRRFNNLFGKTGTYNVSTPEATSSSLENSSSASSLLN

SEQ ID NO: 2481 - protein, 922 aa, Homo sapiens
MATASPRSDTSNNHSGRLQLQVTVSSAKLKRKKNWFGTAIYTEVVVDGEITKTAKSSSSSNPKWDEQLTVNVTPQTTLEFQVWSHRTLKADALLGKATIDLKQALLIHNRKLERVKEQLKLSLENKNGIAQTGELTVVLDGLVIEQENITNCSSSPTIEIQENGDALHENGEPSARTTARLAVEGTNGIDNHVPTSTLVQNSCCSYVVNGDNTPSSPSQVAARPKNTPAPKPLASEPADDTVNGESSSFAPTDNASVTGTPVVSEENALSPNCTSTTVEDPPVQEILTSSENNECIPSTSAELESEARSILEPDTSNSRSSSAFEAAKSRQPDGCMDPVRQQSGNANTETLPSGWEQRKDPHGRTYYVDHNTRTTTWERPQPLPPGWERRVDDRRRVYYVDHNTRTTTWQRPTMESVRNFEQWQSQRNQLQGAMQQFNQRYLYSASMLAAENDPYGPLPPGWEKRVDSTDRVYFVNHNTKTTQWEDPRTQGLQNEEPLPEGWEIRYTREGVRYFVDHNTRTTTFKDPRNGKSSVTKGGPQIAYERGFRWKLAHFRYLCQSNALPSHVKINVSRQTLFEDSFQQIMALKPYDLRRRLYVIFRGEEGLDYGGLAREWFFLLSHEVLNPMYCLFEYAGKNNYCLQINPASTINPDHLSYFCFIGRFIAMALFHGKFIDTGFSLPFYKRMLSKKLTIKDLESIDTEFYNSLIWIRDNNIEECGLEMYFSVDMEILGKVTSHDLKLGGSNILVTEENKDEYIGLMTEWRFSRGVQEQTKAFLDGFNEVVPLQWLQYFDEKELEVMLCGMQEVDLADWQRNTVYRHYTRNSKQIIWFWQFVKETDNEVRMRLLQFVTGTCRLPLGGFAELMGSNGPQKFCIEKVGKDTWLPRSHTCFNRLDLPPYKSYEQLKEKLLFAIEETEGFGQE

SEQ ID NO: 2482 - protein, 754 aa, Homo sapiens
MWKLLPAAGPAGGEPYRLLTGVEYVVGRKNCAILIENDQSISRNHAVLTANFSVTNLSQTDEIPVLTLKDNSKYGTFVNEEKMQNGFSRTLKSGDGITFGVFGSKFRIEYEPLVACSSCLDVSGKTALNQAILQLGGFTVNNWTEECTHLVMVSVKVTIKTICALICGRPIVKPEYFTEFLKAVESKKQPPQIESFYPPLDEPSIGSKNVDLSGRQERKQIFKGKTFIFLNAKQHKKLSSAVVFGGGEARLITEENEEEHNFFLAPGTCVVDTGITNSQTLIPDCQKKWIQSIMDMLQRQGLRPIPEAEIGLAVIFMTTKNYCDPQGHPSTGLKTTTPGPSLSQGVSVDEKLMPSAPVNTTTYVADTESEQADTWDLSERPKEIKVSKMEQKFRMLSQDAPTVKESCKTSSNNNSMVSNTLAKMRIPNYQLSPTKLPSINKSKDRASQQQQTNSIRNYFQPSTKKRERDEENQEMSSCKSARIETSCSLLEQTQPATPSLWKNKEQHLSENEPVDTNSDNNLFTDTDLKSIVKNSASKSHAAEKLRSNKKREMDDVAIEDEVLEQLFKDTKPELEIDVKVQKQEEDVNVRKRPRMDIETNDTFSDEAVPESSKISQENEIGKKRELKEDSLWSAKEISNNDKLQDDSEMLPKKLLLTEFRSLVIKNSTSRNPSGINDDYGQLKNFKKFKKVTYPGAGKLPHIIGGSDLIAHHARKNTELEEWLRQEMEVQNQHAKEESLADDLFRYNPYLKRRR

SEQ ID NO: 2483 - protein, 585 aa, Homo sapiens
MAEAATGFLEQLKSCIVWSWTYLWTVWFFIVLFLVYILRVPLKINDNLSTVSMFLNTLTPKFYVALTGTSSLISGLILIFEWWYFRKYGTSFIEQVSVSHLRPLLGGVDNNSSNNSNSSNGDSDSNRQSVSECKVWRNPLNLFRGAEYNRYTWVTGREPLTYYDMNLSAQDHQTFFTCDSDHLRPADAIMQKAWRERNPQARISAAHEALEINEIRSRVEVPLIASSTIWEIKLLPKCATAYILLAEEEATTIAEAEKLFKQALKAGDGCYRRSQQLQHHGSQYEAQHRRDTNVLVYIKRRLAMCARRLGRTREAVKMMRDLMKEFPLLSMFNIHENLLEALLELQAYADVQAVLAKYDDISLPKSATICYTAALLKARAVSDKFSPEAASRRGLSTAEMNAVEAIHRAVEFNPHVPKYLLEMKSLILPPEHILKRGDSEAIAYAFFHLAHWKRVEGALNLLHCTWEGTFRMIPYPLEKGHLFYPYPICTETADRELLPSFHEVSVYPKKELPFFILFTAGLCSFTAMLALLTHQFPELMGVFAKAMIDIFCSAEFRDWNCKSIFMRVEDELEIPPAPQSQHFQN

SEQ ID NO: 2484 - protein, 360 aa, Homo sapiens
MNAPLGGIWLWLPLLLTWLTPEVNSSWWYMRATGGSSRVMCDNVPGLVSSQRQLCHRHPDVMRAISQGVAEWTAECQHQFRQHRWNCNTLDRDHSLFGRVLLRSSRESAFVYAISSAGVVFAITRACSQGEVKSCSCDPKKMGSAKDSKGIFDWGGCSDNIDYGIKFARAFVDAKERKGKDARALMNLHNNRAGRKAVKRFLKQECKCHGVSGSCTLRTCWLAMADFRKTGDYLWRKYNGAIQVVMNQDGTGFTVANERFKKPTKNDLVYFENSPDYCIRDREAGSLGTAGRVCNLTSRGMDSCEVMCCGRGYDTSHVTRMTKCGCKFHWCCAVRCQDCLEALDVHTCKAPKNADWTTAT

SEQ ID NO: 2485 - protein, 472 aa, Homo sapiens
MPPIGLDNVATYAGQFNQDYLSGMAANMSGTFGGANMPNLYPGAPGAGYPPVPPGGFGQPPSAQQPVPPYGMYPPPGGNPPSRMPSYPPYPGAPVPGQPMPPPGQQPPGAYPGQPPVTYPGQPPVPLPGQQQPVPSYPGYPGSGTVTPAVPPTQFGSRGTITDAPGFDPLRDAEVLRKAMKGFGTDEQAIIDCLGSRSNKQRQQILLSFKTAYGKDLIKDLKSELSGNFEKTILALMKTPVLFDIYEIKEAIKGVGTDEACLIEILASRSNEHIRELNRAYKAEFKKTLEEAIRSDTSGHFQRLLISLSQGNRDESTNVDMSLAQRDAQELYAAGENRLGTDESKFNAVLCSRSRAHLVAVFNEYQRMTGRDIEKSICREMSGDLEEGMLAVVKCLKNTPAFFAERLNKAMRGAGTKDRTLIRIMVSRSETDLLDIRSEYKRMYGKSLYHDISGDTSGDYRKILLKICGGND

SEQ ID NO: 2486 - protein, 1712 aa, Homo sapiens
MASGSRWRPTPPPLLLLLLLALAARADGLEFGGGPGQWARYARWAGAASSGELSFSLRTNATRALLLYLDDGGDCDFLELLLVDGRLRLRFTLSCAEPATLQLDTPVADDRWHMVLLTRDARRTALAVDGEARAAEVRSKRREMQVASDLFVGGIPPDVRLSALTLSTVKYEPPFRGLLANLKLGERPPALLGSQGLRGATADPLCAPARNPCANGGLCTVLAPGEVGCDCSHTGFGGKFCSEEEHPMEGPAHLTLNSEVGSLLFSEGGAGRGGAGDVHQPTKGKEEFVATFKGNEFFCYDLSHNPIQSSTDEITLAFRTLQRNGLMLHTGKSADYVNLSLKSGAVWLVINLGSGAFEALVEPVNGKFNDNAWHDVRVTRNLRQHAGIGHAMVNKLHYLVTISVDGILTTTGYTQEDYTMLGSDDFFYIGGSPNTADLPGSPVSNNFMGCLKDVVYKNNDFKLELSRLAKEGDPKMKLQGDLSFRCEDVAALDPVTFESPEAFVALPRWSAKRTGSISLDFRTTEPNGLLLFSQGRRAGGGAGSHSSAQRADYFAMELLDGHLYLLLDMGSGGIKLRASSRKVNDGEWCHVDFQRDGRKGSISVNSRSTPFLATGDSEILDLESELYLGGLPEGGRVDLPLPPEVWTAALRAGYVGCVRDLFIDGRSRDLRGLAEAQGAVGVAPFCSRETLKQCASAPCRNGGVCREGWNRFICDCIGTGFLGRVCEREATVLSYDGSMYMKIMLPNAMHTEAEDVSLRFMSQRAYGLMMATTSRESADTLRLELDGGQMKLTVNLDCLRVGCAPSKGPETLFAGHKLNDNEWHTVRVVRRGKSLQLSVDNVTVEGQMAGAHMRLEFHNIETGIMTERRFISVVPSNFIGHLSGLVFNGQPYMDQCKDGDITYCELNARFGLRAIVADPVTFKSRSSYLALATLQAYASMHLFFQFKTTAPDGLLLFNSGNGNDFIVIELVKGYIHYVFDLGNGPSLMKGNSDKPVNDNQWHNVVVSRDPGNVHTLKIDSRTVTQHSNGARNLDLKGELYIGGLSKNMFSNLPKLVASRDGFQGCLASVDLNGRLPDLIADALHRIGQVERGCDGPSTTCTEESCANQGVCLQQWDGFTCDCTMTSYGGPVCNDPGTTYIFGKGGALITYTWPPNDRPSTRMDRLAVGFSTHQRSAVLVRVDSASGLGDYLQLHIDQGTVGVIFNVGTDDITIDEPNAIVSDGKYHVVRFTRSGGNATLQVDSWPVNERYPAGNFDNERLAIARQRIPYRLGRVVDEWLLDKGRQLTIFNSQAAIKIGGRDQGRPFQGQVSGLYYNGLKVLALAAESDPNVRTEGHLRLVGEGPSVLLSAETTATTLLADMATTIMETTTTMATTTTRRGRSPTLRDSTTQNTDDLLVASAECPSDDEDLEECEPSTGGELILPIITEDSLDPPPVATRSPFVPPPPTFYPFLTGVGATQDTLPPPAARRPPSGGPCQAERDDSDCEEPIEASGFASGEVFDSSLPPTDDEDFYTTFPLVTDRTTLLSPRKPAPRPNLRTDGATGAPGVLFAPSAPAPNLPAGKMNHRDPLQPLLENPPLGPGAPTSFEPRRPPPLRPGVTSAPGFPHLPTANPTGPGERGPPGAVEVIRESSSTTGMVVGIVAAAALCILILLYAMYKYRNRDEGSYQVDQSRNYISNSAQSNGAVVKEKAPAAPKTPSKAKKNKDKEYYV

SEQ ID NO: 2487 - protein, 214 aa, Homo sapiens
MGLAGVCALRRSAGYILVGGAGGQSAAAAARRYSEGEWASGGVRSFSRAAAAMAPIKVGDAIPAVEVFEGEPGNKVNLAELFKGKKGVLFGVPGAFTPGCSKTHLPGFVEQAEALKAKGVQVVACLSVNDAFVTGEWGRAHKAEGKVRLLADPTGAFGKETDLLLDDSLVSIFGNRRLKRFSMVVQDGIVKALNVEPDGTGLTCSLAPNIISQL

SEQ ID NO: 2488 - protein, 335 aa, Homo sapiens
MKLKLKNVFLAYFLVSIAGLLYALVQLGQPCDCLPPLRAAAEQLRQKDLRISQLQAELRRPPPAPAQPPEPEALPTIYVVTPTYARLVQKAELVRLSQTLSLVPRLHWLLVEDAEGPTPLVSGLLAASGLLFTHLVVLTPKAQRLREGEPGWVHPRGVEQRNKALDWLRGRGGAVGGEKDPPPPGTQGVVYFADDDNTYSRELFEEMRWTRGVSVWPVGLVGGLRFEGPQVQDGRVVGFHTAWEPSRPFPVDMAGFAVALPLLLDKPNAQFDSTAPRGHLESSLLSHLVDPKDLEPRAANCTRVLVWHTRTEKPKMKQEEQLQRQGRGSDPAIEV

SEQ ID NO: 2489 - protein, 147 aa, Homo sapiens
MAGNSILLAAVSILSACQQSYFALQVGKARLKYKVTPPAVTGSPEFERVFRAQQNCVEFYPIFIITLWMAGWYFNQVFATCLGLVYIYGRHLYFWGYSEAAKKRITGFRLSLGILALLTLLGALGIANSFLDEYLDLNIAKKLRRQF

SEQ ID NO: 2490 - protein, 894 aa, Homo sapiens
MILLAVLFLCFISSYSASVKGHTTGLSLNNDRLYKLTYSTEVLLDRGKGKLQDSVGYRISSNVDVALLWRNPDGDDDQLIQITMKDVNVENVNQQRGEKSIFKGKSPSKIMGKENLEALQRPTLLHLIHGKVKEFYSYQNEAVAIENIKRGLASLFQTQLSSGTTNEVDISGNCKVTYQAHQDKVIKIKALDSCKIARSGFTTPNQVLGVSSKATSVTTYKIEDSFVIAVLAEETHNFGLNFLQTIKGKIVSKQKLELKTTEAGPRLMSGKQAAAIIKAVDSKYTAIPIVGQVFQSHCKGCPSLSELWRSTRKYLQPDNLSKAEAVRNFLAFIQHLRTAKKEEILQILKMENKEVLPQLVDAVTSAQTSDSLEAILDFLDFKSDSSIILQERFLYACGFASHPNEELLRALISKFKGSIGSSDIRETVMIITGTLVRKLCQNEGCKLKAVVEAKKLILGGLEKAEKKEDTRMYLLALKNALLPEGIPSLLKYAEAGEGPISHLATTALQRYDLPFITDEVKKTLNRIYHQNRKVHEKTVRTAAAAIILNNNPSYMDVKNILLSIGELPQEMNKYMLAIVQDILRFEMPASKIVRRVLKEMVAHNYDRFSRSGSSSAYTGYIERSPRSASTYSLDILYSGSGILRRSNLNIFQYIGKAGLHGSQVVIEAQGLEALIAATPDEGEENLDSYAGMSAILFDVQLRPVTFFNGYSDLMSKMLSASGDPISVVKGLILLIDHSQELQLQSGLKANIEVQGGLAIDISGAMEFSLWYRESKTRVKNRVTVVITTDITVDSSFVKAGLETSTETEAGLEFISTVQFSQYPFLVCMQMDKDEAPFRQFEKKYERLSTGRGYVSQKRKESVLAGCEFPLHQENSEMCKVVFAPQPDSTSSGWF

SEQ ID NO: 2491 - protein, 296 aa, Homo sapiens
MNAEPERKFGVVVVGVGRAGSVRMRDLRNPHPSSAFLNLIGFVSRRELGSIDGVQQISLEDALSSQEVEVAYICSESSSHEDYIRQFLNAGKHVLVEYPMTLSLAAAQELWELAEQKGKVLHEEHVELLMEEFAFLKKEVVGKDLLKGSLLFTAGPLEEERFGFPAFSGISRLTWLVSLFGELSLVSATLEERKEDQYMKMTVCLETEKKSPLSWIEEKGPGLKRNRYLSFHFKSGSLENVPNVGVNKNIFLKDQNIFVQKLLGQFSEKELAAEKKRILHCLGLAEEIQKYCCSRK

SEQ ID NO: 2492 - protein, 963 aa, Homo sapiens
MAEGGGCRERPDAETQKSELGPLMRTTLQRGAQWYLIDSRWFKQWKKYVGFDSWDMYNVGEHNLFPGPIDNSGLFSDPESQTLKEHLIDELDYVLVPTEAWNKLLNWYGCVEGQQPIVRKVVEHGLFVKHCKVEVYLLELKLCENSDPTNVLSCHFSKADTIATIEKEMRKLFNIPAERETRLWNKYMSNTYEQLSKLDNTVQDAGLYQGQVLVIEPQNEDGTWPRQTLQSKSSTAPSRNFTTSPKSSASPYSSVSASLIANGDSTSTCGMHSSGVSRGGSGFSASYNCQEPPSSHIQPGLCGLGNLGNTCFMNSALQCLSNTAPLTDYFLKDEYEAEINRDNPLGMKGEIAEAYAELIKQMWSGRDAHVAPRMFKTQVGRFAPQFSGYQQQDSQELLAFLLDGLHEDLNRVKKKPYLELKDANGRPDAVVAKEAWENHRLRNDSVIVDTFHGLFKSTLVCPECAKVSVTFDPFCYLTLPLPLKKDRVMEVFLVPADPHCRPTQYRVTVPLMGAVSDLCEALSRLSGIAAENMVVADVYNHRFHKIFQMDEGLNHIMPRDDIFVYEVCSTSVDGSECVTLPVYFRERKSRPSSTSSASALYGQPLLLSVPKHKLTLESLYQAVCDRISRYVKQPLPDEFGSSPLEPGACNGSRNSCEGEDEEEMEHQEEGKEQLSETEGSGEDEPGNDPSETTQKKIKGQPCPKRLFTFSLVNSYGTADINSLAADGKLLKLNSRSTLAMDWDSETRRLYYDEQESEAYEKHVSMLQPQKKKKTTVALRDCIELFTTMETLGEHDPWYCPNCKKHQQATKKFDLWSLPKILVVHLKRFSYNRYWRDKLDTVVEFPIRGLNMSEFVCNLSARPYVYDLIAVSNHYGAMGVGHYTAYAKNKLNGKWYYFDDSNVSLASEDQIVTKAAYVLFYQRRDDEFYKTPSLSSSGSSDGGTRPSSSQQGFGDDEACSMDTN

SEQ ID NO: 2493 - protein, 1636 aa, Homo sapiens
MEAVPRMPMIWLDLKEAGDFHFQPAVKKFVLKNYGENPEAYNEELKKLELLRQNAVRVPRDFEGCSVLRKYLGQLHYLQSRVPMGSGQEAAVPVTWTEIFSGKSVAHEDIKYEQACILYNLGALHSMLGAMDKRVSEEGMKVSCTHFQCAAGAFAYLREHFPQAYSVDMSRQILTLNVNLMLGQAQECLLEKSMLDNRKSFLVARISAQVVDYYKEACRALENPDTASLLGRIQKDWKKLVQMKIYYFAAVAHLHMGKQAEEQQKFGERVAYFQSALDKLNEAIKLAKGQPDTVQDALRFTMDVIGGKYNSAKKDNDFIYHEAVPALDTLQPVKGAPLVKPLPVNPTDPAVTGPDIFAKLVPMAAHEASSLYSEEKAKLLREMMAKIEDKNEVLDQFMDSMQLDPETVDNLDAYSHIPPQLMEKCAALSVRPDTVRNLVQSMQVLSGVFTDVEASLKDIRDLLEEDELLEQKFQEAVGQAGAISITSKAELAEVRREWAKYMEVHEKASFTNSELHRAMNLHVGNLRLLSGPLDQVRAALPTPALSPEDKAVLQNLKRILAKVQEMRDQRVSLEQQLRELIQKDDITASLVTTDHSEMKKLFEEQLKKYDQLKVYLEQNLAAQDRVLCALTEANVQYAAVRRVLSDLDQKWNSTLQTLVASYEAYEDLMKKSQEGRDFYADLESKVAALLERTQSTCQAREAARQQLLDRELKKKPPPRPTAPKPLLPRREESEAVEAGDPPEELRSLPPDMVAGPRLPDTFLGSATPLHFPPSPFPSSTGPGPHYLSGPLPPGTYSGPTQLIQPRAPGPHAMPVAPGPALYPAPAYTPELGLVPRSSPQHGVVSSPYVGVGPAPPVAGLPSAPPPQFSGPELAMAVRPATTTVDSIQAPIPSHTAPRPNPTPAPPPPCFPVPPPQPLPTPYTYPAGAKQPIPAQHHFSSGIPAGFPAPRIGPQPQPHPQPHPSQAFGPQPPQQPLPLQHPHLFPPQAPGLLPPQSPYPYAPQPGVLGQPPPPLHTQLYPGPAQDPLPAHSGALPFPSPGPPQPPHPPLAYGPAPSTRPMGPQAAPLTIRGPSSAGQSTPSPHLVPSPAPSPGPGPVPPRPPAAEPPPCLRRGAAAADLLSSSPESQHGGTQSPGGGQPLLQPTKVDAAEGRRPQALRLIERDPYEHPERLRQLQQELEAFRGQLGDVGALDTVWRELQDAQEHDARGRSIAIARCYSLKNRHQDVMPYDSNRVVLRSGKDDYINASCVEGLSPYCPPLVATQAPLPGTAADFWLMVHEQKVSVIVMLVSEAEMEKQKVARYFPTERGQPMVHGALSLALSSVRSTETHVERVLSLQFRDQSLKRSLVHLHFPTWPELGLPDSPSNLLRFIQEVHAHYLHQRPLHTPIIVHCSSGVGRTGAFALLYAAVQEVEAGNGIPELPQLVRRMRQQRKHMLQEKLHLRFCYEAVVRHVEQVLQRHGVPPPCKPLASASISQKNHLPQDSQDLVLGGDVPISSIQATIAKLSIRPPGGLESPVASLPGPAEPPGLPPASLPESTPIPSSSPPPLSSPLPEAPQPKEEPPVPEAPSSGPPSSSLELLASLTPEAFSLDSSLRGKQRMSKHNFLQAHNGQGLRATRPSDDPLSLLDPLWTLNKT

SEQ ID NO: 2494 - protein, 404 aa, Homo sapiens
MSHIQIPPGLTELLQGYTVEVLRQQPPDLVEFAVEYFTRLREARAPASVLPAATPRQSLGHPPPEPGPDRVADAKGDSESEEDEDLEVPVPSRFNRRVSVCAETYNPDEEEEDTDPRVIHPKTDEQRCRLQEACKDILLFKNLDQEQLSQVLDAMFERIVKADEHVIDQGDDGDNFYVIERGTYDILVTKDNQTRSVGQYDNRGSFGELALMYNTPRAATIVATSEGSLWGLDRVTFRRIIVKNNAKKRKMFESFIESVPLLKSLEVSERMKIVDVIGEKIYKDGERIITQGEKADSFYIIESGEVSILIRSRTKSNKDGGNQEVEIARCHKGQYFGELALVTNKPRAASAYAVGDVKCLVMDVQAFERLLGPCMDIMKRNISHYEEQLVKMFGSSVDLGNLGQ

SEQ ID NO: 2495 - protein, 291 aa, Homo sapiens [sequence omitted]

SEQ ID NO: 2496 - protein, 1394 aa, Homo sapiens
MKDIDIGKEYIIPSPGYRSVRERTSTSGTHRDREDSKFRRTRPLECQDALETAARAEGLSLDASMHSQLRILDEEHPKGKYHHGLSALKPIRTTSKHQHPVDNAGLFSCMTFSWLSSLARVAHKKGELSMEDVWSLSKHESSDVNCRRLERLWQEELNEVGPDAASLRRVVWIFCRTRLILSIVCLMITQLAGFSGPAFMVKHLLEYTQATESNLQYSLLLVLGLLLTEIVRSWSLALTWALNYRTGVRLRGAILTMAFKKILKLKNIKEKSLGELINICSNDGQRMFEAAAVGSLLAGGPVVAILGMIYNVIILGPTGFLGSAVFILFYPAMMFASRLTAYFRRKCVAATDERVQKMNEVLTYIKFIKMYAWVKAFSQSVQKIREEERRILEKAGYFQSITVGVAPIVVVIASVVTFSVHMTLGFDLTAAQAFTVVTVFNSMTFALKVTPFSVKSLSEASVAVDRFKSLFLMEEVHMIKNKPASPHIKIEMKNATLAWDSSHSSIQNSPKLTPKMKKDKRASRGKKEKVRQLQRTEHQAVLAEQKGHLLLDSDERPSPEEEEGKHIHLGHLRLQRTLHSIDLEIQEGKLVGICGSVGSGKTSLISAILGQMTLLEGSIAISGTFAYVAQQAWILNATLRDNILFGKEYDEERYNSVLNSCCLRPDLAILPSSDLTEIGERGANLSGGQRQRISLARALYSDRSIYILDDPLSALDAHVGNHIFNSAIRKHLKSKTVLFVTHQLQYLVDCDEVIFMKEGCITERGTHEELMNLNGDYATIFNNLLLGETPPVEINSKKETSGSQKKSQDKGPKTGSVKKEKAVKPEEGQLVQLEEKGQGSVPWSVYGVYIQAAGGPLAFLVIMALFMLNVGSTAFSTWWLSYWIKQGSGNTTVTRGNETSVSDSMKDNPHMQYYASIYALSMAVMLILKAIRGVVFVKGTLRASSRLHDELFRRILRSPMKFFDTTPTGRILNRFSKDMDEVDVRLPFQAEMFIQNVILVFFCVGMIAGVFPWFLVAVGPLVILFSVLHIVSRYQELLDDNQAPFFLFTCAMRWLAVRLDLISIALITTTGLMIVLMHGQIPPAYAGLAISYAVQLTGLFQFTVRLASETEARFTSVERINHYIKTLSLEAPARIKNKAPSPDWPQEGEVTFENAEMRYRENLPLVLKKVSFTIKPKEKIGIVGRTGSGKSSLGMALFRLVELSGGCIKIDGVRISDIGLADLRSKLSIIPQEPVLFSGTVRSNLDPFNQYTEDQIWDALERTHMKECIAQLPLKLESEVMENGDNFSVGERQLLCIARALLRHCKILILDEATAAMDTETDLLIQETIREAFADCTMLTIAHRLHTVLGSDRIMVLAQGQVVEFDTPSVLLSNDSSRFYAMFAAAENKVAVKG

SEQ ID NO: 2497 - protein, 725 aa, Homo sapiens
MAAASAVSVLLVAAERNRWHRLPSLLLPPRTWVWRQRTMKYTTATGRNITKVLIANRGEIACRVMRTAKKLGVQTVAVYSEADRNSMHVDMADEAYSIGPAPSQQSYLSMEKIIQVAKTSAAQAIHPGCGFLSENMEFAELCKQEGIIFIGPPPSAIRDMGIKSTSKSIMAAAGVPVVEGYHGEDQSDQCLKEHARRIGYPVMIKAVRGGGGKGMRIVRSEQEFQEQLESARREAKKSFNDDAMLIEKFVDTPRHVEVQVFGDHHGNAVYLFERDCSVQRRHQKIIEEAPAPGIKSEVRKKLGEAAVRAAKAVNYVGAGTVEFIMDSKHNFCFMEMNTRLQVEHPVTEMITGTDLVEWQLRIAAGEKIPLSQEEITLQGHAFEARIYAEDPSNNFMPVAGPLVHLSTPRADPSTRIETGVRQGDEVSVHYDPMIAKLVVWAADRQAALTKLRYSLRQYNIVGLHTNIDFLLNLSGHPEFEAGNVHTDFIPQHHKQLLLSRKAAAKESLCQAALGLILKEKAMTDTFTLQAHDQFSPFSSSSGRRLNISYTRNMTLKDGKNNVAIAVTYNHDGSYSMQIEDKTFQVLGNLYSEGDCTYLKCSVNGVASKAKLIILENTIYLFSKEGSIEIDIPVPKYLSSVSSQETQGGPLAPMTGTIEKVFVKAGDKVKAGDSLMVMIAMKMEHTIKSPKDGTVKKVFYREGAQANRHTPLVEFEEEESDKRESE

SEQ ID NO: 2498 - protein, 416 aa, Homo sapiens
MPRQLSAAAALFASLAVILHDGSQMRAKAFPETRDYSQPTAAATVQDIKKPVQQPAKQAPHQTLAARFMDGHITFQTAATVKIPTTTPATTKNTATTSPITYTLVTTQATPNNSHTAPPVTEVTVGPSLAPYSLPPTITPPAHTTGTSSSTVSHTTGNTTQPSNQTTLPATLSIALHKSTTGQKPVQPTHAPGTTAAAHNTTRTAAPASTVPGPTLAPQPSSVKTGIYQVLNGSRLCIKAEMGIQLIVQDKESVFSPRRYFNIDPNATQASGNCGTRKSNLLLNFQGGFVNLTFTKDEESYYISEVGAYLTVSDPETIYQGIKHAVVMFQTAVGHSFKCVSEQSLQLSAHLQVKTTDVQLQAFDFEDDHFGNVDECSSDYTIVLPVIGAIVVGLCLMGMGVYKIRLRCQSSGYQRI

SEQ ID NO: 2499 - protein, 379 aa, Homo sapiens
MGCLGNSKTEDQRNEEKAQREANKKIEKQLQKDKQVYRATHRLLLLGAGESGKSTIVKQMRILHVNGFNGDEKATKVQDIKNNLKEAIETIVAAMSNLVPPVELANPENQFRVDYILSVMNVPDFDFPPEFYEHAKALWEDEGVRACYERSNEYQLIDCAQYFLDKIDVIKQADYVPSDQDLLRCRVLTSGIFETKFQVDKVNFHMFDVGGQRDERRKWIQCFNDVTAIIFVVASSSYNMVIREDNQTNRLQEALNLFKSIWNNRWLRTISVILFLNKQDLLAEKVLAGKSKIEDYFPEFARYTTPEDATPEPGEDPRVTRAKYFIRDEFLRISTASGDGRHYCYPHFTCAVDTENIRRVFNDCRDIIQRMHLRQYELL

SEQ ID NO: 2500 - protein, 237 aa, Homo sapiens
MMVMVVVITCLLSHYKLSARSFISRHSQGRRREDALSSEGCLWPSESTVSGNGIPEPQVYAPPRPTDRLAVPPFAQRERFHRFQPTYPYLQHEIDLPPTISLSDGEEPPPYQGPCTLQLRDPEQQLELNRESVRAPPNRTIFDSDLMDSARLGGPCPPSSNSGISATCYGSGGRMEGPPPTYSEVIGHYPGSSFQHQQSSGPPSLLEGTRLHHTHIAPLESAAIWSKEKDKQKGHPL

SEQ ID NO: 2501 - protein, 354 aa, Homo sapiens
MGKLVALVLLGVGLSLVGEMFLAFRERVNASREVEPVEPENCHLIEELESGSEDIDILPSGLAFISSGLKYPGMPNFAPDEPGKIFLMDLNEQNPRAQALEISGGFDKELFNPHGISIFIDKDNTVYLYVVNHPHMKSTVEIFKFEEQQRSLVYLKTIKHELLKSVNDIVVLGPEQFYATRDHYFTNSLLSFFEMILDLRWTYVLFYSPREVKVVAKGFCSANGITVSADQKYVYVADVAAKNIHIMEKHDNWDLTQLKVIQLGTLVDNLTVDPATGDILAGCHPNPMKLLNYNPEDPPGSEVLRIQNVLSEKPRVSTVYANNGSVLQGTSVASVYHGKILIGTVFHKTLYCEL

SEQ ID NO: 2502 - protein, 675 aa, Homo sapiens
MAAAKVALTKRADPAELRTIFLKYASIEKNGEFFMSPNDFVTRYLNIFGESQPNPKTVELLSGVVDQTKDGLISFQEFVAFESVLCAPDALFMVAFQLFDKAGKGEVTFEDVKQVFGQTTIHQHIPFNWDSEFVQLHFGKERKRHLTYAEFTQFLLEIQLEHAKQAFVQRDNARTGRVTAIDFRDIMVTIRPHVLTPFVEECLVAAAGGTTSHQVSFSYFNGFNSLLNNMELIRKIYSTLAGTRKDVEVTKEEFVLAAQKFGQVTPMEVDILFQLADLYEPRGRMTLADIERIAPLEEGTLPFNLAEAQRQKASGDSARPVLLQVAESAYRFGLGSVAGAVGATAVYPIDLVKTRMQNQRSTGSFVGELMYKNSFDCFKKVLRYEGFFGLYRGLLPQLLGVAPEKAIKLTVNDFVRDKFMHKDGSVPLAAEILAGGCAGGSQVIFTNPLEIVKIRLQVAGEITTGPRVSALSVVRDLGFFGIYKGAKACFLRDIPFSAIYFPCYAHVKASFANEDGQVSPGSLLLAGAIAGMPAASLVTPADVIKTRLQVAARAGQTTYSGVIDCFRKILREEGPKALWKGAGARVFRSSPQFGVTLLTYELLQRWFYIDFGGVKPMGSEPVPKSRINLPAPNPDHVGGYKLAVATFAGIENKFGLYLPLFKPSVSTSKAIGGGP

SEQ ID NO: 2503 - protein, 431 aa, Homo sapiens
MLALLAASVALAVAAGAQDSPAPGSRFVCTALPPEAVHAGCPLPAMPMQGGAQSPEEELRAAVLQLRETVVQQKETLGAQREAIRELTGKLARCEGLAGGKARGAGATGKDTMGDLPRDPGHVVEQLSRSLQTLKDRLESLEHQLRANVSNAGLPGDFREVLQQRLGELERQLLRKVAELEDEKSLLHNETSAHRQKTESTLNALLQRVTELERGNSAFKSPDAFKVSLPLRTNYLYGKIKKTLPELYAFTICLWLRSSASPGIGTPFSYAVPGQANEIVLIEWGNNPIELLINDKVAQLPLFVSDGKWHHICVTWTTRDGMWEAFQDGEKLGTGENLAPWHPIKPGGVLILGQEQDTVGGRFDATQAFVGELSQFNIWDRVLRAQEIVNIANCSTNMPGNIIPWVDNNVDVFGGASKWPVETCEERLLDL

SEQ ID NO: 2504 - protein, 827 aa, Homo sapiens
MFWKFDLHSSSHIDTLLEREDVTLKELMDEEDVLQECKAQNRKLIEFLLKAECLEDLVSFIIEEPPQDMDEKIRYKYPNISCELLTSDVSQMNDRLGEDESLLMKLYSFLLNDSPLNPLLASFFSKVLSILISRKPEQIVDFLKKKHDFVDLIIKHIGTSAIMDLLLRLLTCIEPPQPRQDVLNWLNEEKIIQRLVEIVHPSQEEDRHSNASQSLCEIVRLSRDQMLQIQNSTEPDPLLATLEKQEIIEQLLSNIFHKEKNESAIVSAIQILLTLLETRRPTFEGHIEICPPGMSHSACSVNKSVLEAIRGRLGSFHELLLEPPKKSVMKTTWGVLDPPVGNTRLNVIRLISSLLQTNTSSINGDLMELNSIGVILNMFFKYTWNNFLHTQVEICIALILASPFENTENATITDQDSTGDNLLLKHLFQKCQLIERILEAWEMNEKKQAEGGRRHGYMGHLTRIANCIVHSTDKGPNSALVQQLIKDLPDEVRERWETFCTSSLGETNKRNTVDLFGFNDEKFADQDDIGNVSFDRVSDINFTLNTNESGNIALFEACCKERIQQFDDGGSDEEDIWEEKHIAFTPESQRRSSSGSTDSEESTDSEEEDGAKQDLFEPSSANTEDKMEVDLSEPPNWSANFDVPMETTHGAPLDSVGSDVWSTEEPMPTKETGWASFSEFTSSLSTKDSLRSNSPVEMETSTEPMDPLTPSAAALAVQPEAAGSVAMEASSDGEEDAESTDKVTETVMNGGMKETLSLTVDAKTETAVFKSEEGKLSTSQDAACKDAEECPETAEAKCAAPRPPSSSPEQRTGQPSAPGDTSVNGPV

SEQ ID NO: 2505 - protein, 773 aa, Homo sapiens
MAEAHQAVAFQFTVTPDGIDLRLSHEALRQIYLSGLHSWKKKFIRFKNGIITGVYPASPSSWLIVVVGVMTTMYAKIDPSLGIIAKINRTLETANCMSSQTKNVVSGVLFGTGLWVALIVTMRYSLKVLLSYHGWMFTEHGKMSRATKIWMGMVKIFSGRKPMLYSFQTSLPRLPVPAVKDTVNRYLQSVRPLMKEEDFKRMTALAQDFAVGLGPRLQWYLKLKSWWATNYVSDWWEEYIYLRGRGPLMVNSNYYAMDLLYILPTHIQAARAGNAIHAILLYRRKLDREEIKPIRLLGSTIPLCSAQWERMFNTSRIPGEETDTIQHMRDSKHIVVYHRGRYFKVWLYHDGRLLKPREMEQQMQRILDNTSEPQPGEARLAALTAGDRVPWARCRQAYFGRGKNKQSLDAVEKAAFFVTLDETEEGYRSEDPDTSMDSYAKSLLHGRCYDRWFDKSFTFVVFKNGKMGLNAEHSWADAPIVAHLWEYVMSIDSLQLGYAEDGHCKGDINPNIPYPTRLQWDIPGECQEVIETSLNTANLLANDVDFHSFPFVAFGKGIIKKCRTSPDAFVQLALQLAHYKDMGKFCLTYEASMTRLFREGRTETVRSCTTESCDFVRAMVDPAQTVEQRLKLFKLASEKHQHMYRLAMTGSGIDRHLFCLYVVSKYLAVESPFLKEVLSEPWRLSTSQTPQQQVELFDLENNPEYVSSGGGFGPVADDGYGVSYILVGENLINFHISSKFSCPETDSHRFGRHLKEAMTDIITLFGLSSNSKK

SEQ ID NO: 2506 - protein, 123 aa, Homo sapiens
MARGSALLLASLLLAAALSASAGLWSPAKEKRGWTLNSAGYLLGPHAVGNHRSFSDKNGLTSKRELRPEDDMKPGSFDRSIPENNIMRTIIEFLSFLHLKEAGALDRLLDLPAAASSEDIERS

SEQ ID NO: 2507 - protein, 471 aa, Homo sapiens
MAAMETETAPLTLESLPTDPLLLILSFLDYRDLINCCYVSRRLSQLSSHDPLWRRHCKKYWLISEEEKTQKNQCWKSLFIDTYSDVGRYIDHYAAIKKAWDDLKKYLEPRCPRMVLSLKEGAREEDLDAVEAQIGCKLPDDYRCSYRIHNGQKLVVPGLLGSMALSNHYRSEDLLDVDTAAGGFQQRQGLKYCLPLTFCIHTGLSQYIAVEAAEGRNKNEVFYQCPDQMARNPAAIDMFIIGATFTDWFTSYVKNVVSGGFPIIRDQIFRYVHDPECVATTGDITVSVSTSFLPELSSVHPPHYFFTYRIRIEMSKDALPEKACQLDSRYWRITNAKGDVEEVQGPGVVGEFPIISPGRVYEYTSCTTFSTTSGYMEGYYTFHFLYFKDKIFNVAIPRFHMACPTFRVSIARLEMGPDEYEEMEEEEEEEEEEDEDDDSADMDESDEDDEEERRRRVFDVPIRRRRCSRLF

SEQ ID NO: 2508 - protein, 830 aa, Homo sapiens
MGSMFRSEEVALVQLFLPTAAAYTCVSRLGELGLVEFRDLNASVSAFQRRFVVDVRRCEELEKTFTFLQEEVRRAGLVLPPPKGRLPAPPPRDLLRIQEETERLAQELRDVRGNQQALRAQLHQLQLHAAVLRQGHEPQLAAAHTDGASERTPLLQAPGGPHQDLRVNFVAGAVEPHKAPALERLLWRACRGFLIASFRELEQPLEHPVTGEPATWMTFLISYWGEQIGQKIRKITDCFHCHVFPFLQQEEARLGALQQLQQQSQELQEVLGETERFLSQVLGRVLQLLPPGQVQVHKMKAVYLALNQCSVSTTHKCLIAEAWCSVRDLPALQEALRDSSMEEGVSAVAHRIPCRDMPPTLIRTNRFTASFQGIVDAYGVGRYQEVNPAPYTIITFPFLFAVMFGDVGHGLLMFLFALAMVLAENRPAVKAAQNEIWQTFFRGRYLLLLMGLFSIYTGFIYNECFSRATSIFPSGWSVAAMANQSGWSDAFLAQHTMLTLDPNVTGVFLGPYPFGIDPIWSLAANHLSFLNSFKMKMSVILGVVHMAFGVVLGVFNHVHFGQRHRLLLETLPELTFLLGLFGYLVFLVIYKWLCVWAARAASAPSILIHFINMFLFSHSPSNRLLYPRQEVVQATLVVLALAMVPILLLGTPLHLLHRHRRRLRRRPADRQEENKAGLLDLPDASVNGWSSDEEKAGGLDDEEEAELVPSEVLMHQAIHTIEFCLGCVSNTASYLRLWALSLAHAQLSEVLWAMVMRIGLGLGREVGVAAVVLVPIFAAFAVMTVAILLVMEGLSAFLHALRLHWVEFQNKFYSGTGYKLSPFTFAATDD

SEQ ID NO: 2509 - protein, 457 aa, Homo sapiens
MKTKFCTGGEAEPSPLGLLLSCGSGSAAPAPGVGQQRDAASDLESKQLGGQQPPLALPPPPPLPLPLPLPQPPPPQPPADEQPEPRTRRRAYLWCKEFLPGAWRGLREDEFHISVIRGGLSNMLFQCSLPDTTATLGDEPRKVLLRLYGAILQMRSCNKEGSEQAQKENEFQGAEAMVLESVMFAILAERSLGPKLYGIFPQGRLEQFIPSRRLDTEELSLPDISAEIAEKMATFHGMKMPFNKEPKWLFGTMEKYLKEVLRIKFTEESRIKKLHKLLSYNLPLELENLRSLLESTPSPVVFCHNDCQEGNILLLEGRENSEKQKLMLIDFEYSSYNYRGFDIGNHFCEWMYDYSYEKYPFFRANIRKYPTKKQQLHFISSYLPAFQNDFENLSTEEKSIIKEEMLLEVNRFALASHFLWGLWSIVQAKISSIEFGYMDYAQARFDAYFHQKRKLGV

SEQ ID NO: 2510 - protein, 739 aa, Homo sapiens
MFLLLALLTELGRLQAHEGSEGIFLHVTVPRKIKSNDSEVSERKMIYIITIDGQPYTLHLGKQSFLPQNFLVYTYNETGSLHSVSPYFMMHCHYQGYAAEFPNSFVTLSICSGLRGFLQFENISYGIEPVESSARFEHIIYQMKNNDPNVSILAVNYSHIWQKDQPYKVPLNSQIKNLSKLLPQYLEIYIIVEKALYDYMGSEMMAVTQKIVQVIGLVNTMFTQFKLTVILSSLELWSNENQISTSGDADDILQRFLAWKRDYLILRPHDIAYLLVYRKHPKYVGATFPGTVCNKSYDAGIAMYPDAIGLEGFSVIIAQLLGLNVGLTYDDITQCFCLRATCIMNHEAVSASGRKIFSNCSMHDYRYFVSKFETKCLQKLSNLQPLHQNQPVCGNGILESNEECDCGNKNECQFKKCCDYNTCKLKGSVKCGSGPCCTSKCELSIAGTPCRKSIDPECDFTEYCNGTSSNCVPDTYALNGRLCKLGTAYCYNGQCQTTDNQCAKIFGKGAQGAPFACFKEVNSLHERSENCGFKNSQPLPCERKDVLCGKLACVQPHKNANKSDAQSTVYSYIQDHVCVSIATGSSMRSDGTDNAYVADGTMCGPEMYCVNKTCRKVHLMGYNCNATTKCKGKGICNNFGNCQCFPGHRPPDCKFQFGSPGGSIDDGNFQKSGDFYTEKGYNTHWNNWFILSFCIFLPFFIVFTTVIFKRNEISKSCNRENAEYNRNSSVVSESDDVGH

SEQ ID NO: 2511 - protein, 735 aa, Homo sapiens
MWRVLFLLSGLGGLRMDSNFDSLPVQITVPEKIRSIIKEGIESQASYKIVIEGKPYTVNLMQKNFLPHNFRVYSYSGTGIMKPLDQDFQNFCHYQGYIEGYPKSVVMVSTCTGLRGVLQFENVSYGIEPLESSVGFEHVIYQVKHKKADVSLYNEKDIESRDLSFKLQSVEPQQDFAKYIEMHVIVEKQLYNHMGSDTTVVAQKVFQLIGLTNAIFVSFNITIILSSLELWIDENKIATTGEANELLHTFLRWKTSYLVLRPHDVAFLLVYREKSNYVGATFQGKMCDANYAGGVVLHPRTISLESLAVILAQLLSLSMGITYDDINKCQCSGAVCIMNPEAIHFSGVKIFSNCSFEDFAHFISKQKSQCLHNQPRLDPFFKQQAVCGNAKLEAGEECDCGTEQDCALIGETCCDIATCRFKAGSNCAEGPCCENCLFMSKERMCRPSFEECDLPEYCNGSSASCPENHYVQTGHPCGLNQWICIDGVCMSGDKQCTDTFGKEVEFGPSECYSHLNSKTDVSGNCGISDSGYTQCEADNLQCGKLICKYVGKFLLQIPRATIIYANISGHLCIAVEFASDHADSQKMWIKDGTSCGSNKVCRNQRCVSSSYLGYDCTTDKCNDRGVCNNKKHCHCSASYLPPDCSVQSDLWPGGSIDSGNFPPVAIPARLPERRYIENIYHSKPMRWPFFLFIPFFIIFCVLIAIMVKVNFQRKKWRTEDYSSDEQPESESEPKG

SEQ ID NO: 2512 - protein, 2004 aa, Homo sapiens
MVKLANPLYTEWILEAIKKVKKQKQRPSEERICNAVSSSHGLDRKTVLEQLELSVKDGTILKVSNKGLNSYKDPDNPGRIALPKPRNHGKLDNKQNVDWNKLIKRAVEGLAESGGSTLKSIERFLKGQKDVSALFGGSAASGFHQQLRLAIKRAIGHGRLLKDGPLYRLNTKATNVDGKESCESLSCLPPVSLLPHEKDKPVAEPIPICSFCLGTKEQNREKKPEELISCADCGNSGHPSCLKFSPELTVRVKALRWQCIECKTCSSCRDQGKNADNMLFCDSCDRGFHMECCDPPLTRMPKGMWICQICRPRKKGRKLLQKKAAQIKRRYTNPIGRPKNRLKKQNTVSKGPFSKVRTGPGRGRKRKITLSSQSASSSSEEGYLERIDGLDFCRDSNVSLKFNKKTKGLIDGLTKFFTPSPDGRKARGEVVDYSEQYRIRKRGNRKSSTSDWPTDNQDGWDGKQENEERLFGSQEIMTEKDMELFRDIQEQALQKVGVTGPPDPQVRCPSVIEFGKYEIHTWYSSPYPQEYSRLPKLYLCEFCLKYMKSRTILQQHMKKCGWFHPPANEIYRKNNISVFEVDGNVSTIYCQNLCLLAKLFLDHKTLYYDVEPFLFYVLTQNDVKGCHLVGYFSKEKHCQQKYNVSCIMILPQYQRKGYGRFLIDFSYLLSKREGQAGSPEKPLSDLGRLSYMAYWKSVILECLYHQNDKQISIKKLSKLTGICPQDITSTLHHLRMLDFRSDQFVIIRREKLIQDHMAKLQLNLRPVDVDPECLRWTPVIVSNSVVSEEEEEEAEEGENEEPQCQERELEISVGKSVSHENKEQDSYSVESEKKPEVMAPVSSTRLSKQVLPHDSLPANSQPSRRGRWGRKNRKTQERFGDKDSKLLLEETSSAPQEQYGECGEKSEATQEQYTESEEQLVASEEQPSQDGKPDLPKRRLSEGVEPWRGQLKKSPEALKCRLTEGSERLPRRYSEGDRAVLRGFSESSEEEEEPESPRSSSPPILTKPTLKRKKPFLHRRRRVRKRKHHNSSVVTETISETTEVLDEPFEDSDSERPMPRLEPTFEIDEEEEEEDENELFPREYFRRLSSQDVLRCQSSSKRKSKDEEEDEESDDADDTPILKPVSLLRKRDVKNSPLEPDTSTPLKKKKGWPKGKSRKPIHWKKRPGRKPGFKLSREIMPVSTQACVIEPIVSIPKAGRKPKIQESEETVEPKEDMPLPEERKEEEEMQAEAEEAEEGEEEDAASSEVPAASPADSSNSPETETKEPEVEEEEEKPRVSEEQRQSEEEQQELEEPEPEEEEDAAAETAQNDDHDADDEDDGHLESTKKKELEEQPTREDVKEEPGVQESFLDANMQKSREKIKDKEETELDSEEEQPSHDTSVVSEQMAGSEDDHEEDSHTKEELIELKEEEEIPHSELDLETVQAVQSLTQEESSEHEGAYQDCEETLAACQTLQSYTQADEDPQMSMVEDCHASEHNSPISSVQSHPSQSVRSVSSPNVPALESGYTQISPEQGSLSAPSMQNMETSPMMDVPSVSDHSQQVVDSGFSDLGSIESTTENYENPSSYDSTMGGSICGNSSSQSSCSYGGLSSSSSLTQSSCVVTQQMASMGSSCSMMQQSSVQPAANCSIKSPQSCVVERPPSNQQQQPPPPPPQQPQPPPPQPQPAPQPPPPQQQPQQQPQPQPQQPPPPPPPQQQPPLSQCSMNNSFTPAPMIMEIPESGSTGNISIYERIPGDFGAGSYSQPSATFSLAKLQQLTNTIMDPHAMPYSHSPAVTSYATSVSLSNTGLAQLAPSHPLAGTPQAQATMTPPPNLASTTMNLTSPLLQCNMSATNIGIPHTQRLQGQMPVKGHISIRSKSAPLPSAAAHQQQLYGRSPSAVAMQAGPRALAVQRGMNMGVNLMPTPAYNVNSMNMNTLNAMNSYRMTQPMMNSSYHSNPAYMNQTAQYPMQMQMGMMGSQAYTQQPMQPNPHGNMMYTGPSHHSYMNAAGVPKQSLNGPYMRR

SEQ ID NO: 2513 - protein, 418 aa, Homo sapiens
MSIEIPAGLTELLQGFTVEVLRHQPADLLEFALQHFTRLQQENERKGTARFGHEGRTWGDLGAAAGGGTPSKGVNFAEEPMQSDSEDGEEEEAAPADAGAFNAPVINRFTRRASVCAEAYNPDEEEDDAESRIIHPKTDDQRNRLQEACKDILLFKNLDPEQMSQVLDAMFEKLVKDGEHVIDQGDDGDNFYVIDRGTFDIYVKCDGVGRCVGNYDNRGSFGELALMYNTPRAATITATSPGALWGLDRVTFRRIIVKNNAKKRKMYESFIESLPFLKSLEFSERLKVVDVIGTKVYNDGEQIIAQGDSADSFFIVESGEVKITMKRKGKSEVEENGAVEIARCSRGQYFGELALVTNKPRAASAHAIGTVKCLAMDVQAFERLLGPCMEIMKRNIATYEEQLVALFGTNMDIVEPTA

SEQ ID NO: 2514 - protein, 906 aa, Homo sapiens
MQAAVAVSVPFLLLCVLGTCPPARCGQAGDASLMELEKRKENRFVERQSIVPLRLIYRSGGEDESRHDALDTRVRGDLGGPQLTHVDQASFQVDAFGTSFILDVVLNHDLLSSEYIERHIEHGGKTVEVKGGEHCYYQGHIRGNPDSFVALSTCHGLHGMFYDGNHTYLIEPEENDTTQEDFHFHSVYKSRLFEFSLDDLPSEFQQVNITPSKFILKPRPKRSKRQLRRYPRNVEEETKYIELMIVNDHLMFKKHRLSVVHTNTYAKSVVNMADLIYKDQLKTRIVLVAMETWATDNKFAISENPLITLREFMKYRRDFIKEKSDAVHLFSGSQFESSRSGAAYIGGICSLLKGGGVNEFGKTDLMAVTLAQSLAHNIGIISDKRKLASGECKCEDTWSGCIMGDTGYYLPKKFTQCNIEEYHDFLNSGGGACLFNKPSKLLDPPECGNGFIETGEECDCGTPAECVLEGAECCKKCTLTQDSQCSDGLCCKKCKFQPMGTVCREAVNDCDIRETCSGNSSQCAPNIHKMDGYSCDGVQGICFGGRCKTRDRQCKYIWGQKVTASDKYCYEKLNIEGTEKGNCGKDKDTWIQCNKRDVLCGYLLCTNIGNIPRLGELDGEITSTLVVQQGRTLNCSGGHVKLEEDVDLGYVEDGTPCGPQMMCLEHRCLPVASFNFSTCLSSKEGTICSGNGVCSNELKCVCNRHWIGSDCNTYFPHNDDAKTGITLSGNGVAGTNIIIGIIAGTILVLALILGITAWGYKNYREQRQLPQGDYVKKPGDGDSFYSDIPPGVSTNSASSSKKRSNGLSHSWSERIPDTKHISDICENGRPRSNSWQGNLGGNKKKIRGKRFRPRSNSTETLSPAKSPSSSTGSIASSRKYPYPMPPLPDEDKKVNRQSARLWETSI

SEQ ID NO: 2515 - protein, 198 aa, Homo sapiens
MAYPGHPGAGGGYYPGGYGGAPGGPAFPGQTQDPLYGYFAAVAGQDGQIDADELQRCLTQSGIAGGYKPFNLETCRLMVSMLDRDMSGTMGFNEFKELWAVLNGWRQHFISFDTDRSGTVDPQELQKALTTMGFRLSPQAVNSIAKRYSTNGKITFDDYIACCVKLRALTDSFRRRDTAQQGVVNFPYDDFIQCVMSV

SEQ ID NO: 2516 - protein, 367 aa, Homo sapiens
MASSGGELGSLFDHHVQRAVCDTRAKYREGRRPRAVKVYTINLESQYLLIQGVPAVGVMKELVERFALYGAIEQYNALDEYPAEDFTEVYLIKFMNLQSARTAKRKMDEQSFFGGLLHVCYAPEFETVEETRKKLQMRKAYVVKTTENKDHYVTKKKLVTEHKDTEDFRQDFHSEMSGFCKAALNTSAGNSNPYLPYSCELPLCYFSSKCMCSSGGPVDRAPDSSKDGRNHHKTMGHYNHNDSLRKTQINSLKNSVACPGAQKAITSSEAVDRFMPRTTQLQERKRRREDDRKLGTFLQTNPTGNEIMIGPLLPDISKVDMHDDSLNTTANLIRHKLKEVISSVPKPPEDKPEDVHTSHPLKQRRRI

SEQ ID NO: 2517 - protein, 326 aa, Homo sapiens
MEKDGLCRADQQYECVAEIGEGAYGKVFKARDLKNGGRFVALKRVRVQTGEEGMPLSTIREVAVLRHLETFEHPNVVRLFDVCTVSRTDRETKLTLVFEHVDQDLTTYLDKVPEPGVPTETIKDMMFQLLRGLDFLHSHRVVHRDLKPQNILVTSSGQIKLADFGLARIYSFQMALTSVVVTLWYRAPEVLLQSSYATPVDLWSVGCIFAEMFRRKPLFRGSSDVDQLGKILDVIGLPGEEDWPRDVALPRQAFHSKSAQPIEKFVTDIDELGKDLLLKCLTFNPAKRISAYSALSHPYFQDLERCKENLDSHLPPSQNTSELNTA

SEQ ID NO: 2518 - protein, 1089 aa, Homo sapiens
MGNTTTKFRKALINGDENLACQIYENNPQLKESLDPNTSYGEPYQHNTPLHYAARHGMNKILGTFLGRDGNPNKRNVHNETSMHLLCMGPQIMISEGALHPRLARPTEDDFRRADCLQMILKWKGAKLDQGEYERAAIDAVDNKKNTPLHYAAASGMKACVELLVKHGGDLFAENENKDTPCDCAEKQHHKDLALNLESQMVFSRDPEAEEIEAEYAALDKREPYEGLRPQDLRRLKDMLIVETADMLQAPLFTAEALLRAHDWDREKLLEAWMSNPENCCQRSGVQMPTPPPSGYNAWDTLPSPRTPRTTRSSVTSPDEISLSPGDLDTSLCDICMCSISVFEDPVDMPCGHDFCRGCWESFLNLKIQEGEAHNIFCPAYDCFQLVPVDIIESVVSKEMDKRYLQFDIKAFVENNPAIKWCPTPGCDRAVRLTKQGSNTSGSDTLSFPLLRAPAVDCGKGHLFCWECLGEAHEPCDCQTWKNWLQKITEMKPEELVGVSEAYEDAANCLWLLTNSKPCANCKSPIQKNEGCNHMQCAKCKYDFCWICLEEWKKHSSSTGGYYRCTRYEVIQHVEEQSKEMTVEAEKKHKRFQELDRFMHYYTRFKNHEHSYQLEQRLLKTAKEKMEQLSRALKETEGGCPDTTFIEDAVHVLLKTRRILKCSYPYGFFLEPKSTKKEIFELMQTDLEMVTEDLAQKVNRPYLRTPRHKIIKAACLVQQKRQEFLASVARGVAPADSPEAPRRSFAGGTWDWEYLGFASPEEYAEFQYRRRHRQRRRGDVHSLLSNPPDPDEPSESTLDIPEGGSSSRRPGTSVVSSASMSVLHSSSLRDYTPASRSENQDSLQALSSLDEDDPNILLAIQLSLQESGLALDEETRDFLSNEASLGAIGTSLPSRLDSVPRNTDSPRAALSSSELLELGDSLMRLGAENDPFSTDTLSSHPLSEARSDFCPSSSDPDSAGQDPNINDNLLGNIMAWFHDMNPQSIALIPPATTEISADSQLPCIKDGSEGVKDVELVLPEDSMFEDASVSEGRGTQIEENPLEENILAGEAASQAGDSGNEAANRGDGSDVSSQTPQTSSDWLEQVHLV

SEQ ID NO: 2519 - protein, 1124 aa, Homo sapiens
MDPFTEKLLERTRARRENLQRKMAERPTAAPRSMTHAKRARQPLSEASNQQPLSGGEEKSCTKPSPSKKRCSDNTEVEVSNLENKQPVESTSAKSCSPSPVSPQVQPQAADTISDSVAVPASLLGMRRGLNSRLEATAASSVKTRMQKLAEQRRRWDNDDMTDDIPESSLFSPMPSEEKAASPPRPLLSNASATPVGRRGRLANLAATICSWEDDVNHSFAKQNSVQEQPGTACLSKFSSASGASARINSSSVKQEATFCSQRDGDASLNKALSSSADDASLVNASISSSVKATSPVKSTTSITDAKSCEGQNPELLPKTPISPLKTGVSKPIVKSTLSQTVPSKGELSREICLQSQSKDKSTTPGGTGIKPFLERFGERCQEHSKESPARSTPHRTPIITPNTKAIQERLFKQDTSSSTTHLAQQLKQERQKELACLRGRFDKGNIWSAEKGGNSKSKQLETKQETHCQSTPLKKHQGVSKTQSLPVTEKVTENQIPAKNSSTEPKGFTECEMTKSSPLKITLFLEEDKSLKVTSDPKVEQKIEVIREIEMSVDDDDINSSKVINDLFSDVLEEGELDMEKSQEEMDQALAESSEEQEDALNISSMSLLAPLAQTVGVVSPESLVSTPRLELKDTSRSDESPKPGKFQRTRVPRAESGDSLGSEDRDLLYSIDAYRSQRFKETERPSIKQVIVRKEDVTSKLDEKNNAFPCQVNIKQKMQELNNEINMQQTVIYQASQALNCCVDEEHGKGSLEEAEAERLLLIATGKRTLLIDELNKLKNEGPQRKNKASPQSEFMPSKGSVTLSEIRLPLKADFVCSTVQKPDAANYYYLIILKAGAENMVATPLASTSNSLNGDALTFTTTFTLQDVSNDFEINIEVYSLVQKKDPSGLDKKKKTSKSKAITPKRLLTSITTKSNIHSSVMASPGGLSAVRTSNFALVGSYTLSLSSVGNTKFVLDKVPFLSSLEGHIYLKIKCQVNSSVEERGFLTIFEDVSGFGAWHRRWCVLSGNCISYWTYPDDEKRKNPIGRINLANCTSRQIEPANREFCARRNTFELITVRPQREDDRETLVSQCRDTLCVTKNWLSADTKEERDLWMQKLNQVLVDIRLWQPDACYKPIGKP

SEQ ID NO: 2520 - protein, 248 aa, Homo sapiens
MADFDTYDDRAYSSFGGGRGSRGSAGGHGSRSQKELPTEPPYTAYVGNLPFNTVQGDIDAIFKDLSIRSVRLVRDKDTDKFKGFCYVEFDEVDSLKEALTYDGALLGDRSLRVDIAEGRKQDKGGFGFRKGGPDDRGMGSSRESRGGWDSRDDFNSGFRDDFLGGRGGSRPGDRRTGPPMGSRFRDGPPLRGSNMDFREPTEEERAQRPRLQLKPRTVATPLNQVANPNSAIFGGARPREEVVQKEQE

SEQ ID NO: 2521 - protein, 228 aa, Homo sapiens
MADFDTYDDRAYSSFGGGRGSRGSAGGHGSRSQKELPTEPPYTAYVGNLPFNTVQGDIDAIFKDLSIRSVRLVRDKDTDKFKGFCYVEFDEVDSLKEALTYDGALLGDRSLRVDIAEGRKQDKGGFGFRKGGPDDRGFRDDFLGGRGGSRPGDRRTGPPMGSRFRDGPPLRGSNMDFREPTEEERAQRPRLQLKPRTVATPLNQVANPNSAIFGGARPREEVVQKEQE

SEQ ID NO: 2522 - protein, 959 aa, Homo sapiens
MALLGKRCDVPTNGCGPDRWNSAFTRKDEIITSLVSALDSMCSALSKLNAEVACVAVHDESAFVVGTEKGRMFLNARKELQSDFLRFCRGPPWKDPEAEHPKKVQRGEGGGRSLPRSSLEHGSDVYLLRKMVEEVFDVLYSEALGRASVVPLPYERLLREPGLLAVQGLPEGLAFRRPAEYDPKALMAILEHSHRIRFKLKRPLEDGGRDSKALVELNGVSLIPKGSRDCGLHGQAPKVPPQDLPPTATSSSMASFLYSTALPNHAIRELKQEAPSCPLAPSDLGLSRPMPEPKATGAQDFSDCCGQKPTGPGGPLIQNVHASKRILFSIVHDKSEKWDAFIKETEDINTLRECVQILFNSRYAEALGLDHMVPVPYRKIACDPEAVEIVGIPDKIPFKRPCTYGVPKLKRILEERHSIHFIIKRMFDERIFTGNKFTKDTTKLEPASPPEDTSAEVSRATVLDLAGNARSDKGSMSEDCGPGTSGELGGLRPIKIEPEDLDIIQVTVPDPSPTSEEMTDSMPGHLPSEDSGYGMEMLTDKGLSEDARPEERPVEDSHGDVIRPLRKQVELLFNTRYAKAIGISEPVKVPYSKFLMHPEELFVVGLPEGISLRRPNCFGIAKLRKILEASNSIQFVIKRPELLTEGVKEPIMDSQGTASSLGFSPPALPPERDSGDPLVDESLKRQGFQENYDARLSRIDIANTLREQVQDLFNKKYGEALGIKYPVQVPYKRIKSNPGSVIIEGLPPGIPFRKPCTFGSQNLERILAVADKIKFTVTRPFQGLIPKPDEDDANRLGEKVILREQVKELFNEKYGEALGLNRPVLVPYKLIRDSPDAVEVTGLPDDIPFRNPNTYDIHRLEKILKAREHVRMVIINQLQPFAEICNDAKVPAKDSSIPKRKRKRVSEGNSVSSSSSSSSSSSSNPDSVASANQISLVQWPMYMVDYAGLNVQLPGPLNY

SEQ ID NO: 2523 - protein, 281 aa, Homo sapiens
MASRGRRPEHGGPPELFYDETEARKYVRNSRMIDIQTRMAGRALELLYLPENKPCYLLDIGCGTGLSGSYLSDEGHYWVGLDISPAMLDEAVDREIEGDLLLGDMGQGIPFKPGTFDGCISISAVQWLCNANKKSENPAKRLYCFFASLFSVLVRGSRAVLQLYPENSEQLELITTQATKAGFSGGMVVDYPNSAKAKKFYLCLFSGPSTFIPEGLSENQDEVEPRESVFTNERFPLRMSRRGMVRKSRAWVLEKKERHRRQGREVRPDTQYTGRKRKPRF

SEQ ID NO: 2524 - protein, 775 aa, Homo sapiens
MLQGLLPVSLLLSVAVSAIKELPGVKKYEVVYPIRLHPLHKREAKEPEQQEQFETELKYKMTINGKIAVLYLKKNKNLLAPGYTETYYNSTGKEITTSPQIMDDCYYQGHILNEKVSDASISTCRGLRGYFSQGDQRYFIEPLSPIHRDGQEHALFKYNPDEKNYDSTCGMDGVLWAHDLQQNIALPATKLVKLKDRKVQEHEKYIEYYLVLDNGEFKRYNENQDEIRKRVFEMANYVNMLYKKLNTHVALVGMEIWTDKDKIKITPNASFTLENFSKWRGSVLSRRKRHDIAQLITATELAGTTVGLAFMSTMCSPYSVGVVQDHSDNLLRVAGTMAHEMGHNFGMFHDDYSCKCPSTICVMDKALSFYIPTDFSSCSRLSYDKFFEDKLSNCLFNAPLPTDIISTPICGNQLVEMGEDCDCGTSEECTNICCDAKTCKIKATFQCALGECCEKCQFKKAGMVCRPAKDECDLPEMCNGKSGNCPDDRFQVNGFPCHHGKGHCLMGTCPTLQEQCTELWGPGTEVADKSCYNRNEGGSKYGYCRRVDDTLIPCKANDTMCGKLFCQGGSDNLPWKGRIVTFLTCKTFDPEDTSQEIGMVANGTKCGDNKVCINAECVDIEKAYKSTNCSSKCKGHAVCDHELQCQCEEGWIPPDCDDSSVVFHFSIVVGVLFPMAVIFVVVAMVIRHQSSREKQKKDQRPLSTTGTRPHKQKRKPQMVKAVQPQEMSQMKPHVYDLPVEGNEPPASFHKDTNALPPTVFKDNPVSTPKDSNPKA

SEQ ID NO: 2525 - protein, 1590 aa, Homo sapiens
MSTPTDPGAMPHPGPSPGPGPSPGPILGPSPGPGPSPGSVHSMMGPSPGPPSVSHPMPTMGSTDFPQEGMHQMHKPIDGIHDKGIVEDIHCGSMKGTGMRPPHPGMGPPQSPMDQHSQGYMSPHPSPLGAPEHVSSPMSGGGPTPPQMPPSQPGALIPGDPQAMSQPNRGPSPFSPVQLHQLRAQILAYKMLARGQPLPETLQLAVQGKRTLPGLQQQQQQQQQQQQQQQQQQQQQQQPQQQPPQPQTQQQQQPALVNYNRPSGPGPELSGPSTPQKLPVPAPGGRPSPAPPAAAQPPAAAVPGPSVPQPAPGQPSPVLQLQQKQSRISPIQKPQGLDPVEILQEREYRLQARIAHRIQELENLPGSLPPDLRTKATVELKALRLLNFQRQLRQEVVACMRRDTTLETALNSKAYKRSKRQTLREARMTEKLEKQQKIEQERKRRQKHQEYLNSILQHAKDFKEYHRSVAGKIQKLSKAVATWHANTEREQKKETERIEKERMRRLMAEDEEGYRKLIDQKKDRRLAYLLQQTDEYVANLTNLVWEHKQAQAAKEKKKRRRRKKKAEENAEGGESALGPDGEPIDESSQMSDLPVKVTHTETGKVLFGPEAPKASQLDAWLEMNPGYEVAPRSDSEESDSDYEEEDEEEESSRQETEEKILLDPNSEEVSEKDAKQIIETAKQDVDDEYSMQYSARGSQSYYTVAHAISERVEKQSALLINGTLKHYQLQGLEWMVSLYNNNLNGILADEMGLGKTIQTIALITYLMEHKRLNGPYLIIVPLSTLSNWTYEFDKWAPSVVKISYKGTPAMRRSLVPQLRSGKFNVLLTTYEYIIKDKHILAKIRWKYMIVDEGHRMKNHHCKLTQVLNTHYVAPRRILLTGTPLQNKLPELWALLNFLLPTIFKSCSTFEQWFNAPFAMTGERVDLNEEETILIIRRLHKVLRPFLLRRLKKEVESQLPEKVEYVIKCDMSALQKILYRHMQAKGILLTDGSEKDKKGKGGAKTLMNTIMQLRKICNHPYMFQHIEESFAEHLGYSNGVINGAELYRASGKFELLDRILPKLRATNHRVLLFCQMTSLMTIMEDYFAFRNFLYLRLDGTTKSEDRAALLKKFNEPGSQYFIFLLSTRAGGLGLNLQAADTVVIFDSDWNPHQDLQAQDRAHRIGQQNEVRVLRLCTVNSVEEKILAAAKYKLNVDQKVIQAGMFDQKSSSHERRAFLQAILEHEEENEEEDEVPDDETLNQMIARREEEFDLFMRMDMDRRREDARNPKRKPRLMEEDELPSWIIKDDAEVERLTCEEEEEKIFGRGSRQRRDVDYSDALTEKQWLRAIEDGNLEEMEEEVRLKKRKRRRNVDKDPAKEDVEKAKKRRGRPPAEKLSPNPPKLTKQMNAIIDTVINYKDRCNVEKVPSNSQLEIEGNSSGRQLSEVFIQLPSRKELPEYYELIRKPVDFKKIKERIRNHKYRSLGDLEKDVMLLCHNAQTFNLEGSQIYEDSIVLQSVFKSARQKIAKEEESEDESNEEEEEEDEEESESEAKSVKVKIKLNKKDDKGRDKGKGKKRPNRGKAKPVVSDFDSDEEQDEREQSEGSGTDDE

SEQ ID NO: 2526 - protein, 596 aa, Homo sapiens
MGSVSSLISGHSFHSKHCRASQYKLRKSSHLKKLNRYSDGLLRFGFSQDSGHGKSSSKMGKSEDFFYIKVSQKARGSHHPDYTALSSGDLGGQAGVDFDPSTPPKLMPFSNQLEMGSEKGAVRPTAFKPVLPRSGAILHSSPESASHQLHPAPPDKPKEQELKPGLCSGALSDSGRNSMSSLPTHSTSSSYQLDPLVTPVGPTSRFGGSAHNITQGIVLQDSNMMSLKALSFSDGGSKLGHSNKADKGPSCVRSPISTDECSIQELEQKLLEREGALQKLQRSFEEKELASSLAYEERPRRCRDELEGPEPKGGNKLKQASQKSQRAQQVLHLQVLQLQQEKRQLRQELESLMKEQDLLETKLRSYEREKTSFGPALEETQWEVCQKSGEISLLKQQLKESQTEVNAKASEILGLKAQLKDTRGKLEGLELRTQDLEGALRTKGLELEVCENELQRKKNEAELLREKVNLLEQELQELRAQAALARDMGPPTFPEDVPALQRELERLRAELREERQGHDQMSSGFQHERLVWKEEKEKVIQYQKQLQQSYVAMYQRNQRLEKALQQLARGDSAGEPLEVDLEGADIPYEDIIATEI

SEQ ID NO: 2527 - protein, 454 aa, Homo sapiens
MLKQILSEMYIDPDLLAELSEEQKQILFFKMREEQIRRWKEREAAMERKESLPVKPRPKKENGKSVHWKLGADKEVWVWVMGEHHLDKPYDVLCNEIIAERARLKAEQEAEEPRKTHSEEFTNSLKTKSQYHDLQAPDNQQTKDIWKKVAEKEELEQGSRPAPTLEEEKIRSLSSSSRNIQQMLADSINRMKAYAFHQKKESMKKKQDEEINQIEEERTKQICKSWKEDSEWQASLRKSKAADEKRRSLAKQAREDYKRLSLGAQKGRGGERLQSPLRVPQKPERPPLPPKPQFLNSGAYPQKPLRNQGVVRTLSSSAQEDIIRWFKEEQLPLRAGYQKTSDTIAPWFHGILTLKKANELLLSTGMPGSFLIRVSERIKGYALSYLSEDGCKHFLIDASADAYSFLGVDQLQHATLADLVEYHKEEPITSLGKELLLYPCGQQDQLPDYLELFE

SEQ ID NO: 2528 - protein, 604 aa, Homo sapiens
MISVKRNTWRALSLVIGDCRKKGNFEYCQDRTEKHSTMPDSPVDVKTQSRLTPPTMPPPPTTQGAPRTSSFTPTTLTNGTSHSPTALNGAPSPPNGFSNGPSSSSSSSLANQQLPPACGARQLSKLKRFLTTLQQFGNDISPEIGERVRTLVLGLVNSTLTIEEFHSKLQEATNFPLRPFVIPFLKANLPLLQRELLHCARLAKQNPAQYLAQHEQLLLDASTTSPVDSSELLLDVNENGKRRTPDRTKENGFDREPLHSEHPSKRPCTISPGQRYSPNNGLSYQPNGLPHPTPPPPQHYRLDDMAIAHHYRDSYRHPSHRDLRDRNRPMGLHGTRQEEMIDHRLTDREWAEEWKHLDHLLNCIMDMVEKTRRSLTVLRRCQEADREELNYWIRRYSDAEDLKKGGGSSSSHSRQQSPVNPDPVALDAHREFLHRPASGYVPEEIWKKAEEAVNEVKRQAMTELQKAVSEAERKAHDMITTERAKMERTVAEAKRQAAEDALAVINQQEDSSESCWNCGRKASETCSGCNTARYCGSFCQHKDWEKHHHICGQTLQAQQQGDTPAVSSSVTPNSGAGSPMDTPPAATPRSTTPGTPSTIETTPR

SEQ ID NO: 2529 - protein, 664 aa, Homo sapiens
MPLRDKYCQTDHHHHGCCEPVYILEPGDPPLLQQPLQTSKSGIQQIIECFRSGTKQLKHILLKDVDTIFECKLCRSLFRGLPNLITHKKFYCPPSLQMDDNLPDVNDKQSQAINDLLEAIYPSVDKREYIIKLEPIETNQNAVFQYISRTDNPIEVTESSSTPEQTEVQIQETSTEQSKTVPVTDTEVETVEPPPVEIVTDEVAPTSDEQPQESQADLETSDNSDFGHQLICCLCRKEFNSRRGVRRHIRKVHKKKMEELKKYIETRKNPNQSSKGRSKNVLVPLSRSCPVCCKSFATKANVRRHFDEVHRGLRRDSITPDIATKPGQPLFLDSISPKKSFKTRKQKSSSKAEYNLTACKCLLCKRKYSSQIMLKRHMQIVHKITLSGTNSKREKGPNNTANSSEIKVKVEPADSVESSPPSITHSPQNELKGTNHSNEKKNTPAAQKNKVKQDSESPKSTSPSAAGGQQKTRKPKLSAGFDFKQLYCKLCKRQFTSKQNLTKHIELHTDGNNIYVKFYKCPLCTYETRRKRDVIRHITVVHKKSSRYLGKITASLEIRAIKKPIDFVLNKVAKRGPSRDEAKHSDSKHDGTSNSPSKKYEVADVGIEVKVTKNFSLHRCNKCGKAFAKKTYLEHHKKTHKANASNSPEGNKTKGRSTRSKALV

SEQ ID NO: 2530 - protein, 427 aa, Homo sapiens
MAVLAALLRSGARSRSPLLRRLVQEIRYVERSYVSKPTLKEVVIVSATRTPIGSFLGSLSLLPATKLGSIAIQGAIEKAGIPKEEVKEAYMGNVLQGGEGQAPTRQAVLGAGLPISTPCTTINKVCASGMKAIMMASQSLMCGHQDVMVAGGMESMSNVPYVMNRGSTPYGGVKLEDLIVKDGLTDVYNKIHMGSCAENTAKKLNIARNEQDAYAINSYTRSKAAWEAGKFGNEVIPVTVTVKGQPDVVVKEDEEYKRVDFSKVPKLKTVFQKENGTVTAANASTLNDGAAALVLMTADAAKRLNVTPLARIVAFADAAVEPIDFPIAPVYAASMVLKDVGLKKEDIAMWEVNEAFSLVVLANIKMLEIDPQKVNINGGAVSLGHPIGMSGARIVGHLTHALKQGEYGLASICNGGGGASAMLIQKL

SEQ ID NO: 2531 - protein, 718 aa, Homo sapiens
MEDLGENTMVLSTLRSLNNFISQRVEGGSGLDISTSAPGSLQMQYQQSMQLEERAEQIRSKSHLIQVEREKMQMELSHKRARVELERAASTSARNYEREVDRNQELLTRIRQLQEREAGAEEKMQEQLERNRQCQQNLDAASKRLREKEDSLAQAGETINALKGRISELQWSVMDQEMRVKRLESEKQELQEQLDLQHKKCQEANQKIQELQASQEARADHEQQIKDLEQKLSLQEQDAAIVKNMKSELVRLPRLERELKQLREESAHLREMRETNGLLQEELEGLQRKLGRQEKMQETLVGLELENERLLAKLQSWERLDQTMGLSIRTPEDLSRFVVELQQRELALKDKNSAVTSSARGLEKARQQLQEELRQVSGQLLEERKKRETHEALARRLQKRVLLLTKERDGMRAILGSYDSELTPAEYSPQLTRRMREAEDMVQKVHSHSAEMEAQLSQALEELGGQKQRADMLEMELKMLKSQSSSAEQSFLFSREEADTLRLKVEELEGERSRLEEEKRMLEAQLERRALQGDYDQSRTKVLHMSLNPTSVARQRLREDHSQLQAECERLRGLLRAMERGGTVPADLEAAAASLPSSKEVAELKKQVESAELKNQRLKEVFQTKIQEFRKACYTLTGYQIDITTENQYRLTSLYAEHPGDCLIFKATSPSGSKMQLLETEFSHTVGELIEVHLRRQDSIPAFLSSLTLELFSRQTVA

SEQ ID NO: 2532 - protein, 346 aa, Homo sapiens
MDWVMKHNGPNDASDGTVRLRGLPFGCSKEEIVQFFQGLEIVPNGITLTMDYQGRSTGEAFVQFASKEIAENALGKHKERIGHRYIEIFRSSRSEIKGFYDPPRRLLGQRPGPYDRPIGGRGGYYGAGRGSMYDRMRRGGDGYDGGYGGFDDYGGYNNYGYGNDGFDDRMRDGRGMGGHGYGGAGDASSGFHGGHFVHMRGLPFRATENDIANFFSPLNPIRVHIDIGADGRATGEADVEFVTHEDAVAAMSKDKNNMQHRYIELFLNSTPGGGSGMGGSGMGGYGRDGMDNQGGYGSVGRMGMGNNYSGGYGTPDGLGGYGRGGGGSGGYYGQGGMSGGGWRGMY

SEQ ID NO: 2533 - protein, 1150 aa, Homo sapiens
MAQFGGQKNPPWATQFTATAVSQPAALGVQQPSLLGASPTIYTQQTALAAAGLTTQTPANYQLTQTAALQQQAAAAAAALQQQYSQPQQALYSVQQQLQQPQQTLLTQPAVALPTSLSLSTPQPTAQITVSYPTPRSSQQQTQPQKQRVFTGVVTKLHDTFGFVDEDVFFQLSAVKGKTPQVGDRVLVEATYNPNMPFKWNAQRIQTLPNQNQSQTQPLLKTPPAVLQPIAPQTTFGVQTQPQPQSLLQAQISAASITPLLQTQPQPLLQQPQQKAGLLQPPVRIVSQPQPARRLDPPSRFSGRNDRGDQVPNRKDDRSRERERERRRSRERSPQRKRSRERSPRRERERSPRRVRRVVPRYTVQFSKFSLDCPSCDMMELRRRYQNLYIPSDFFDAQFTWVDAFPLSRPFQLGNYCNFYVMHREVESLEKNMAILDPPDADHLYSAKVMLMASPSMEDLYHKSCALAEDPQELRDGFQHPARLVKFLVGMKGKDEAMAIGGHWSPSLDGPDPEKDPSVLIKTAIRCCKALTGIDLSVCTQWYRFAEIRYHRPEETHKGRTVPAHVETVVLFFPDVWHCLPTRSEWETLSRGYKQQLVEKLQGERKEADGEQDEEEKDDGEAKEISTPTHWSKLDPKTMKVNDLRKELESRALSSKGLKSQLIARLTKQLKVEEQKEEQKELEKSEKEEDEDDDRKSEDDKEEEERKRQEEIERQRRERRYILPDEPAIIVHPNWAAKSGKFDCSIMSLSVLLDYRLEDNKEHSFEVSLFAELFNEMLQRDFGVRIYKSLLSLPEKEDKKEKDKKSKKDERKDKKEERDDETDEPKPKRRKSGDDKDKKEDRDERKKEDKRKDDSKDDDETEEDNNQDEYDPMEAEEAEDEEDDRDEEEMTKRDDKRDINRYCKERPSKDKEKEKTQMITINRDLLMAFVYFDQSHCGYLLEKDLEEILYTLGLHLSRAQVKKLLNKVVLRESCFYRKLTDTSKDEENHEESESLQEDMLGNRLLLPTPTVKQESKDVEENVGLIVYNGAMVDVGSLLQKLEKSEKVRAEVEQKLQLLEEKTDEDEKTILNLENSNKSLSGELREVKKDLSQLQENLKISENMNLQFENQMNKTIRNLSTVMDEIHTVLKKDNVKNEDKDQKSKENGASV

SEQ ID NO: 2534 - protein, 237 aa, Homo sapiens
MLGGSLGSRLLRGVGGSHGRFGARGVREGGAAMAAGESMAQRMVWVDLEMTGLDIEKDQIIEMACLITDSDLNILAEGPNLIIKQPDELLDSMSDWCKEHHGKSGLTKAVKESTITLQQAEYEFLSFVRQQTPPGLCPLAGNSVHEDKKFLDKYMPQFMKHLHYRIIDVSTVKELCRRWYPEEYEFAPKKAASHRALDDISESIKELQFYRNNIFKKKIDEKKRKIIENGENEKTVS

SEQ ID NO: 2535 - protein, 574 aa, Homo sapiens
MWTFLGIATFTYFYKKFGDFITLANREVLLCVLVFLSLGLVLSYRCRHRNGGLLGRQQSGSQFALFSDILSGLPFIGFFWAKSPPESENKEQLEARRRRKGTNISETSLIGTAACTSTSSQNDPEVIIVGAGVLGSALAAVLSRDGRKVTVIERDLKEPDRIVGEFLQPGGYHVLKDLGLGDTVEGLDAQVVNGYMIHDQESKSEVQIPYPLSENNQVQSGRAFHHGRFIMSLRKAAMAEPNAKFIEGVVLQLLEEDDVVMGVQYKDKETGDIKELHAPLTVVADGLFSKFRKSLVSNKVSVSSHFVGFLMKNAPQFKANHAELILANPSPVLIYQISSSETRVLVDIRGEMPRNLREYMVEKIYPQIPDHLKEPFLEATDNSHLRSMPASFLPPSSVKKRGVLLLGDAYNMRHPLTGGGMTVAFKDIKLWRKLLKGIPDLYDDAAIFEAKKSFYWARKTSHSFVVNILAQALYELFSATDDSLHQLRKACFLYFKLGGECVAGPVGLLSVLSPNPLVLIGHFFAVAIYAVYFCFKSEPWITKPRALLSSGAVLYKACSVIFPLIYSEMKYMVH

SEQ ID NO: 2536 - protein, 992 aa, Homo sapiens
MKTETVPPFQETPAGSSCHLNNLLSSRKLMAVGVLLGWLLVIHLLVNVWLLCLLSALLVVLGGWLGSSLAGVASGRLHLERFIPLATCPPCPEAERQLEREINRTIQMIIRDFVLSWYRSVSQEPAFEEEMEAAMKGLVQELRRRMSVMDSHAVAQSVLTLCGCHLQSYIQAKEATAGKNGPVEPSHLWEAYCRATAPHPAVHSPSAEVTYTRGVVNLLLQGLVPKPHLETRTGRHVVVELITCNVILPLISRLSDPDWIHLVLVGIFSKARDPAPCPASAPEQPSVPTSLPLIAEVEQLPEGRASPVAAPVFLSYSEPEGSAGPSPEVEEGHEAVEGDLGGMCEERKVGNNSSHFLQPNVRGPLFLCEDSELESPLSELGKETIMLMTPGSFLSDRIQDALCALESSQALEPKDGEASEGAEAEEGPGTETETGLPVSTLNSCPEIHIDTADKEIEQGDVTASVTALLEGPEKTCPSRPSCLEKDLTNDVSSLDPTLPPVLLSSSPPGPLSSATFSFEPLSSPDGPVIIQNLRITGTITAREHSGTGFHPYTLYTVKYETALDGENSSGLQQLAYHTVNRRYREFLNLQTRLEEKPDLRKFIKNVKGPKKLFPDLPLGNMDSDRVEARKSLLESFLKQLCAIPEIANSEEVQEFLALNTDARIAFVKKPFMVSRIDKMVVSAIVDTLKTAFPRSEPQSPTEELSEAETESKPQTEGKKASKSRLRFSSSKISPALSVTEAQDKILYCLQEGNVESETLSMSAMESFIEKQTKLLEMQPTKAPEKDPEQPPKGRVDSCVSDAAVPAQDPSNSDPGTETELADTALDLLLLLLTEQWKWLCTENMQKFLRLIFGTLVQRWLEVQVANLTSPQRWVQYLLLLQESIWPGGVLPKFPRPVRTQEQKLAAEKQALQSLMGVLPDLVVEILGVNKCRLSWGLVLESLQQPLINRHLIYCLGDIILEFLDLSASVEESAATTSASDTPGNSKRMGVSS

SEQ ID NO: 2537 - protein, 761 aa, Homo sapiens
MNWRFVELLYFLFIWGRISVQPSHQEPAGTDQHVSKEFDWLISDRGPFHHSRSYLSFVERHRQGFTTRYKIYREFARWKVRNTAIERRDLVRHPVPLMPEFQRSIRLLGRRPTTQQFIDTIIKKYGTHLLISATLGGEEALTMYMDKSRLDRKSGNATQSVEALHQLASSYFVDRDGTMRRLHEIQISTGAIKVTETRTGPLGCNSYDNLDSVSSVLLQSTESKLHLQGLQIIFPQYLQEKFVQSALSYIMCNGEGEYLCQNSQCRCQCAEEFPQCNCPITDIQIMEYTLANMAKSWAEAYKDLENSDEFKSFMKRLPSNHFLTIGSIHQHWGNDWDLQNRYKLLQSATEAQRQKIQRTARKLFGLSVRCRHNPNHQLPRERTIQQWLARVQSLLYCNENGFWGTFLESQRSCVCHGSTTLCQRPIPCVIGGNNSCAMCSLANISLCGSCNKGYKLYRGRCEPQNVDSERSEQFISFETDLDFQDLELKYLLQKMDSRLYVHTTFISNEIRLDTFFDPRWRKRMSLTLKSNKNRMDFIHMVIGMSMRICQMRNSSLDPMFFVYVNPFSGSHSEGWNMPFGEFGYPRWEKIRLQNSQCYNWTLLLGNRWKTFFETVHIYLRSRTRLPTLLRNETGQGPVDLSDPSKRQFYIKISDVQVFGYSLRFNADLLRSAVQQVNQSYTQGGQFYSSSSVMLLLLDIRDRINRLAPPVAPGKPQLDLFSCMLKHRLKLTNSEIIRVNHALDLYNTEILKQSDQMTAKLC

SEQ ID NO: 2538 - protein, 522 aa, Homo sapiens
MAFLDNPTIILAHIRQSHVTSDDTGMCEMVLIDHDVDLEKIHPPSMPGDSGSEIQGSNGETQGYVYAQSVDITSSWDFGIRRRSNTAQRLERLRKERQNQIKCKNIQWKERNSKQSAQELKSLFEKKSLKEKPPISGKQSILSVRLEQCPLQLNNPFNEYSKFDGKGHVGTTATKKIDVYLPLHSSQDRLLPMTVVTMASARVQDLIGLICWQYTSEGREPKLNDNVSAYCLHIAEDDGEVDTDFPPLDSNEPIHKFGFSTLALVEKYSSPGLTSKESLFVRINAAHGFSLIQVDNTKVTMKEILLKAVKRRKGSQKVSGPQYRLEKQSEPNVAVDLDSTLESQSAWEFCLVRENSSRADGVFEEDSQIDIATVQDMLSSHHYKSFKVSMIHRLRFTTDVQLGISGDKVEIDPVTNQKASTKFWIKQKPISIDSDLLCACDLAEEKSPSHAIFKLTYLSNHDYKHLYFESDAATVNEIVLKVNYILESRASTARADYFAQKQRKLNRRTSFSFQKEKKSGQQ

SEQ ID NO: 2539 - protein, 548 aa, Homo sapiens
MATSSEEVLLIVKKVRQKKQDGALYLMAERIAWAPEGKDRFTISHMYADIKCQKISPEGKAKIQLQLVLHAGDTTNFHFSNESTAVKERDAVKDLLQQLLPKFKRKANKELEEKNRMLQEDPVLFQLYKDLVVSQVISAEEFWANRLNVNATDSSSTSNHKQDVGISAAFLADVRPQTDGCNGLRYNLTSDIIESIFRTYPAVKMKYAENVPHNMTEKEFWTRFFQSHYFHRDRLNTGSKDLFAECAKIDEKGLKTMVSLGVKNPLLDLTALEDKPLDEGYGISSVPSASNSKSIKENSNAAIIKRFNHHSAMVLAAGLRKQEAQNEQTSEPSNMDGNSGDADCFQPAVKRAKLQESIEYEDLGKNNSVKTIALNLKKSDRYYHGPTPIQSLQYATSQDIINSFQSIRQEMEAYTPKLTQVLSSSAASSTITALSPGGALMQGGTQQAINQMVPNDIQSELKHLYVAVGELLRHFWSCFPVNTPFLEEKVVKMKSNLERFQVTKLCPFQEKIRRQYLSTNLVSHIEEMLQTAYNKLHTWQSRRLMKKT

SEQ ID NO: 2540 - protein, 458 aa, Homo sapiens [sequence omitted]

SEQ ID NO: 2541 - protein, 1686 aa, Homo sapiens
MAQISSNSGFKECPSSHPEPTRAKDVDKEEALQMEAEALAKLQKDRQVTDNQRGFELSSSTRKKAQVYNKQDYDLMVFPESDSQKRALDIDVEKLTQAELEKLLLDDSFETKKTPVLPVTPILSPSFSAQLYFRPTIQRGQWPPGLPGPSTYALPSIYPSTYSKQAAFQNGFNPRMPTFPSTEPIYLSLPGQSPYFSYPLTPATPFHPQGSLPIYRPVVSTDMAKLFDKIASTSEFLKNGKARTDLEITDSKVSNLQVSPKSEDISKFDWLDLDPLSKPKVDNVEVLDHEEEKNVSSLLAKDPWDAVLLEERSTANCHLERKVNGKSLSVATVTRSQSLNIRTTQLAKAQGHISQKDPNGTSSLPTGSSLLQEVEVQNEEMAAFCRSITKLKTKFPYTNHRTNPGYLLSPVTAQRNICGENASVKVSIDIEGFQLPVTFTCDVSSTVEIIIMQALCWVHDDLNQVDVGSYVLKVCGQEEVLQNNHCLGSHEHIQNCRKWDTEIRLQLLTFSAMCQNLARTAEDDETPVDLNKHLYQIEKPCKEAMTRHPVEELLDSYHNQVELALQIENQHRAVDQVIKAVRKICSALDGVETLAITESVKKLKRAVNLPRSKTADVTSLFGGEDTSRSSTRGSLNPENPVQVSINQLTAAIYDLLRLHANSGRSPTDCAQSSKSVKEAWTTTEQLQFTIFAAHGISSNWVSNYEKYYLICSLSHNGKDLFKPIQSKKVGTYKNFFYLIKWDELIIFPIQISQLPLESVLHLTLFGILNQSSGSSPDSNKQRKGPEALGKVSLPLFDFKRFLTCGTKLLYLWTSSHTNSVPGTVTKKGYVMERIVLQVDFPSPAFDIIYTTPQVDRSIIQQHNLETLENDIKGKLLDILHKDSSLGLSKEDKAFLWEKRYYCFKHPNCLPKILASAPNWKWVNLAKTYSLLHQWPALYPLIALELLDSKFADQEVRSLAVTWIEAISDDELTDLLPQFVQALKYEIYLNSSLVQFLLSRALGNIQIAHNLYWLLKDALHDVQFSTRYEHVLGALLSVGGKRLREELLKQTKLVQLLGGVAEKVRQASGSARQVVLQRSMERVQSFFQKNKCRLPLKPSLVAKELNIKSCSFFSSNAVPLKVTMVNADPMGEEINVMFKVGEDLRQDMLALQMIKIMDKIWLKEGLDLRMVIFKCLSTGRDRGMVELVPASDTLRKIQVEYGVTGSFKDKPLAEWLRKYNPSEEEYEKASENFIYSCAGCCVATYVLGICDRHNDNIMLRSTGHMFHIDFGKFLGHAQMFGSFKRDRAPFVLTSDMAYVINGGEKPTIRFQLFVDLCCQAYNLIRKQTNLFLNLLSLMIPSGLPELTSIQDLKYVRDALQPQTTDAEATIFFTRLIESSLGSIATKFNFFIHNLAQLRFSGLPSNDEPILSFSPKTYSFRQDGRIKEVSVFTYHKKYNPDKHYIYVVRILREGQIEPSFVFRTFDEFQELHNKLSIIFPLWKLPGFPNRMVLGRTHIKDVAAKRKIELNSYLQSLMNASTDVAECDLVCTFFHPLLRDEKAEGIARSADAGSFSPTPGQIGGAVKLSISYRNGTLFIMVMHIKDLVTEDGADPNPYVKTYLLPDNHKTSKRKTKISRKTRNPTFNEMLVYSGYSKETLRQRELQLSVLSAESLRENFFLGGVTLPLKDFNLSKETVKWYQLTAATYL

SEQ ID NO: 2542 - protein, 230 aa, Homo sapiens
MGQQISDQTQLVINKLPEKVAKHVTLVRESGSLTYEEFLGRVAELNDVTAKVASGQEKHLLFEVQPGSDSSAFWKVVVRVVCTKINKSSGIVEASRIMNLYQFIQLYKDITSQAAGVLAQSSTSEEPDENSSSVTSCQASLWMGRVKQLTDEEECCICMDGRADLILPCAHSFCQKCIDKWSDRHRNCPICRLQMTGANESWVVSDAPTEDDMANYILNMADEAGQPHRP

SEQ ID NO: 2543 - protein, 462 aa, Homo sapiens
MARVLGAPVALGLWSLCWSLAIATPLPPTSAHGNVAEGETKPDPDVTERCSDGWSFDATTLDDNGTMLFFKGEFVWKSHKWDRELISERWKNFPSPVDAAFRQGHNSVFLIKGDKVWVYPPEKKEKGYPKLLQDEFPGIPSPLDAAVECHRGECQAEGVLFFQGDREWFWDLATGTMKERSWPAVGNCSSALRWLGRYYCFQGNQFLRFDPVRGEVPPRYPRDVRDYFMPCPGRGHGHRNGTGHGNSTHHGPEYMRCSPHLVLSALTSDNHGATYAFSGTHYWRLDTSRDGWHSWPIAHQWPQGPSAVDAAFSWEEKLYLVQGTQVYVFLTKGGYTLVSGYPKRLEKEVGTPHGIILDSVDAAFICPGSSRLHIMAGRRLWWLDLKSGAQATWTELPWPHEKVDGALCMEKSLGPNSCSANGPGLYLIHGPNLYCYSDVEKLNAAKALPQPQNVTSLLGCTH

SEQ ID NO: 2544 - protein, 1019 aa, Homo sapiens [sequence omitted]

SEQ ID NO: 2545 - protein, 1849 aa, Homo sapiens
MAVSRLDRLFILLDTGTTPVTRKAAAQQLGEVVKLHPHELNNLLSKVLIYLRSANWDTRIAAGQAVEAIVKNVPEWNPVPRTRQEPTSESSMEDSPTTERLNFDRFDICRLLQHGASLLGSAGAEFEVQDEKSGEVDPKERIARQRKLLQKKLGLNMGEAIGMSTEELFNDEDLDYTPTSASFVNKQPTLQAAELIDSEFRAGMSNRQKNKAKRMAKLFAKQRSRDAVETNEKSNDSTDGEPEEKRRKIANVVINQSANDSKVLIDNIPDSSSLIEETNEWPLESFCEELCNDLFNPSWEVRHGAGTGLREILKAHGKSGGKMGDSTLEEMIQQHQEWLEDLVIRLLCVFALDRFGDFVSDEVVAPVRETCAQTLGVVLKHMNETGVHKTVDVLLKLLTQEQWEVRHGGLLGIKYALAVRQDVINTLLPKVLTRIIEGLQDLDDDVRAVAAASLVPVVESLVYLQTQKVPFIINTLWDALLELDDLTASTNSIMTLLSSLLTYPQVQQCSIQQSLTVLVPRVWPFLHHTISSVRRAALETLFTLLSTQDQNSSSWLIPILPDMLRHIFQFCVLESSQEILDLIHKVWMELLSKASVQYVVAAACPWMGAWLCLMMQPSHLPIDLNMLLEVKARAKEKTGGKVRQGQSQNKEVLQEYIAGADTIMEDPATRDFVVMRARMMAAKLLGALCCCICDPGVNVVTQEIKPAESLGQLLLFHLNSKSALQRISVALVICEWAALQKECKAVTLAVQPRLLDILSEHLYYDEIAVPFTRMQNECKQLISSLADVHIEVGNRVNNNVLTIDQASDLVTTVFNEATSSFDLNPQVLQQLDSKRQQVQMTVTETNQEWQVLQLRVHTFAACAVVSLQQLPEKLNPIIKPLMETIKKEENTLVQNYAAQCIAKLLQQCTTRTPCPNSKIIKNLCSSLCVDPYLTPCVTCPVPTQSGQENSKGSTSEKDGMHHTVTKHRGIITLYRHQKAAFAITSRRGPTPKAVKAQIADLPAGSSGNILVELDEAQKPYLVQRRGAEFALTTIVKHFGGEMAVKLPHLWDAMVGPLRNTIDINNFDGKSLLDKGDSPAQELVNSLQVFETAAASMDSELHPLLVQHLPHLYMCLQYPSTAVRHMAARCVGVMSKIATMETMNIFLEKVLPWLGAIDDSVKQEGAIEALACVMEQLDVGIVPYIVLLVVPVLGRMSDQTDSVRFMATQCFATLIRLMPLEAGIPDPPNMSAELIQLKAKERHFLEQLLDGKKLENYKIPVPINAELRKYQQDGVNWLAFLNKYKLHGILCDDMGLGKTLQSICILAGDHCHRAQEYARSKLAECMPLPSLVVCPPTLTGHWVDEVGKFCSREYLNPLHYTGPPTERIRLQHQVKRHNLIVASYDVVRNDIDFFRNIKFNYCILDEGHVIKNGKTKLSKAVKQLTANYRIILSGTPIQNNVLELWSLFDFLMPGFLGTERQFAARYGKPILASRDARSSSREQEAGVLAMDALHRQVLPFLLRRMKEDVLQDLPPKIIQDYYCTLSPLQVQLYEDFAKSRAKCDVDETVSSATLSEETEKPKLKATGHVFQALQYLRKLCNHPALVLTPQHPEFKTTAEKLAVQNSSLHDIQHAPKLSALKQLLLDCGLGNGSTSESGTESVVAQHRILIFCQLKSMLDIVEHDLLKPHLPSVTYLRLDGSIPPGQRHSIVSRFNNDPSIDVLLLTTHVGGLGLNLTGADTVVFVEHDWNPMRDLQAMDRAHRIGQKRVVNVYRLITRGTLEEKIMGLQKFKMNIANTVISQENSSLQSMGTDQLLDLFTLDKDGKAEKADTSTSGKASMKSILENLSDLWDQEQYDSEYSLENFMHSLK

SEQ ID NO: 2546 - protein, 740 aa, Homo sapiens
MATANSIIVLDDDDEDEAAAQPGPSHPLPNAASPGAEAPSSSEPHGARGSSSSGGKKCYKLENEKLFEEFLELCKMQTADHPEVVPFLYNRQQRAHSLFLASAEFCNILSRVLSRARSRPAKLYVYINELCTVLKAHSAKKKLNLAPAATTSNEPSGNNPPTHLSLDPTNAENTASQSPRTRGSRRQIQRLEQLLALYVAEIRRLQEKELDLSELDDPDSAYLQEARLKRKLIRLFGRLCELKDCSSLTGRVIEQRIPYRGTRYPEVNRRIERLINKPGPDTFPDYGDVLRAVEKAAARHSLGLPRQQLQLMAQDAFRDVGIRLQERRHLDLIYNFGCHLTDDYRPGVDPALSDPVLARRLRENRSLAMSRLDEVISKYAMLQDKSEEGERKKRRARLQGTSSHSADTPEASLDSGEGPSGMASQGCPSASRAETDDEDDEESDEEEEEEEEEEEEEATDSEEEEDLEQMQEGQEDDEEEDEEEEAAAGKDGDKSPMSSLQISNEKNLEPGKQISRSSGEQQNKGRIVSPSLLSEEPLAPSSIDAESNGEQPEELTLEEESPVSQLFELEIEALPLDTPSSVETDISSSRKQSEEPFTTVLENGAGMVSSTSFNGGVSPHNWGDSGPPCKKSRKEKKQTGSGPLGNSYVERQRSVHEKNGKKICTLPSPPSPLASLAPVADSSTRVDSPSHGLVTSSLCIPSPARLSQTPHSQPPRPGTCKTSVATQCDPEEIIVLSDSD

SEQ ID NO: 2547 - protein, 114 aa, Homo sapiens
MVSRKAVAALLVVHVAAMLASQTEAFVPIFTYGELQRMQEKERNKGQKKSLSVWQRSGEEGPVDPAEPIREEENEMIKLTAPLEIGMRMNSRQLEKYPATLEGLLSEMLPQHAK

SEQ ID NO: 2548 - protein, 371 aa, Homo sapiens
MSFRKVNIIILVLAVALFLLVLHHNFLSLSSLLRNEVTDSGIVGPQPIDFVPNALRHAVDGRQEEIPVVIAASEDRLGGAIAAINSIQHNTRSNVIFYIVTLNNTADHLRSWLNSDSLKSIRYKIVNFDPKLLEGKVKEDPDQGESMKPLTFARFYLPILVPSAKKAIYMDDDVIVQGDILALYNTALKPGHAAAFSEDCDSASTKVVIRGAGNQYNYIGYLDYKKERIRKLSMKASTCSFNPGVFVANLTEWKRQNITNQLEKWMKLNVEEGLYSRTLAGSITTPPLLIVFYQQHSTIDPMWNVRHLGSSAGKRYSPQFVKAAKLLHWNGHLKPWGRTASYTDVWEKWYIPDPTGKFNLIRRYTEISNIK

SEQ ID NO: 2549 - protein, 1123 aa, Homo sapiens
MWGDSRPANRTGPFRGSQEERFAPGWNRDYPPPPLKSHAQERHSGNFPGRDSLPFDFQGHSGPPFANVEEHSFSYGARDGPHGDYRGGEGPGHDFRGGDFSSSDFQSRDSSQLDFRGRDIHSGDFRDREGPPMDYRGGDGTSMDYRGREAPHMNYRDRDAHAVDFRGRDAPPSDFRGRGTYDLDFRGRDGSHADFRGRDLSDLDFRAREQSRSDFRNRDVSDLDFRDKDGTQVDFRGRGSGTTDLDFRDRDTPHSDFRGRHRSRTDQDFRGREMGSCMEFKDREMPPVDPNILDYIQPSTQDREHSGMNVNRREESTHDHTIERPAFGIQKGEFEHSETREGETQGVAFEHESPADFQNSQSPVQDQDKSQLSGREEQSSDAGLFKEEGGLDFLGRQDTDYRSMEYRDVDHRLPGSQMFGYGQSKSFPEGKTARDAQRDLQDQDYRTGPSEEKPSRLIRLSGVPEDATKEEILNAFRTPDGMPVKNLQLKEYNTGYDYGYVCVEFSLLEDAIGCMEANQGTLMIQDKEVTLEYVSSLDFWYCKRCKANIGGHRSSCSFCKNPREVTEAKQELITYPQPQKTSIPAPLEKQPNQPLRPADKEPEPRKREEGQESRLGHQKREAERYLPPSRREGPTFRRDRERESWSGETRQDGESKTIMLKRIYRSTPPEVIVEVLEPYVRLTTANVRIIKNRTGPMGHTYGFIDLDSHAEALRVVKILQNLDPPFSIDGKMVAVNLATGKRRNDSGDHSDHMHYYQGKKYFRDRRGGGRNSDWSSDTNRQGQQSSSDCYIYDSATGYYYDPLAGTYYDPNTQQEVYVPQDPGLPEEEEIKEKKPTSQGKSSSKKEMSKRDGKEKKDRGVTRFQENASEGKAPAEDVFKKPLPPTVKKEESPPPPKVVNPLIGLLGEYGGDSDYEEEEEEEQTPPPQPRTAQPQKREEQTKKENEEDKLTDWNKLACLLCRRQFPNKEVLIKHQQLSDLHKQNLEIHRKIKQSEQELAYLERREREGKFKGRGNDRREKLQSFDSPERKRIKYSRETDSDRKLVDKEDIDTSSKGGCVQQATGWRKGTGLGYGHPGLASSEEAEGRMRGPSVGASGRTSKRQSNETYRDAVRRVMFARYKELD

SEQ ID NO: 2550 - protein, 351 aa, Homo sapiens
MQRALPGARQHLGAILASASVVVKALCAAVLFLYLLSFAVDTGCLAVTPGYLFPPNFWIWTLATHGLMEQHVWDVAISLTTVVVAGRLLEPLWGALELLIFFSVVNVSVGLLGAFAYLLTYMASFNLVYLFTVRIHGALGFLGGVLVALKQTMGDCVVLRVPQVRVSVMPMLLLALLLLLRLATLLQSPALASYGFGLLSSWVYLRFYQRHSRGRGDMADHFAFATFFPEILQPVVGLLANLVHSLLVKVKICQKTVKRYDVGAPSSITISLPGTDPQDAERRRQLALKALNERLKRVEDQSIWPSMDDDEEESGAKVDSPLPSDKAPTPPGKGAAPESSLITFEAAPPTL

SEQ ID NO: 2551 - protein, 435 aa, Homo sapiens
MAAHLLPICALFLTLLDMAQGFRGPLLPNRPFTTVWNANTQWCLERHGVDVDVSVFDVVANPGQTFRGPDMTIFYSSQLGTYPYYTPTGEPVFGGLPQNASLIAHLARTFQDILAAIPAPDFSGLAVIDWEAWRPRWAFNWDTKDIYRQRSRALVQAQHPDWPAPQVEAVAQDQFQGAARAWMAGTLQLGRALRPRGLWGFYGFPDCYNYDFLSPNYTGQCPSGIRAQNDQLGWLWGQSRALYPSIYMPAVLEGTGKSQMYVQHRVAEAFRVAVAAGDPNLPVLPYVQIFYDTTNHFLPLDELEHSLGESAAQGAAGVVLWVSWENTRTKESCQAIKEYMDTTLGPFILNVTSGALLCSQALCSGHGRCVRRTSHPKALLLLNPASFSIQLTPGGGPLSLRGALSLEDQAQMAVEFKCRCYPGWQAPWCERKSMW

SEQ ID NO: 2552 - protein, 930 aa, Homo sapiens
MKPPRPVRTCSKVLVLLSLLAIHQTTTAEKNGIDIYSLTVDSRVSSRFAHTVVTSRVVNRANTVQEATFQMELPKKAFITNFSMIIDGMTYPGIIKEKAEAQAQYSAAVAKGKSAGLVKATGRNMEQFQVSVSVAPNAKITFELVYEELLKRRLGVYELLLKVRPQQLVKHLQMDIHIFEPQGISFLETESTFMTNQLVDALTTWQNKTKAHIRFKPTLSQQQKSPEQQETVLDGNLIIRYDVDRAISGGSIQIENGYFVHYFAPEGLTTMPKNVVFVIDKSGSMSGRKIQQTREALIKILDDLSPRDQFNLIVFSTEATQWRPSLVPASAENVNKARSFAAGIQALGGTNINDAMLMAVQLLDSSNQEERLPEGSVSLIILLTDGDPTVGETNPRSIQNNVREAVSGRYSLFCLGFGFDVSYAFLEKLALDNGGLARRIHEDSDSALQLQDFYQEVANPLLTAVTFEYPSNAVEEVTQNNFRLLFKGSEMVVAGKLQDRGPDVLTATVSGKLPTQNITFQTESSVAEQEAEFQSPKYIFHNFMERLWAYLTIQQLLEQTVSASDADQQALRNQALNLSLAYSFVTPLTSMVVTKPDDQEQSQVAEKPMEGESRNRNVHSGSTFFKYYLQGAKIPKPEASFSPRRGWNRQAGAAGSRMNFRPGVLSSRQLGLPGPPDVPDHAAYHPFRRLAILPASAPPATSNPDPAVSRVMNMKIEETTMTTQTPAPIQAPSAILPLPGQSVERLCVDPRHRQGPVNLLSDPEQGVEVTGQYEREKAGFSWIEVTFKNPLVWVHASPEHVVVTRNRRSSAYKWKETLFSVMPGLKMTMDKTGLLLLSDPDKVTIGLLFWDGRGEGLRLLLRDTDRFSSHVGGTLGQFYQEVLWGSPAASDDGRRTLRVQGNDHSATRERRLDYQEGPPGVEISCWSVEL

SEQ ID NO: 2553 - protein, 1534 aa, Homo sapiens
MALTPGWGSSAGPVRPELWLLLWAAAWRLGASACPALCTCTGTTVDCHGTGLQAIPKNIPRNTERLELNGNNITRIHKNDFAGLKQLRVLQLMENQIGAVERGAFDDMKELERLRLNRNQLHMLPELLFQNNQALSRLDLSENAIQAIPRKAFRGATDLKNLQLDKNQISCIEEGAFRALRGLEVLTLNNNNITTIPVSSFNHMPKLRTFRLHSNHLFCDCHLAWLSQWLRQRPTIGLFTQCSGPASLRGLNVAEVQKSEFSCSGQGEAGRVPTCTLSSGSCPAMCTCSNGIVDCRGKGLTAIPANLPETMTEIRLELNGIKSIPPGAFSPYRKLRRIDLSNNQIAEIAPDAFQGLRSLNSLVLYGNKITDLPRGVFGGLYTLQLLLLNANKINCIRPDAFQDLQNLSLLSLYDNKIQSLAKGTFTSLRAIQTLHLAQNPFICDCNLKWLADFLRTNPIETSGARCASPRRLANKRIGQIKSKKFRCSAKEQYFIPGTEDYQLNSECNSDVVCPHKCRCEANVVECSSLKLTKIPERIPQSTAELRLNNNEISILEATGMFKKLTHLKKINLSNNKVSEIEDGAFEGAASVSELHLTANQLESIRSGMFRGLDGLRTLMLRNNRISCIHNDSFTGLRNVRLLSLYDNQITTVSPGAFDTLQSLSTLNLLANPFNCNCQLAWLGGWLRKRKIVTGNPRCQNPDFLRQIPLQDVAFPDFRCEEGQEEGGCLPRPQCPQECACLDTVVRCSNKHLRALPKGIPKNVTELYLDGNQFTLVPGQLSTFKYLQLVDLSNNKISSLSNSSFTNMSQLTTLILSYNALQCIPPLAFQGLRSLRLLSLHGNDISTLQEGIFADVTSLSHLAIGANPLYCDCHLRWLSSWVKTGYKEPGIARCAGPQDMEGKLLLTTPAKKFECQGPPTLAVQAKCDLCLSSPCQNQGTCHNDPLEVYRCACPSGYKGRDCEVSLDSCSSGPCENGGTCHAQEGEDAPFTCSCPTGFEGPTCGVNTDDCVDHACANGGVCVDGVGNYTCQCPLQYEGKACEQLVDLCSPDLNPCQHEAQCVGTPDGPRCECMPGYAGDNCSENQDDCRDHRCQNGAQCMDEVNSYSCLCAEGYSGQLCEIPPHLPAPKSPCEGTECQNGANCVDQGNRPVCQCLPGFGGPECEKLLSVNFVDRDTYLQFTDLQNWPRANITLQVSTAEDNGILLYNGDNDHIAVELYQGHVRVSYDPGSYPSSAIYSAETINDGQFHTVELVAFDQMVNLSIDGGSPMTMDNFGKHYTLNSEAPLYVGGMPVDVNSAAFRLWQILNGTGFHGCIRNLYINNELQDFTKTQMKPGVVPGCEPCRKLYCLHGICQPNATPGPMCHCEAGWVGLHCDQPADGPCHGHKCVHGQCVPLDALSYSCQCQDGYSGALCNQAGALAEPCRGLQCLHGHCQASGTKGAHCVCDPGFSGELCEQESECRGDPVRDFHQVQRGYAICQTTRPLSWVECRGSCPGQGCCQGLRLKRRKFTFECSDGTSFAEEVEKPTKCGCALCA

SEQ ID NO: 2554 - protein, 317 aa, Homo sapiens
MRAAAAGGGVRTAALALLLGALHWAPARCEEYDYYGWQAEPLHGRSYSKPPQCLDIPADLPLCHTVGYKRMRLPNLLEHESLAEVKQQASSWLPLLAKRCHSDTQVFLCSLFAPVCLDRPIYPCRSLCEAVRAGCAPLMEAYGFPWPEMLHCHKFPLDNDLCIAVQFGHLPATAPPVTKICAQCEMEHSADGLMEQMCSSDFVVKMRIKEIKIENGDRKLIGAQKKKKLLKPGPLKRKDTKRLVLHMKNGAGCPCPQLDSLAGSFLVMGRKVDGQLLLMAVYRWDKKNKEMKFAVKFMFSYPCSLYYPFFYGAAEPH

SEQ ID NO: 2555 - protein, 2240 aa, Homo sapiens
MDDKGDPSNEEAPKAIKPTSKEFRKTWGFRRTTIAKREGAGDAEADPLEPPPPQQQLGLSLRRSGRQPKRTERVEQFLTIARRRGRRSMPVSLEDSGEPTSCPATDAETASEGSVESASETRSGPQSASTAVKERPASSEKVKGGDDHDDTSDSDSDGLTLKELQNRLRRKREQEPTERPLKGIQSRLRKKRREEGPAETVGSEASDTVEGVLPSKQEPENDQGVVSQAGKDDRESKLEGKAAQDIKDEEPGDLGRPKPECEGYDPNALYCICRQPHNNRFMICCDRCEEWFHGDCVGISEARGRLLERNGEDYICPNCTILQVQDETHSETADQQEAKWRPGDADGTDCTSIGTIEQKSSEDQGIKGRIEKAANPSGKKKLKIFQPVIEAPGASKCIGPGCCHVAQPDSVYCSNDCILKHAAATMKFLSSGKEQKPKPKEKMKMKPEKPSLPKCGAQAGIKISSVHKRPAPEKKETTVKKAVVVPARSEALGKEAACESSTPSWASDHNYNAVKPEKTAAPSPSLLYKSTKEDRRSEEKAAAMAASKKTAPPGSAVGKQPAPRNLVPKKSSFANVAAATPAIKKPPSGFKGTIPKRPWLSATPSSGASAARQAGPAPAAATAASKKFPGSAALVGAVRKPVVPSVPMASPAPGRLGAMSAAPSQPNSQIRQNIRRSLKEILWKRVNDSDDLIMTENEVGKIALHIEKEMFNLFQVTDNRYKSKYRSIMFNLKDPKNQGLFHRVLREEISLAKLVRLKPEELVSKELSTWKERPARSVMESRTKLHNESKKTAPRQEAIPDLEDSPPVSDSEEQQESARAVPEKSTAPLLDVFSSMLKDTTSQHRAHLFDLNCKICTGQVPSAEDEPAPKKQKLSASVKKEDLKSKHDSSAPDPAPDSADEVMPEAVPEVASEPGLESASHPNVDRTYFPGPPGDGHPEPSPLEDLSPCPASCGSGVVTTVTVSGRDPRTAPSSSCTAVASAASRPDSTHMVEARQDVPKPVLTSVMVPKSILAKPSSSPDPRYLSVPPSPNISTSESRSPPEGDTTLFLSRLSTIWKGFINMQSVAKFVTKAYPVSGCFDYLSEDLPDTIHIGGRIAPKTVWDYVGKLKSSVSKELCLIRFHPATEEEEVAYISLYSYFSSRGRFGVVANNNRHVKDLYLIPLSAQDPVPSKLLPFEGPGLESPRPNIILGLVICQKIKRPANSGELDKMDEKRTRLQPEEADVPAYPKVATVPQSEKKPSKYPLCSADAAVSTTPPGSPPPPPPLPEPPVLKVLSSLKPAAPSPATAATTAAAASTAASSTASSASKTASPLEHILQTLFGKKKSFDPSAREPPGSTAGLPQEPKTTAEDGVPAPPLLDPIVQQFGQFSKDKALEEEEDDRPYDPEEEYDPERAFDTQLVERGRRHEVERAPEAAAAEREEVAYDPEDETILEEAKVTVDDLPNRMCADVRRNSVERPAEPVAGAATPSLVEQQKMLEELNKQIEEQKRQLEEQEEALRQQRAAVGVSMAHFSVSDALMSPPPKSSLPKAELFQQEQQSADKPASLPPASQASNHRDPRQARRLATETGEGEGEPLSRLSARGAQGALPERDASRGGLVGQAPMPVPEEKEPASSPWASGEKPPAGSEQDGWKAEPGEGTRPATVGDSSARPARRVLLPTPPCGALQPGFPLQHDGERDPFTCPGFASQDKALGSAQYEDPRNLHSAGRSSSPAGETEGDREPQARPGEGTAPLPPPGQKVGGSQPPFQGQREPGPHALGMSGLHGPNFPGPRGPAPPFPEENIASNDGPRGPPPARFGAQKGPIPSLFSGQHGPPPYGDSRGPSPSYLGGPRGVAPSQFEERKDPHGEKREFQDAPYNEVTGAPAQFEGTEQAPFLGSRGGAPFQFGGQRRPLLSQLKGPRGGPPPSQFGGQRGPPPGHFVGPRGPHPSQFETARGPHPNQFEGPRGQAPNFMPGPRGIQPQQFEDQRVHSPPRFTNQRAPAPLQFGGLRGSAPFSEKNEQTPSRFHFQGQAPQVMKPGPRPLLELPSHPPQHRKDRWEEAGPPSALSSSAPGQGPEADGQWASADFREGKGHEYRNQTFEGRQRERFDVGPKEKPLEEPDAQGRASEDRRRERERGRNWSRERDWDRPREWDRHRDKDSSRDWDRNRERSANRDREREADRGKEWDRSRERSRNRERERDRRRDRDRSRSRERDRDKARDRERGRDRKDRSKSKESARDPKPEASRASDAGTASQA

SEQ ID NO: 2556 - protein, 387 aa, Homo sapiens
MERPPPRAAGRDPSALRAEAPWLRAEGPGPRAAPVTVPTPPQGSSVGGGFAGLEFARPQESEPRASDLGAPRTWTGAAAGPRTPSAHIPVPAQRATPGKARLDEVMAAAALTSLSTSPLLLGAPVAAFSPEPGLEPWKEALVRPPGSYSSSSNSGDWGWDLASDQSSPSTPSPPLPPEAAHFLFGEPTLRKRKSPAQVMFQCLWKSCGKVLSTASAMQRHIRLVHLGRQAEPEQSDGEEDFYYTELDVGVDTLTDGLSSLTPVSPTASMPPAFPRLELPELLEPPALPSPLRPPAPPLPPPPVLSTVANPQSCHSDRVYQGCLTPARLEPQPTEVGACPPALSSRIGVTLRKPRGDAKKCRKVYGMERRDLWCTACRWKKACQRFLD

SEQ ID NO: 2557 - protein, 941 aa, Homo sapiens
MNKKKKPFLGMPAPLGYVPGLGRGATGFTTRSDIGPARDANDPVDDRHAPPGKRTVGDQMKKNQAADDDDEDLNDTNYDEFNGYAGSLFSSGPYEKDDEEADAIYAALDKRMDERRKERREQREKEEIEKYRMERPKIQQQFSDLKRKLAEVTEEEWLSIPEVGDARNKRQRNPRYEKLTPVPDSFFAKHLQTGENHTSVDPRQTQFGGLNTPYPGGLNTPYPGGMTPGLMTPGTGELDMRKIGQARNTLMDMRLSQVSDSVSGQTVVDPKGYLTDLNSMIPTHGGDINDIKKARLLLKSVRETNPHHPPAWIASARLEEVTGKLQVARNLIMKGTEMCPKSEDVWLEAARLQPGDTAKAVVAQAVRHLPQSVRIYIRAAELETDIRAKKRVLRKALEHVPNSVRLWKAAVELEEPEDARIMLSRAVECCPTSVELWLALARLETYENARKVLNKARENIPTDRHIWITAAKLEEANGNTQMVEKIIDRAITSLRANGVEINREQWIQDAEECDRAGSVATCQAVMRAVIGIGIEEEDRKHTWMEDADSCVAHNALECARAIYAYALQVFPSKKSVWLRAAYFEKNHGTRESLEALLQRAVAHCPKAEVLWLMGAKSKWLAGDVPAARSILALAFQANPNSEEIWLAAVKLESENDEYERARRLLAKARSSAPTARVFMKSVKLEWVQDNIRAAQDLCEEALRHYEDFPKLWMMKGQIEEQKEMMEKAREAYNQGLKKCPHSTPLWLLLSRLEEKIGQLTRARAILEKSRLKNPKNPGLWLESVRLEYRAGLKNIANTLMAKALQECPNSGILWSEAIFLEARPQRRTKSVDALKKCEHDPHVLLAVAKLFWSQRKITKAREWFHRTVKIDSDLGDAWAFFYKFELQHGTEEQQEEVRKRCESAEPRHGELWCAVSKDIANWQKKIGDILRLVAGRIKNTF

SEQ ID NO: 2558 - protein, 211 aa, Homo sapiens
MTPWLGLIVLLGSWSLGDWGAEACTCSPSHPQDAFCNSDIVIRAKVVGKKLVKEGPFGTLVYTIKQMKMYRGFTKMPHVQYIHTEASESLCGLKLEVNKYQYLLTGRVYDGKMYTGLCNFVERWDQLTLSQRKGLNYRYHLGCNCKIKSCYYLPCFVTSKNECLWTDMLSNFGYPGYQSKHYACIRQKGGYCSWYRGWAPPDKSIINATDP

SEQ ID NO: 2559 - protein, 522 aa, Homo sapiens
MRLRVRLLKRTWPLEVPETEPTLGHLRSHLRQSLLCTWGYSSNTRFTITLNYKDPLTGDEETLASYGIVSGDLICLILQDDIPAPNIPSSTDSEHSSLQNNEQPSLATSSNQTSMQDEQPSDSFQGQAAQSGVWNDDSMLGPSQNFEAESIQDNAHMAEGTGFYPSEPMLCSESVEGQVPHSLETLYQSADCSDANDALIVLIHLLMLESGYIPQGTEAKALSMPEKWKLSGVYKLQYMHPLCEGSSATLTCVPLGNLIVVNATLKINNEIRSVKRLQLLPESFICKEKLGENVANIYKDLQKLSRLFKDQLVYPLLAFTRQALNLPDVFGLVVLPLELKLRIFRLLDVRSVLSLSAVCRDLFTASNDPLLWRFLYLRDFRDNTVRVQDTDWKELYRKRHIQRKESPKGRFVMLLPSSTHTIPFYPNPLHPRPFPSSRLPPGIIGGEYDQRPTLPYVGDPISSLIPGPGETPSQFPPLRPRFDPVGPLPGPNPILPGRGGPNDRFPFRPSRGRPTDGRLSFM

SEQ ID NO: 2560 - protein, 351 aa, Homo sapiens
MPGSAAKGSELSERIESFVETLKRGGGPRSSEEMARETLGLLRQIITDHRWSNAGELMELIRREGRRMTAAQPSETTVGNMVRRVLKIIREEYGRLHGRSDESDQQESLHKLLTSGGLNEDFSFHYAQLQSNIIEAINELLVELEGTMENIAAQALEHIHSNEVIMTIGFSRTVEAFLKEAARKRKFHVIVAECAPFCQGHEMAVNLSKAGIETTVMTDAAIFAVMSRVNKVIIGTKTILANGALRAVTGTHTLALAAKHHSTPLIVCAPMFKLSPQFPNEEDSFHKFVAPEEVLPFTEGDILEKVSVHCPVFDYVPPELITLFISNIGGNAPSYIYRLMSELYHPDDHVL

SEQ ID NO: 2561 - protein, 423 aa, Homo sapiens
MAGKVKWVTDIEKSVLINNFEKRGWVQVTENEDWNFYWMSVQTIRNVFSVEAGYRLSDDQIVNHFPNHYELTRKDLMVKNIKRYRKELEKEGSPLAEKDENGKYLYLDFVPVTYMLPADYNLFVEEFRKSPSSTWIMKPCGKAQGKGIFLINKLSQIKKWSRDSKTSSFVSQSNKEAYVISLYINNPLLIGGRKFDLRLYVLVSTYRPLRCYMYKLGFCRFCTVKYTPSTSELDNMFVHLTNVAIQKHGEDYNHIHGGKWTVSNLRLYLESTRGKEVTSKLFDEIHWIIVQSLKAVAPVMNNDKHCFECYGYDIIIDDKLKPWLIEVNASPSLTSSTANDRILKYNLINDTLNIAVPNGEIPDCKWNKSPPKEVLGNYEILYDEELAQGDGADRELRSRQGQSLGPRAGRSRDSGRAVLTTWK

SEQ ID NO: 2562 - protein, 166 aa, Homo sapiens
MSEPQPRGAERDLYRDTWVRYLGYANEVGEAFRSLVPAAVVWLSYGVASSYVLADAIDKGKKAGEVPSPEAGRSARVTVAVVDTFVWQALASVAIPGFTINRVCAASLYVLGTATRWPLAVRKWTTTALGLLTIPIIIHPIDRSVDFLLDSSLRKLYPTVGKPSSS

SEQ ID NO: 2563 - protein, 687 aa, Homo sapiens
MERVNDASCGPSGCYTYQVSRHSTEMLHNLNQQRKNGGRFCDVLLRVGDESFPAHRAVLAACSEYFESVFSAQLGDGGAADGGPADVGGATAAPGGGAGGSRELEMHTISSKVFGDILDFAYTSRIVVRLESFPELMTAAKFLLMRSVIEICQEVIKQSNVQILVPPARADIMLFRPPGTSDLGFPLDMTNGAALAANSNGIAGSMQPEEEAARAAGAAIAGQASLPVLPGVDRLPMVAGPLSPQLLTSPFPSVASSAPPLTGKRGRGRPRKANLLDSMFGSPGGLREAGILPCGLCGKVFTDANRLRQHEAQHGVTSLQLGYIDLPPPRLGENGLPISEDPDGPRKRSRTRKQVACEICGKIFRDVYHLNRHKLSHSGEKPYSCPVCGLRFKRKDRMSYHVRSHDGSVGKPYICQSCGKGFSRPDHLNGHIKQVHTSERPHKCQTCNASFATRDRLRSHLACHEDKVPCQVCGKYLRAAYMADHLKKHSEGPSNFCSICNRGFSSASYLKVHVKTHHGVPLPQVSRHQEPILNGGAAFHCARTYGNKEGQKCSHQDPIESSDSYGDLSDASDLKTPEKQSANGSFSCDMAVPKNKMESDGEKKYPCPECGSFFRSKSYLNKHIQKVHVRALGGPLGDLGPALGSPFSPQQNMSLLESFGFQIVQSAFASSLVDPEVDQQPMGPEGK

SEQ ID NO: 2564 - protein, 273 aa, Homo sapiens
MEAAPSRFMFLLFLLTCELAAEVAAEVEKSSDGPGAAQEPTWLTDVPAAMEFIAATEVAVIGFFQDLEIPAVPILHSMVQKFPGVSFGISTDSEVLTHYNITGNTICLFRLVDNEQLNLEDEDIESIDATKLSRFIEINSLHMVTEYNPVTVIGLFNSVIQIHLLLIMNKASPEYEENMHRYQKAAKLFQGKILFILVDSGMKENGKVISFFKLKESQLPALAIYQTLDDEWDTLPTAEVSVEHVQNFCDGFLSGKLLKENRESEGKTPKVEL

SEQ ID NO: 2565 - protein, 117 aa, Homo sapiens
MKFQYKEDHPFEYRKKEGEKIRKKYPDRVPVIVEKAPKARVPDLDKRKYLVPSDLTVGQFYFLIRKRIHLRPEDALFFFVNNTIPPTSATMGQLYEDNHEEDYFLYVAYSDESVYGK

SEQ ID NO: 2566 - protein, 699 aa, Homo sapiens
MEALIPVINKLQDVFNTVGADIIQLPQIVVVGTQSSGKSSVLESLVGRDLLPRGTGIVTRRPLILQLVHVSQEDKRKTTGEENGVEAEEWGKFLHTKNKLYTDFDEIRQEIENETERISGNNKGVSPEPIHLKIFSPNVVNLTLVDLPGMTKVPVGDQPKDIELQIRELILRFISNPNSIILAVTAANTDMATSEALKISREVDPDGRRTLAVITKLDLMDAGTDAMDVLMGRVIPVKLGIIGVVNRSQLDINNKKSVTDSIRDEYAFLQKKYPSLANRNGTKYLARTLNRLLMHHIRDCLPELKTRINVLAAQYQSLLNSYGEPVDDKSATLLQLITKFATEYCNTIEGTAKYIETSELCGGARICYIFHETFGRTLESVDPLGGLNTIDILTAIRNATGPRPALFVPEVSFELLVKRQIKRLEEPSLRCVELVHEEMQRIIQHCSNYSTQELLRFPKLHDAIVEVVTCLLRKRLPVTNEMVHNLVAIELAYINTKHPDFADACGLMNNNIEEQRRNRLARELPSAVSRDKVASGGGGVGDGVQEPTTGNWRGMLKTSKAEELLAEEKSKPIPIMPASPQKGHAVNLLDVPVPVARKLSAREQRDCEVIERLIKSYFLIVRKNIQDSVPKAVMHFLVNHVKDTLQSELVGQLYKSSLLDDLLTESEDMAQRRKEAADMLKALQGASQIIAEIRETHLW

SEQ ID NO: 2567 - protein, 363 aa, Homo sapiens
MANYIHVPPGSPEVPKLNVTVQDQEEHRCREGALSLLQHLRPHWDPQEVTLQLFTDGITNKLIGCYVGNTMEDVVLVRIYGNKTELLVDRDEEVKSFRVLQAHGCAPQLYCTFNNGLCYEFIQGEALDPKHVCNPAIFRLIARQLAKIHAIHAHNGWIPKSNLWLKMGKYFSLIPTGFADEDINKRFLSDIPSSQILQEEMTWMKEILSNLGSPVVLCHNDLLCKNIIYNEKQGDVQFIDYEYSGYNYLAYDIGNHFNEFAGVSDVDYSLYPDRELQSQWLRAYLEAYKEFKGFGTEVTEKEVEILFIQVNQFALASHFFWGLWALIQAKYSTIEFDFLGYAIVRFNQYFKMKPEVTALKVPE

SEQ ID NO: 2568 - protein, 217 aa, Homo sapiens
MSGGLAPSKSTVYVSNLPFSLTNNDLYRIFSKYGKVVKVTIMKDKDTRKSKGVAFILFLDKDSAQNCTRAINNKQLFGRVIKASIAIDNGRAAEFIRRRNYFDKSKCYECGESGHLSYACPKNMLGEREPPKKKEKKKKKKAPEPEEEIEEVEESEDEGEDPALDSLSQAIAFQQAKIEEEQKKWKPSSGVPSTSDDSRRPRIKKSTYFSDEEELSD

SEQ ID NO: 2569 - protein, 487 aa, Homo sapiens
MPGPRVWGKYLWRSPHSKGCPGAMWWLLLWGVLQACPTRGSVLLAQELPQQLTSPGYPEPYGKGQESSTDIKAPEGFAVRLVFQDFDLEPSQDCAGDSVTISFVGSDPSQFCGQQGSPLGRPPGQREFVSSGRSLRLTFRTQPSSENKTAHLHKGFLALYQTVAVNYSQPISEASRGSEAINAPGDNPAKVQNHCQEPYYQAAAAGALTCATPGTWKDRQDGEEVLQCMPVCGRPVTPIAQNQTTLGSSRAKLGNFPWQAFTSIHGRGGGALLGDRWILTAAHTIYPKDSVSLRKNQSVNVFLGHTAIDEMLKLGNHPVHRVVVHPDYRQNESHNFSGDIALLELQHSIPLGPNVLPVCLPDNETLYRSGLLGYVSGFGMEMGWLTTELKYSRLPVAPREACNAWLQKRQRPEVFSDNMFCVGDETQRHSVCQGDSGSVYVVWDNHAHHWVATGIVSWGIGCGEGYDFYTKVLSYVDWIKGVMNGKN

SEQ ID NO: 2570 - protein, 377 aa, Homo sapiens
MAAAAQSRVVRVLSMSRSAITAIATSVCHGPPCRQLHHALMPHGKGGRSSVSGIVATVFGATGFLGRYVVNHLGRMGSQVIIPYRCDKYDIMHLRPMGDLGQLLFLEWDARDKDSIRRVVQHSNVVINLIGRDWETKNFDFEDVFVKIPQAIAQLSKEAGVEKFIHVSHLNANIKSSSRYLRNKAVGEKVVRDAFPEAIIVKPSDIFGREDRFLNSFASMHRFGPIPLGSLGWKTVKQPVYVVDVSKGIVNAVKDPDANGKSFAFVGPSRYLLFHLVKYIFAVAHRLFLPFPLPLFAYRWVARVFEISPFEPWITRDKVERMHITDMKLPHLPGLEDLGIQATPLELKAIEVLRRHRTYRWLSAEIEDVKPAKTVNI

SEQ ID NO: 2571 - protein, 956 aa, Homo sapiens
MTLLLLPLLLASLLASCSCNKANKHKPWIEAEYQGIVMENDNTVLLNPPLFALDKDAPLRYAGEICGFRLHGSGVPFEAVILDKATGEGLIRAKEPVDCEAQKEHTFTIQAYDCGEGPDGANTKKSHKATVHVRVNDVNEFAPVFVERLYRAAVTEGKLYDRILRVEAIDGDCSPQYSQICYYEILTPNTPFLIDNDGNIENTEKLQYSGERLYKFTVTAYDCGKKRAADDAEVEIQVKPTCKPSWQGWNKRIEYAPGAGSLALFPGIRLETCDEPLWNIQATIELQTSHVAKGCDRDNYSERALRKLCGAATGEVDLLPMPGPNANWTAGLSVHYSQDSSLIYWFNGTQAVQVPLGGPSGLGSGPQDSLSDHFTLSFWMKHGVTPNKGKKEEETIVCNTVQNEDGFSHYSLTVHGCRIAFLYWPLLESARPVKFLWKLEQVCDDEWHHYALNLEFPTVTLYTDGISFDPALIHDNGLIHPPRREPALMIGACWTEEKNKEKEKGDNSTDTTQGDPLSIHHYFHGYLAGFSVRSGRLESREVIECLYACREGLDYRDFESLGKGMKVHVNPSQSLLTLEGDDVETFNHALQHVAYMNTLRFATPGVRPLRLTTAVKCFSEESCVSIPEVEGYVVVLQPDAPQILLSGTAHFARPAVDFEGTNGVPLFPDLQITCSISHQVEAKKDESWQGTVTDTRMSDEIVHNLDGCEISLVGDDLDPERESLLLDTTSLQQRGLELTNTSAYLTIAGVESITVYEEILRQARYRLRHGAALYTRKFRLSCSEMNGRYSSNEFIVEVNVLHSMNRVAHPSHVLSSQQFLHRGHQPPPEMAGHSLASSHRNSMIPSAATLIIVVCVGFLVLMVVLGLVRIHSLHRRVSGAGGPPGASSDPKDPDLFWDDSALTIIVNPMESYQNRQSCVTGAVGGQQEDEDSSDSEVADSPSSDERRIIETPPHRY

SEQ ID NO: 2572 - protein, 468 aa, Homo sapiens
MGTQEGWCLLLCLALSGAAETKPHPAEGQWRAVDVVLDCFLAKDGAHRGALASSEDRARASLVLKQVPVLDDGSLEDFTDFQGGTLAQDDPPIIFEASVDLVQIPQAEALLHADCSGKEVTCEISRYFLQMTETTVKTAAWFMANMQVSGGGPSISLVMKTPRVTKNEALWHPTLNLPLSPQGTVRTAVEFQVMTQTQSLSFLLGSSASLDCGFSMAPGLDLISVEWRLQHKGRGQLVYSWTAGQGQAVRKGATLEPAQLGMARDASLTLPGLTIQDEGTYICQITTSLYRAQQIIQLNIQASPKVRLSLANEALLPTLICDIAGYYPLDVVVTWTREELGGSPAQVSGASFSSLRQSVAGTYSISSSLTAEPGSAGATYTCQVTHISLEEPLGASTQVVPPERRTALGVIFASSLFLLALMFLGLQRRQAPTGLGLLQAERWETTSCADTQSSHLHEDRTARVSQPS

SEQ ID NO: 2573 - protein, 260 aa, Homo sapiens
MARPHPWWLCVLGTLVGLSATPAPKSCPERHYWAQGKLCCQMCEPGTFLVKDCDQHRKAAQCDPCIPGVSFSPDHHTRPHCESCRHCNSGLLVRNCTITANAECACRNGWQCRDKECTECDPLPNPSLTARSSQALSPHPQPTHLPYVSEMLEARTAGHMQTLADFRQLPARTLSTHWPPQRSLCSSDFIRILVIFSGMFLVFTLAGALFLHQRRKYRSNKGESPVEPAEPCHYSCPREEEGSTIPIQEDYRKPEPACSP

SEQ ID NO: 2574 - protein, 602 aa, Homo sapiens
MAMRELVEAECGGANPLMKLAGHFTQDKALRQEGLRPGPWPPGAPASEAASKPLGVASEDELVAEFLQDQNAPLVSRAPQTFKMDDLLAEMQQIEQSNFRQAPQRAPGVADLALSENWAQEFLAAGDAVDVTQDYNETDWSQEFISEVTDPLSVSPARWAEEYLEQSEEKLWLGEPEGTATDRWYDEYHPEEDLQHTASDFVAKVDDPKLANSEGTSDAWVDQFTRPVNTSALDMEFERAKSAIESDVDFWDKLQAELEEMAKRDAEAHPWLSDYDDLTSATYDKGYQFEEENPLRDHPQPFEEGLRRLQEGDLPNAVLLFEAAVQQDPKHMEAWQYLGTTQAENEQELLAISALRRCLELKPDNQTALMALAVSFTNESLQRQACETLRDWLRYTPAYAHLVTPAEEGAGGAGLGPSKRILGSLLSDSLFLEVKELFLAAVRLDPTSIDPDVQCGLGVLFNLSGEYDKAVDCFTAALSVRPNDYLLWNKLGATLANGNQSEEAVAAYRRALELQPGYIRSRYNLGISCINLGAHREAVEHFLEALNMQRKSRGPRGEGGAMSENIWSTLRLALSMLGQSDAYGAADARDLSTLLTMFGLPQ

SEQ ID NO: 2575 - protein, 631 aa, Homo sapiens
MAMRELVEAECGGANPLMKLAGHFTQDKALRQEGLRPGPWPPGAPASEAASKPLGVASEDELVAEFLQDQNAPLVSRAPQTFKMDDLLAEMQQIEQSNFRQAPQRAPGVADLALSENWAQEFLAAGDAVDVTQDYNETDWSQEFISEVTDPLSVSPARWAEEYLEQSEEKLWLGEPEGTATDRWYDEYHPEEDLQHTASDFVAKVDDPKLANSEFLKFVRQIGEGQVSLESGAGSGRAQAEQWAAEFIQQQGTSDAWVDQFTRPVNTSALDMEFERAKSAIELQAELEEMAKRDAEAHPWLSDYDDLTSATYDKGYQFEEENPLRDHPQPFEEGLRRLQEGDLPNAVLLFEAAVQQDPKHMEAWQYLGTTQAENEQELLAISALRRCLELKPDNQTALMALAVSFTNESLQRQACETLRDWLRYTPAYAHLVTPAEEGAGGAGLGPSKRILGSLLSDSLFLEVKELFLAAVRLDPTSIDPDVQCGLGVLFNLSGEYDKAVDCFTAALSVRPNDYLLWNKLGATLANGNQSEEAVAAYRRALELQPGYIRSRYNLGISCINLGAHREAVEHFLEALNMQRKSRGPRGEGGAMSENIWSTLRLALSMLGQSDAYGAADARDLSTLLTMFGLPQ

SEQ ID NO: 2576 - protein, 547 aa, Homo sapiens
MDPMELRNVNIEPDDESSSGESAPDSYIGIGNSEKAAMSSQFANEDTESQKFLTNGFLGKKKLADYADEHHPGTTSFGMSSFNLSNAIMGSGILGLSYAMANTGIILFIIMLLAVAILSLYSVHLLLKTAKEGGSLIYEKLGEKAFGWPGKIGAFVSITMQNIGAMSSYLFIIKYELPEVIRAFMGLEENTGEWYLNGNYLIIFVSVGIILPLSLLKNLGYLGYTSGFSLTCMVFFVSVVIYKKFQIPCPLPVLDHSVGNLSFNNTLPMHVVMLPNNSESSDVNFMMDYTHRNPAGLDENQAKGSLHDSGVEYEAHSDDKCEPKYFVFNSRTAYAIPILVFAFVCHPEVLPIYSELKDRSRRKMQTVSNISITGMLVMYLLAALFGYLTFYGEVEDELLHAYSKVYTLDIPLLMVRLAVLVAVTLTVPIVLFPIRTSVITLLFPKRPFSWIRHFLIAAVLIALNNVLVILVPTIKYIFGFIGASSATMLIFILPAVFYLKLVKKETFRSPQKVGALIFLVVGIFFMIGSMALIIIDWIYDPPNSKHH

SEQ ID NO: 2577 - protein, 522 aa, Homo sapiens
MSLRVHTLPTLLGAVVRPGCRELLCLLMITVTVGPGASGVCPTACICATDIVSCTNKNLSKVPGNLFRLIKRLDLSYNRIGLLDSEWIPVSFAKLNTLILRHNNITSISTGSFSTTPNLKCLDLSSNKLKTVKNAVFQELKVLEVLLLYNNHISYLDPSAFGGLSQLQKLYLSGNFLTQFPMDLYVGRFKLAELMFLDVSYNRIPSMPMHHINLVPGKQLRGIYLHGNPFVCDCSLYSLLVFWYRRHFSSVMDFKNDYTCRLWSDSRHSRQVLLLQDSFMNCSDSIINGSFRALGFIHEAQVGERLMVHCDSKTGNANTDFIWVGPDNRLLEPDKEMENFYVFHNGSLVIESPRFEDAGVYSCIAMNKQRLLNETVDVTINVSNFTVSRSHAHEAFNTAFTTLAACVASIVLVLLYLYLTPCPCKCKTKRQKNMLHQSNAHSSILSPGPASDASADERKAGAGKRVVFLEPLKDTAAGQNGKVRLFPSEAVIAEGILKSTRGKSDSDSVNSVFSDTPFVAST

SEQ ID NO: 2578 - protein, 129 aa, Homo sapiens
MAKSLRSKWKRKMRAEKRKKNAPKEASRLKSILKLDGDVLMKDVQEIATVVVPKPKHCQEKMQCEVKDEKDDMKMETDIKRNKKTLLDQHGQYPIWMNQRQRKRLKAKREKRKGKSKAKAVKVAKGLAW

SEQ ID NO: 2579 - protein, 350 aa, Homo sapiens
MRLPDVQLWLVLLWALVRAQGTGSVCPSCGGSKLAPQAERALVLELAKQQILDGLHLTSRPRITHPPPQAALTRALRRLQPGSVAPGNGEEVISFATVTDSTSAYSSLLTFHLSTPRSHHLYHARLWLHVLPTLPGTLCLRIFRWGPRRRRQGSRTLLAEHHITNLGWHTLTLPSSGLRGEKSGVLKLQLDCRPLEGNSTVTGQPRRLLDTAGHQQPFLELKIRANEPGAGRARRRTPTCEPATPLCCRRDHYVDFQELGWRDWILQPEGYQLNYCSGQCPPHLAGSPGIAASFHSAVFSLLKANNPWPASTSCCVPTARRPLSLLYLDHNGNVVKTDVPDMVVEACGCS

SEQ ID NO: 2580 - protein, 266 aa, Homo sapiens
MRVTLATIAWMVSFVSNYSHTANILPDIENEDFIKDCVRIHNKFRSEVKPTASDMLYMTWDPALAQIAKAWASNCQFSHNTRLKPPHKLHPNFTSLGENIWTGSVPIFSVSSAITNWYDEIQDYDFKTRICKKVCGHYTQVVWADSYKVGCAVQFCPKVSGFDALSNGAHFICNYGPGGNYPTWPYKRGATCSACPNNDKCLDNLCVNRQRDQVKRYYSVVYPGWPIYPRNRYTSLFLIVNSVILILSVIITILVQHKYPNLVLLD

SEQ ID NO: 2581 - protein, 336 aa, Homo sapiens
MTDLNDNICKRYIKMITNIVILSLIICISLAFWIISMTASTYYGNLRPISPWRWLFSVVVPVLIVSNGLKKKSLDHSGALGGLVVGFILTIANFSFFTSLLMFFLSSSKLTKWKGEVKKRLDSEYKEGGQRNWVQVFCNGAVPTELALLYMIENGPGEIPVDFSKQYSASWMCLSLLAALACSAGDTWASEVGPVLSKSSPRLITTWEKVPVGTNGGVTVVGLVSSLLGGTFVGIAYFLTQLIFVNDLDISAPQWPIIAFGGLAGLLGSIVDSYLGATMQYTGLDESTGMVVNSPTNKARHIAGKPILDNNAVNLFSSVLIALLLPTAAWGFWPRG

SEQ ID NO: 2582 - protein, 907 aa, Homo sapiens
MDTSRLGVLLSLPVLLQLATGGSSPRSGVLLRGCPTHCHCEPDGRMLLRVDCSDLGLSELPSNLSVFTSYLDLSMNNISQLLPNPLPSLRFLEELRLAGNALTYIPKGAFTGLYSLKVLMLQNNQLRHVPTEALQNLRSLQSLRLDANHISYVPPSCFSGLHSLRHLWLDDNALTEIPVQAFRSLSALQAMTLALNKIHHIPDYAFGNLSSLVVLHLHNNRIHSLGKKCFDGLHSLETLDLNYNNLDEFPTAIRTLSNLKELGFHSNNIRSIPEKAFVGNPSLITIHFYDNPIQFVGRSAFQHLPELRTLTLNGASQITEFPDLTGTANLESLTLTGAQISSLPQTVCNQLPNLQVLDLSYNLLEDLPSFSVCQKLQKIDLRHNEIYEIKVDTFQQLLSLRSLNLAWNKIAIIHPNAFSTLPSLIKLDLSSNLLSSFPITGLHGLTHLKLTGNHALQSLISSENFPELKVIEMPYAYQCCAFGVCENAYKISNQWNKGDNSSMDDLHKKDAGMFQAQDERDLEDFLLDFEEDLKALHSVQCSPSPGPFKPCEHLLDGWLIRIGVWTIAVLALTCNALVTSTVFRSPLYISPIKLLIGVIAAVNMLTGVSSAVLAGVDAFTFGSFARHGAWWENGVGCHVIGFLSIFASESSVFLLTLAALERGFSVKYSAKFETKAPFSSLKVIILLCALLALTMAAVPLLGGSKYGASPLCLPLPFGEPSTMGYMVALILLNSLCFLMMTIAYTKLYCNLDKGDLENIWDCSMVKHIALLLFTNCILNCPVAFLSFSSLINLTFISPEVIKFILLVVVPLPACLNPLLYILFNPHFKEDLVSLRKQTYVWTRSKHPSLMSINSDDVEKQSCDSTQALVTFTSSSITYDLPPSSVPSPAYPVTESCHLSSVAFVPCL

SEQ ID NO: 2583 - protein, 588 aa, Homo sapiens
MADGVDHIDIYADVGEEFNQEAEYGGHDQIDLYDDVISPSANNGDAPEDRDYMDTLPPTVGDDVGKGAAPNVVYTYTGKRIALYIGNLTWWTTDEDLTEAVHSLGVNDILEIKFFENRANGQSKGFALVGVGSEASSKKLMDLLPKRELHGQNPVVTPCNKQFLSQFEMQSRKTTQSGQMSGEGKAGPPGGSSRAAFPQGGRGRGRFPGAVPGGDRFPGPAGPGGPPPPFPGNLIKHLVKGTRPLFLETRIPWHMGHSIEEIPIFGLKAGQTPPRPPLGPPGPPGPPGPPPPGQVLPPPLAGPPNRGDRPPPPVLFPGQPFGQPPLGPLPPGPPPPVPGYGPPPGPPPPQQGPPPPPGPFPPRPPGPLGPPLTLAPPPHLPGPPPGAPPPAPHVNPAFFPPPTNSGMPTSDSRGPPPTDPYGRPPPYDRGDYGPPGREMDTARTPLSEAEFEEIMNRNRAISSSAISRAVSDASAGDYGSAIETLVTAISLIKQSKVSADDRCKVLISSLQDCLHGIESKSYGSGSRRERSRERDHSRSREKSRRHKSRSRDRHDDYYRERSRERERHRDRDRDRDRERDREREYRHR

SEQ ID NO: 2584 - protein, 914 aa, Homo sapiens
MANINLKEITLIVGVVTACYWNSLFCGFVFDDVSAILDNKDLHPSTPLKTLFQNDFWGTPMSEERSHKSYRPLTVLTFRLNYLLSELKPMSYHLLNMIFHAVVSVIFLKVCKLFLDNKSSVIASLLFAVHPIHTEAVTGVVGRAELLSSIFFLAAFLSYTRSKGPDNSIIWTPIALTVFLVAVATLCKEQGITVVGICCVYEVFIAQGYTLPLLCTTAGQFLRGKGSIPFSMLQTLVKLIVLMFSTLLLVVIRVQVIQSQLPVFTRFDNPAAVSPTPTRQLTFNYLLPVNAWLLLNPSELCCDWTMGTIPLIESLLDIRNLATFTFFCFLGMLGVFSIRYSGDSSKTVLMALCLMALPFIPASNLFFPVGFVVAERVLYVPSMGFCILVAHGWQKISTKSVFKKLSWICLSMVILTHSLKTFHRNWDWESEYTLFMSALKVNKNNAKLWNNVGHALENEKNFERALKYFLQATHVQPDDIGAHMNVGRTYKNLNRTKEAEESYMMAKSLMPQIIPGKKYAARIAPNHLNVYINLANLIRANESRLEEADQLYRQAISMRPDFKQAYISRGELLLKMNKPLKAKEAYLKALELDRNNADLWYNLAIVHIELKEPNEALKNFNRALELNPKHKLALFNSAIVMQESGEVKLRPEARKRLLSYINEEPLDANGYFNLGMLAMDDKKDNEAEIWMKKAIKLQADFRSALFNLALLYSQTAKELKALPILEELLRYYPDHIKGLILKGDILMNQKKDILGAKKCFERILEMDPSNVQGKHNLCVVYFEEKDLLKAERCLLETLALAPHEEYIQRHLNIVRDKISSSSFIEPIFPTSKISSVEGKKIPTESVKEIRGESRQTQIVKTSDNKSQSKSNKQLGKNGDEETPHKTTKDIKEIEKKRVAALKRLEEIERILNGE

SEQ ID NO: 2585 - protein, 338 aa, Homo sapiens
MSLSAFTLFLALIGGTSGQYYDYDFPLSIYGQSSPNCAPECNCPESYPSAMYCDELKLKSVPMVPPGIKYLYLRNNQIDHIDEKAFENVTDLQWLILDHNLLENSKIKGRVFSKLKQLKKLHINHNNLTESVGPLPKSLEDLQLTHNKITKLGSFEGLVNLTFIHLQHNRLKEDAVSAAFKGLKSLEYLDLSFNQIARLPSGLPVSLLTLYLDNNKISNIPDEYFKRFNALQYLRLSHNELADSGIPGNSFNVSSLVELDLSYNKLKNIPTVNENLENYYLEVNQLEKFDIKSFCKILGPLSYSKIKHLRLDGNRISETSLPPDMYECLRVANEVTLN

SEQ ID NO: 2586 - protein, 352 aa, Homo sapiens
MAGTICFIMWVLFITDTVWSRSVRQVYEVHDSDDWTIHDFECPMECFCPPSFPTALYCENRGLKEIPAIPSRIWYLYLQNNLIETIPEKPFENATQLRWINLNKNKITNYGIEKGALSQLKKLLFLFLEDNELEEVPSPLPRSLEQLQLARNKVSRIPQGTFSNLENLTLLDLQNNKLVDNAFQRDTFKGLKNLMQLNMAKNALRNMPPRLPANTMQLFLDNNSIEGIPENYFNVIPKVAFLRLNHNKLSDEGLPSRGFDVSSILDLQLSHNQLTKVPRISAHLQHLHLDHNKIKSVNVSVICPSPSMLPAERDSFSYGPHLRYLRLDGNEIKPPIPMALMTCFRLLQAVII

SEQ ID NO: 2587 - protein, 694 aa, Homo sapiens
MPEFLEDPSVLTKDKLKSELVANNVTLPAGEQRKDVYVQLYLQHLTARNRPPLPAGTNSKGPPDFSSDEEREPTPVLGSGAAAAGRSRAAVGRKATKKTDKPRQEDKDDLDVTELTNEDLLDQLVKYGVNPGPIVGTTRKLYEKKLLKLREQGTESRSSTPLPTISSSAENTRQNGSNDSDRYSDNEEGKKKEHKKVKSTRDIVPFSELGTTPSGGGFFQGISFPEISTRPPLGSTELQAAKKVHTSKGDLPREPLVATNLPGRGQLQKLASERNLFISCKSSHDRCLEKSSSSSSQPEHSAMLVSTAASPSLIKETTTGYYKDIVENICGREKSGIQPLCPERSHISDQSPLSSKRKALEESESSQLISPPLAQAIRDYVNSLLVQGGVGSLPGTSNSMPPLDVENIQKRIDQSKFQETEFLSPPRKVPRLSEKSVEERDSGSFVAFQNIPGSELMSSFAKTVVSHSLTTLGLEVAKQSQHDKIDASELSFPFHESILKVIEEEWQQVDRQLPSLACKYPVSSREATQILSVPKVDDEILGFISEATPLGGIQAASTESCNQQLDLALCRAYEAAASALQIATHTAFVAKAMQADISQAAQILSSDPSRTHQALGILSKTYDAASYICEAAFDEVKMAAHTMGNATVGRRYLWLKDCKINLASKNKLASTPFKGGTLFGGEVCKVIKKRGNKH

SEQ ID NO: 2588 - protein, 86 aa, Homo sapiens
MSLPLNPKPFLNGLTGKPVMVKLKWGMEYKGYLVSVDGYMNMQLANTEEYIDGALSGHLGEVLIRCNNVLYIRGVEEEEEDGEMRE

SEQ ID NO: 2589 - protein, 426 aa, Homo sapiens
MASGHSLLLENAQQVVLVCARGERFLARDALRSLAVLEGASLVVGKDGFIKAIGPADVIQRQFSGETFEEIIDCSGKCILPGLVDAHTHPVWAGERVHEFAMKLAGATYMEIHQAGGGIHFTVERTRQATEEELFRSLQQRLQCMMRAGTTLVECKSGYGLDLETELKMLRVIERARRELDIGISATYCGAHSVPKGKTATEAADDIINNHLPKLKELGRNGEIHVDNIDVFCEKGVFDLDSTRRILQRGKDIGLQINFHGDELHPMKAAELGAELGAQAISHLEEVSDEGIVAMATARCSAILLPTTAYMLRLKQPRARKMLDEGVIVALGSDFNPNAYCFSMPMVMHLACVNMRMSMPEALAAATINAAYALGKSHTHGSLEVGKQGDLIIINSSRWEHLIYQFGGHHELIEYVIAKGKLIYKT

SEQ ID NO: 2590 - protein, 623 aa, Homo sapiens
MERPEEGKQSPPPQPWGRLLRLGAEEGEPHVLLRKREWTIGRRRGCDLSFPSNKLVSGDHCRIVVDEKSGQVTLEDTSTSGTVINKLKVVKKQTCPLQTGDVIYLVYRKNEPEHNVAYLYESLSEKQGMTQESFEMVPCCVAQAGLKLLGSSDPPTLASQSIVITGSGGGGISPKGSGPSVASDEVSSFASALPDRKTASFSSLEPQDQEDLEPVKKKMRGDGDLDLNGQLLVAQPRRNAQTVHEDVRAAAGKPDKMEETLTCIICQDLLHDCVSLQPCMHTFCAACYSGWMERSSLCPTCRCPVERICKNHILNNLVEAYLIQHPDKSRSEEDVQSMDARNKITQDMLQPKVRRSFSDEEGSSEDLLELSDVDSESSDISQPYVVCRQCPEYRRQAAQPPHCPAPEGEPGAPQALGDAPSTSVSLTTAVQDYVCPLQGSHALCTCCFQPMPDRRAEREQDPRVAPQQCAVCLQPFCHLYWGCTRTGCYGCLAPFCELNLGDKCLDGVLNNNSYESDILKNYLATRGLTWKNMLTESLVALQRGVFLLSDYRVTGDTVLCYCCGLRSFRELTYQYRQNIPASELPVAVTSRPDCYWGRNCRTQVKAHHAMKFNHICEQTRFKN

SEQ ID NO: 2591 - protein, 461 aa, Homo sapiens
MKILFVEPAIFLSAFAMTLTGPLTTQYVYRRIWEETGNYTFSSDSNISECEKNKSSPIFAFQEEVQKKVSRFNLQMDISGLIPGLVSTFILLSISDHYGRKFPMILSSVGALATSVWLCLLCYFAFPFQLLIASTFIGAFCGNYTTFWGACFAYIVDQCKEHKQKTIRIAIIDFLLGLVTGLTGLSSGYFIRELGFEWSFLIIAVSLAVNLIYILFFLGDPVKECSSQNVTMSCSEGFKNLFYRTYMLFKNASGKRRFLLCLLLFTVITYFFVVIGIAPIFILYELDSPLCWNEVFIGYGSALGSASFLTSFLGIWLFSYCMEDIHMAFIGIFTTMTGMAMTAFASTTLMMFLARVPFLFTIVPFSVLRSMLSKVVRSTEQGTLFACIAFLETLGGVTAVSTFNGIYSATVAWYPGFTFLLSAGLLLLPAISLCVVKCTSWNEGSYELLIQEESSEDASDR

SEQ ID NO: 2592 - protein, 109 aa, Homo sapiens
MAQSINITELNLPQLEMLKNQLDQMYVPGKLHDVEHVLIDVGTGYYVEKTAEDAKDFFKRKIDFLTKQMEKIQPALQEKHAMKQAVMEMMSQKIQQLTALGAAQATAKA

SEQ ID NO: 2593 - protein, 298 aa, Homo sapiens
MENFQKVEKIGEGTYGVVYKARNKLTGEVVALKKIRLDTETEGVPSTAIREISLLKELNHPNIVKLLDVIHTENKLYLVFEFLHQDLKKFMDASALTGIPLPLIKSYLFQLLQGLAFCHSHRVLHRDLKPQNLLINTEGAIKLADFGLARAFGVPVRTYTHEVVTLWYRAPEILLGCKYYSTAVDIWSLGCIFAEMVTRRALFPGDSEIDQLFRIFRTLGTPDEVVWPGVTSMPDYKPSFPKWARQDFSKVVPPLDEDGRSLLSQMLHYDPNKRISAKAALAHPFFQDVTKPVPHLRL

SEQ ID NO: 2594 - protein, 540 aa, Homo sapiens
MMGSPVSHLLAGFCVWVVLGWVGGSVPNLGPAEQEQNHYLAQLFGLYGENGTLTAGGLARLLHSLGLGRVQGLRLGQHGPLTGRAASPAADNSTHRPQNPELSVDVWAGMPLGPSGWGDLEESKAPHLPRGPAPSGLDLLHRLLLLDHSLADHLNEDCLNGSQLLVNFGLSPAAPLTPRQFALLCPALLYQIDSRVCIGAPAPAPPGDLLSALLQSALAVLLLSLPSPLSLLLLRLLGPRLLRPLLGFLGALAVGTLCGDALLHLLPHAQEGRHAGPGGLPEKDLGPGLSVLGGLFLLFVLENMLGLLRHRGLRPRCCRRKRRNLETRNLDPENGSGMALQPLQAAPEPGAQGQREKNSQHPPALAPPGHQGHSHGHQGGTDITWMVLLGDGLHNLTDGLAIGAAFSDGFSSGLSTTLAVFCHELPHELGDFAMLLQSGLSFRRLLLLSLVSGALGLGGAVLGVGLSLGPVPLTPWVFGVTAGVFLYVALVDMLPALLRPPEPLPTPHVLLQGLGLLLGGGLMLAITLLEERLLPVTTEG

SEQ ID NO: 2595 - protein, 113 aa, Homo sapiens
MDSRQAAALLVLLLLIDGGCAEGPGGQQEDQLSAEEDSEPLPPQDAQTSGSLLHYLLQAMERPGRSQAFLFQPQRFGRNTQGSWRNEWLSPRAGEGLNSQFWSLAAPQRFGKK

SEQ ID NO: 2596 - protein, 211 aa, Homo sapiens
MTTETFVKDIKPGLKNLNLIFIVLETGRVTKTKDGHEVRTCKVADKTGSINISVWDDVGNLIQPGDIIRLTKGYASVFKGCLTLYTGRGGDLQKIGEFCMVYSEVPNFSEPNPEYSTQQAPNKAVQNDSNPSASQPTTGPSAASPASENQNGNGLSAPPGPGGGPHPPHTPSHPPSTRITRSQPNHTPAGPPGPSSNPVSNGKETRRSSKR

SEQ ID NO: 2597 - protein, 1214 aa, Homo sapiens
MAVRKKDGGPNVKYYEAADTVTQFDNVRLWLGKNYKKYIQAEPPTNKSLSSLVVQLLQFQEEVFGKHVSNAPLTKLPIKCFLDFKAGGSLCHILAAAYKFKSDQGWRRYDFQNPSRMDRNVEMFMTIEKSLVQNNCLSRPNIFLCPEIEPKLLGKLKDIIKRHQGTVTEDKNNASHVVYPVPGNLEEEEWVRPVMKRDKQVLLHWGYYPDSYDTWIPASEIEASVEDAPTPEKPRKVHAKWILDTDTFNEWMNEEDYEVNDDKNPVSRRKKISAKTLTDEVNSPDSDRRDKKGGNYKKRKRSPSPSPTPEAKKKNAKKGPSTPYTKSKRGHREEEQEDLTKDMDEPSPVPNVEEVTLPKTVNTKKDSESAPVKGGTMTDLDEQEDESMETTGKDEDENSTGNKGEQTKNPDLHEDNVTEQTHHIIIPSYAAWFDYNSVHAIERRALPEFFNGKNKSKTPEIYLAYRNFMIDTYRLNPQEYLTSTACRRNLAGDVCAIMRVHAFLEQWGLINYQVDAESRPTPMGPPPTSHFHVLADTPSGLVPLQPKTPQQTSASQQMLNFPDKGKEKPTDMQNFGLRTDMYTKKNVPSKSKAAASATREWTEQETLLLLEALEMYKDDWNKVSEHVGSRTQDECILHFLRLPIEDPYLEDSEASLGPLAYQPIPFSQSGNPVMSTVAFLASVVDPRVASAAAKSALEEFSKMKEEVPTALVEAHVRKVEEAAKVTGKADPAFGLESSGIAGTTSDEPERIEESGNDEARVEGQATDEKKEPKEPREGGGAIEEEAKEKTSEAPKKDEEKGKEGDSEKESEKSDGDPIVDPEKEKEPKEGQEEVLKEVVESEGERKTKVERDIGEGNLSTAAAAALAAAAVKAKHLAAVEERKIKSLVALLVETQMKKLEIKLRHFEELETIMDREREALEYQRQQLLADRQAFHMEQLKYAEMRARQQHFQQMHQQQQQPPPALPPGSQPIPPTGAAGPPAVHGLAVAPASVVPAPAGSGAPPGSLGPSEQIGQAGSTAGPQQQQPAGAPQPGAVPPGVPPPGPHGPSPFPNQQTPPSMMPGAVPGSGHPGVAGNAPLGLPFGMPPPPPPPAPSIIPFGSLADSISINLPAPPNLHGHHHHLPFAPGTLPPPNLPVSMANPLHPNLPATTTMPSSLPLGPGLGSAAAQSPAIVAAVQGNLLPSASPLPDPGTPLPPDPTAPSPGTVTPVPPPQ

SEQ ID NO: 2598 - protein, 798 aa, Homo sapiens
MVALPMVLVLLLVLSRGESELDAKIPSTGDATEWRNPHLSMLGSCQPAPSCQKCILSHPSCAWCKQLNFTASGEAEARRCARREELLARGCPLEELEEPRGQQEVLQDQPLSQGARGEGATQLAPQRVRVTLRPGEPQQLQVRFLRAEGYPVDLYYLMDLSYSMKDDLERVRQLGHALLVRLQEVTHSVRIGFGSFVDKTVLPFVSTVPSKLRHPCPTRLERCQSPFSFHHVLSLTGDAQAFEREVGRQSVSGNLDSPEGGFDAILQAALCQEQIGWRNVSRLLVFTSDDTFHTAGDGKLGGIFMPSDGHCHLDSNGLYSRSTEFDYPSVGQVAQALSAANIQPIFAVTSAALPVYQELSKLIPKSAVGELSEDSSNVVQLIMDAYNSLSSTVTLEHSSLPPGVHISYESQCEGPEKREGKAEDRGQCNHVRINQTVTFWVSLQATHCLPEPHLLRLRALGFSEELIVELHTLCDCNCSDTQPQAPHCSDGQGHLQCGVCSCAPGRLGRLCECSVAELSSPDLESGCRAPNGTGPLCSGKGHCQCGRCSCSGQSSGHLCECDDASCERHEGILCGGFGRCQCGVCHCHANRTGRACECSGDMDSCISPEGGLCSGHGRCKCNRCQCLDGYYGALCDQCPGCKTPCERHRDCAECGAFRTGPLATNCSTACAHTNVTLALAPILDDGWCKERTLDNQLFFFLVEDDARGTVVLRVRPQEKGADHTQAIVLGCVGGIVAVGLGLVLAYRLSVEIYDRREYSRFEKEQQQLNWKQDSNPLYKSAITTTINPRFQEADSPTL

SEQ ID NO: 2599 - protein, 520 aa, Homo sapiens
MSIPLKSSFLLSYLCTLPPALLSREILMADSEALPSLAGDPVAVEALLRAVFGVVVDEAIQKGTSVSQKVCEWKEPEELKQLLDLELRSQGESQKQILERCRAVIRYSVKTGHPRFFNQLFSGLDPHALAGRIITESLNTSQYTYEIAPVFVLMEEEVLRKLRALVGWSSGDGIFCPGGSISNMYAVNLARYQRYPDCKQRGLRTLPPLALFTSKECHYSIQKGAAFLGLGTDSVRVVKADERGKMVPEDLERQIGMAEAEGAVPFLVSATSGTTVLGAFDPLEAIADVCQRHGLWLHVDAAWGGSVLLSQTHRHLLDGIQRADSVAWNPHKLLAAGLQCSALLLQDTSNLLKRCHGSQASYLFQQDKFYDVALDTGDKVVQCGRRVDCLKLWLMWKAQGDQGLERRIDQAFVLARYLVEEMKKREGFELVMEPEFVNVCFWFVPPSLRGKQESPDYHERLSKVAPVLKERMVKEGSMMIGYQPHGTRGNFFRVVVANSALTCADMDFLLNELERLGQDL

SEQ ID NO: 2600 - protein, 1342 aa, Homo sapiens
MRANDALQVLGLLFSLARGSEVGNSQAVCPGTLNGLSVTGDAENQYQTLYKLYERCEVVMGNLEIVLTGHNADLSFLQWIREVTGYVLVAMNEFSTLPLPNLRVVRGTQVYDGKFAIFVMLNYNTNSSHALRQLRLTQLTEILSGGVYIEKNDKLCHMDTIDWRDIVRDRDAEIVVKDNGRSCPPCHEVCKGRCWGPGSEDCQTLTKTICAPQCNGHCFGPNPNQCCHDECAGGCSGPQDTDCFACRHFNDSGACVPRCPQPLVYNKLTFQLEPNPHTKYQYGGVCVASCPHNFVVDQTSCVRACPPDKMEVDKNGLKMCEPCGGLCPKACEGTGSGSRFQTVDSSNIDGFVNCTKILGNLDFLITGLNGDPWHKIPALDPEKLNVFRTVREITGYLNIQSWPPHMHNFSVFSNLTTIGGRSLYNRGFSLLIMKNLNVTSLGFRSLKEISAGRIYISANRQLCYHHSLNWTKVLRGPTEERLDIKHNRPRRDCVAEGKVCDPLCSSGGCWGPGPGQCLSCRNYSRGGVCVTHCNFLNGEPREFAHEAECFSCHPECQPMEGTATCNGSGSDTCAQCAHFRDGPHCVSSCPHGVLGAKGPIYKYPDVQNECRPCHENCTQGCKGPELQDCLGQTLVLIGKTHLTMALTVIAGLVVIFMMLGGTFLYWRGRRIQNKRAMRRYLERGESIEPLDPSEKANKVLARIFKETELRKLKVLGSGVFGTVHKGVWIPEGESIKIPVCIKVIEDKSGRQSFQAVTDHMLAIGSLDHAHIVRLLGLCPGSSLQLVTQYLPLGSLLDHVRQHRGALGPQLLLNWGVQIAKGMYYLEEHGMVHRNLAARNVLLKSPSQVQVADFGVADLLPPDDKQLLYSEAKTPIKWMALESIHFGKYTHQSDVWSYGVTVWELMTFGAEPYAGLRLAEVPDLLEKGERLAQPQICTIDVYMVMVKCWMIDENIRPTFKELANEFTRMARDPPRYLVIKRESGPGIAPGPEPHGLTNKKLEEVELEPELDLDLDLEAEEDNLATTTLGSALSLPVGTLNRPRGSQSLLSPSSGYMPMNQGNLGESCQESAVSGSSERCPRPVSLHPMPRGCLASESSEGHVTGSEAELQEKVSMCRSRSRSRSPRPRGDSAYHSQRHSLLTPVTPLSPPGLEEEDVNGYVMPDTHLKGTPSSREGTLSSVGLSSVLGTEEEDEDEEYEYMNRRRRHSPPHPPRPSSLEELGYEYMDVGSDLSASLGSTQSCPLHPVPIMPTAGTTPDEDYEYMNRQRDGGGPGGDYAAMGACPASEQGYEEMRAFQGPGHQAPHVHYARLKTLRSLEATDSAFDNPDYWHSRLFPKANAQRT

SEQ ID NO: 2601 - protein, 1114 aa, Homo sapiens
MERSPGEGPSPSPMDQPSAPSDPTDQPPAAHAKPDPGSGGQPAGPGAAGEALAVLTSFGRRLLVLIPVYLAGAVGLSVGFVLFGLALYLGWRRVRDEKERSLRAARQLLDDEEQLTAKTLYMSHRELPAWVSFPDVEKAEWLNKIVAQVWPFLGQYMEKLLAETVAPAVRGSNPHLQTFTFTRVELGEKPLRIIGVKVHPGQRKEQILLDLNISYVGDVQIDVEVKKYFCKAGVKGMQLHGVLRVILEPLIGDLPFVGAVSMFFIRRPTLDINWTGMTNLLDIPGLSSLSDTMIMDSIAAFLVLPNRLLVPLVPDLQDVAQLRSPLPRGIIRIHLLAARGLSSKDKYVKGLIEGKSDPYALVRLGTQTFCSRVIDEELNPQWGETYEVMVHEVPGQEIEVEVFDKDPDKDDFLGRMKLDVGKVLQASVLDDWFPLQGGQGQVHLRLEWLSLLSDAEKLEQVLQWNWGVSSRPDPPSAAILVVYLDRAQDLPMVTSELYPPQLKKGNKEPNPMVQLSIQDVTQESKAVYSTNCPVWEEAFRFFLQDPQSQELDVQVKDDSRALTLGALTLPLARLLTAPELILDQWFQLSSSGPNSRLYMKLVMRILYLDSSEICFPTVPGCPGAWDVDSENPQRGSSVDAPPRPCHTTPDSQFGTEHVLRIHVLEAQDLIAKDRFLGGLVKGKSDPYVKLKLAGRSFRSHVVREDLNPRWNEVFEVIVTSVPGQELEVEVFDKDLDKDDFLGRCKVRLTTVLNSGFLDEWLTLEDVPSGRLHLRLERLTPRPTAAELEEVLQVNSLIQTQKSAELAAALLSIYMERAEDLPLRKGTKHLSPYATLTVGDSSHKTKTISQTSAPVWDESASFLIRKPHTESLELQVRGEGTGVLGSLSLPLSELLVADQLCLDRWFTLSSGQGQVLLRAQLGILVSQHSGVEAHSHSYSHSSSSLSEEPELSGGPPHITSSAPELRQRLTHVDSPLEAPAGPLGQVKLTLWYYSEERKLVSIVHGCRSLRQNGRDPPDPYVSLLLLPDKNRGTKRRTSQKKRTLSPEFNERFEWELPLDEAQRRKLDVSVKSNSSFMSRERELLGKVQLDLAETDLSQGVARWYDLMDNKDKGSS

SEQ ID NO: 2602 - protein, 237 aa, Homo sapiens
MNIFDRKINFDALLKFSHITPSTQQHLKKVYASFALCMFVAAAGAYVHMVTHFIQAGLLSALGSLILMIWLMATPHSHETEQKRLGLLAGFAFLTGVGLGPALEFCIAVNPSILPTAFMGTAMIFTCFTLSALYARRRSYLFLGGILMSALSLLLLSSLGNVFFGSIWLFQANLYVGLVVMCGFVLFDTQLIIEKAEHGDQDYIWHCIDLFLDFITVFRKLMMILAMNEKDKKKEKK

SEQ ID NO: 2603 - protein, 1076 aa, Homo sapiens
MGILSITDQPPLVQAIFSRDVEEVRSLLSQKENINVLDQERRTPLHAAAYVGDVPILQLLLMSGANVNAKDTLWLTPLHRAAASRNEKVLGLLLAHSADVNARDKLWQTPLHVAAANRATKCAEALAPLLSSLNVADRSGRSALHHAVHSGHLETVNLLLNKGASLNVCDKKERQPLHWAAFLGHLEVLKLLVARGADLGCKDRKGYGLLHTAAASGQIEVVKYLLRMGAEIDEPNAFGNTALHIACYLGQDAVAIELVNAGANVNQPNDKGFTPLHVAAVSTNGALCLELLVNNGADVNYQSKEGKSPLHMAAIHGRFTRSQILIQNGSEIDCADKFGNTPLHVAARYGHELLISTLMTNGADTARRGIHDMFPLHLAVLFGFSDCCRKLLSSGQLYSIVSSLSNEHVLSAGFDINTPDNLGRTCLHAAASGGNVECLNLLLSSGADLRRRDKFGRTPLHYAAANGSYQCAVTLVTAGAGVNEADCKGCSPLHYAAASDTYRRAEPHTPSSHDAEEDEPLKESRRKEAFFCLEFLLDNGADPSLRDRQGYTAVHYAAAYGNRQNLELLLEMSFNCLEDVESTIPVSPLHLAAYNGHCEALKTLAETLVNLDVRDHKGRTALFLATERGSTECVEVLTAHGASALIKERKRKWTPLHAAAASGHTDSLHLLIDSGERADITDVMDAYGQTPLMLAIMNGHVDCVHLLLEKGSTADAADLRGRTALHRGAVTGCEDCLAALLDHDAFVLCRDFKGRTPIHLASACGHTAVLRTLLQAALSTDPLDAGVDYSGYSPMHWASYTGHEDCLELLLEHSPFSYLEGNPFTPLHCAVINNQDSTTEMLLGALGAKIVNSRDAKGRTPLHAAAFADNVSGLRMLLQHQAEVNATDHTGRTALMTAAENGQTAAVEFLLYRGKADLTVLDENKNTALHLACSKGHEKCALMILAETQDLGLINATNSALQMPLHIAARNGLASVVQALLSHGATVLAVDEEGHTPALACAPNKDVADCLALILSTMKPFPPKDAVSPFSFSLLKNCSIAAAKTVGGCGALPHGASCPYSQERPGAIGLDGCYSE

SEQ ID NO: 2604 - protein, 928 aa, Homo sapiens
MPPKTPRKTAATAAAAAAEPPAPPPPPPPEEDPEQDSGPEDLPLVRLEFEETEEPDFTALCQKLKIPDHVRERAWLTWEKVSSVDGVLGGYIQKKKELWGICIFIAAVDLDEMSFTFTELQKNIEISVHKFFNLLKEIDTSTKVDNAMSRLLKKYDVLFALFSKLERTCELIYLTQPSSSISTEINSALVLKVSWITFLLAKGEVLQMEDDLVISFQLMLCVLDYFIKLSPPMLLKEPYKTAVIPINGSPRTPRRGQNRSARIAKQLENDTRIIEVLCKEHECNIDEVKNVYFKNFIPFMNSLGLVTSNGLPEVENLSKRYEEIYLKNKDLDARLFLDHDKTLQTDSIDSFETQRTPRKSNLDEEVNVIPPHTPVRTVMNTIQQLMMILNSASDQPSENLISYFNNCTVNPKESILKRVKDIGYIFKEKFAKAVGQGCVEIGSQRYKLGVRLYYRVMESMLKSEEERLSIQNFSKLLNDNIFHMSLLACALEVVMATYSRSTSQNLDSGTDLSFPWILNVLNLKAFDFYKVIESFIKAEGNLTREMIKHLERCEHRIMESLAWLSDSPLFDLIKQSKDREGPTDHLESACPLNLPLQNNHTAADMYLSPVRSPKKKGSTTRVNSTANAETQATSAFQTQKPLKSTSLSLFYKKVYRLAYLRLNTLCERLLSEHPELEHIIWTLFQHTLQNEYELMRDRHLDQIMMCSMYGICKVKNIDLKFKIIVTAYKDLPHAVQETFKRVLIKEEEYDSIIVFYNSVFMQRLKTNILQYASTRPPTLSPIPHIPRSPYKFPSSPLRIPGGNIYISPLKSPYKISEGLPTPTKMTPRSRILVSIGESFGTSEKFQKINQMVCNSDRVLKRSAEGSNPPKPLKKLRFDIEGSDEADGSKHLPGESKFQQKLAEMTSTRTRMQKQKMNDSMDTSNKEEK

SEQ ID NO: 2605 - protein, 1392 aa, Homo sapiens
MVEPGQDLLLAALSESGISPNDLFDIDGGDAGLATPMPTPSVQQSVPLSALELGLETEAAVPVKQEPETVPTPALLNVRQPPSTTTFVLNQINHLPPLGSTIVMTKTPPVTTNRQTITLTKFIQTTASTRPSVSAPTVRNAMTSAPSKDQVQLKDLLKNNSLNELMKLKPPANIAQPVATAATDVSNGTVKKESSNKEGARMWINDMKMRSFSPTMKVPVVKEDDEPEEEDEEEMGHAETYAEYMPIKLKIGLRHPDAVVETSSLSSVTPPDVWYKTSISEETIDNGWLSALQLEAITYAAQQHETFLPNGDRAGFLIGDGAGVGKGRTIAGIIYENYLLSRKRALWFSVSNDLKYDAERDLRDIGAKNILVHSLNKFKYGKISSKHNGSVKKGVIFATYSSLIGESQSGGKYKTRLKQLLHWCGDDFDGVIVFDECHKAKNLCPVGSSKPTKTGLAVLELQNKLPKARVVYASATGASEPRNMAYMNRLGIWGEGTPFREFSDFIQAVERRGVGAMEIVAMDMKLRGMYIARQLSFTGVTFKIEEVLLSQSYVKMYNKAVKLWVIARERFQQAADLIDAEQRMKKSMWGQFWSAHQRFFKYLCIASKVKRVVQLAREEIKNGKCVVIGLQSTGEARTLEALEEGGGELNDFVSTAKGVLQSLIEKHFPAPDRKKLYSLLGIDLTAPSNNSSPRDSPCKENKIKKRKGEEITREAKKARKVGGLTGSSSDDSGSESDASDNEESDYESSKNMSSGDDDDFNPFLDESNEDDENDPWLIRKDHKKNKEKKKKKSIDPDSIQSALLASGLGSKRPSFSSTPVISPAPNSTPANSNTNSNSSLITSQDAVERAQQMKKDLLDKLEKLAEDLPPNTLDELIDELGGPENVAEMTGRKGRVVSNDDGSISYESRSELDVPVEILNITEKQRFMDGDKNIAIISEAASSGISLQADRRAKNQRRRVHMTLELPWSADRAIQQFGRTHRSNQVTAPEYVFLISELAGEQRFASIVAKRLESLGALTHGDRRATESRDLSRFNFDNKYGRNALEIVMKSIVNLDSPMVSPPPDYPGEFFKDVRQGLIGVGLINVEDRSGILTLDKDYNNIGKFLNRILGMEVHQQNALFQYFADTLTAVVQNAKKNGRYDMGILDLGSGDEKVRKSDVKKFLTPGYSTSGHVELYTISVERGMSWEEATKIWAELTGPDDGFYLSLQIRNNKKTAILVKEVNPKKKLFLVYRPNTGKQLKLEIYADLKKKYKKVVSDDALMHWLDQYNSSADTCTHAYWRGNCKKASLGLVCEIGLRCRTYYVLCGSVLSVWTKVEGVLASVSGTNVKMQIVRLRTEDGQRIVGLIIPANCVSPLVNLLSTSDQSQQLAVQQKQLWQQHHPQSITNLSNA

SEQ ID NO: 2606 - protein, 596 aa, Homo sapiens
MAAHLSYGRVNLNVLREAVRRELREFLDKCAGSKAIVWDEYLTGPFGLIAQYSLLKEHEVEKMFTLKGNRLPAADVKNIIFFVRPRLELMDIIAENVLSEDRRGPTRDFHILFVPRRSLLCEQRLKDLGVLGSFIHREEYSLDLIPFDGDLLSMESEGAFKECYLEGDQTSLYHAAKGLMTLQALYGTIPQIFGKGECARQVANMMIRMKREFTGSQNSIFPVFDNLLLLDRNVDLLTPLATQLTYEGLIDEIYGIQNSYVKLPPEKFAPKKQGDGGKDLPTEAKKLQLNSAEELYAEIRDKNFNAVGSVLSKKAKIISAAFEERHNAKTVGEIKQFVSQLPHMQAARGSLANHTSIAELIKDVTTSEDFFDKLTVEQEFMSGIDTDKVNNYIEDCIAQKHSLIKVLRLVCLQSVCNSGLKQKVLDYYKREILQTYGYEHILTLHNLEKAGLLKPQTGGRNNYPTIRKTLRLWMDDVNEQNPTDISYVYSGYAPLSVRLAQLLSRPGWRSIEEVLRILPGPHFEERQPLPTGLQKKRQPGENRVTLIFFLGGVTFAEIAALRFLSQLEDGGTEYVIATTKLMNGTSWIEALMEKPF

SEQ ID NO: 2607 - protein, 285 aa, Homo sapiens
MAGAGSEARFAGLSLVQLNELLEDEGQLTEMVQKMEETQNVQLNKEMTLASNRSLAEGNLLYQPQLDTLKARLTQKYQELQVLFEAYQIKKTKLDRQSSSASLETLLALLQAEGAKIEEDTENMAEKFLDGELPLDSFIDVYQSKRKLAHMRRVKIEKLQEMVLKGQRLPQALAPLPPRLPELAPTAPLPYPAPEASGPPAVAPRRIPPPPPPVPAGRLATPFTAAMSSGQAVPYPGLQCPPLPPRVGLPTQQGFSSQFVSPYPPPLPQRPPPRLPPHQPGFILQ

SEQ ID NO: 2608 - protein, 1112 aa, Homo sapiens
MERHQPRLHHPAQGSAAGTPYPSSASLRGCRESKMPRRKGPQHPPPPSGPEEPGEKRPKFHLNIRTLTDDMLDKFASIRIPGSKKERPPLPNLKTAFASSDCSAAPLEMMENFPKPLSENELLELFEKMMEDMNLNEDKKAPLREKDFSIKKEMVMQYINTASKTGSLKRSRQISPQEFIHELKMGSADERLVTCLESLRVSLTSNPVSWVESFGHEGLGLLLDILEKLISGKIQEKVVKKNQHKVIQCLKALMNTQYGLERIMSEERSLSLLAKAVDPRHPNMMTDVVKLLSAVCIVGEESILEEVLEALTSAGEEKKIDRFFCIVEGLRHNSVQLQVACMQLINALVTSPDDLDFRLHIRNEFMRCGLKEILPNLKCIKNDGLDIQLKVFDEHKEEDLFELSHRLEDIRAELDEAYDVYNMVWSTVKETRAEGYFISILQHLLLIRNDYFIRQQYFKLIDECVSQIVLHRDGMDPDFTYRKRLDLDLTQFVDICIDQAKLEEFEEKASELYKKFEKEFTDHQETQAELQKKEAKINELQAELQAFKSQFGALPADCNIPLPPSKEGGTGHSALPPPPPLPSGGGVPPPPPPPPPPPLPGMRMPFSGPVPPPPPLGFLGGQNSPPLPILPFGLKPKKEFKPEISMRRLNWLKIRPHEMTENCFWIKVNENKYENVDLLCKLENTFCCQQKERREEEDIEEKKSIKKKIKELKFLDSKIAQNLSIFLSSFRVPYEEIRMMILEVDETRLAESMIQNLIKHLPDQEQLNSLSQFKSEYSNLCEPEQFVVVMSNVKRLRPRLSAILFKLQFEEQVNNIKPDIMAVSTACEEIKKSKSFSKLLELVLLMGNYMNAGSRNAQTFGFNLSSLCKLKDTKSADQKTTLLHFLVEICEEKYPDILNFVDDLEPLDKASKVSVETLEKNLRQMGRQLQQLEKELETFPPPEDLHDKFVTKMSRFVISAKEQYETLSKLHENMEKLYQSIIGYYAIDVKKVSVEDFLTDLNNFRTTFMQAIKENIKKREAEEKEKRVRIAKELAERERLERQQKKKRLLEMKTEGDETGVMDNLLEALQSGAAFRDRRKRTPMPKDVRQSLSPMSQRPVLKVCNHGNKPYL

SEQ ID NO: 2609 - protein, 605 aa, Homo sapiens
MDDLDALLADLESTTSHISKRPVFLSEETPYSYPTGNHTYQEIAVPPPVPPPPSSEALNGTILDPLDQWQPSSSRFIHQQPQSSSPVYGSSAKTSSVSNPQDSVGSPCSRVGEEEHVYSFPNKQKSAEPSPTVMSTSLGSNLSELDRLLLELNAVQHNPPGFPADEANSSPPLPGALSPLYGVPETNSPLGGKAGPLTKEKPKRNGGRGLEDVRPSVESLLDELESSVPSPVPAITVNQGEMSSPQRVTSTQQQTRISASSATRELDELMASLSDFKGSWPLEEVVLLVSISSSVQEGEKYPHPCAARHRTPSLRSPDQPPPCPQFMAQGKTGSSSPPGGPPKPGSQLDSMLGSLQSDLNKLGVATVAKGVCGACKKPIAGQVVTAMGKTWHPEHFVCTHCQEEIGSRNFFERDGQPYCEKDYHNLFSPRCYYCNGPILDKVVTALDRTWHPEHFFCAQCGAFFGPEGFHEKDGKAYCRKDYFDMFAPKCGGCARAILENYISALNTLWHPECFVCRECFTPFVNGSFFEHDGQPYCEVHYHERRGSLCSGCQKPITGRCITAMAKKFHPEHFVCAFCLKQLNKGTFKEQNDKPYCQNCFLKLFC

SEQ ID NO: 2610 - protein, 264 aa, Homo sapiens
MDVCLSSAQQPGRRGEGLSSPGGWLEAEKKGAPQKDSTGGVLEESNKIEPSLHSLQKFVPTDYASYTQEHYRFAGKEIVIQESIESYGAVVWPGAMALCQYLEEHAEELNFQDAKILEIGAGPGLVSIVASILGAQVTATDLPDVLGNLQYNLLKNTLQCTAHLPEVKELVWGEDLDKNFPKSAFYYDYVLASDVVYHHYFLDKLLTTMVYLSQPGTVLLWANKFRFSTDYEFLDKFKQVFDTTLLAEYPESSVKLFKGILKWD

SEQ ID NO: 2611 - protein, 367 aa, Homo sapiens
MALNVAPVRDTKWLTLEVCRQFQRGTCSRSDEECKFAHPPKSCQVENGRVIACFDSLKGRCSRENCKYLHPPTHLKTQLEINGRNNLIQQKTAAAMLAQQMQFMFPGTPLHPVPTFPVGPAIGTNTAISFAPYLAPVTPGVGLVPTEILPTTPVIVPGSPPVTVPGSTATQKLLRTDKLEVCREFQRGNCARGETDCRFAHPADSTMIDTSDNTVTVCMDYIKGRCMREKCKYFHPPAHLQAKIKAAQHQANQAAVAAQAAAAAATVMAFPPGALHPLPKRQALEKSNGTSAVFNPSVLHYQQALTSAQLQQHAAFIPTGSVLCMTPATSIVPMMHSATSATVSAATTPATSVPFAATATANQIILK

SEQ ID NO: 2612 - protein, 819 aa, Homo sapiens
MWGLVRLLLAWLGGWGCMGRLAAPARAWAGSREHPGPALLRTRRSWVWNQFFVIEEYAGPEPVLIGKLHSDVDRGEGRTKYLLTGEGAGTVFVIDEATGNIHVTKSLDREEKAQYVLLAQAVDRASNRPLEPPSEFIIKVQDINDNPPIFPLGPYHATVPEMSNVGTSVIQVTAHDADDPSYGNSAKLVYTVLDGLPFFSVDPQTGVVRTAIPNMDRETQEEFLVVIQAKDMGGHMGGLSGSTTVTVTLSDVNDNPPKFPQSLYQFSVVETAGPGTLVGRLRAQDPDLGDNALMAYSILDGEGSEAFSISTDLQGRDGLLTVRKPLDFESQRSYSFRVEATNTLIDPAYLRRGPFKDVASVRVAVQDAPEPPAFTQAAYHLTVPENKAPGTLVGQISAADLDSPASPIRYSILPHSDPERCFSIQPEEGTIHTAAPLDREARAWHNLTVLATELGWSWGPERGWVPLLVAEWSAPAAPPQRSPVGSAVGIPQDSSAQASRVQVAIQTLDENDNAPQLAEPYDTFVCDSAAPGQLIQVIRALDRDEVGNSSHVSFQGPLGPDANFTVQDNRDGSASLLLPSRPAPPRHAPYLVPIELWDWGQPALSSTATVTVSVCRCQPDGSVASCWPEAHLSAAGLSTGALLAIITCVGALLALVVLFVALRRQKQEALMVLEEEDVRENIITYDDEGGGEEDTEAFDITALQNPDGAAPPAPGPPARRDVLPRARVSRQPRPPGPADVAQLLALRLREADEDPGVPPYDSVQVYGYEGRGSSCGSLSSLGSGSEAGGAPGPAEPLDDWGPLFRTLAELYGAKEPPAP

SEQ ID NO: 2613 - protein, 205 aa, Homo sapiens
MLGAKPHWLPGPLHSPGLPLVLVLLALGAGWAQEGSEPVLLEGECLVVCEPGRAAAGGPGGAALGEAPPGRVAFAAVRSHHHEPAGETGNGTSGAIYFDQVLVNEGGGFDRASGSFVAPVRGVYSFRFHVVKVYNRQTVQVSLMLNTWPVISAFANDPDVTREAATSSVLLPLDPGDRVSLRLRRGNLLGGWKYSSFSGFLIFPL

SEQ ID NO: 2614 - protein, 451 aa, Homo sapiens
MATPLVAGPAALRFAAAASWQVVRGRCVEHFPRVLEFLRSLRAVAPGLVRYRHHERLCMGLKAKVVVELILQGRPWAQVLKALNHHFPESGPIVRDPKATKQDLRKILEAQETFYQQVKQLSEAPVDLASKLQELEQEYGEPFLAAMEKLLFEYLCQLEKALPTPQAQQLQDVLSWMQPGVSITSSLAWRQYGVDMGWLLPECSVTDSVNLAEPMEQNPPQQQRLALHNPLPKAKPGTHLPQGPSSRTHPEPLAGRHFNLAPLGRRRVQSQWASTRGGHKERPTVMLFPFRNLGSPTQVISKPESKEEHAIYTADLAMGTRAASTGKSKSPCQTLGGRALKENPVDLPATEQKENCLDCYMDPLRLSLLPPRARKPVCPPSLCSSVITIGDLVLDSDEEENGQGEGKESLENYQKTKFDTLIPTLCEYLPPSGHGAIPVSSCDCRDSSRPL

SEQ ID NO: 2615 - protein, 636 aa, Homo sapiens
MGQGPRSPHKVGRRFPAGGKRGRGAKGSGRPLPGRKRQPWPPPDGRSEPAPDSHPHLSPEALGYFRRALSALKEAPETGEERDLMVHNIMKEVETQALALSTNRTGSEMLQELLGFSPLKPLCRVWAALRSNLRTVACHRCGVHVLQSALLQLPRLLGSAAEEEEEEEEDGKDGPTETLEELVLGLAAEVCDDFLVYCGDTHGSFVVRTLLQVLGGTILESERARPRGSQSSEAQKTPAQECKPADFEVPETFLNRLQDLSSSFLKDIAVFITDKISSFCLQVALQVLHRKLPQFCAHLCNAVIGYLSTRGSSVDGSPLLLFLRDQTSSRLLEQVLLVLEPPRLQSLFEEHLQGQLQTLAAHPIANFPLQRLLDAVTTPELLSPVFEELSPVLEAVLAQGHPGVVIALVGACRRVGAYQAKVLQLLLEAFHCAEPSSRQVACVPLFATLMAYEVYYGLTEEEGAVPAEHQVAMAAARALGDVTVLGSLLLQHLLHFSTPGLVLRSLGALTGPQLLSLAQSPAGSHVLDAILTSPSVTRKLRRRVLQNLKGQYVALACSRHGSRVLDAIWSGAALRARKEIAAELGEQNQELIRDPFGHHVARNVALTTFLKRREAWEQQQGAVAKRRRALNSILED

SEQ ID NO: 2616 - protein, 774 aa, Homo sapiens
MRGPIVLHICLAFCSLLLFSVATQCLAFPKIERRREIAHVHAEKGQSDKMNTDDLENSSVTSKQTPQLVVSEDPMMMSAVPSATSLNKAFSINKETQPGQAGLMQTERPGVSTPTESGVPSAEEVFGSSQPERISPESGLAKAMLTIAITATPSLTVDEKEELLTSTNFQPIVEEITETTKGFLKYMDNQSFATESQEGVGLGHSPSSYVNTKEMLTTNPKTEKFEADTDHRTTSFPGAESTAGSEPGSLTPDKEKPSQMTADNTQAAATKQPLETSEYTLSVEPETDSLLGAPEVTVSVSTAVPAASALSDEWDDTKLESVSRIRTPKLGDNEETQVRTEMSQTAQVSHEGMEGGQPWTEAAQVALGLPEGETHTGTALLIAHGNERSPAFTDQSSFTPTSLMEDMKVSIVNLLQSTGDFTESTKENDALFFLETTVSVSVYESEADQLLGNTMKDIITQEMTTAVQEPDATLSMVTQEQVATLELIRDSGKTEEEKEDPSPVSDVPGVTQLSRRWEPLATTISTTVVPLSFEVTPTVEEQMDTVTGPNEEFTPVLGSPVTPPGIMVGEPSISPALPALEASSERRTVVPSITRVNTAASYGLDQLESEEGQEDEDEEDEEDEDEEEEDEEEDEEDKDADSLDEGLDGDTELPGFTLPGITSQEPGLEEGNMDLLEGATYQVPDALEWEQQNQGLVRSWMEKLKDKAGYMSGMLVPVGVGIAGALFILGALYSIKVMNRRRRNGFKRHKRKQREFNSMQDRVMLLADSSEDEF

SEQ ID NO: 2617 - protein, 456 aa, Homo sapiens
MEASWGSFNAERGWYVSVQQPEEAEAEELSPLLSNELHRQRSPGVSFGLSVFNLMNAIMGSGILGLAYVLANTGVFGFSFLLLTVALLASYSVHLLLSMCIQTAVTSYEDLGLFAFGLPGKLVVAGTIIIQNIGAMSSYLLIIKTELPAAIAEFLTGDYSRYWYLDGQTLLIIICVGIVFPLALLPKIGFLGYTSSLSFFFMMFFALVVIIKKWSIPCPLTLNYVEKGFQISNVTDDCKPKLFHFSKESAYALPTMAFSFLCHTSILPIYCELQSPSKKRMQNVTNTAIALSFLIYFISALFGYLTFYDKVESELLKGYSKYLSHDVVVMTVKLCILFAVLLTVPLIHFPARKAVTMMFFSNFPFSWIRHFLITLALNIIIVLLAIYVPDIRNVFGVVGASTSTCLIFIFPGLFYLKLSREDFLSWKKLGAFVLLIFGILVGNFSLALIIFDWINK

SEQ ID NO: 2618 - protein, 316 aa, Homo sapiens
MLVTLGLLTSFFSFLYMVAPSIRKFFAGGVCRTNVQLPGKVVVITGANTGIGKETARELASRGARVYIACRDVLKGESAASEIRVDTKNSQVLVRKLDLSDTKSIRAFAEGFLAEEKQLHILINNAGVMMCPYSKTADGFETHLGVNHLGHFLLTYLLLERLKVSAPARVVNVSSVAHHIGKIPFHDLQSEKRYSRGFAYCHSKLANVLFTRELAKRLQGTGVTTYAVHPGVVRSELVRHSSLLCLLWRLFSPFVKTAREGAQTSLHCALAEGLEPLSGKYFSDCKRTWVSPRARNNKTAERLWNVSCELLGIRWE

SEQ ID NO: 2619 - protein, 387 aa, Homo sapiens
MEKIEEQFANLHIVKCSLGTKEPTYLLGIDTSKTVQAGKENLVAVLCSNGSIRIYDKERLNVLREFSGYPGLLNGVRFANSCDSVYSACTDGTVKCWDARVAREKPVQLFKGYPSNIFISFDINCNDHIICAGTEKVDDDALLVFWDARMNSQNLSTTKDSLGAYSETHSDDVTQVRFHPSNPNMVVSGSSDGLVNVFDINIDNEEDALVTTCNSISSVSCIGWSGKGYKQIYCMTHDEGFYWWDLNHLDTDEPVTRLNIQDVREVVNMKEDALDYLIGGLYHEKTDTLHVIGGTNKGRIHLMNCSMSGLTHVTSLQGGHAATVRSFCWNVQDDSLLTGGEDAQLLLWKPGAIEKTFTKKESMKIASSVHQRVRVHSNDSYKRRKKQ

SEQ ID NO: 2620 - protein, 351 aa, Homo sapiens
MIVQRVVLNSRPGKNGNPVAENFRMEEVYLPDNINEGQVQVRTLYLSVDPYMRCRMNEDTGTDYITPWQLSQVVDGGGIGIIEESKHTNLTKGDFVTSFYWPWQTKVILDGNSLEKVDPQLVDGHLSYFLGAIGMPGLTSLIGIQEKGHITAGSNKTMVVSGAAGACGSVAGQIGHFLGCSRVVGICGTHEKCILLTSELGFDAAINYKKDNVAEQLRESCPAGVDVYFDNVGGNISDTVISQMNENSHIILCGQISQYNKDVPYPPPLSPAIEAIQKERNITRERFLVLNYKDKFEPGILQLSQWFKEGKLKIKETVINGLENMGAAFQSMMTGGNIGKQIVCISEEISL

SEQ ID NO: 2621 - protein, 414 aa, Homo sapiens
MQTFLKGKRVGYWLSEKKIKKLNFQAFAELCRKRGMEVVQLNLSRPIEEQGPLDVIIHKLTDVILEADQNDSQSLELVHRFQEYIDAHPETIVLDPLPAIRTLLDRSKSYELIRKIEAYMEDDRICSPPFMELTSLCGDDTMRLLEKNGLTFPFICKTRVAHGTNSHEMAIVFNQEGLNAIQPPCVVQNFINHNAVLYKVFVVGESYTVVQRPSLKNFSAGTSDRESIFFNSHNVSKPESSSVLTELDKIEGVFERPSDEVIRELSRALRQALGVSLFGIDIIINNQTGQHAVIDINAFPGYEGVSEFFTDLLNHIATVLQGQSTAMAATGDVALLRHSKLLAEPAGGLVGERTCSASPGCCGSMMGQDAPWKAEADAGGTAKLPHQRLGCNAGVSPSFQQHCVASLATKASSQ

SEQ ID NO: 2622 - protein, 489 aa, Homo sapiens
MPGIKRILTVTILALCLPSPGNAQAQCTNGFDLDRQSGQCLDGVSLSSPRLECNGAISAHCNLCLPGSSDSSASASQVAGITDIDECRTIPEACRGDMMCVNQNGGYLCIPRTNPVYRGPYSNPYSTPYSGPYPAAAPPLSAPNYPTISRPLICRFGYQMDESNQCVDVDECATDSHQCNPTQICINTEGGYTCSCTDGYWLLEGQCLDIDECRYGYCQQLCANVPGSYSCTCNPGFTLNEDGRSCQDVNECATENPCVQTCVNTYGSFICRCDPGYELEEDGVHCSDMDECSFSEFLCQHECVNQPGTYFCSCPPGYILLDDNRSCQDINECEHRNHTCNLQQTCYNLQGGFKCIDPIRCEEPYLRISDNRCMCPAENPGCRDQPFTILYRDMDVVSGRSVPADIFQMQATTRYPGAYYIFQIKSGNEGREFYMRQTGPISATLVMTRPIKGPREIQLDLEMITVNTVINFRGSSVIRLRIYVSQYPF

SEQ ID NO: 2623 - protein, 1979 aa, Homo sapiens
MSSWLGGLGSGLGQSLGQVGGSLASLTGQISNFTKDMLMEGTEEVEAELPDSRTKEIEAIHAILRSENERLKKLCTDLEEKHEASEIQIKQQSTSYRNQLQQKEVEISHLKARQIALQDQLLKLQSAAQSVPSGAGVPATTASSSFAYGISHHPSAFHDDDMDFGDIISSQQEINRLSNEVSRLESEVGHWRHIAQTSKAQGTDNSDQSEICKLQNIIKELKQNRSQEIDDHQHEMSVLQNAHQQKLTEISRRHREELSDYEERIEELENLLQQGGSGVIETDLSKIYEMQKTIQVLQIEKVESTKKMEQLEDKIKDINKKLSSAENDRDILRREQEQLNVEKRQIMEECENLKLECSKLQPSAVKQSDTMTEKERILAQSASVEEVFRLQQALSDAENEIMRLSSLNQDNSLAEDNLKLKMRIEVLEKEKSLLSQEKEELQMSLLKLNNEYEVIKSTATRDISLDSELHDLRLNLEAKEQELNQSISEKETLIAEIEELDRQNQEATKHMILIKDQLSKQQNEGDSIISKLKQDLNDEKKRVHQLEDDKMDITKELDVQKEKLIQSEVALNDLHLTKQKLEDKVENLVDQLNKSQESNVSIQKENLELKEHIRQNEEELSRIRNELMQSLNQDSNSNFKDTLLKEREAEVRNLKQNLSELEQLNENLKKVAFDVKMENEKLVLACEDVRHQLEECLAGNNQLSLEKNTIVETLKMEKGEIEAELCWAKKRLLEEANKYEKTIEELSNARNLNTSALQLEHEHLIKLNQKKDMEIAELKKNIEQMDTDHKETKDVLSSSLEEQKQLTQLINKKEIFIEKLKERSSKLQEELDKYSQALRKNEILRQTIEEKDRSLGSMKEENNHLQEELERLREEQSRTAPVADPKTLDSVTELASEVSQLNTIKEHLEEEIKHHQKIIEDQNQSKMQLLQSLQEQKKEMDEFRYQHEQMNATHTQLFLEKDEEIKSLQKTIEQIKTQLHEERQDIQTDNSDIFQETKVQSLNIENGSEKHDLSKAETERLVKGIKERELEIKLLNEKNISLTKQIDQLSKDEVGKLTQIIQQKDLEIQALHARISSTSHTQDVVYLQQQLQAYAMEREKVFAVLNEKTRENSHLKTEYHKMMDIVAAKEAALIKLQDENKKLSTRFESSGQDMFRETIQNLSRIIREKDIEIDALSQKCQTLLAVLQTSSTGNEAGGVNSNQFEELLQERDKLKQQVKKMEEWKQQVMTTVQNMQHESAQLQEELHQLQAQVLVDSDNNSKLQVDYTGLIQSYEQNETKLKNFGQELAQVQHSIGQLCNTKDLLLGKLDIISPQLSSASLLTPQSAECLRASKSEVLSESSELLQQELEELRKSLQEKDATIRTLQENNHRLSDSIAATSELERKEHEQTDSEIKQLKEKQDVLQKLLKEKDLLIKAKSDQLLSSNENFTNKVNENELLRQAVTNLKERILILEMDIGKLKGENEKIVETYRGKETEYQALQETNMKFSMMLREKEFECHSMKEKALAFEQLLKEKEQGKTGELNQLLNAVKSMQEKTVVFQQERDQVMLALKQKQMENTALQNEVQRLRDKEFRSNQELERLRNHLLESEDSYTREALAAEDREAKLRKKVTVLEEKLVSSSNAMENASHQASVQVESLQEQLNVVSKQRDETALQLSVSQEQVKQYALSLANLQMVLEHFQQEEKAMYSAELEKQKQLIAEWKKNAENLEGKVISLQECLDEANAALDSASRLTEQLDVKEEQIEELKRQNELRQEMLDDVQKKLMSLANSSEGKVDKVLMRNLFIGHFHTPKNQRHEVLRLMGSILGVRREEMEQLFHDDQGGVTRWMTGWLGGGSKSVPNTPLRPNQQSVVNSSFSELFVKFLETESHPSIPPPKLSVHDMKPLDSPGRRKRDTNAPESFKDTAESRSGRRTDVNPFLAPRSAAVPLINPAGLGPGGPGHLLLKPISDVLPTFTPLPALPDNSAGVVLKDLLKQ

SEQ ID NO: 2624 - protein, 183 aa, Homo sapiens
MTAQGGLVANRGRRFKWAIELSGPGGGSRGRSDRGSGQGDSLYPVGYLDKQVPDTSVQETDRILVEKRCWDIALGPLKQIPMNLFIMYMAGNTISIFPTMMVCMMAWRPIQALMAISATFKMLESSSQKFLQGLVYLIGNLMGLALAVYKCQSMGLLPTHASDWLAFIEPPERMEFSGGGLLL

SEQ ID NO: 2625 - protein, 979 aa, Homo sapiens
MGDNPFQPKSNSKMAELFMECEEEELEPWQKKVKEVEDDDDDEPIFVGEISSSKPAISNILNRVNPSSYSRGLKNGALSRGITAAFKPTSQHYTNPTSNPVPASPINFHPESRSSDSSVIVQPFSKPGYITNSSRVVSNKSSELLFDLTQDTGLSHYQGGPTLSMAGMSESSFLSKRPSTSEVNNVNPKKPKPSESVSGANSSAVLPSVKSPSVTSSQAMLAKGTNTSSNQSKNGTPFPRACPKCNIHFNLLDPLKNHMKYCCPDMINNFLGLAKTEFSSTVNKNTTIDSEKGKLIMLVNDFYYGKHEGDVQEEQKTHTTFKCFSCLKILKNNIRFMNHMKHHLELEKQSSESWENHTTCQHCYRQFPTPFQLQCHIESTHTPHEFSTICKICELSFETEHVLLQHMKDNHKPGEMPYVCQVCNYRSSSFSDVETHFRTSHENTKNLLCPFCLKVIKIATPYMHHYMKHQKKGIHRCTKCRLQFLTCKEKMDHKTQHHRTFIKPKQLEGLPPGTKVTIRASVGPLQSGASPTPSISASASTLQLSPPRTKNITAKNPAKSNTSKPNTVKSNASKPNTSKPNGSKSKYKPKISNMQKKQSTLASSNKKSKVNTALRNLRYRRGIHKCIECCSEIKDFANHFPTYVHCSFCRYNTSCSKAYVNHMMSFHSNRPSKRFCIFKKHSENLRGITLVCLNCDFLSDVSGLDNMATHLSQHKTHTCQVVMQKVSVCIPTSEHLSELKKEAPAKEQEPVSKEIARPNMAERETETSNSESKQDKAASSKEKNGCNANSFEGSSTTKSEESITVSDKENETCLADQETGSKNIVSCDSNIGADKVEKKKQIQHVCQEMELKMCQSSENIILSDQIKDHNSSEARFSSKNIKDLRLASDNVSIDQFLRKRHEPESVSSDVSEQGSIHLEPLTPSEVLEYEATEILQKGSGDPSAKTDEVVSDQTDDIPGGNNPSTTEATVDLEDEKERS

SEQ ID NO: 2626 - protein, 682 aa, Homo sapiens
MNPQQQRMAAIGTDKELSDLLDFSAMFSPPVNSGKTRPTTLGSSQFSGSGIDERGGTTSWGTSGQPSPSYDSSRGFTDSPHYSDHLNDSRLGAHEGLSPTPFMNSNLMGKTSERGSFSLYSRDTGLPGCQSSLLRQDLGLGSPAQLSSSGKPGTAYYSFSATSSRRRPLHDSAALDPLQAKKVRKVPPGLPSSVYAPSPNSDDFNRESPSYPSPKPPTSMFASTFFMQDGTHNSSDLWSSSNGMSQPGFGGILGTSTSHMSQSSSYGNLHSHDRLSYPPHSVSPTDINTSLPPMSSFHRGSTSSSPYVAASHTPPINGSDSILGTRGNAAGSSQTGDALGKALASIYSPDHTSSSFPSNPSTPVGSPSPLTGTSQWPRPGGQAPSSPSYENSLHSLQSRMEDRLDRLDDAIHVLRNHAVGPSTSLPAGHSDIHSLLGPSHNAPIGSLNSNYGGSSLVASSRSASMVGTHREDSVSLNGNHSVLSSTVTTSSTDLNHKTQENYRGGLQSQSGTVVTTEIKTENKEKDENLHEPPSSDDMKSDDESSQKDIKVSSRGRTSSTNEDEDLNPEQKIEREKERRMANNARERLRVRDINEAFKELGRMCQLHLKSEKPQTKLLILHQAVAVILSLEQQVRERNLNPKAACLKRREEEKVSAVSAEPPTTLPGTHPGLSETTNPMGHM

SEQ ID NO: 2627 - protein, 439 aa, Homo sapiens
MSVPSALMKQPPIQSTAGAVPVRNEKGEISMEKVKVKRYVSGKRPDYAPMESSDEEDEEFQFIKKAKEQEAEPEEQEEDSSSDPRLRRLQNRISEDVEERLARHRKIVEPEVVGESDSEVEGDAWRMEREDSSEEEEEEIDDEEIERRRGMMRQRAQERKNEEMEVMEVEDEGRSGEESESESEYEEYTDSEDEMEPRLKPVFIRKKDRVTVQEREAEALKQKELEQEAKRMAEERRKYTLKIVEEETKKELEENKRSLAALDALNTDDENDEEEYEAWKVRELKRIKRDREDREALEKEKAEIERMRNLTEEERRAELRANGKVITNKAVKGKYKFLQKYYHRGAFFMDEDEEVYKRDFSAPTLEDHFNKTILPKVMQVKNFGRSGRTKYTHLVDQDTTSFDSAWGQESAQNTKFFKQKAAGVRDVFERPSAKKRKTT

SEQ ID NO: 2628 - protein, 215 aa, Homo sapiens
MADSSPALSLREGGPRAPRPSAPSPPPRSRSGSESEEAELSLSLARTKTRSYGSTASVRAPLGAGVIERHVEHRVRAGDTLQGIALKYGVTMEQIKRANKLFTNDCIFLKKTLNIPVISEKPLLFNGLNSIDSPENETADNSFSQEEEPVVAGEDLPPPSPQESDVQPVQPEEVSARDFLQRLDLQIKLSTQAAKKLKEESRDEESPYATSLYHS

SEQ ID NO: 2629 - protein, 620 aa, Homo sapiens
MLSAIYTVLAGLLFLPLLVNLCCPYFFQDIGYFLKVAAVGRRVRSYGKRRPARTILRAFLEKARQTPHKPFLLFRDETLTYAQVDRRSNQVARALHDHLGLRQGDCVALLMGNEPAYVWLWLGLVKLGCAMACLNYNIRAKSLLHCFQCCGAKVLLVSPELQAAVEEILPSLKKDDVSIYYVSRTSNTDGIDSFLDKVDEVSTEPIPESWRSEVTFSTPALYIYTSGTTGLPKAAMITHQRIWYGTGLTFVSGLKADDVIYITLPFYHSAALLIGIHGCIVAGATLALRTKFSASQFWDDCRKYNVTVIQYIGELLRYLCNSPQKPNDRDHKVRLALGNGLRGDVWRQFVKRFGDICIYEFYAATEGNIGFMNYARKVGAVGRVNYLQKKIITYDLIKYDVEKDEPVRDENGYCVRVPKGEVGLLVCKITQLTPFNGYAGAKAQTEKKKLRDVFKKGDLYFNSGDLLMVDHENFIYFHDRVGDTFRWKGENVATTEVADTVGLVDFVQEVNVYGVHVPDHEGRIGMASIKMKENHEFDGKKLFQHIADYLPSYARPRFLRIQDTIEITGTFKHRKMTLVEEGFNPAVIKDALYFLDDTAKMYVPMTEDIYNAISAKTLKL

SEQ ID NO: 2630 - protein, 194 aa, Homo sapiens
MHKWILTWILPTLLYRSCFHIICLVGTISLACNDMTPEQMATNVNCSSPERHTRSYDYMEGGDIRVRRLFCRTQWYLRIDKRGKVKGTQEMKNNYNIMEIRTVAVGIVAIKGVESEFYLAMNKEGKLYAKKECNEDCNFKELILENHYNTYASAKWTHNGGEMFVALNQKGIPVRGKKTKKEQKTAHFLPMAIT

SEQ ID NO: 2631 - protein, 314 aa, Homo sapiens
MEGVELKEEWQDEDFPIPLPEDDSIEADILAITGPEDQPGSLEVNGNKVRKKLMAPDISLTLDPSDGSVLSDDLDESGEIDLDGLDTPSENSNEFEWEDDLPKPKTTEVIRKGSITEYTAAEEKEDGRRWRMFRIGEQDHRVDMKAIEPYKKVISHGGYYGDGLNAIVVFAVCFMPESSQPNYRYLMDNLFKYVIGTLELLVAENYMIVYLNGATTRRKMPSLGWLRKCYQQIDRRLRKNLKSLIIVHPSWFIRTLLAVTRPFISSKFSQKIRYVFNLAELAELVPMEYVGIPECIKQVDQELNGKQDEPKNEQ

SEQ ID NO: 2632 - protein, 339 aa, Homo sapiens
MAMQMQLEANADTSVEEESFGPQPISRLEQCGINANDVKKLEEAGFHTVEAVAYAPKKELINIKGISEAKADKILAEAAKLVPMGFTTATEFHQRRSEIIQITTGSKELDKLLQGGIETGSITEMFGEFRTGKTQICHTLAVTCQLPIDRGGGEGKAMYIDTEGTFRPERLLAVAERYGLSGSDVLDNVAYARAFNTDHQTQLLYQASAMMVESRYALLIVDSATALYRTDYSGRGELSARQMHLARFLRMLLRLADEFGVAVVITNQVVAQVDGAAMFAADPKKPIGGNIIAHASTTRLYLRKGRGETRICKIYDSPCLPEAEAMFAINADGVGDAKD

SEQ ID NO: 2633 - protein, 136 aa, Homo sapiens
MVLLESEQFLTELTRLFQKCRTSGSVYITLKKYDGRTKPIPKKGTVEGFEPADNKCLLRATDGKKKISTVVSSKEVNKFQMAYSNLLRANMDGLKKRDKKNKTKKTKAAAAAAAAAPAAAATAPTTAATTAATAAQ

SEQ ID NO: 2634 - protein, 199 aa, Homo sapiens
MRFRFCGDLDCPDWVLAEISTLAKMSSVKLRLLCSQVLKELLGQGIDYEKILKLTADAKFESGDVKATVAVLSFILSSAAKHSVDGESLSSELQQLGLPKEHAASLCRCYEEKQSPLQKHLRVCSLRMNRLAGVGWRVDYTLSSSLLQSVEEPMVHLRLEVAAAPGTPAQPVAMSLSADKFQVLLAELKQAQTLMSSLG

SEQ ID NO: 2635 - protein, 375 aa, Homo sapiens
MSVSGLKAELKFLASIFDKNHERFRIVSWKLDELHCQFLVPQQGSPHSLPPPLTLHCNITESYPSSSPIWFVDSEDPNLTSVLERLEDTKNNNLLRQQLKWLICELCSLYNLPKHLDVEMLDQPLPTGQNGTTEEVTSEEEEEEEEMAEDIEDLDHYEMKEEEPISGKKSEDEGIEKENLAILEKIRKTQRQDHLNGAVSGSVQASDRLMKELRDIYRSQSYKTGIYSVELINDSLYDWHVKLQKVDPDSPLHSDLQILKEKEGIEYILLNFSFKDNFPFDPPFVRVVLPVLSGGYVLGGGALCMELLTKQGWSSAYSIESVIMQINATLVKGKARVQFGANKNQYNLARAQQSYNSIVQIHEKNGWYTPPKEDG

SEQ ID NO: 2636 - protein, 489 aa, Homo sapiens
MGSGPLSLPLALSPPRLLLLLLLSLLPVARASEAEHRLFERLFEDYNEIIRPVANVSDPVIIHFEVSMSQLVKVDEVNQIMETNLWLKQIWNDYKLKWNPSDYGGAEFMRVPAQKIWKPDIVLYNNAVGDFQVDDKTKALLKYTGEVTWIPPAIFKSSCKIDVTYFPFDYQNCTMKFGSWSYDKAKIDLVLIGSSMNLKDYWESGEWAIIKAPGYKHDIKYNCCEEIYPDITYSLYIRRLPLFYTINLIIPCLLISFLTVLVFYLPSDCGEKVTLCISVLLSLTVFLLVITETIPSTSLVIPLIGEYLLFTMIFVTLSIVITVFVLNVHYRTPTTHTMPSWVKTVFLNLLPRVMFMTRPTSNEGNAQKPRPLYGAELSNLNCFSRAESKGCKEGYPCQDGMCGYCHHRRIKISNFSANLTRSSSSESVDAVLSLSALSPEIKEAIQSVKYIAENMKAQNEAKEEQKAQEIQQLKRKEKSTETSDQEPGL

SEQ ID NO: 2637 - protein, 253 aa, Homo sapiens
MGQCGITSSKTVLVFLNLIFWGAAGILCYVGAYVFITYDDYDHFFEDVYTLIPAVVIIAVGALLFIIGLIGCCATIRESRCGLATFVIILLLVFVTEVVVVVLGYVYRAKVENEVDRSIQKVYKTYNGTNPDAASRAIDYVQRQLHCCGIHNYSDWENTDWFKETKNQSVPLSCCRETASNCNGSLAHPSDLYAEGCEALVVKKLQEIMMHVIWAALAFAAIQLLGMLCACIVLCRRSRDPAYELLITGGTYA

SEQ ID NO: 2638 - protein, 305 aa, Homo sapiens
MTNQYGILFKQEQAHDDAIWSVAWGTNKKENSETVVTGSLDDLVKVWKWRDERLDLQWSLEGHQLGVVSVDISHTLPIAASSSLDAHIRLWDLENGKQIKSIDAGPVDAWTLAFSPDSQYLATGTHVGKVNIFGVESGKKEYSLDTRGKFILSIAYSPDGKYLASGAIDGIINIFDIATGKLLHTLEGHAMPIRSLTFSPDSQLLVTASDDGYIKIYDVQHANLAGTLSGHASWVLNVAFCPDDTHFVSSSSDKSVKVWDVGTRTCVHTFFDHQDQVWGVKYNGNGSKIVSVGDDQEIHIYDCPI

SEQ ID NO: 2639 - protein, 1040 aa, Homo sapiens
MAAAPALKHWRTTLERVEKFVSPLYFTDCNLRGRLFGASCPVAVLSSFLTPERLPYQEAVQRDFRPAQVGDSFGPTWWTCWFRVELTIPEAWVGQEVHLCWESDGEGLVWRDGEPVQGLTKEGEKTSYVLTDRLGERDPRSLTLYVEVACNGLLGAGKGSMIAAPDPEKMFQLSRAELAVFHRDVHMLLVDLELLLGIAKGLGKDNQRSFQALYTANQMVNVCDPAQPETFPVAQALASRFFGQHGGESQHTIHATGHCHIDTAWLWPFKETVRKCARSWVTALQLMERNPEFIFACSQAQQLEWVKSRYPGLYSRIQEFACRGQFVPVGGTWVEMDGNLPSGEAMVRQFLQGQNFFLQEFGKMCSEFWLPDTFGYSAQLPQIMHGCGIRRFLTQKLSWNLVNSFPHHTFFWEGLDGSRVLVHFPPGDSYGMQGSVEEVLKTVANNRDKGRANHSAFLFGFGDGGGGPTQTMLDRLKRLSNTDGLPRVQLSSPRQLFSALESDSEQLCTWVGELFLELHNGTYTTHAQIKKGNRECERILHDVELLSSLALARSAQFLYPAAQLQHLWRLLLLNQFHDVVTGSCIQMVAEEAMCHYEDIRSHGNTLLSAAAAALCAGEPGPEGLLIVNTLPWKRIEVMALPKPGGAHSLALVTVPSMGYAPVPPPTSLQPLLPQQPVFVVQETDGSVTLDNGIIRVKLDPTGRLTSLVLVASGREAIAEGAVGNQFVLFDDVPLYWDAWDVMDYHLETRKPVLGQAGTLAVGTEGGLRGSAWFLLQISPNSRLSQEVVLDVGCPYVRFHTEVHWHEAHKFLKVEFPARVRSSQATYEIQFGHLQRPTHYNTSWDWARFEVWAHRWMDLSEHGFGLALLNDCKYGASVRGSILSLSLLRAPKAPDATADTGRHEFTYALMPHKGSFQDAGVIQAAYSLNFPLLALPAPSPAPATSWSAFSVSSPAVVLETVKQAESSPQRRSLVLRLYEAHGSHVDCWLHLSLPVQEAILCDLLERPDPAGHLTLRDNRLKLTFSPFQVLSLLLVLQPPPH

SEQ ID NO: 2640 - protein, 284 aa, Homo sapiens
MDAIKKKMQMLKLDKENALDRAEQAEADKKAAEDRSKQLEEDIAAKEKLLRVSEDERDRVLEELHKAEDSLLAAEEAAAKAEADVASLNRRIQLVEEELDRAQERLATALQKLEEAEKAADESERGMKVIESRAQKDEEKMEIQEIQLKEAKHIAEDADRKYEEVARKLVIIESDLERAEERAELSEGKCAELEEELKTVTNNLKSLEAQAEKYSQKEDRYEEEIKVLSDKLKEAETRAEFAERSVTKLEKSIDDLEEKVAHAKEENLSMHQMLDQTLLELNNM

SEQ ID NO: 2641 - protein, 418 aa, Homo sapiens
MGGEAGCAAAVGAEGRVKSLGLVFEDERKGCYSSGETVAGHVLLEASEPVALRALRLEAQGRATAAWGPSTCPRASASTAALAVFSEVEYLNVRLSLREPPAGEGIILLQPGKHEFPFRFQLPSEPLVTSFTGKYGSIQYCVRAVLERPKVPDQSVKRELQVVSHVDVNTPALLTPVLKTQEKMVGCWFFTSGPVSLSAKIERKGYCNGEAIPIYAEIENCSSRLIVPKAAIFQTQTYLASGKTKTIRHMVANVRGNHIASGSTDTWNGKTLKIPPVTPSILDCCIIRVDYSLAVYIHIPGAKKLMLELPLVIGTIPYNGFGSRNSSIASQFSMDMSWLTLTLPEQPEAPPNYADVVSEEEFSRHIPPYPQPPNCEGEVCCPVFACIQEFRFQPPPLYSEVDPHPSDVEESQPVSFIL

SEQ ID NO: 2642 - protein, 882 aa, Homo sapiens
MEPAPARSPRPQQDPARPQEPTMPPPETPSEGRQPSPSPSPTERAPASEEEFQFLRCQQCQAEAKCPKLLPCLHTLCSGCLEASGMQCPICQAPWPLGADTPALDNVFFESLQRRLSVYRQIVDAQAVCTRCKESADFWCFECEQLLCAKCFEAHQWFLKHEARPLAELRNQSVREFLDGTRKTNNIFCSNPNHRTPTLTSIYCRGCSKPLCCSCALLDSSHSELKCDISAEIQQRQEELDAMTQALQEQDSAFGAVHAQMHAAVGQLGRARAETEELIRERVRQVVAHVRAQERELLEAVDARYQRDYEEMASRLGRLDAVLQRIRTGSALVQRMKCYASDQEVLDMHGFLRQALCRLRQEEPQSLQAAVRTDGFDEFKVRLQDLSSCITQGKDAAVSKKASPEAASTPRDPIDVDLPEEAERVKAQVQALGLAEAQPMAVVQSVPGAHPVPVYAFSIKGPSYGEDVSNTTTAQKRKCSQTQCPRKVIKMESEEGKEARLARSSPEQPRPSTSKAVSPPHLDGPPSPRSPVIGSEVFLPNSNHVASGAGEAEERVVVISSSEDSDAENSSSRELDDSSSESSDLQLEGPSTLRVLDENLADPQAEDRPLVFFDLKIDNETQKISQLAAVNRESKFRVVIQPEAFFSIYSKAVSLEVGLQHFLSFLSSMRRPILACYKLWGPGLPNFFRALEDINRLWEFQEAISGFLAALPLIRERVPGASSFKLKNLAQTYLARNMSERSAMAAVLAMRDLCRLLEVSPGPQLAQHVYPFSSLQCFASLQPLVQAAVLPRAEARLLALHNVSFMELLSAHRRDRQGGLKKYSRYLSLQTTTLPPAQPAFNLQALGTYFEGLLEGPALARAEGVSTPLAGRGLAERASQQS

SEQ ID NO: 2643 - protein, 829 aa, Homo sapiens
MEPAPARSPRPQQDPARPQEPTMPPPETPSEGRQPSPSPSPTERAPASEEEFQFLRCQQCQAEAKCPKLLPCLHTLCSGCLEASGMQCPICQAPWPLGADTPALDNVFFESLQRRLSVYRQIVDAQAVCTRCKESADFWCFECEQLLCAKCFEAHQWFLKHEARPLAELRNQSVREFLDGTRKTNNIFCSNPNHRTPTLTSIYCRGCSKPLCCSCALLDSSHSELKCDISAEIQQRQEELDAMTQALQEQDSAFGAVHAQMHAAVGQLGRARAETEELIRERVRQVVAHVRAQERELLEAVDARYQRDYEEMASRLGRLDAVLQRIRTGSALVQRMKCYASDQEVLDMHGFLRQALCRLRQEEPQSLQAAVRTDGFDEFKVRLQDLSSCITQGKDAAVSKKASPEAASTPRDPIDVDLPEEAERVKAQVQALGLAEAQPMAVVQSVPGAHPVPVYAFSIKGPSYGEDVSNTTTAQKRKCSQTQCPRKVIKMESEEGKEARLARSSPEQPRPSTSKAVSPPHLDGPPSPRSPVIGSEVFLPNSNHVASGAGEAEERVVVISSSEDSDAENSCMEPMETAEPQSSPAHSSPAHSSPAHSSPVQSLLRAQGASSLPCGTYHPPAWPPHQPAEQAATPDAEPHSEPPDHQERPAVHRGIRYLLYRAQRAIRLRHALRLHPQLHRAPIRTWSPHVVQASTPAITGPLNHPANAQEHPAQLQRGISPPHRIRGAVRSRSRSLRGSSHLSQWLNNFFALPFSSMASQLDMSSVVGAGESRAQTLGAGVPPGDSVRGSMEASQVQVPLEASPITFPPPCAPERPPISPVPGARQAGL

SEQ ID NO: 2644 - protein, 1095 aa, Homo sapiens
MCDGALLPPLVLPVLLLLVWGLDPGTAVGDAAADVEVVLPWRVRPDDVHLPPLPAAPGPRRRRRPRTPPAAPRARPGERALLLHLPAFGRDLYLQLRRDLRFLSRGFEVEEAGAARRRGRPAELCFYSGRVLGHPGSLVSLSACGAAGGLVGLIQLGQEQVLIQPLNNSQGPFSGREHLIRRKWSLTPSPSAEAQRPEQLCKVLTEKKKPTWGRPSRDWRERRNAIRLTSEHTVETLVVADADMVQYHGAEAAQRFILTVMNMVYNMFQHQSLGIKINIQVTKLVLLRQRPAKLSIGHHGERSLESFCHWQNEEYGGARYLGNNQVPGGKDDPPLVDAAVFVTRTDFCVHKDEPCDTVGIAYLGGVCSAKRKCVLAEDNGLNLAFTIAHELGHNLGMNHDDDHSSCAGRSHIMSGEWVKGRNPSDLSWSSCSRDDLENFLKSKVSTCLLVTDPRSQHTVRLPHKLPGMHYSANEQCQILFGMNATFCRNMEHLMCAGLWCLVEGDTSCKTKLDPPLDGTECGADKWCRAGECVSKTPIPEHVDGDWSPWGAWSMCSRTCGTGARFRQRKCDNPPPGPGGTHCPGASVEHAVCENLPCPKGLPSFRDQQCQAHDRLSPKKKGLLTAVVVDDKPCELYCSPLGKESPLLVADRVLDGTPCGPYETDLCVHGKCQKIGCDGIIGSAAKEDRCGVCSGDGKTCHLVKGDFSHARGTALKDSGKGSINSDWKIELPGEFQIAGTTVRYVRRGLWEKISAKGPTKLPLHLMVLLFHDQDYGIHYEYTVPVNRTAENQSEPEKPQDSLFIWTHSGWEGCSVQCGGGERRTIVSCTRIVNKTTTLVNDSDCPQASRPEPQVRRCNLHPCQSRWVAGPWSPCSATCEKGFQHREVTCVYQLQNGTHVATRPLYCPGPRPAAVQSCEGQDCLSIWEASEWSQCSASCGKGVWKRTVACTNSQGKCDASTRPRAEEACEDYSGCYEWKTGDWSTCSSTCGKGLQSRVVQCMHKVTGRHGSECPALSKPAPYRQCYQEVCNDRINANTITSPRLAALTYKCTRDQWTVYCRVIREKNLCQDMRWYQRCCQTCRDFYANKMRQPPPNS

SEQ ID NO: 2645 - protein, 529 aa, Homo sapiens
MTSSRLWFSLLLAAAFAGRATALWPWPQNFQTSDQRYVLYPNNFQFQYDVSSAAQPGCSVLDEAFQRYRDLLFGSGSWPRPYLTGKRHTLEKNVLVVSVVTPGCNQLPTLESVENYTLTINDDQCLLLSETVWGALRGLETFSQLVWKSAEGTFFINKTEIEDFPRFPHRGLLLDTSRHYLPLSSILDTLDVMAYNKLNVFHWHLVDDPSFPYESFTFPELMRKGSYNPVTHIYTAQDVKEVIEYARLRGIRVLAEFDTPGHTLSWGPGIPGLLTPCYSGSEPSGTFGPVNPSLNNTYEFMSTFFLEVSSVFPDFYLHLGGDEVDFTCWKSNPEIQDFMRKKGFGEDFKQLESFYIQTLLDIVSSYGKGYVVWQEVFDNKVKIQPDTIIQVWREDIPVNYMKELELVTKAGFRALLSAPWYLNRISYGPDWKDFYIVEPLAFEGTPEQKALVIGGEACMWGEYVDNTNLVPRLWPRAGAVAERLWSNKLTSDLTFAYERLSHFRCELLRRGVQAQPLNVGFCEQEFEQT

SEQ ID NO: 2646 - protein, 329 aa, Homo sapiens
MSAFDTNPFADPVDVNPFQDPSVTQLTNAPQGGLAEFNPFSETNAATTVPVTQLPGSSQPAVLQPSVEPTQPTPQAVVSAAQAGLLRQQEELDRKAAELERKERELQNTVANLHVRQNNWPPLPSWCPVKPCFYQDFSTEIPADYQRICKMLYYLWMLHSVTLFLNLLACLAWFSGNSSKGVDFGLSILWFLIFTPCAFLCWYRPIYKAFRSDNSFSFFVFFFVFFCQIGIYIIQLVGIPGLGDSGWIAALSTLDNHSLAISVIMMVVAGFFTLCAVLSVFLLQRVHSLYRRTGASFQQAQEEFSQGIFSSRTFHRAASSAAQGAFQGN

SEQ ID NO: 2647 - protein, 425 aa, Homo sapiens
MNAMLETPELPAVFDGVKLAAVAAVLYVIVRCLNLKSPTAPPDLYFQDSGLSRFLLKSCPLLTKEYIPPLIWGKSGHIQTALYGKMGRVRSPHPYGHRKFITMSDGATSTFDLFEPLAEHCVGDDITMVICPGIANHSEKQYIRTFVDYAQKNGYRCAVLNHLGALPNIELTSPRMFTYGCTWEFGAMVNYIKKTYPLTQLVVVGFSLGGNIVCKYLGETQANQEKVLCCVSVCQGYSALRAQETFMQWDQCRRFYNFLMADNMKKIILSHRQALFGDHVKKPQSLEDTDLSRLYTATSLMQIDDNVMRKFHGYNSLKEYYEEESCMRYLHRIYVPLMLVNAADDPLVHESLLTIPKSLSEKRENVMFVLPLHGGHLGFFEGSVLFPEPLTWMDKLVVEYANAICQWERNKLQCSDTEQVEADLE

SEQ ID NO: 2648 - protein, 550 aa, Homo sapiens
MDHHVSTIKPRRIQNQNVIHRLERRRISSGKAGTHWHQVRVFHQNVFPNFTVVNVEKPPCFLRKFSPDGRYFIAFSSDQTSLEIYEYQGCQAAEDLLQGYEGEILSNGNDQRSVNIRGRLFERFFVLLHITNVAANGEHLNRECSLFTDDCRCVIVGSAAYLPDEPHPPFFEVYRNSESVTPNPRSPLEDYSLHIIDLHTGRLCDTRTFKCDKVVLSHNQGLYLYKNILAILSVQQQTIHVFQVTPEGTFIDVRTIGRFCYEDDLLTVSAVFPEVQRDSQTGMANPFRDPFINSLKHRLLVYLWRRAEQDGSAMAKRRFFQYFDQLRQLRMWKMQLLDENHLFIKYTSEDVVTLRVTDPSQASFFVVYNMVTTEVIAVFENTSDELLELFENFCDLFRNATLHSEVQFPCSASSNNFARQIQRRFKDTIINAKYGGHTEAVRRLLGQLPISAQSYSGSPYLDLSLFSYDDKWVSVMERPKTCGDHPIRFYARDSGLLKFEIQAGLLGRPINHTVRRLVAFTFHPFEPFAISVQRTNAEYVVNFHMRHCCT

SEQ ID NO: 2649 - protein, 387 aa, Homo sapiens
MPRPRLLAALCGALLCAPSLLVALDICSKNPCHNGGLCEEISQEVRGDVFPSYTCTCLKGYAGNHCETKCVEPLGLENGNIANSQIAASSVRVTFLGLQHWVPELARLNRAGMVNAWTPSSNDDNPWIQVNLLRRMWVTGVVTQGASRLASHEYLKAFKVAYSLNGHEFDFIHDVNKKHKEFVGNWNKNAVHVNLFETPVEAQYVRLYPTSCHTACTLRFELLGCELNGCANPLGLKNNSIPDKQITASSSYKTWGLHLFSWNPSYARLDKQGNFNAWVAGSYGNDQWLQVDLGSSKEVTGIITQGARNFGSVQFVASYKVAYSNDSANWTEYQDPRTGSSKIFPGNWDNHSHKKNLFETPILARYVRILPVAWHNRIALRLELLGC

SEQ ID NO: 2650 - protein, 335 aa, Homo sapiens
MPRPRLLAALCGALLCAPSLLVALDICSKNPCHNGGLCEEISQEVRGDVFPSYTCTCLKGYAGNHCETKCVEPLGLENGNIANSQIAASSVRVTFLGLQHWVPELARLNRAGMVNAWTPSSNDDNPWIQVNLLRRMWVTGVVTQGASRLASHEYLKAFKVAYSLNGHEFDFIHDVNKKHKEFVGNWNKNAVHVNLFETPVEAQYVRLYPTSCHTACTLRFELLGCELNGCANPLGLKNNSIPDKQITASSSYKTWGLHLFSWNPSYARLDKQGNFNAWVAGSYGNDQWLQIFPGNWDNHSHKKNLFETPILARYVRILPVAWHNRIALRLELLGC

SEQ ID NO: 2651 - protein, 664 aa, Homo sapiens
MEGFMDSGTQTDAVVVLSLAQAAVLGLVSENELFGATISAEAFYPDLGPELSGAAMGEPEPPGPDVYQLACNGRALEEPAEEEVLEVEAACEKHTRRKTRPPVRLVPKVKFEKVEEEEQEVYEVSVPGDDKDAGPAEAPAEAASGGCDALVQSSAVKMIDLSAFSRKPRTLRHLPRTPRPELNVAPYDPHFPAPARDGFPEPSMALPGPEALPTECGFEPPHLAPLSDPEAPSMESPEPVKPEQGFVWQEASEFEADTAGSTVERHKKAQLDRLDINVQIDDSYLVEAGDRQKRWQCRMCEKSYTSKYNLVTHILGHNGIKPHSCPHCSKLFKQPSHLQTHLLTHQGTRPHKCQVCHKAFTQTSHLKRHMLLHSEVKPYSCHFCGRGFAYPSELKAHEVKHESGRCHVCVECGLDFSTLTQLKRHLASHQGPTLYQCLECDKSFHYRSQLQNHMLKHQNVRPFVCTECGMEFSQIHHLKQHSLTHKGVKEFKCEVCGREFTLQANMKRHMLIHTSVRPYQCHICFKTFVQKQTLKTHMIVHSPVKPFKCKVCGKSFNRMYNLLGHMHLHAGSKPFKCPYCSSKFNLKGNLSRHMKVKHGVMDIGLDSQDPMMELTGTDPSELDGQQEMEDFEENAYSYASVDSSAEASVLTEQAMKEMAYYNVL

SEQ ID NO: 2652 - protein, 375 aa, Homo sapiens
MQLQFRSWMLAALTLLVVFLIFADISEIEEEIGNSGGRGTIRSAVNSLHSKSNRAEVVINGSSSPAVVDRSNESIKHNIQPASSKWRHNQTLSLRIRKQILKFLDAEKDISVLKGTLKPGDIIHYIFDRDSTMNVSQNLYELLPRTSPLKNKHFGTCAIVGNSGVLLNSGCGQEIDAHSFVIRCNLAPVQEYARDVGLKTDLVTMNPSVIQRAFEDLVNATWREKLLQRLHSLNGSILWIPAFMARGGKERVEWVNELILKHHVNVRTAYPSLRLLHAVRGYWLTNKVHIKRPTTGLLMYTLATRFCKQIYLYGFWPFPLDQNQNPVKYHYYDSLKYGYTSQASPHTMPLEFKALKSLHEQGALKLTVGQCDGAT

SEQ ID NO: 2653 - protein, 794 aa, Homo sapiens
MELRPWLLWVVAATGTLVLLAADAQGQKVFTNTWAVRIPGGPAVANSVARKHGFLNLGQIFGDYYHFWHRGVTKRSLSPHRPRHSRLQREPQVQWLEQQVAKRRTKRDVYQEPTDPKFPQQWYLSGVTQRDLNVKAAWAQGYTGHGIVVSILDDGIEKNHPDLAGNYDPGASFDVNDQDPDPQPRYTQMNDNRHGTRCAGEVAAVANNGVCGVGVAYNARIGGVRMLDGEVTDAVEARSLGLNPNHIHIYSASWGPEDDGKTVDGPARLAEEAFFRGVSQGRGGLGSIFVWASGNGGREHDSCNCDGYTNSIYTLSISSATQFGNVPWYSEACSSTLATTYSSGNQNEKQIVTTDLRQKCTESHTGTSASAPLAAGIIALTLEANKNLTWRDMQHLVVQTSKPAHLNANDWATNGVGRKVSHSYGYGLLDAGAMVALAQNWTTVAPQRKCIIDILTEPKDIGKRLEVRKTVTACLGEPNHITRLEHAQARLTLSYNRRGDLAIHLVSPMGTRSTLLAARPHDYSADGFNDWAFMTTHSWDEDPSGEWVLEIENTSEANNYGTLTKFTLVLYGTAPEGLPVPPESSGCKTLTSSQACVVCEEGFSLHQKSCVQHCPPGFAPQVLDTHYSTENDVETIRASVCAPCHASCATCQGPALTDCLSCPSHASLDPVEQTCSRQSQSSRESPPQQQPPRLPPEVEAGQRLRAGLLPSHLPEVVAGLSCAFIVLVFVTVFLVLQLRSGFSFRGVKVYTMDRGLISYKGLPPEAWQEECPSDSEEDEGRGERTAFIKDQSAL

SEQ ID NO: 2654 - protein, 1657 aa, Homo sapiens
MSAADEVDGLGVARPHYGSVLDNERLTAEEMDERRRQNVAYEYLCHLEEAKRWMEACLGEDLPPTTELEEGLRNGVYLAKLGNFFSPKVVSLKKIYDREQTRYKATGLHFRHTDNVIQWLNAMDEIGLPKIFYPETTDIYDRKNMPRCIYCIHALSLYLFKLGLAPQIQDLYGKVDFTEEEINNMKTELEKYGIQMPAFSKIGGILANELSVDEAALHAAVIAINEAIDRRIPADTFAALKNPNAMLVNLEEPLASTYQDILYQAKQDKMTNAKNRTENSERERDVYEELLTQAEIQGNINKVNTFSALANIDLALEQGDALALFRALQSPALGLRGLQQQNSDWYLKQLLSDKQQKRQSGQTDPLQKEELQSGVDAANSAAQQYQRRLAAVALINAAIQKGVAEKTVLELMNPEAQLPQVYPFAADLYQKELATLQRQSPEHNLTHPELSVAVEMLSSVALINRALESGDVNTVWKQLSSSVTGLTNIEEENCQRYLDELMKLKAQAHAENNEFITWNDIQACVDHVNLVVQEEHERILAIGLINEALDEGDAQKTLQALQIPAAKLEGVLAEVAQHYQDTLIRAKREKAQEIQDESAVLWLDEIQGGIWQSNKDTQEAQKFALGIFAINEAVESGDVGKTLSALRSPDVGLYGVIPECGETYHSDLAEAKKKKLAVGDNNSKWVKHWVKGGYYYYHNLETQEGGWDEPPNFVQNSMQLSREEIQSSISGVTAAYNREQLWLANEGLITRLQARCRGYLVRQEFRSRMNFLKKQIPAITCIQSQWRGYKQKKAYQDRLAYLRSHKDEVVKIQSLARMHQARKRYRDRLQYFRDHINDIIKIQAFIRANKARDDYKTLINAEDPPMVVVRKFVHLLDQSDQDFQEELDLMKMREEVITLIRSNQQLENDLNLMDIKIGLLVKNKITLQDVVSHSKKLTKKNKEQLSDMMMINKQKGGLKALSKEKREKLEAYQHLFYLLQTNPTYLAKLIFQMPQNKSTKFMDSVIFTLYNYASNQREEYLLLRLFKTALQEEIKSKVDQIQEIVTGNPTVIKMVVSFNRGARGQNALRQILAPVVKEIMDDKSLNIKTDPVDIYKSWVNQMESQTGEASKLPYDVTPEQALAHEEVKTRLDSSIRNMRAVTDKFLSAIVSSVDKIPYGMRFIAKVLKDSLHEKFPDAGEDELLKIIGNLLYYRYMNPAIVAPDAFDIIDLSAGGQLTTDQRRNLGSIAKMLQHAASNKMFLGDNAHLSIINEYLSQSYQKFRRFFQTACDVPELQDKFNVDEYSDLVTLTKPVIYISIGEIINTHTLLLDHQDAIAPEHNDPIHELLDDLGEVPTIESLIGESSGNLNDPNKEALAKTEVSLTLTNKFDVPGDENAEMDARTILLNTKRLIVDVIRFQPGETLTEILETPATSEQEAEHQRAMQRRAIRDAKTPDKMKKSKSVKEDSNLTLQEKKEKIQTGLKKLTELGTVDPKNKYQELINDIARDIRNQRRYRQRRKAELVKLQQTYAALNSKATFYGEQVDYYKSYIKTCLDNLASKGKVSKKPREMKGKKSKKISLKYTAARLHEKGVLLEIEDLQVNQFKNVIFEISPTEEVGDFEVKAKFMGVQMETFMLHYQDLLQLQYEGVAVMKLFDRAKVNVNLLIFLLNKKFYGK

SEQ ID NO: 2655 - protein, 619 aa, Homo sapiens
MAASPGSGSANPRKFSEKIALHTQRQAEETRAFEQLMTDLTLSRVQFQKLQQLRLTQYHGGSLPNVSQLRSSASEFQPSFHQADNVRGTRHHGLVERPSRNRFHPLHRRSGDKPGRQFDGSAFGANYSSQPLDESWPRQQPPWKDEKHPGFRLTSALNRTNSDSALHTSALSTKPQDPYGGGGQSAWPAPYMGFCDGENNGHGEVASFPGPLKEENLLNVPKPLPKQLWETKEIQSLSGRPRSCDVGGGNAFPHNGQNLGLSPFLGTLNTGGSLPDLTNLHYSTPLPASLDTTDHHFGSMSVGNSVNNIPAAMTHLGIRSSSGLQSSRSNPSIQATLNKTVLSSSLNNHPQTSVPNASALHPSLRLFSLSNPSLSTTNLSGPSRRRQPPVSPLTLSPGPEAHQGFSRQLSSTSPLAPYPTSQMVSSDRSQLSFLPTEAQAQVSPPPPYPAPQELTQPLLQQPRAPEAPAQQPQAASSLPQSDFQLLPAQGSSLTNFFPDVGFDQQSMRPGPAFPQQVPLVQQGSRELQDSFHLRPSPYSNCGSLPNTILPEDSSTSLFKDLNSALAGLPEVSLNVDTPFPLEEELQIEPLSLDGLNMLSDSSMGLLDPSVEETFRADRL

SEQ ID NO: 2656 - protein, 1120 aa, Homo sapiens
MVLNSLDKMIQLQKNTANIRNICVLAHVDHGKTTLADCLISSNGIISSRLAGKLRYMDSREDEQIRGITMKSSAISLHYATGNEEYLINLIDSPGHVDFSSEVSTAVRICDGCIIVVDAVEGVCPQTQAVLRQAWLENIRPVLVINKIDRLIVELKFTPQEAYSHLKNILEQINALTGTLFTSKVLEERAERETESQVNPNSEQGEQVYDWSTGLEDTDDSHLYFSPEQGNVVFTSAIDGWGFGIEHFARIYSQKIGIKKEVLMKTLWGDYYINMKAKKIMKGDQAKGKKPLFVQLILENIWSLYDAVLKKDKDKIDKIVTSLGLKIGAREARHSDPKVQINAICSQWLPISHAVLAMVCQKLPSPLDITAERVERLMCTGSQTFDSFPPETQALKAAFMKCGSEDTAPVIIFVSKMFAVDAKALPQNKPRPLTQEEIAQRRERARQRHAEKLAAAQGQAPLEPTQDGSAIETCPKGEEPRGDEQQVESMTPKPVLQEENNQESFIAFARVFSGVARRGKKIFVLGPKYSPLEFLRRVPLGFSAPPDGLPQVPHMAYCALENLYLLMGRELEYLEEVPPGNVLGIGGLQDFVLKSATLCSLPSCPPFIPLNFEATPIVRVAVEPKHPSEMPQLVKGMKLLNQADPCVQILIQETGEHVLVTAGEVHLQRCLDDLKERFAKIHISVSEPIIPFRETITKPPKVDMVNEEIGKQQKVAVIHQMKEDQSKIPEGIQVDSDGLITITTPNKLATLSVRAMPLPEEVTQILEENSDLIRSMEQLTSSLNEGENTHMIHQKTQEKIWEFKGKLEQHLTGRRWRNIVDQIWSFGPRKCGPNILVNKSEDFQNSVWTGPADKASKEASRYRDLGNSIVSGFQLATLSGPMCEEPLMGVCFVLEKWDLSKFEEQGASDLAKEGQEENETCSGGNENQELQDGCSEAFEKRTSQKGESPLTDCYGPFSGQLIATMKEACRYALQVKPQRLMAAMYTCDIMATGDVLGRVYAVLSKREGRVLQEEMKEGTDMFIIKAVLPVAESFGFADEIRKRTSGLASPQLVFSHWEIIPSDPFWVPTTEEEYLHFGEKADSENQARKYMNAVRKRKGLYVEEKIVEHAEKQRTLSKNK

SEQ ID NO: 2657 - protein, 179 aa, Homo sapiens
MLSLDFLDDVRRMNKRQLYYQVLNFGMIVSSALMIWKGLMVITGSESPIVVVLSGSMEPAFHRGDLLFLTNRVEDPIRVGEIVVFRIEGREIPIVHRVLKIHEKQNGHIKFLTKGDNNAVDDRGLYKQGQHWLEKKDVVGRARGFVPYIGIVTILMNDYPKFKYAVLFLLGLFVLVHRE

SEQ ID NO: 2658 - protein, 246 aa, Homo sapiens
MAAPGPALCLFDVDGTLTAPRQKITKEMDDFLQKLRQKIKIGVVGGSDFEKVQEQLGNDVVEKYDYVFPENGLVAYKDGKLLCRQNIQSHLGEALIQDLINYCLSYIAKIKLPKKRGTFIEFRNGMLNVSPIGRSCSQEERIEFYELDKKENIRQKFVADLRKEFAGKGLTFSIGGQISFDVFPDGWDKRYCLRHVENDGYKTIYFFGDKTMPGGNDHEIFTDPRTMGYSVTAPEDTRRICELLFS

SEQ ID NO: 2659 - protein, 855 aa, Homo sapiens
MARHLLLPLVMLVISPIPGAFQDSALSPTQEEPEDLDCGRPEPSARIVGGSNAQPGTWPWQVSLHHGGGHICGGSLIAPSWVLSAAHCFMTNGTLEPAAEWSVLLGVHSQDGPLDGAHTRAVAAIVVPANYSQVELGADLALLRLASPASLGPAVWPVCLPRASHRFVHGTACWATGWGDVQEADPLPLPWVLQEVELRLLGEATCQCLYSQPGPFNLTLQILPGMLCAGYPEGRRDTCQGDSGGPLVCEEGGRWFQAGITSFGFGCGRRNRPGVFTAVATYEAWIREQVMGSEPGPAFPTQPQKTQSDPQEPREENCTIALPECGKAPRPGAWPWEAQVMVPGSRPCHGALVSESWVLAPASCFLDPNSSDSPPRDLDAWRVLLPSRPRAERVARLVQHENASWDNASDLALLQLRTPVNLSAASRPVCLPHPEHYFLPGSRCRLARWGRGEPALGPGALLEAELLGGWWCHCLYGRQGAAVPLPGDPPHALCPAYQEKEEVGSCWNDSRWSLLCQEEGTWFLAGIRDFPSGCLRPRAFFPLQTHGPWISHVTRGAYLEDQLAWDWGPDGEETETQTCPPHTEHGACGLRLEAAPVGVLWPWLAEVHVAGDRVCTGILLAPGWVLAATHCVLRPGSTTVPYIEVYLGRAGASSLPQGHQVSRLVISIRLPQHLGLRPPLALLELSSRVEPSPSALPICLHPAGIPPGASCWVLGWKEPQDRVPVAAAVSILTQRICDCLYQGILPPGTLCVLYAEGQENRCEMTSAPPLLCQMTEGSWILVGMAVQGSRELFAAIGPEEAWISQTVGEANFLPPSGSPHWPTGGSNLCPPELAKASGSPHAVYFLLLLTLLIQS

SEQ ID NO: 2660 - protein, 1163 aa, Homo sapiens
MTRTRAALLLFTALATSLGFNLDTEELTAFRVDSAGFGDSVVQYANSWVVVGAPQKITAANQTGGLYQCGYSTGACEPIGLQVPPEAVNMSLGLSLASTTSPSQLLACGPTVHHECGRNMYLTGLCFLLGPTQLTQRLPVSRQECPRQEQDIVFLIDGSGSISSRNFATMMNFVRAVISQFQRPSTQFSLMQFSNKFQTHFTFEEFRRSSNPLSLLASVHQLQGFTYTATAIQNVVHRLFHASYGARRDAAKILIVITDGKKEGDSLDYKDVIPMADAAGIIRYAIGVGLAFQNRNSWKELNDIASKPSQEHIFKVEDFDALKDIQNQLKEKIFAIEGTETTSSSSFELEMAQEGFSAVFTPDGPVLGAVGSFTWSGGAFLYPPNMSPTFINMSQENVDMRDSYLGYSTELALWKGVQSLVLGAPRYQHTGKAVIFTQVSRQWRMKAEVTGTQIGSYFGASLCSVDVDSDGSTDLVLIGAPHYYEQTRGGQVSVCPLPRGWRRWWCDAVLYGEQGHPWGRFGAALTVLGDVNGDKLTDVVIGAPGEEENRGAVYLFHGVLGPSISPSHSQRIAGSQLSSRLQYFGQALSGGQDLTQDGLVDLAVGARGQVLLLRTRPVLWVGVSMQFIPAEIPRSAFECREQVVSEQTLVQSNICLYIDKRSKNLLGSRDLQSSVTLDLALDPGRLSPRATFQETKNRSLSRVRVLGLKAHCENFNLLLPSCVEDSVTPITLRLNFTLVGKPLLAFRNLRPMLAADAQRYFTASLPFEKNCGADHICQDNLGISFSFPGLKSLLVGSNLELNAEVMVWNDGEDSYGTTITFSHPAGLSYRYVAEGQKQGQLRSLHLTCDSAPVGSQGTWSTSCRINHLIFRGGAQITFLATFDVSPKAVLGDRLLLTANVSSENNTPRTSKTTFQLELPVKYAVYTVVSSHEQFTKYLNFSESEEKESHVAMHRYQVNNLGQRDLPVSINFWVPVELNQEAVWMDVEVSHPQNPSLRCSSEKIAPPASDFLAHIQKNPVLDCSIAGCLRFRCDVPSFSVQEELDFTLKGNLSFGWVRQILQKKVSVVSVAEITFDTSVYSQLPGQEAFMRAQTTTVLEKYKVHNPTPLIVGSSIGGLLLLALITAVLYKVGFFKRQYKEMMEEANGQIAPENGTQTPSPPSEK

SEQ ID NO: 2661 - protein, 935 aa, Homo sapiens
MAAAKPTLTDSLSFCLAQLAAAAGEALGGEKDPATNETPLSRALLALRTRHIKAAGGIERFRARGGLRPLLALLRRAAAAGSAPSQAGPGSAPSSAASGASSPAPASGPAPSAVSSSSPTPPVRLRKTLDLALSILADCCTEGACRTEVRRLGGILPLVTILQCMKTDSIQNRTARALGNLAMEPESCGDIHCAGAVPLLVESLTACQDSQCLQSVVRALRNLADSPQHRLALAQQGAVRPLAELLATAPDAALTLALVRALLELSRGCSRACAEQLSLGGGLGPLVSLASHPKRAVREGTILILANLCAQGLIRPALGNAGGVEVLVDELRQRRDPNGASPTSQQPLVRAVCLLCREAINRARLRDAGGLDLLMGLLRDPRASAWHPRIVAALVGFLYDTGALGRLQALGLVPLLAGQLCGEAGEEEEEGREAASWDFPEERTPERAQGGSFRSLRSWLISEGYATGPDDISPDWSPEQCPPEPMEPASPAPTPTSLRAPRTQRTPGRSPAAAIEEPWGREGPALLLLSRFSQAPDPSGALVTGPALYGLLTYVTGAPGPPSPRALRILSRLTCNPACLEAFVRSYGAALLRAWLVLGVAPDDWPAPRARPTLHSRHRELGERLLQNLTVQAESPFGVGALTHLLLSGSPEDRVACALTLPFICRKPSLWRRLLLEQGGLRLLLAALTRPAPHPLFLFFAADSLSCLQDLVSPTVSPAVPQAVPMDLDSPSPCLYEPLLGPAPVPAPDLHFLLDSGLQLPAQRAASATASPFFRALLSGSFAEAQMDLVPLRGLSPGAAWPVLHHLHGCRGCGAALGPVPPPGQPLLGSEAEEALEAAGRFLLPGLEEELEEAVGRIHLGPQGGPESVGEVFRLGRPRLAAHCARWTLGSEQCPRKRGLALVGLVEAAGEEAGPLTEALLAVVMGIELGARVPA

SEQ ID NO: 2662 - protein, 453 aa, Homo sapiens
MKLLTRAGSFSRFYSLKVAPKVKATAAPAGAPPQPQDLEFTKLPNGLVIASLENYSPVSRIGLFIKAGSRYEDFSNLGTTHLLRLTSSLTTKGASSFKITRGIEAVGGKLSVTATRENMAYTVECLRGDVDILMEFLLNVTTAPEFRRWEVADLQPQLKIDKAVAFQNPQTHVIENLHAAAYRNALANPLYCPDYRIGKVTSEELHYFVQNHFTSARMALIGLGVSHPVLKQVAEQFLNMRGGLGLSGAKANYRGGEIREQNGDSLVHAAFVAESAVAGSAEANAFSVLQHVLGAGPHVKRGSNTTSHLHQAVAKATQQPFDVSAFNASYSDSGLFGIYTISQATAAGDVIKAAYNQVKTIAQGNLSNTDVQAAKNKLKAGYLMSVESSECFLEEVGSQALVAGSYMPPSTVLQQIDSVANADIINAAKKFVSGQKSMAASGNLGHTPFVDEL

SEQ ID NO: 2663 - protein, 454 aa, Homo sapiens
MLAENLVEEFEMKEDEPWYDHQDLQQDLQLAAELGKTLLDRNTELEDSVQQMYTTNQEQLQEIEYLTKQVELLRQMNEQHAKVYEQLDVTARELEETNQKLVADSKASQQKILSLTETIECLQTNIDHLQSQVEELKSSGQGRRSPGKCDQEKPAPSFACLKELYDLRQHFVYDHVFAEKITSLQGQPSPDEEENEHLKKTVTMLQAQLSLERQKRVTMEEEYGLVLKENSELEQQLGATGAYRARALELEAEVAEMRQMLQSEHPFVNGVEKLVPDSLYVPFKEPSQSLLEEMFLTVPESHRKPLKRSSSETILSSLAGSDIVKGHEETCIRRAKAVKQRGISLLHEVDTQYSALKVKYEELLKKCQEEQDSLSHKAVQTSRAAAKDLTGVNAQSEPVASGWELASVNPEPVSSPTTPPEYKALFKEIFSCIKKTKQEIDEQRTKYRSLSSHS

SEQ ID NO: 2664 - protein, 241 aa, Homo sapiens
MGTASRSNIARHLQTNLILFCVGAVGACTLSVTQPWYLEVDYTHEAVTIKCTFSATGCPSEQPTCLWFRYGAHQPENLCLDGCKSEADKFTVREALKENQVSLTVNRVTSNDSAIYICGIAFPSVPEARAKQTGGGTTLVVREIKLLSKELRSFLTALVSLLSVYVTGVCVAFILLSKSKSNPLRNKEIKEDSQKKKSARRIFQEIAQELYHKRHVETNQQSEKDNNTYENRRVLSNYERP

SEQ ID NO: 2665 - protein, 470 aa, Homo sapiens
MGKLHSKPAAVCKRRESPEGDSFAVSAAWARKGIEEWIGRQRCPGGVSGPRQLRLAGTIGRSTRELVGDVLRDTLSEEEEDDFRLEVALPPEKTDGLGSGDEKKMERVSEPCPGSKKQLKFEELQCDVSMEEDSRQEWTFTLYDFDNNGKVTREDITSLLHTIYEVVDSSVNHSPTSSKMLRVKLTVAPDGSQSKRSVLVNQADLQSARPRAETKPTEDLRSWEKKQRAPLRFQGDSRLEQSGCYHHCVDENIERRNHYLDLAGIENYTSQFGPGSPSVAQKSELPPRTSNPTRSRSHEPEAIHIPHRKPQGVDPASFHFLDTPIAKVSELQQRLRGTQDGSKHFVRSPKAQGKSVGVGHVARGARNKPPLGPAIPAVSPSAHLAASPALLPSLAPLGHKKHKHRAKESQQGCRGLQAPLASGGPVLGREHLRELPALVVYESQAGQPVQRHEHHHHHEHHHHYHHFYQT

SEQ ID NO: 2666 - protein, 1227 aa, Homo sapiens
MGDTSEDASIHRLEGTDLDCQVGGLICKSKSAASEQHVFKAPAPRPSLLGLDLLASLKRREREEKDDGEDKKKSKVSSYKDWEESKDDQKDAEEEGGDQAGQNIRKDRHYRSARVETPSHPGGVSEEFWERSRQRERERREHGVYASSKEEKDWKKEKSRDRDYDRKRDRDERDRSRHSSRSERDGGSERSSRRNEPESPRHRPKDAATPSRSTWEEEDSGYGSSRRSQWESPSPTPSYRDSERSHRLSTRDRDRSVRGKYSDDTPLPTPSYKYNEWADDRRHLGSTPRLSRGRGRREEGEEGISFDTEEERQQWEDDQRQADRDWYMMDEGYDEFHNPLAYSSEDYVRRREQHLHKQKQKRISAQRRQINEDNERWETNRMLTSGVVHRLEVDEDFEEDNAAKVHLMVHNLVPPFLDGRIVFTKQPEPVIPVKDATSDLAIIARKGSQTVRKHREQKERKKAQHKHWELAGTKLGDIMGVKKEEEPDKAVTEDGKVDYRTEQKFADHMKRKSEASSEFAKKKSILEQRQYLPIFAVQQELLTIIRDNSIVIVVGETGSGKTTQLTQYLHEDGYTDYGMIGCTQPRRVAAMSVAKRVSEEMGGNLGEEVGYAIRFEDCTSENTLIKYMTDGILLRESLREADLDHYSAIIMDEAHERSLNTDVLFGLLREVVARRSDLKLIVTSATMDAEKFAAFFGNVPIFHIPGRTFPVDILFSKTPQEDYVEAAVKQSLQVHLSGAPGDILIFMPGQEDIEVTSDQIVEHLEELENAPALAVLPIYSQLPSDLQAKIFQKAPDGVRKCIVATNIAETSLTVDGIMFVIDSGYCKLKVFNPRIGMDALQIYPISQANANQRSGRAGRTGPGQCFRLYTQSAYKNELLTTTVPEIQRTNLANVVLLLKSLGVQDLLQFHFMDPPPEDNMLNSMYQLWILGALDNTGGLTSTGRLMVEFPLDPALSKMLIVSCDMGCSSEILLIVSMLSVPAIFYRPKGREEESDQIREKFAVPESDHLTYLNVYLQWKNNNYSTIWCNDHFIHAKAMRKVREVRAQLKDIMVQQRMSLASCGTDWDIVRKCICAAYFHQAAKLKGIGEYVNIRTGMPCHLHPTSSLFGMGYTPDYIVYHELVMTTKEYMQCVTAVDGEWLAELGPMFYSVKQAGKSRQENRRRAKEEASAMEEEMALAEEQLRARRQEQEKRSPLGSVRSTKIYTPGRKEQGEPMTPRRTPARFGL

SEQ ID NO: 2667 - protein, 796 aa, Homo sapiens
MKENYCLQAALVCLGMLCHSHAFAPERRGHLRPSFHGHHEKGKEGQVLQRSKRGWVWNQFFVIEEYTGPDPVLVGRLHSDIDSGDGNIKYILSGEGAGTIFVIDDKSGNIHATKTLDREERAQYTLMAQAVDRDTNRPLEPPSEFIVKVQDINDNPPEFLHETYHANVPERSNVGTSVIQVTASDADDPTYGNSAKLVYSILEGQPYFSVEAQTGIIRTALPNMDREAKEEYHVVIQAKDMGGHMGGLSGTTKVTITLTDVNDNPPKFPQSVYQMSVSEAAVPGEEVGRVKAKDPDIGENGLVTYNIVDGDGMESFEITTDYETQEGVIKLKKPVDFETKRAYSLKVEAANVHIDPKFISNGPFKDTVTVKISVEDADEPPMFLAPSYIHEVQENAAAGTVVGRVHAKDPDAANSPIRYSIDRHTDLDRFFTINPEDGFIKTTKPLDREETAWLNITVFAAEIHNRHQEAKVPVAIRVLDVNDNAPKFAAPYEGFICESDQTKPLSNQPIVTISADDKDDTANGPRFIFSLPPEIIHNPNFTVRDNRDNTAGVYARRGGFSRQKQDLYLLPIVISDGGIPPMSSTNTLTIKVCGCDVNGALLSCNAEAYILNAGLSTGALIAILACIVILLVIVVLFVTLRRQKKEPLIVFEEEDVRENIITYDDEGGGEEDTEAFDIATLQNPDGINGFIPRKDIKPEYQYMPRPGLRPAPNSVDVDDFINTRIQEADNDPTAPPYDSIQIYGYEGRGSVAGSLSSLESATTDSDLDYDYLQNWGPRFKKLADLYGSKDTFDDDS

SEQ ID NO: 2668 - protein, 208 aa, Homo sapiens
MGNAQERPSETIDRERKRLVETLQADSGLLLDALLARGVLTGPEYEALDALPDAERRVRRLLLLVQGKGEAACQELLRCAQRTAGAPDPAWDWQHVGPGYRDRSYDPPCPGHWTPEAPGSGTTCPGLPRASDPDEAGGPEGSEAVQSGTPEEPEPELEAEASKEAEPEPEPEPELEPEAEAEPEPELEPEPDPEPEPDFEERDESEDS

SEQ ID NO: 2669 - protein, 125 aa, Homo sapiens
MPSEKTFKQRRTFEQRVEDVRLIREQHPTKIPVIIERYKGEKQLPVLDKTKFLVPDHVNMSELIKIIRRRLQLNANQAFFLLVNGHSMVSVSTPISEVYESEKDEDGFLYMVYASQETFGMKLSV

SEQ ID NO: 2670 - protein, 760 aa, Homo sapiens
MKTPPGASSRTKCSRELRSFCAFSCPRAKQPTCTAWFPQQEHPSENGPQMPGRDPPAASTMQVLLLTSAEDLDCTPGFQQKVFHINQPAEFIEDQSILNLTFSDCKGNDKLRYEVSSPYFKVNSDGGLVALRNITAVGKTLFVHARTPHAEDMAELVIVGGKDIQGSLQDIFKFARTSPVPRQKRSIVVSPILIPENQRQPFPRDVGKVVDSDRPERSKFRLTGKGVDQEPKGIFRINENTGSVSVTRTLDREVIAVYQLFVETTDVNGKTLEGPVPLEVIVIDQNDNRPIFREGPYIGHVMEGSPTGTTVMRMTAFDADDPATDNALLRYNIRQQTPDKPSPNMFYIDPEKGDIVTVVSPALLDRETLENPKYELIIEAQDMAGLDVGLTGTATATIMIDDKNDHSPKFTKKEFQATVEEGAVGVIVNLTVEDKDDPTTGAWRAAYTIINGNPGQSFEIHTNPQTNEGMLSVVKPLDYEISAFHTLLIKVENEDPLVPDVSYGPSSTATVHITVLDVNEGPVFYPDPMMVTRQEDLSVGSVLLTVNATDPDSLQHQTIRYSVYKDPAGWLNINPINGTVDTTAVLDRESPFVDNSVYTALFLAIDSGNPPATGTGTLLITLEDVNDNAPFIYPTVAEVCDDAKNLSVVILGASDKDLHPNTDPFKFEIHKQAVPDKVWKISKINNTHALVSLLQNLNKANYNLPIMVTDSGKPPMTNITDLRVQVCSCRNSKVDCNAAGALRFSLPSVLLLSLFSLACL

SEQ ID NO: 2671 - protein, 949 aa, Homo sapiens
MASNHPAFSFHQKQVLRQELTQIQSSLNGGGGHGGKGAPGPGGALPTCPACHKITPRTEAPVSSVSNSLENALHTSAHSTEESLPKRPLGKHSKVSVEKIDLKGLSHTKNDRNVECSFEVLWSDSSITSVTKSSSEVTEFISKLCQLYPEENLEKLIPCLAGPDAFYVERNHVDLDSGLRYLASLPSHVLKNDHVRRFLSTSSPPQQLQSPSPGNPSLSKVGTVMGVSGRPVCGVAGIPSSQSGAQHHGQHPAGSAAPLPHCSHAGSAGSALAYRTQMDTSPAILMPSSLQTPQTQEQNGILDWLRKLRLHKYYPVFKQLSMEKFLSLTEEDLNKFESLTMGAKKKLKTQLELEKEKSERRCLNPSAPPLVTSSGVARVPPTSHVGPVQSGRGSHAAELRVEVEQPHHQLPREGSSSEYSSSSSSPMGVQAREESSDSAEENDRRVEIHLESSDKEKPVMLLNHFTSSSARPTAQVLPVQNEASSNPSGHHPLPPQMLSAASHITPIRMLNSVHKPERGSADMKLLSSSVHSLLSLEERNKGSGPRSSMKVDKSFGSAMMDVLPASAPHQPVQVLSGLSESSSMSPTVSFGPRTKVVHASTLDRVLKTAQQPALVVETSTAATGTPSTVLHAARPPIKLLLSSSVPADSAISGQTSCPNNVQISVPPAIINPRTALYTANTKVAFSAMSSMPVGPLQGGFCANSNTASPSSHPSTSFANMATLPSCPAPSSSPALSSVPESSFYSSSGGGGSTGNIPASNPNHHHHHHHQQPPAPPQPAPPPPGCIVCTSCGCSGSCGSSGLTVSYANYFQHPFSGPSVFTFPFLPFSPMCSSGYVSAQQYGGGSTFPVVHAPYSSSGTPDPVLSGQSTFAVPPMQNFMAGTAGVYQTQGLVGSSNGSSHKKSGNLSCYNCGATGHRAQDCKQPSMDFNRPGTFRLKYAPPAESLDSTD

SEQ ID NO: 2672 - protein, 172 aa, Homo sapiens
MPDSWDKDVYPEPPRRTPVQPNPIVYMMKAFDLIVDRPVTLVREFIERQHAKNRYYYYHRQYRRVPDITECKEEDIMCMYEAEMQWKRDYKVDQEIINIMQDRLKACQQREGQNYQQNCIKEVEQFTQVAKAYQDRYQDLGAYSSARKCLAKQRQRMLQERKAAKEAAAATS

SEQ ID NO: 2673 - protein, 429 aa, Homo sapiens
MARTTSQLYDAVPIQSSVVLCSCPSPSMVRTQTESSTPPGIPGGSRQGPAMDGTAAEPRPGAGSLQHAQPPPQPRKKRPEDFKFGKILGEGSFSTVVLARELATSREYATRANSFVGTAQYVSPELLTEKSACKSSDLWALGCIIYQLVAGLPPFRAGNEYLIFQKIIKLEYDFPEKFFPKARDLVEKLLVLDATKRLGCEEMEGYGPLKAHPFFESVTWENLHQQTPPKLTAYLPAMSEDDEDCYGNYDNLLSQFGCMQVSSSSSSHSLSASDTGLPQRSGSNIEQYIHDLDSNSFELDLQFSEDEKRLLLEKQAGGNPWHQFVENNLILKMGPVDKRKGLFARRRQLLLTEGPHLYYVDPVNKVLKGEIPWSQELRPEAKNFKTFFVHTPNRTYYLMDPSGNAHKWCRKIQEVWRQRYQSHPDAAVQ

SEQ ID NO: 2674 - protein, 522 aa, Homo sapiens
MAAVVAATRWWQLLLVLSAAGMGASGAPQPPNILLLLMDDMGWGDLGVYGEPSRETPNLDRMAAEGLLFPNFYSANPLCSPSRAALLTGRLPIRNGFYTTNAHARNAYTPQEIVGGIPDSEQLLPELLKKAGYVSKIVGKWHLGHRPQFHPLKHGFDEWFGSPNCHFGPYDNKARPNIPVYRDWEMVGRYYEEFPINLKTGEANLTQIYLQEALDFIKRQARHHPFFLYWAVDATHAPVYASKPFLGTSQRGRYGDAVREIDDSIGKILELLQDLHVADNTFVFFTSDNGAALISAPEQGGSNGPFLCGKQTTFEGGMREPALAWWPGHVTAGQVSHQLGSIMDLFTTSLALAGLTPPSDRAIDGLNLLPTLLQGRLMDRPIFYYRGDTLMAATLGQHKAHFWTWTNSWENFRQGIDFCPGQNVSGVTTHNLEDHTKLPLIFHLGRDPGERFPLSFASAEYQEALSRITSVVQQHQEALVPAQPQLNVCNWAVMNWAPPGCEKLGKCLTPPESIPKKCLWSH

SEQ ID NO: 2675 - protein, 478 aa, Homo sapiens
MAPKKKGKKGKAKGTPIVDGLAPEDMSKEQVEEHVSRIREELDREREERNYFQLERDKIHTFWEITRRQLEEKKAELRNKDREMEEAEERHQVEIKVYKQKVKHLLYEHQNNLTEMKAEGTVVMKLAQKEHRIQESVLRKDMRALKVELKEQELASEVVVKNLRLKHTEEITRMRNDFERQVREIEAKYDKKMKMLRDELDLRRKTELHEVEERKNGQIHTLMQRHEEAFTDIKNYYNDITLNNLALINSLKEQMEDMRKKEDHLEREMAEVSGQNKRLADPLQKAREEMSEMQKQLANYERDKQILLCTKARLKVREKELKDLQWEHEVLEQRFTKVQQERDELYRKFTAAIQEVQQKTGFKNLVLERKLQALSAAVEKKEVQFNEVLAASNLDPAALTLVSRKLEDVLESKNSTIKDLQYELAQVCKAHNDLLRTYEAKLLAFGIPLDNVGFKPLETAVIGQTLGQGPAGLVGTPT

SEQ ID NO: 2676 - protein, 788 aa, Homo sapiens
MAVLLLLLRALRRGPGPGPRPLWGPGPAWSPGFPARPGRGRPYMASRPPGDLAEAGGRALQSLQLRLLTPTFEGINGLLLKQHLVQNPVRLWQLLGGTFYFNTSRLKQKNKEKDKSKGKAPEEDEEERRRRERDDQMYRERLRTLLVIAVVMSLLNALSTSGGSISWNDFVHEMLAKGEVQRVQVVPESDVVEVYLHPGAVVFGRPRLALMYRMQVANIDKFEEKLRAAEDELNIEAKDRIPVSYKRTGFFGNALYSVGMTAVGLAILWYVFRLAGMTGREGGFSAFNQLKMARFTIVDGKMGKGVSFKDVAGMHEAKLEVREFVDYLKLGAKVPKGALLLGPPGCGKTLLAKAVATEAQVPFLAMAGPEFVEVIGGLGAARVRSLFKEARARAPCIVYIDEIDAVGKKRSTTMSGFSNTEEEQTLNQLLVEMDGMGTTDHVIVLASTNRADILDGALMRPGRLDRHVFIDLPTLQERREIFEQHLKSLKLTQSSTFYSQRLAELTPGFSGADIANICNEAALHAAREGHTSVHTLNFEYAVERVLAGTAKKSKILSKEEQKVVAFHESGHALVGWMLEHTEAVMKVSITPRTNAALGFAQMLPRDQHLFTKEQLFERMCMALGGRASEALSFNEVTSGAQDDLRKVTRIAYSMVKQFGMAPGIGPISFPEAQEGLMGIGRRPFSQGLQQMMDHEARLLVAKAYRHTEKVLQDNLDKLQALANALLEKEVINYEDIEALIGPPPHGPKKMIAPQRWIDAQREKQDLGEEETEETQQPPLGGEEPTWPK

SEQ ID NO: 2677 - protein, 146 aa, Homo sapiens
MASAGVAAGRQAEDVLPPTSDQPLPDTKPLPPPQPPPVPAPQPQQSPAPRPQSPARAREEENYSFLPLVHNIIKCMDKDSPEVHQDLNALKSKFQEMRKLISTMPGIHLSPEQQQQQLQSLREQVRTKNELLQKYKSLCMFEIPKE

SEQ ID NO: 2678 - protein, 2440 aa, Homo sapiens
MSSSGYPPNQGAFSTEQSRYPPHSVQYTFPNTRHQQEFAVPDYRSSHLEVSQASQLLQQQQQQQLRRRPSLLSEFHPGSDRPQERRTSYEPFHPGPSPVDHDSLESKRPRLEQVSDSHFQRVSAAVLPLVHPLPEGLRASADAKKDPAFGGKHEAPSSPISGQPCGDDQNASPSKLSKEELIQSMDRVDREIAKVEQQILKLKKKQQQLEEEAAKPPEPEKPVSPPPVEQKHRSIVQIIYDENRKKAEEAHKIFEGLGPKVELPLYNQPSDTKVYHENIKTNQVMRKKLILFFKRRNHARKQREQKICQRYDQLMEAWEKKVDRIENNPRRKAKESKTREYYEKQFPEIRKQREQQERFQRVGQRGAGLSATIARSEHEISEIIDGLSEQENNEKQMRQLSVIPPMMFDAEQRRVKFINMNGLMEDPMKVYKDRQFMNVWTDHEKEIFKDKFIQHPKNFGLIASYLERKSVPDCVLYYYLTKKNENYKALVRRNYGKRRGRNQQIARPSQEEKVEEKEEDKAEKTEKKEEEKKDEEEKDEKEDSKENTKEKDKIDGTAEETEEREQATPRGRKTANSQGRRKGRITRSMTNEAAAASAAAAAATEEPPPPLPPPPEPISTEPVETSRWTEEEMEVAKKGLVEHGRNWAAIAKMVGTKSEAQCKNFYFNYKRRHNLDNLLQQHKQKTSRKPREERDVSQCESVASTVSAQEDEDIEASNEEENPEDSEVEAVKPSEDSPENATSRGNTEPAVELEPTTETAPSTSPSLAVPSTKPAEDESVETQVNDSISAETAEQMDVDQQEHSAEEGSVCDPPPATKADSVDVEVRVPENHASKVEGDNTKERDLDRASEKVEPRDEDLVVAQQINAQRPEPQSDNDSSATCSADEDVDGEPERQRMFPMDSKPSLLNPTGSILVSSPLKPNPLDLPQLQHRAAVIPPMVSCTPCNIPIGTPVSGYALYQRHIKAMHESALLEEQRQRQEQIDLECRSSTSPCGTSKSPNREWEVLQPAPHQVITNLPEGVRLPTTRPTRPPPPLIPSSKTTVASEKPSFIMGGSISQGTPGTYLTSHNQASYTQETPKPSVGSISLGLPRQQESAKSATLPYIKQEEFSPRSQNSQPEGLLVRAQHEGVVRGTAGAIQEGSITRGTPTSKISVESIPSLRGSITQGTPALPQTGIPTEALVKGSISRMPIEDSSPEKGREEAASKGHVIYEGKSGHILSYDNIKNAREGTRSPRTAHEISLKRSYESVEGNIKQGMSMRESPVSAPLEGLICRALPRGSPHSDLKERTVLSGSIMQGTPRATTESFEDGLKYPKQIKRESPPIRAFEGAITKGKPYDGITTIKEMGRSIHEIPRQDILTQESRKTPEVVQSTRPIIEGSISQGTPIKFDNNSGQSAIKHNVKSLITGPSKLSRGMPPLEIVPENIKVVERGKYEDVKAGETVRSRHTSVVSSGPSVLRSTLHEAPKAQLSPGIYDDTSARRTPVSYQNTMSRGSPMMNRTSDVTISSNKSTNHERKSTLTPTQRESIPAKSPVPGVDPVVSHSPFDPHHRGSTAGEVYRSHLPTHLDPAMPFHRALDPAAAAYLFQRQLSPTPGYPSQYQLYAMENTRQTILNDYITSQQMQVNLRPDVARGLSPREQPLGLPYPATRGIIDLTNMPPTILVPHPGGTSTPPMDRITYIPGTQITFPPRPYNSASMSPGHPTHLAAAASAEREREREREKERERERIAAASSDLYLRPGSEQPGRPGSHGYVRSPSPSVRTQETMLQQRPSVFQGTNGTSVITPLDPTAQLRIMPLPAGGPSISQGLPASRYNTAADALAALVDAAASAPQMDVSKTKESKHEAARLEENLRSRSAAVSEQQQLEQKTLEVEKRSVQCLYTSSAFPSGKPQPHSSVVYSEAGKDKGPPPKSRYEEELRTRGKTTITAANFIDVIITRQIASDKDARERGSQSSDSSSSLSSHRYETPSDAIEVISPASSPAPPQEKLQTYQPEVVKANQAENDPTRQYEGPLHHYRPQQESPSPQQQLPPSSQAEGMGQVPRTHRLITLADHICQIITQDFARNQVSSQTPQQPPTSTFQNSPSALVSTPVRTKTSNRYSPESQAQSVHHQRPGSRVSPENLVDKSRGSRPGKSPERSHVSSEPYEPISPPQVPVVHEKQDSLLLLSQRGAEPAEQRNDARSPGSISYLPSFFTKLENTSPMVKSKKQEIFRKLNSSGGGDSDMAAAQPGTEIFNLPAVTTSGSVSSRGHSFADPASNLGLEDIIRKALMGSFDDKVEDHGVVMSQPMGVVPGTANTSVVTSGETRREEGDPSPHSGGVCKPKLISKSNSRKSKSPIPGQGYLGTERPSSVSSVHSEGDYHRQTPGWAWEDRPSSTGSTQFPYNPLTMRMLSSTPPTPIACAPSAVNQAAPHQQNRIWEREPAPLLSAQYETLSDSDD

SEQ ID NO: 2679 - protein, 423 aa, Homo sapiens
MASALEQFVNSVRQLSAQGQMTQLCELINKSGELLAKNLSHLDTVLGALDVQEHSLGVLAVLFVKFSMPSVPDFETLFSQVQLFISTCNGEHIRYATDTFAGLCHQLTNALVERKQPLRGIGILKQAIDKMQMNTNQLTSIHADLCQLCLLAKCFKPALPYLDVDMMDICKENGAYDAKHFLCYYYYGGMIYTGLKNFERALYFYEQAITTPAMAVSHIMLESYKKYILVSLILLGKVQQLPKYTSQIVGRFIKPLSNAYHELAQVYSTNNPSELRNLVNKHSETFTRDNNMGLVKQCLSSLYKKNIQRLTKTFLTLSLQDMASRVQLSGPQEAEKYVLHMIEDGEIFASINQKDGMVSFHDNPEKYNNPAMLHNIDQEMLKCIELDERLKAMDQEITVNPQFVQKSMGSQEDDSGNKPSSYS

SEQ ID NO: 2680 - protein, 300 aa, Homo sapiens
MCARGQVGRGTQLRTGRPCSQVPGSRWRPERLLRRQRAGGRPSRPHPARARPGLSLPATLLGSRAAAAVPLPLPPALAPGDPAMPVRTECPPPAGASAASAASLIPPPPINTQQPGVATSLLYSGSKFRGHQKSKGNSYDVEVVLQHVDTGNSYLCGYLKIKGLTEEYPTLTTFFEGEIISKKHPFLTRKWDADEDVDRKHWGKFLAFYQYAKSFNSDDFDYEELKNGDYVFMRWKEQFLVPDHTIKDISGASFAGFYYICFQKSAASIEGYYYHRSSEWYQSLNLTHVPEHSAPIYEFR

SEQ ID NO: 2681 - protein, 633 aa, Homo sapiens
MSAGSERGAAATPGGLPAPCASKVELRLSCRHLLDRDPLTKSDPSVALLQQAQGQWVQVGRTEVVRSSLHPVFSKVFTVDYYFEEVQRLRFEVYDTHGPSGFSCQEDDFLGGMECTLGQPAQKWLLQVVMRVSVDVLGPAGHCAKHFLCCTESSHLARTGPSFLLRYDDLCLPWATAGAVRWWTCRGGHTQGWQIVAQKKVTRPLLLKFGRNAGKSTITVIAEDISGNNGYVELSFRARKLDDKDLFSKSDPFLELYRVNDDQGLQLVYRTEVVKNNLNPVWEAFKVSLSSLCSCEETRPLKCLVWDYDSRGKHDFIGEFSTTFEEMQKAFEEGQAQWDCVNPKYKQKRRSYKNSGVVVLADLKFHRVYSFLDYIMGGCQIHFTVAIDFTASNGDPRNSCSLHYINPYQPNEYLKALVSVGEICQDYDSDKRFSALGFGARIPPKYEVSHDFAINFNPEDDECEGIQGVVEAYQNCLPRVQLYGPTNVAPIISKVARVAAAEESTGKASQYYILLILTDGVVTDMADTREAIVRASRLPMSIIIVGVGNADFTDMQVLDGDDGVLRSPRGEPALRDIVQFVPFRELKNASPAALAKCVLAEVPKQVVEYYSHRGLPPRSLGVPAGEASPGCTP

SEQ ID NO: 2682 - protein, 385 aa, Homo sapiens
MKMLPGVGVFGTGSSARVLVPLLRAEGFTVEALWGKTEEEAKQLAEEMNIAFYTSRTDDILLHQDVDLVCISIPPPLTRQISVKALGIGKNVVCEKAATSVDAFRMVTASRYYPQLMSLVGNVLRFLPAFVRMKQLISEHYVGAVMICDARIYSGSLLSPSYGWICDELMGGGGLHTMGTYIVDLLTHLTGRRAEKVHGLLKTFVRQNAAIRGIRHVTSDDFCFFQMLMGGGVCSTVTLNFNMPGAFVHEVMVVGSAGRLVARGADLYGQKNSATQEELLLRDSLAVGAGLPEQGPQDVPLLYLKGMVYMVQALRQSFQGQGDRRTWDRTPVSMAASFEDGLYMQSVVDAIKRSSRSGEWEAVEVLTEEPDTNQNLCEALQRNNL

SEQ ID NO: 2683 - protein, 412 aa, Homo sapiens [sequence omitted]

SEQ ID NO: 2684 - protein, 369 aa, Homo sapiens
MFCVTPPELETKMNITKGGLVLFSANSNSSCMELSKKIAERLGVEMGKVQVYQEPNRETRVQIQESVRGKDVFIIQTVSKDVNTTIMELLIMVYACKTSCAKSIIGVIPYFPYSKQCKMRKRGSIVSKLLASMMCKAGLTHLITMDLHQKEIQGFFNIPVDNLRASPFLLQYIQEEIPDYRNAVIVAKSPASAKRAQSFAERLRLGIAVIHGEAQDAESDLVDGRHSPPMVRSVAAIHPSLEIPMLIPKEKPPITVVGDVGGRIAIIVDDIIDDVDSFLAAAETLKERGAYKIFVMATHGLLSSDAPRRIEESAIDEVVVTNTIPHEVQKLQCPKIKTVDISMILSEAIRRIHNGESMSYLFRNIGLDD

SEQ ID NO: 2685 - protein, 214 aa, Homo sapiens
MELAAGSFSEEQFWEACAELQQPALAGADWQLLVETSGISIYRLLDKKTGLYEYKVFGVLEDCSPTLLADIYMDSDYRKQWDQYVKELYEQECNGETVVYWEVKYPFPMSNRDYVYLRQRRDLDMEGRKIHVILARSTSMPQLGERSGVIRVKQYKQSLAIESDGKKGSKVFMYYFDNPGGQIPSWLINWAAKNGVPNFLKDMARACQNYLKKT

SEQ ID NO: 2686 - protein, 345 aa, Homo sapiens
MQLEIQVALNFIISYLYNKLPRRRVNIFGEELERLLKKKYEGHWYPEKPYKGSGFRCIHIGEKVDPVIEQASKESGLDIDDVRGNLPQDLSVWIDPFEVSYQIGEKGPVKVLYVDDNNENGCELDKEIKNSFNPEAQVFMPISDPASSVSSSPSPPFGHSAAVSPTFMPRSTQPLTFTTATFAATKFGSTKMKNSGRSNKVARTSPINLGLNVNDLLKQKAISSSMHSLYGLGLGSQQQPQQQQQPAQPPPPPPPPQQQQQQKTSALSPNAKEFIFPNMQGQGSSTNGMFPGDSPLNLSPLQYSNAFDVFAAYGGLNEKSFVDGLNFSLNNMQYSNQQFQPVMAN

SEQ ID NO: 2687 - protein, 346 aa, Homo sapiens
MESTLGAGIVIAEALQNQLAWLENVWLWITFLGDPKILFLFYFPAAYYASRRVGIAVLWISLITEWLNLIFKWFLFGDRPFWWVHESGYYSQAPAQVHQFPSSCETGPGSPSGHCMITGAALWPIMTALSSQVATRARSRWVRVMPSLAYCTFLLAVGLSRIFILAHFPHQVLAGLITGAVLGWLMTPRVPMERELSFYGLTALALMLGTSLIYWTLFTLGLDLSWSISLAFKWCERPEWIHVDSRPFASLSRDSGAALGLGIALHSPCYAQVRRAQLGNGQKIACLVLAMGLLGPLDWLGHPPQISLFYIFNFLKYTLWPCLVLALVPWAVHMFSAQEAPPIHSS

SEQ ID NO: 2688 - protein, 1675 aa, Homo sapiens
MAQILPIRFQEHLQLQNLGINPANIGFSTLTMESDKFICIREKVGEQAQVVIIDMNDPSNPIRRPISADSAIMNPASKVIALKAGKTLQIFNIEMKSKMKAHTMTDDVTFWKWISLNTVALVTDNAVYHWSMEGESQPVKMFDRHSSLAGCQIINYRTDAKQKWLLLTGISAQQNRVVGAMQLYSVDRKVSQPIEGHAASFAQFKMEGNAEESTLFCFAVRGQAGGKLHIIEVGTPPTGNQPFPKKAVDVFFPPEAQNDFPVAMQISEKHDVVFLITKYGYIHLYDLETGTCIYMNRISGETIFVTAPHEATAGIIGVNRKGQVLSVCVEEENIIPYITNVLQNPDLALRMAVRNNLAGAEELFARKFNALFAQGNYSEAAKVAANAPKGILRTPDTIRRFQSVPAQPGQTSPLLQYFGILLDQGQLNKYESLELCRPVLQQGRKQLLEKWLKEDKLECSEELGDLVKSVDPTLALSVYLRANVPNKVIQCFAETGQVQKIVLYAKKVGYTPDWIFLLRNVMRISPDQGQQFAQMLVQDEEPLADITQIVDVFMEYNLIQQCTAFLLDALKNNRPSEGPLQTRLLEMNLMHAPQVADAILGNQMFTHYDRAHIAQLCEKAGLLQRALEHFTDLYDIKRAVVHTHLLNPEWLVNYFGSLSVEDSLECLRAMLSANIRQNLQICVQVASKYHEQLSTQSLIELFESFKSFEGLFYFLGSIVNFSQDPDVHFKYIQAACKTGQIKEVERICRESNCYDPERVKNFLKEAKLTDQLPLIIVCDRFDFVHDLVLYLYRNNLQKYIEIYVQKVNPSRLPVVIGGLLDVDCSEDVIKNLILVVRGQFSTDELVAEVEKRNRLKLLLPWLEARIHEGCEEPATHNALAKIYIDSNNNPERFLRENPYYDSRVVGKYCEKRDPHLACVAYERGQCDLELINVCNENSLFKSLSRYLVRRKDPELWGSVLLESNPYRRPLIDQVVQTALSETQDPEEVSVTVKAFMTADLPNELIELLEKIVLDNSVFSEHRNLQNLLILTAIKADRTRVMEYINRLDNYDAPDIANIAISNELFEEAFAIFRKFDVNTSAVQVLIEHIGNLDRAYEFAERCNEPAVWSQLAKAQLQKGMVKEAIDSYIKADDPSSYMEVVQAANTSGNWEELVKYLQMARKKARESYVETELIFALAKTNRLAELEEFINGPNNAHIQQVGDRCYDEKMYDAAKLLYNNVSNFGRLASTLVHLGEYQAAVDGARKANSTRTWKEVCFACVDGKEFRLAQMCGLHIVVHADELEELINYYQDRGYFEELITMLEAALGLERAHMGMFTELAILYSKFKPQKMREHLELFWSRVNIPKVLRAAEQAHLWAELVFLYDKYEEYDNAIITMMNHPTDAWKEGQFKDIITKVANVELYYRAIQFYLEFKPLLLNDLLMVLSPRLDHTRAVNYFSKVKQLPLVKPYLRSVQNHNNKSVNESLNNLFITEEDYQALRTSIDAYDNFDNISLAQRLEKHELIEFRRIAAYLFKGNNRWKQSVELCKKDSLYKDAMQYASESKDTELAEELLQWFLQEEKRECFGACLFTCYDLLRPDVVLETAWRHNIMDFAMPYFIQVMKEYLTKVDKLDASESLRKEEEQATETQPIVYGQPQLMLTAGPSVAVPPQAPFGYGYTAPPYGQPQPGFGYSM

SEQ ID NO: 2689 - protein, 387 aa, Homo sapiens
MSVAFAAPRQRGKGEITPAAIQKMLDDNNHLIQCIMDSQNKGKTSECSQYQQMLHTNLVYLATIADSNQNMQSLLPAPPTQNMPMGPGGMNQSGPPPPPRSHNMPSDGMVGGGPPAPHMQNQMNGQMPGPNHMPMQGPGPNQLNMTNSSMNMPSSSHGSMGGYNHSVPSSQSMPVQNQMTMSQGQPMGNYGPRPNMSMQPNQGPMMHQQPPSQQYNMPQGGGQHYQGQQPPMGMMGQVNQGNHMMGQRQIPPYRPPQQGPPQQYSGQEDYYGDQYSHGGQGPPEGMNQQYYPDGNSQYGQQQDAYQGPPPQQGYPPQQQQYPGQQGYPGQQQGYGPSQGGPGPQYPNYPQGQGQQYGGYRPTQPGPPQPPQQRPYGYDQGQYGNYQQ

SEQ ID NO: 2690 - protein, 906 aa, Homo sapiens
MCRIAGALRTLLPLLAALLQASVEASGEIALCKTGFPEDVYSAVLSKDVHEGQPLLNVKFSNCNGKRKVQYESSEPADFKVDEDGMVYAVRSFPLSSEHAKFLIYAQDKETQEKWQVAVKLSLKPTLTEESVKESAEVEEIVFPRQFSKHSGHLQRQKRDWVIPPINLPENSRGPFPQELVRIRSDRDKNLSLRYSVTGPGADQPPTGIFIINPISGQLSVTKPLDREQIARFHLRAHAVDINGNQVENPIDIVINVIDMNDNRPEFLHQVWNGTVPEGSKPGTYVMTVTAIDADDPNALNGMLRYRIVSQAPSTPSPNMFTINNETGDIITVAAGLDREKVQQYTLIIQATDMEGNPTYGLSNTATAVITVTDVNDNPPEFTAMTFYGEVPENRVDIIVANLTVTDKDQPHTPAWNAVYRISGGDPTGRFAIQTDPNSNDGLVTVVKPIDFETNRMFVLTVAAENQVPLAKGIQHPPQSTATVSVTVIDVNENPYFAPNPKIIRQEEGLHAGTMLTTFTAQDPDRYMQQNIRYTKLSDPANWLKIDPVNGQITTIAVLDRESPNVKNNIYNATFLASDNGIPPMSGTGTLQIYLLDINDNAPQVLPQEAETCETPDPNSINITALDYDIDPNAGPFAFDLPLSPVTIKRNWTITRLNGDFAQLNLKIKFLEAGIYEVPIIITDSGNPPKSNISILRVKVCQCDSNGDCTDVDRIVGAGLGTGAIIAILLCIIILLILVLMFVVWMKRRDKERQAKQLLIDPEDDVRDNILKYDEEGGGEEDQDYDLSQLQQPDTVEPDAIKPVGIRRMDERPIHAEPQYPVRSAAPHPGDIGDFINEGLKAADNDPTAPPYDSLLVFDYEGSGSTAGSLSSLNSSSSGGEQDYDYLNDWGPRFKKLADMYGGGDD

SEQ ID NO: 2691 - protein, 797 aa, Homo sapiens
MAHRCLRLWGRGGCWPRGLQQLLVPGGVGPGEQPCLRTLYRFVTTQARASRNSLLTDIIAAYQRFCSRPPKGFEKYFPNGKNGKKASEPKEVMGEKKESKPAATTRSSGGGGGGGGKRGGKKDDSHWWSRFQKGDIPWDDKDFRMFFLWTALFWGGVMFYLLLKRSGREITWKDFVNNYLSKGVVDRLEVVNKRFVRVTFTPGKTPVDGQYVWFNIGSVDTFERNLETLQQELGIEGENRVPVVYIAESDGSFLLSMLPTVLIIAFLLYTIRRGPAGIGRTGRGMGGLFSVGETTAKVLKDEIDVKFKDVAGCEEAKLEIMEFVNFLKNPKQYQDLGAKIPKGAILTGPPGTGKTLLAKATAGEANVPFITVSGSEFLEMFVGVGPARVRDLFALARKNAPCILFIDEIDAVGRKRGRGNFGGQSEQENTLNQLLVEMDGFNTTTNVVILAGTNRPDILDPALLRPGRFDRQIFIGPPDIKGRASIFKVHLRPLKLDSTLEKDKLARKLASLTPGFSGADVANVCNEAALIAARHLSDSINQKHFEQAIERVIGGLEKKTQVLQPEEKKTVAYHEAGHAVAGWYLEHADPLLKVSIIPRGKGLGYAQYLPKEQYLYTKEQLLDRMCMTLGGRVSEEIFFGRITTGAQDDLRKVTQSAYAQIVQFGMNEKVGQISFDLPRQGDMVLEKPYSEATARLIDDEVRILINDAYKRTVALLTEKKADVEKVALLLLEKEVLDKNDMVELLGPRPFAEKSTYEEFVEGTGSLDEDTSLPEGLKDWNKEREKEKEEPPGEKVAN

SEQ ID NO: 2692 - protein, 288 aa, Homo sapiens
MKPSGEDQAALAAGPWEECFQAAVQLALRAGQIIRKALTEEKRVSTKTSAADLVTETDHLVEDLIISELRERFPSHRFIAEEAAASGAKCVLTHSPTWIIDPIDGTCNFVHRFPTVAVSIGFAVRQELEFGVIYHCTEERLYTGRRGRGAFCNGQRLRVSGETDLSKALVLTEIGPKRDPATLKLFLSNMERLLHAKAHGVRVIGSSTLALCHLASGAADAYYQFGLHCWDLAAATVIIREAGGIVIDTSGGPLDLMACRVVAASTREMAMLIAQALQTINYGRDDEK

SEQ ID NO: 2693 - protein, 755 aa, Homo sapiens
MARKLSVILILTFALSVTNPLHELKAAAFPQTTEKISPNWESGINVDLAISTRQYHLQQLFYRYGENNSLSVEGFRKLLQNIGIDKIKRIHIHHDHDHHSDHEHHSDHERHSDHEHHSEHEHHSDHDHHSHHNHAASGKNKRKALCPDHDSDSSGKDPRNSQGKGAHRPEHASGRRNVKDSVSASEVTSTVYNTVSEGTHFLETIETPRPGKLFPKDVSSSTPPSVTSKSRVSRLAGRKTNESVSEPRKGFMYSRNTNENPQECFNASKLLTSHGMGIQVPLNATEFNYLCPAIINQIDARSCLIHTSEKKAEIPPKTYSLQIAWVGGFIAISIISFLSLLGVILVPLMNRVFFKFLLSFLVALAVGTLSGDAFLHLLPHSHASHHHSHSHEEPAMEMKRGPLFSHLSSQNIEESAYFDSTWKGLTALGGLYFMFLVEHVLTLIKQFKDKKKKNQKKPENDDDVEIKKQLSKYESQLSTNEEKVDTDDRTEGYLRADSQEPSHFDSQQPAVLEEEEVMIAHAHPQEVYNEYVPRGCKNKCHSHFHDTLGQSDDLIHHHHDYHHILHHHHHQNHHPHSHSQRYSREELKDAGVATLAWMVIMGDGLHNFSDGLAIGAAFTEGLSSGLSTSVAVFCHELPHELGDFAVLLKAGMTVKQAVLYNALSAMLAYLGMATGIFIGHYAENVSMWIFALTAGLFMYVALVDMVPEMLHNDASDHGCSRWGYFFLQNAGMLLGFGIMLLISIFEHKIVFRINF

SEQ ID NO: 2694 - protein, 559 aa, Homo sapiens
MRKFAYCKVVLATSLIWVLLDMFLLLYFSECNKCDEKKERGLPAGDVLEPVQKPHEGPGEMGKPVVIPKEDQEKMKEMFKINQFNLMASEMIALNRSLPDVRLEGCKTKVYPDNLPTTSVVIVFHNEAWSTLLRTVHSVINRSPRHMIEEIVLVDDASERDFLKRPLESYVKKLKVPVHVIRMEQRSGLIRARLKGAAVSKGQVITFLDAHCECTVGWLEPLLARIKHDRRTVVCPIIDVISDDTFEYMAGSDMTYGGFNWKLNFRWYPVPQREMDRRKGDRTLPVRTPTMAGGLFSIDRDYFQEIGTYDAGMDIWGGENLEISFRIWQCGGTLEIVTCSHVGHVFRKATPYTFPGGTGQIINKNNRRLAEVWMDEFKNFFYIISPGVTKVDYGDISSRVGLRHKLQCKPFSWYLENIYPDSQIPRHYFSLGEIRNVETNQCLDNMARKENEKVGIFNCHGMGGNQVFSYTANKEIRTDDLCLDVSKLNGPVTMLKCHHLKGNQLWEYDPVKLTLQHVNSNQCLDKATEEDSQVPSIRDCNGSRSQQWLLRNVTLPEIF

SEQ ID NO: 2695 - protein, 701 aa, Homo sapiens
MDLWNLSWFLFLDALLVISGLATPENFDVDGGMDQDIFDINEGLGLDLFEGDIRLDRAQIRNSIIGEKYRWPHTIPYVLEDSLEMNAKGVILNAFERYRLKTCIDFKPWAGETNYISVFKGSGCWSSVGNRRVGKQELSIGANCDRIATVQHEFLHALGFWHEQSRSDRDDYVRIMWDRILSGREHNFNTYSDDISDSLNVPYDYTSVMHYSKTAFQNGTEPTIVTRISDFEDVIGQRMDFSDSDLLKLNQLYNCSSSLSFMDSCSFELENVCGMIQSSGDNADWQRVSQVPRGPESDHSNMGQCQGSGFFMHFDSSSVNVGATAVLESRTLYPKRGFQCLQFYLYNSGSESDQLNIYIREYSADNVDGNLTLVEEIKEIPTGSWQLYHVTLKVTKKFRVVFEGRKGSGASLGGLSIDDINLSETRCPHHIWHIRNFTQFIGSPNGTLYSPPFYSSKGYAFQIYLNLAHVTNAGIYFHLISGANDDQLQWPCPWQQATMTLLDQNPDIRQRMSNQRSITTDPFMTTDNGNYFWDRPSKVGTVALFSNGTQFRRGGGYGTSAFITHERLKSRDFIKGDDVYILLTVEDISHLNSTQIQLTPAPSVQDLCSKTTCKNDGVCTVRDGKAECRCQSGEDWWYMGERCEKRGSTRDTIVIAVSSTVAVFALMLIITLVSVYCTRKKYRERMSSNRPNLTPQNQHAF

SEQ ID NO: 2696 - protein, 595 aa, Homo sapiens
MALTDGGWCLPKRFGAAGADASDSRAFPAREPSTPPSPISSSSSSCSRGGERGPGGASNCGTPQLDTEAAAGPPARSLLLSSYASHPFGAPHGPSAPGVAGPGGNLSSWEDLLLFTDLDQAATASKLLWSSRGAKLSPFAPEQPEEMYQTLAALSSQGPAAYDGAPGGFVHSAAAAAAAAAAASSPVYVPTTRVGSMLPGLPYHLQGSGSGPANHAGGAGAHPGWPQASADSPPYGSGGGAAGGGAAGPGGAGSAAAHVSARFPYSPSPPMANGAAREPGGYAAAGSGGAGGVSGGGSSLAAMGGREPQYSSLSAARPLNGTYHHHHHHHHHHPSPYSPYVGAPLTPAWPAGPFETPVLHSLQSRAGAPLPVPRGPSADLLEDLSESRECVNCGSIQTPLWRRDGTGHYLCNACGLYSKMNGLSRPLIKPQKRVPSSRRLGLSCANCHTTTTTLWRRNAEGEPVCNACGLYMKLHGVPRPLAMKKEGIQTRKRKPKNINKSKTCSGNSNNSIPMTPTSTSSNSDDCSKNTSPTTQPTASGAGAPVMTGAGESTNPENSELKYSGQDGLYIGVSLASPAEVTSSVRPDSWCALALA

SEQ ID NO: 2697 - protein, 1724 aa, Homo sapiens
MPPAVRRSACSMGWLWIFGAALGQCLGYSSQQQRVPFLQPPGQSQLQASYVEFRPSQGCSPGYYRDHKGLYTGRCVPCNCNGHSNQCQDGSGICVNCQHNTAGEHCERCQEGYYGNAVHGSCRACPCPHTNSFATGCVVNGGDVRCSCKAGYTGTQCERCAPGYFGNPQKFGGSCQPCSCNSNGQLGSCHPLTGDCINQEPKDSSPAEECDDCDSCVMTLLNDLATMGEQLRLVKSQLQGLSASAGLLEQMRHMETQAKDLRNQLLNYRSAISNHGSKIEGLERELTDLNQEFETLQEKAQVNSRKAQTLNNNVNRATQSAKELDVKIKNVIRNVHILLKQISGTDGEGNNVPSGDFSREWAEAQRMMRELRNRNFGKHLREAEADKRESQLLLNRIRTWQKTHQGENNGLANSIRDSLNEYEAKLSDLRARLQEAAAQAKQANGLNQENERALGAIQRQVKEINSLQSDFTKYLTTADSSLLQTNIALQLMEKSQKEYEKLAASLNEARQELSDKVRELSRSAGKTSLVEEAEKHARSLQELAKQLEEIKRNASGDELVRCAVDAATAYENILNAIKAAEDAANRAASASESALQTVIKEDLPRKAKTLSSNSDKLLNEAKMTQKKLKQEVSPALNNLQQTLNIVTVQKEVIDTNLTTLRDGLHGIQRGDIDAMISSAKSMVRKANDITDEVLDGLNPIQTDVERIKDTYGRTQNEDFKKALTDADNSVNKLTNKLPDLWRKIESINQQLLPLGNISDNMDRIRELIQQARDAASKVAVPMRFNGKSGVEVRLPNDLEDLKGYTSLSLFLQRPNSRENGGTENMFVMYLGNKDASRDYIGMAVVDGQLTCVYNLGDREAELQVDQILTKSETKEAVMDRVKFQRIYQFARLNYTKGATSSKPETPGVYDMDGRNSNTLLNLDPENVVFYVGGYPPDFKLPSRLSFPPYKGCIELDDLNENVLSLYNFKKTFNLNTTEVEPCRRRKEESDKNYFEGTGYARVPTQPHAPIPTFGQTIQTTVDRGLLFFAENGDRFISLNIEDGKLMVRYKLNSELPKERGVGDAINNGRDHSIQIKIGKLQKRMWINVDVQNTIIDGEVFDFSTYYLGGIPIAIRERFNISTPAFRGCMKNLKKTSGVVRLNDTVGVTKKCSEDWKLVRSASFSRGGQLSFTDLGLPPTDHLQASFGFQTFQPSGILLDHQTWTRNLQVTLEDGYIELSTSDSGGPIFKSPQTYMDGLLHYVSVISDNSGLRLLIDDQLLRNSKRLKHISSSRQSLRLGGSNFEGCISNVFVQRLSLSPEVLDLTSNSLKRDVSLGGCSLNKPPFLMLLKGSTRFNKTKTFRINQLLQDTPVASPRSVKVWQDACSPLPKTQANHGALQFGDIPTSHLLFKLPQELLKPRSQFAVDMQTTSSRGLVFHTGTKNSFMALYLSKGRLVFALGTDGKKLRIKSKEKCNDGKWHTVVFGHDGEKGRLVVDGLRAREGSLPGNSTISIRAPVYLGSPPSGKPKSLPTNSFVGCLKNFQLDSKPLYTPSSSFGVSSCLGGPLEKGIYFSEEGGHVVLAHSVLLGPEFKLVFSIRPRSLTGILIHIGSQPGKHLCVYLEAGKVTASMDSGAGGTSTSVTPKQSLCDGQWHSVAVTIKQHILHLELDTDSSYTAGQIPFPPASTQEPLHLGGAPANLTTLRIPVWKSFFGCLRNIHVNHIPVPVTEALEVQGPVSLNGCPDQ

SEQ ID NO: 2698 - protein, 657 aa, Homo sapiens
MGEEDYYLELCERPVQFEKANPVNCVFFDEANKQVFAVRSGGATGVVVKGPDDRNPISFRMDDKGEVKCIKFSLENKILAVQRTSKTVDFCNFIPDNSQLEYTQECKTKNANILGFCWTSSTEIVFITDQGIEFYQVLPEKRSLKLLKSHNLNVNWYMYCPESAVILLSTTVLENVLQPFHFRAGTMSKLPKFEIELPAAPKSTKPSLSERDIAMATIYGQLYVLFLRHHSRTSNSTGAEVVLYHLPREGACKKMHILKLNRTGKFALNVVDNLVVVHHQDTETSVIFDIKLRGEFDGSVTFHHPVLPARSIQPYQIPITGPAAVTSQSPVPCKLYSSSWIVFQPDIIISASQGYLWNLQVKLEPIVNLLPDKGRLMDFLLQRKECKMVILSVCSQMLSESDRASLPVIATVFDKLNHEYKKYLDAEQSYAMAVEAGQSRSSPLLKRPVRTQAVLDQSDVYTHVLSAFVEKKEMPHKFVIAVLMEYIRSLNQFQIAVQHYLHELVIKTLVQHNLFYMLHQFLQYHVLSDSKPLACLLLSLESFYPPAHQLSLDMLKRLSTANDEIVEVLLSKHQVLAALRFIRGIGGHDNISARKFLDAAKQTEDNMLFYTIFRFFEQRNQRLRGSPNFTPGEHCEEHVAFFKQIFGDQALMRPTTF

SEQ ID NO: 2699 - protein, 1278 aa, Homo sapiens
MTARGLALGLLLLLLCPAQVFSQSCVWYGECGIAYGDKRYNCEYSGPPKPLPKDGYDLVQELCPGFFFGNVSLCCDVRQLQTLKDNLQLPLQFLSRCPSCFYNLLNLFCELTCSPRQSQFLNVTATEDYVDPVTNQTKTNVKELQYYVGQSFANAMYNACRDVEAPSSNDKALGLLCGKDADACNATNWIEYMFNKDNGQAPFTITPVFSDFPVHGMEPMNNATKGCDESVDEVTAPCSCQDCSIVCGPKPQPPPPPAPWTILGLDAMYVIMWITYMAFLLVFFGAFFAVWCYRKRYFVSEYTPIDSNIAFSVNASDKGEASCCDPVSAAFEGCLRRLFTRWGSFCVRNPGCVIFFSLVFITACSSGLVFVRVTTNPVDLWSAPSSQARLEKEYFDQHFGPFFRTEQLIIRAPLTDKHIYQPYPSGADVPFGPPLDIQILHQVLDLQIAIENITASYDNETVTLQDICLAPLSPYNTNCTILSVLNYFQNSHSVLDHKKGDDFFVYADYHTHFLYCVRAPASLNDTSLLHDPCLGTFGGPVFPWLVLGGYDDQNYNNATALVITFPVNNYYNDTEKLQRAQAWEKEFINFVKNYKNPNLTISFTAERSIEDELNRESDSDVFTVVISYAIMFLYISLALGHMKSCRRLLVDSKVSLGIAGILIVLSSVACSLGVFSYIGLPLTLIVIEVIPFLVLAVGVDNIFILVQAYQRDERLQGETLDQQLGRVLGEVAPSMFLSSFSETVAFFLGALSVMPAVHTFSLFAGLAVFIDFLLQITCFVSLLGLDIKRQEKNRLDIFCCVRGAEDGTSVQASESCLFRFFKNSYSPLLLKDWMRPIVIAIFVGVLSFSIAVLNKVDIGLDQSLSMPDDSYMVDYFKSISQYLHAGPPVYFVLEEGHDYTSSKGQNMVCGGMGCNNDSLVQQIFNAAQLDNYTRIGFAPSSWIDDYFDWVKPQSSCCRVDNITDQFCNASVVDPACVRCRPLTPEGKQRPQGGDFMRFLPMFLSDNPNPKCGKGGHAAYSSAVNILLGHGTRVGATYFMTYHTVLQTSADFIDALKKARLIASNVTETMGINGSAYRVFPYSVFYVFYEQYLTIIDDTIFNLGVSLGAIFLVTMVLLGCELWSAVIMCATIAMVLVNMFGVMWLWGISLNAVSLVNLVMSCGISVEFCSHITRAFTVSMKGSRVERAEEALAHMGSSVFSGITLTKFGGIVVLAFAKSQIFQIFYFRMYLAMVLLGATHGLIFLPVLLSYIGPSVNKAKSCATEERYKGTERERLLNF

SEQ ID NO: 2700 - protein, 1976 aa, Homo sapiens
MAQRTGLEDPERYLFVDRAVIYNPATQADWTAKKLVWIPSERHGFEAASIKEERGDEVMVELAENGKKAMVNKDDIQKMNPPKFSKVEDMAELTCLNEASVLHNLKDRYYSGLIYTYSGLFCVVINPYKNLPIYSENIIEMYRGKKRHEMPPHIYAISESAYRCMLQDREDQSILCTGESGAGKTENTKKVIQYLAHVASSHKGRKDHNIPGELERQLLQANPILESFGNAKTVKNDNSSRFGKFIRINFDVTGYIVGANIETYLLEKSRAVRQAKDERTFHIFYQLLSGAGEHLKSDLLLEGFNNYRFLSNGYIPIPGQQDKDNFQETMEAMHIMGFSHEEILSMLKVVSSVLQFGNISFKKERNTDQASMPENTVAQKLCHLLGMNVMEFTRAILTPRIKVGRDYVQKAQTKEQADFAVEALAKATYERLFRWLVHRINKALDRTKRQGASFIGILDIAGFEIFELNSFEQLCINYTNEKLQQLFNHTMFILEQEEYQREGIEWNFIDFGLDLQPCIDLIERPANPPGVLALLDEECWFPKATDKTFVEKLVQEQGSHSKFQKPRQLKDKADFCIIHYAGKVDYKADEWLMKNMDPLNDNVATLLHQSSDRFVAELWKDVDRIVGLDQVTGMTETAFGSAYKTKKGMFRTVGQLYKESLTKLMATLRNTNPNFVRCIIPNHEKRAGKLDPHLVLDQLRCNGVLEGIRICRQGFPNRIVFQEFRQRYEILTPNAIPKGFMDGKQACERMIRALELDPNLYRIGQSKIFFRAGVLAHLEEERDLKITDIIIFFQAVCRGYLARKAFAKKQQQLSALKVLQRNCAAYLKLRHWQWWRVFTKVKPLLQVTRQEEELQAKDEELLKVKEKQTKVEGELEEMERKHQQLLEEKNILAEQLQAETELFAEAEEMRARLAAKKQELEEILHDLESRVEEEEERNQILQNEKKKMQAHIQDLEEQLDEEEGARQKLQLEKVTAEAKIKKMEEEILLLEDQNSKFIKEKKLMEDRIAECSSQLAEEEEKAKNLAKIRNKQEVMISDLEERLKKEEKTRQELEKAKRKLDGETTDLQDQIAELQAQIDELKLQLAKKEEELQGALARGDDETLHKNNALKVVRELQAQIAELQEDFESEKASRNKAEKQKRDLSEELEALKTELEDTLDTTAAQQELRTKREQEVAELKKALEEETKNHEAQIQDMRQRHATALEELSEQLEQAKRFKANLEKNKQGLETDNKELACEVKVLQQVKAESEHKRKKLDAQVQELHAKVSEGDRLRVELAEKASKLQNELDNVSTLLEEAEKKGIKFAKDAASLESQLQDTQELLQEETRQKLNLSSRIRQLEEEKNSLQEQQEEEEEARKNLEKQVLALQSQLADTKKKVDDDLGTIESLEEAKKKLLKDAEALSQRLEEKALAYDKLEKTKNRLQQELDDLTVDLDHQRQVASNLEKKQKKFDQLLAEEKSISARYAEERDRAEAEAREKETKALSLARALEEALEAKEEFERQNKQLRADMEDLMSSKDDVGKNVHELEKSKRALEQQVEEMRTQLEELEDELQATEDAKLRLEVNMQAMKAQFERDLQTRDEQNEEKKRLLIKQVRELEAELEDERKQRALAVASKKKMEIDLKDLEAQIEAANKARDEVIKQLRKLQAQMKDYQRELEEARASRDEIFAQSKESEKKLKSLEAEILQLQEELASSERARRHAEQERDELADEITNSASGKSALLDEKRRLEARIAQLEEELEEEQSNMELLNDRFRKTTLQVDTLNAELAAERSAAQKSDNARQQLERQNKELKAKLQELEGAVKSKFKATISALEAKIGQLEEQLEQEAKERAAANKLVRRTEKKLKEIFMQVEDERRHADQYKEQMEKANARMKQLKRQLEEAEEEATRANASRRKLQRELDDATEANEGLSREVSTLKNRLRRGGPISFSSSRSGRRQLHLEGASLELSDDDTESKTSDVNETQPPQSE

SEQ ID NO: 2701 - protein, 291 aa, Homo sapiens
MTKEYQDLQHLDNEESDHHQLRKGPPPPQPLLQRLCSGPRLLLLSLGLSLLLLVVVCVIGSQNSQLQEELRGLRETFSNFTASTEAQVKGLSTQGGNVGRKMKSLESQLEKQQKDLSEDHSSLLLHVKQFVSDLRSLSCQMAALQGNGSERTCCPVNWVEHERSCYWFSRSGKAWADADNYCRLEDAHLVVVTSWEEQKFVQHHIGPVNTWMGLHDQNGPWKWVDGTDYETGFKNWRPEQPDDWYGHGLGGGEDCAHFTDDGRWNDDVCQRPYRWVCETELDKASQEPPLL

SEQ ID NO: 2702 - protein, 393 aa, Homo sapiens [sequence omitted]

SEQ ID NO: 2703 - protein, 204 aa, Homo sapiens
MAEQEPTAEQLAQIAAENEEDEHSVNYKPPAQKSIQEIQELDKDDESLRKYKEALLGRVAVSADPNVPNVVVTGLTLVCSSAPGPLELDLTGDLESFKKQSFVLKEGVEYRIKISFRVNREIVSGMKYIQHTYRKGVKIDKTDYMVGSYGPRAEEYEFLTPVEEAPKGMLARGSYSIKSRFTDDDKTDHLSWEWNLTIKKDWKD

SEQ ID NO: 2704 - protein, 309 aa, Homo sapiens
MEELLRRELGCSSVRATGHSGGGCISQGRSYDTDQGRVFVKVNPKAEARRMFEGEMASLTAILKTNTVKVPKPIKVLDAPGGGSVLVMEHMDMRHLSSHAAKLGAQLADLHLDNKKLGEMRLKEAGTVGRGGGQEERPFVARFGFDVVTCCGYLPQVNDWQEDWVVFYARQRIQPQMDMVEKESGDREALQLWSALQLKIPDLFRDLEIIPALLHGDLWGGNVAEDSSGPVIFDPASFYGHSEYELAIAGMFGGFSSSFYSAYHGKIPKAPGFEKRLQLYQLFHYLNHWNHFGSGYRGSSLNIMRNLVK

SEQ ID NO: 2705 - protein, 517 aa, Homo sapiens
MAAQLLEEKLTCAICLGLYQDPVTLPCGHNFCGACIRDWWDRCGKACPECREPFPDGAELRRNVALSGVLEVVRAGPARDPGPDPGPGPDPAARCPRHGRPLELFCRTEGRCVCSVCTVRECRLHERALLDAERLKREAQLRASLEVTQQQATQAEGQLLELRKQSSQIQNSACILASWVSGKFSSLLQALEIQHTTALRSIEVAKTQALAQARDEEQRLRVHLEAVARHGCRIRELLEQVDEQTFLQESQLLQPPGPLGPLTPLQWDEDQQLGDLKQLLSRLCGLLLEEGSHPGAPAKPVDLAPVEAPGPLAPVPSTVCPLRRKLWQNYRNLTFDPVSANRHFYLSRQDQQVKHCRQSRGPGGPGSFELWQVQCAQSFQAGHHYWEVRASDHSVTLGVSYPQLPRCRLGPHTDNIGRGPCSWGLCVQEDSLQAWHNGEAQRLPGVSGRLLGMDLDLASGCLTFYSLEPQTQPLYTFHALFNQPLTPVFWLLEGRTLTLCHQPGAVFPLGPQEEVLS

SEQ ID NO: 2706 - protein, 389 aa, Homo sapiens
MELSAVGERVFAAEALLKRRIRKGRMEYLVKWKGWSQKYSTWEPEENILDARLLAAFEEREREMELYGPKKRGPKPKTFLLKAQAKAKAKTYEFRSDSARGIRIPYPGRSPQDLASTSRAREGLRNMGLSPPASSTSTSSTCRAEAPRDRDRDRDRDRERDRERERERERERERERERERGTSRVDDKPSSPGDSSKKRGPKPRKELPDPSQRPLGEPSAGLGEYLKGRKLDDTPSGAGKFPAGHSVIQLARRQDSDLVQCGVTSPSSAEATGKLAVDTFPARVIKHRAAFLEAKGQGALDPNGTRVRHGSGPPSSGGGLYRDMGAQGGRPSLIARIPVARILGDPEEESWSPSLTNLEKVVVTDVTSNFLTVTIKESNTDQGFFKEKR

SEQ ID NO: 2707 - protein, 248 aa, Homo sapiens
MQTCPLAFPGHVSQALGTLLFLAASLSAQNEGWDSPICTEGVVSVSWGENTVMSCNISNAFSHVNIKLRAHGQESAIFNEVAPGYFSRDGWQLQVQGGVAQLVIKGARDSHAGLYMWHLVGHQRNNRQVTLEVSGAEPQSAPDTGFWPVPAVVTAVFILLVALVMFAWYRCRCSQQRREKKFFLLEPQMKVAALRAGAQQGLSRASAELWTPDSEPTPRPLALVFKPSPLGALELLSPQPLFPYAADP

SEQ ID NO: 2708 - protein, 560 aa, Homo sapiens
MELPAVGEHVFAVESIEKKRIRKGRVEYLVKWRGWSPKYNTWEPEENILDPRLLIAFQNRERQEQLMGYRKRGPKPKPLVVQVPTFARRSNVLTGLQDSSTDNRAKLDLGAQGKGQGHQYELNSKKHHQYQPHSKERAGKPPPPGKSGKYYYQLNSKKHHPYQPDPKMYDLQYQGGHKEAPSPTCPDLGAKSHPPDKWAQGAGAKGYLGAVKPLAGAAGAPGKGSEKGPPNGMMPAPKEAVTGNGIGGKMKIVKNKNKNGRIVIVMSKYMENGMQAVKIKSGEVAEGEARSPSHKKRAADERHPPADRTFKKAAGAEEKKVEAPPKRREEEVSGVSDPQPQDAGSRKLSPTKEAFGEQPLQLTTKPDLLAWDPARNTHPPSHHPHPHPHHHHHHHHHHHHAVGLNLSHVRKRCLSETHGEREPCKKRLTARSISTPTCLGGSPAAERPADLPPAAALPQPEVILLDSDLDEPIDLRCVKTRSEAGEPPSSLQVKPETPASAAVAVAAAAAPTTTAEKPPAEAQDEPAESLSEFKPFFGNIIITDVTANCLTVTFKEYVTV

SEQ ID NO: 2709 - protein, 669 aa, Homo sapiens
MGSNSSRIGDLPKNEYLKKLSGTESISENDPFWNQLLSFSFPAPTSSSELKLLEEATISVCRSLVENNPRTGNLGALIKVFLSRTKELKLSAECQNHIFIWQTHNALFIICCLLKVFICQMSEEELQLHFTYEEKSPGNYSSDSEDLLEELLCCLMQLITDIPLLDITYEISVEAISTMVVFLSCQLFHKEVLRQSISHKYLMRGPCLPYTSKLVKTLLYNFIRQEKPPPPGAHVFPQQSDGGGLLYGLASGVATGLWTVFTLGGVGSKAAASPELSSPLANQSLLLLLVLANLTDASDAPNPYRQAIMSFKNTQDSSPFPSSIPHAFQINFNSLYTALCEQQTSDQATLLLYTLLHQNSNIRTYMLARTDMENLVLPILEILYHVEERNSHHVYMALIILLILTEDDGFNRSIHEVILKNITWYSERVLTEISLGSLLILVVIRTIQYNMTRTRDKYLHTNCLAALANMSAQFRSLHQYAAQRIISLFSLLSKKHNKVLEQATQSLRGSLSSNDVPLPDYAQDLNVIEEVIRMMLEIINSCLTNSLHHNPNLVYALLYKRDLFEQFRTHPSFQDIMQNIDLVISFFSSRLLQAGAELSVERVLEIIKQGVVALPKDRLKKFPELKFKYVEEEQPEEFFIPYVWSLVYNSAVGLYWNPQDIQLFTMDSD

SEQ ID NO: 2710 - protein, 605 aa, Homo sapiens
MAEDWLDCPALGPGWKRREVFRKSGATCGRSDTYYQSPTGDRIRSKVELTRYLGPACDLTLFDFKQGILCYPAPKAHPVAVASKKRKKPSRPAKTRKRQVGPQSGEVRKEAPRDETKADTDTAPASFPAPGCCENCGISFSGDGTQRQRLKTLCKDCRAQRIAFNREQRMFKRVGCGECAACQVTEDCGACSTCLLQLPHDVASGLFCKCERRRCLRIVERSRGCGVCRGCQTQEDCGHCPICLRPPRPGLRRQWKCVQRRCLRGKHARRKGGCDSKMAARRRPGAQPLPPPPPSQSPEPTEPHPRALAPSPPAEFIYYCVDEDELQPYTNRRQNRKCGACAACLRRMDCGRCDFCCDKPKFGGSNQKRQKCRWRQCLQFAMKRLLPSVWSESEDGAGSPPPYRRRKRPSSARRHHLGPTLKPTLATRTAQPDHTQAPTKQEAGGGFVLPPPGTDLVFLREGASSPVQVPGPVAASTEALLQEAQCSGLSWVVALPQVKQEKADTQDEWTPGTAVLTSPVLVPGCPSKAVDPGLPSVKQEPPDPEEDKEENKDDSASKLAPEEEAGGAGTPVITEIFSLGGTRFRDTAVWLPRSKDLKKPGARKQ

SEQ ID NO: 2711 - protein, 586 aa, Homo sapiens
MAEDWLDCPALGPGWKRREVFRKSGATCGRSDTYYQSPTGDRIRSKVELTRYLGPACDLTLFDFKQGILCYPAPKAHPVAVASKKRKKPSRPAKTRKRQVGPQSGEVRKEAPRDETKADTDTAPASFPAPGCCENCGISFSGDGTQRQRLKTLCKDCRAQRIAFNREQRMFKRVGCGECAACQVTEDCGACSTCLLQLPHDVASGLFCKCERRRCLRIVERSRGCGVCRGCQTQEDCGHCPICLRPPRPGLRRQWKCVQRRCLRGKHARRKGGCDSKMAARRRPGAQPLPPPPPSQSPEPTEPQPYTNRRQNRKCGACAACLRRMDCGRCDFCCDKPKFGGSNQKRQKCRWRQCLQFAMKRLLPSVWSESEDGAGSPPPYRRRKRPSSARRHHLGPTLKPTLATRTAQPDHTQAPTKQEAGGGFVLPPPGTDLVFLREGASSPVQVPGPVAASTEALLQAVDPGLPSVKQEPPDPEEDKEENKDDSASKLAPEEEAGGAGTPVITEIFSLGGTRFRDTAVWLPSLQGRHSGREDGCKVWETEDTVEPTSTSWNPRGWPGTHVSLSPPPASMMWVSCRRSWCPSSQS

SEQ ID NO: 2712 - protein, 299 aa, Homo sapiens
MAPRARRRRPLFALLLLCALLARLQVALQIAPPCTSEKHYEHLGRCCNKCEPGKYMSSKCTTTSDSVCLPCGPDEYLDSWNEEDKCLLHKVCDTGKALVAVVAGNSTTPRRCACTAGYHWSQDCECCRRNTECAPGLGAQHPLQLNKDTVCKPCLAGYFSDAFSSTDKCRPWTNCTFLGKRVEHHGTEKSDAVCSSSLPARKPPNGNVTGNSNSTFISSGQVMNFKGDIIVVYVSQTSQEGAAAAAEPMGRPVQEETLARRDSFAGNGPRFPDPCGGPEGLREPEKASRPVQEQGGAKA

SEQ ID NO: 2713 - protein, 1255 aa, Homo sapiens [sequence omitted]

SEQ ID NO: 2714 - protein, 258 aa, Homo sapiens
MLPLCLVAALLLAAGPGPSLGDEAIHCPPCSEEKLARCRPPVGCEELVREPGCGCCATCALGLGMPCGVYTPRCGSGLRCYPPRGVEKPLHTLMHGQGVCMELAEIEAIQESLQPSDKDEGDHPNNSFSPCSAHDRRCLQKHFAKIRDRSTSGGKMKVNGAPREDARPVPQGSCQSELHRALERLAASQSRTHEDLYIIPIPNCDRNGNFHPKQCHPALDGQRGKCWCVDRKTGVKLPGGLEPKGELDCHQLADSFRE

SEQ ID NO: 2715 - protein, 142 aa, Homo sapiens
MSYMLPHLHNGWQVDQAILSEEDRVVVIRFGHDWDPTCMKMDEVLYSIAEKVKNFAVIYLVDITEVPDFNKMYELYDPCTVMFFFRNKHIMIDLGTGNNNKINWAMEDKQEMVDIIETVYRGARKGRGLVVSPKDYSTKYRY

SEQ ID NO: 2716 - protein, 692 aa, Homo sapiens
MDQGYGGYGAWSAGPANTQGAYGTGVASWQGYENYNYYGAQNTSVTTGATYSYGPASWEAAKANDGGLAAGAPAMHMASYGPEPCTDNSDSLIAKINQRLDMMSKEGGRGGSGGGGEGIQDRESSFRFQPFESYDSRPCLPEHNPYRPSYSYDYEFDLGSDRNGSFGGQYSECRDPARERGSLDGFMRGRGQGRFQDRSNPGTFMRSDPFVPPAASSEPLSTPWNELNYVGGRGLGGPSPSRPPPSLFSQSMAPDYGVMGMQGAGGYDSTMPYGCGRSQPRMRDRDRPKRRGFDRFGPDGTGRKRKQFQLYEEPDTKLARVDSEGDFSENDDAAGDFRSGDEEFKGEDELCDSGRQRGEKEDEDEDVKKRREKQRRRDRTRDRAADRIQFACSVCKFRSFDDEEIQKHLQSKFHKETLRFISTKLPDKTVEFLQEYIVNRNKKIEKRRQELMEKETAKPKPDPFKGIGQEHFFKKIEAAHCLACDMLIPAQPQLLQRHLHSVDHNHNRRLAAEQFKKTSLHVAKSVLNNRHIVKMLEKYLKGEDPFTSETVDPEMEGDDNLGGEDKKETPEEVAADVLAEVITAAVRAVDGEGAPAPESSGEPAEDEGPTDTAEAGSDPQAEQLLEEQVPCGTAHEKGVPKARSEAAEAGNGAETMAAEAESAQTRVAPAPAAADAEVEQTDAESKDAVPTE

SEQ ID NO: 2717 - protein, 531 aa, Homo sapiens
MLPITDRLLHLLGLEKTAFRIYAVSTLLLFLLFFLFRLLLRFLRLCRSFYITCRRLRCFPQPPRRNWLLGHLGMYLPNEAGLQDEKKVLDNMHHVLLVWMGPVLPLLVLVHPDYIKPLLGASAAIAPKDDLFYGFLKPWLGDGLLLSKGDKWSRHRRLLTPAFHFDILKPYMKIFNQSADIMHAKWRHLAEGSAVSLDMFEHISLMTLDSLQKCVFSYNSNCQEKMSDYISAIIELSALSVRRQYRLHHYLDFIYYRSADGRRFRQACDMVHHFTTEVIQERRRALRQQGAEAWLKAKQGKTLDFIDVLLLARDEDGKELSDEDIRAEADTFMFEGHDTTSSGISWMLFNLAKYPEYQEKCREEIQEVMKGRELEELEWDDLTQLPFTTMCIKESLRQYPPVTLVSRQCTEDIKLPDGRIIPKGIICLVSIYGTHHNPTVWPDSKVYNPYRFDPDNPQQRSPLAYVPFSAGPRNCIGQSFAMAELRVVVALTLLRFRLSVDRTRKVRRKPELILRTENGLWLKVEPLPPRA

SEQ ID NO: 2718 - protein, 780 aa, Homo sapiens
MAAVDLEKLRASGAGKAIGVLTSGGDAQGMNAAVRAVTRMGIYVGAKVFLIYEGYEGLVEGGENIKQANWLSVSNIIQLGGTIIGSARCKAFTTREGRRAAAYNLVQHGITNLCVIGGDGSLTGANIFRSEWGSLLEELVAEGKISETTARTYSHLNIAGLVGSIDNDFCGTDMTIGTDSALHRIMEVIDAITTTAQSHQRTFVLEVMGRHCGYLALVSALASGADWLFIPEAPPEDGWENFMCERLGETRSRGSRLNIIIIAEGAIDRNGKPISSSYVKDLVVQRLGFDTRVTVLGHVQRGGTPSAFDRILSSKMGMEAVMALLEATPDTPACVVTLSGNQSVRLPLMECVQMTKEVQKAMDDKRFDEATQLRGGSFENNWNIYKLLAHQKPPKEKSNFSLAILNVGAPAAGMNAAVRSAVRTGISHGHTVYVVHDGFEGLAKGQVQEVGWHDVAGWLGRGGSMLGTKRTLPKGQLESIVENIRIYGIHALLVVGGFEAYEGVLQLVEARGRYEELCIVMCVIPATISNNVPGTDFSLGSDTAVNAAMESCDRIKQSASGTKRRVFIVETMGGYCGYLATVTGIAVGADAAYVFEDPFNIHDLKVNVEHMTEKMKTDIQRGLVLRNEKCHDYYTTEFLYNLYSSEGKGVFDCRTNVLGHLQQGGAPTPFDRNYGTKLGVKAMLWLSEKLREVYRKGRVFANAPDSACVIGLKKKAVAFSPVTELKKDTDFEHRMPREQWWLSLRLMLKMLAQYRISMAAYVSGELEHVTRRTLSMDKGF

SEQ ID NO: 2719 - protein, 669 aa, Homo sapiens
MDLRTAVYNAARDGKLQLLQKLLSGRSREELDELTGEVAGGGTPLLIAARYGHLDVVEYLVDRCGASVEAGGSVHFDGETIEGAPPLWAASAAGHLDVVRSLLRRGASVNRTTRTNSTPLRAACFDGHLEVVRYLVGEHQADLEVANRHGHTCLMISCYKGHREIARYLLEQGAQVNRRSAKGNTALHDCAESGSLEILQLLLGCKARMERDGYGMTPLLAASVTGHTNIVEYLIQEQPGQEQVAGGEAQPGLPQEDPSTSQGCAQPQGAPCCSSSPEEPLNGESYESCCPTSREAAVEALELLGATYVDKKRDLLGALKHWRRAMELRHQGGEYLPKPEPPQLVLAYDYSREVNTTEELEALITDPDEMRMQALLIRERILGPSHPDTSYYIRYRGAVYADSGNFERCIRLWKYALDMQQSNLEPLSPMTASSFLSFAELFSYVLQDRAAKGSLGTQIGFADLMGVLTKGVREVERALQLPREPGDSAQFTKALAIILHLLYLLEKVECTPSQEHLKHQTVYRLLKCAPRGKNGFTPLHMAVDKDTTNVGRYPVGRFPSLHVVKVLLDCGADPDSRDFDNNTPLHIAAQNNCPAIMNALIEAGAHMDATNAFKKTAYELLDEKLLARGTMQPFNYVTLQCLAARALDKNKIPYKGFIPEDLEAFIELH

SEQ ID NO: 2720 - protein, 384 aa, Homo sapiens
MARALVQLWAICMLRVALATVYFQEEFLDGEHWRNRWLQSTNDSRFGHFRLSSGKFYGHKEKDKGLQTTQNGRFYAISARFKPFSNKGKTLVIQYTVKHEQKMDCGGGYIKVFPADIDQKNLNGKSQYYIMFGPDICGFDIKKVHVILHFKNKYHENKKLIRCKVDGFTHLYTLILRPDLSYDVKIDGQSIESGSIEYDWNLTSLKKETSPAESKDWEQTKDNKAQDWEKHFLDASTSKQSDWNGDLDGDWPAPMLQKPPYQDGLKPEGIHKDVWLHRKMKNTDYLTQYDLSEFENIGAIGLELWQVRSGTIFDNFLITDDEEYADNFGKATWGETKGPEREMDAIQAKEEMKKAREEEEEELLSGKINRHEHYFNQFHRRNEL

SEQ ID NO: 2721 - protein, 368 aa, Homo sapiens
MSVAGLKKQFYKASQLVSEKVGGAEGTKLDDDFKEMEKKVDVTSKAVTEVLARTIEYLQPNPASRAKLTMLNTVSKIRGQVKNPGYPQSEGLLGECMIRHGKELGGESNFGDALLDAGESMKRLAEVKDSLDIEVKQNFIDPLQNLCEKDLKEIQHHLKKLEGRRLDFDYKKKRQGKIPDEELRQALEKFEESKEVAETSMHNLLETDIEQVSQLSALVDAQLDYHRQAVQILDELAEKLKRRMREASSRPKREYKPKPREPFDLGEPEQSNGGFPCTTAPKIAASSSFRSSDKPIRTPSRSMPPLDQPSCKALYDFEPENDGELGFHEGDVITLTNQIDENWYEGMLDGQSGFFPLSYVEVLVPLPQ

SEQ ID NO: 2722 - protein, 209 aa, Homo sapiens
MEQPRKAVVVTGFGPFGEHTVNASWIAVQELEKLGLGDSVDLHVYEIPVEYQTVQRLIPALWEKHSPQLVVHVGVSGMATTVTLEKCGHNKGYKGLDNCRFCPGSQCCVEDGPESIDSIIDMDAVCKRVTTLGLDVSVTISQDAGRYLCDFTYYTSLYQSHGRSAFVHVPPLGKPYNADQLGRALRAIIEEMLDLLEQSEGKINYCHKH

SEQ ID NO: 2723 - protein, 476 aa, Homo sapiens
MVSKRIAQETFDAAVRENIEEFAMGPEEAVKEAVEQFESQGVDLSNIVKTAPKVSADGSQEPTHDILQMLSDLQESVASSRPQEVSAYLTRFCDQCKQDKACRFLAAQKGAYPIIFTAWKLATAGDQGLLLQSLNALSVLTDGQPDLLDAQGLQLLVATLTQNADEADLTCSGIRCVRHACLKHEQNRQDLVKAGVLPLLTGAITHHGHHTDVVREACWALRVMTFDDDIRVPFGHAHNHAKMIVQENKGLKVLIEATKAFLDNPGILSELCGTLSRLAIRNEFCQEVVDLGGLSILVSLLADCNDHQMRDQSGVQELVKQVLSTLRAIAGNDDVKDAIVRAGGTESIVAAMTQHLTSPQVCEQSCAALCFLALRKPDNSRIIVEGGGAVAALQAMKAHPQKAGVQKQACMLIRNLVAHGQAFSKPILDLGAEALIMQARSAHRDCEDVAKAALRDLGCHVELRELWTGQRGNLAP

SEQ ID NO: 2724 - protein, 682 aa, Homo sapiens
MTKSKEAVTFKDVAVVFSEEELQLLDLAQRKLYRDVMLENFRNVVSVGHQSTPDGLPQLEREEKLWMMKMATQRDNSSGAKNLKEMETLQEVGLRYLPHEELFCSQIWQQITRELIKYQDSVVNIQRTGCQLEKRDDLHYKDEGFSNQSSHLQVHRVHTGEKPYKGEHCVKSFSWSSHLQINQRAHAGEKPYKCEKCDNAFRRFSSLQAHQRVHSRAKSYTNDASYRSFSQRSHLPHHQRVPTGENPYKYEECGRNVGKSSHCQAPLIVHTGEKPYKCEECGVGFSQRSYLQVHLKVHTGKKPYKCEECGKSFSWRSRLQAHERIHTGEKPYKCNACGKSFSYSSHLNIHCRIHTGEKPYKCEECGKGFSVGSHLQAHQISHTGEKPYKCEECGKGFCRASNLLDHQRGHTGEKPYQCDACGKGFSRSSDFNIHFRVHTGEKPYKCEECGKGFSQASNLLAHQRGHTGEKPYKCGTCGKGFSRSSDLNVHCRIHTGEKPYKCERCGKAFSQFSSLQVHQRVHTGEKPYQCAECGKGFSVGSQLQAHQRCHTGEKPYQCEECGKGFCRASNFLAHRGVHTGEKPYRCDVCGKRFRQRSYLQAHQRVHTGERPYKCEECGKVFSWSSYLQAHQRVHTGEKPYKCEECGKGFSWSSSLIIHQRVHADDEGDKDFPSSEDSHRKTR

SEQ ID NO: 2725 - protein, 445 aa, Homo sapiens
MAVAIAAARVWRLNRGLSQAALLLLRQPGARGLARSHPPRQQQQFSSLDDKPQFPGASAEFIDKLEFIQPNVISGIPIYRVMDRQGQIINPSEDPHLPKEKVLKLYKSMTLLNTMDRILYESQRQGRISFYMTNYGEEGTHVGSAAALDNTDLVFGQYREAGVLMYRDYPLELFMAQCYGNISDLGKGRQMPVHYGCKERHFVTISSPLATQIPQAVGAAYAAKRANANRVVICYFGEGAASEGDAHAGFNFAATLECPIIFFCRNNGYAISTPTSEQYRGDGIAARGPGYGIMSIRVDGNDVFAVYNATKEARRRAVAENQPFLIEAMTYRIGHHSTSDDSSAYRSVDEVNYWDKQDHPISRLRHYLLSQGWWDEEQEKAWRKQSRRKVMEAFEQAERKPKPNPNLLFSDVYQEMPAQLRKQQESLARHLQTYGEHYPLDHFDK

SEQ ID NO: 2726 - protein, 385 aa, Homo sapiens
MYAKGGKGSAVPSDSQAREKLALYVYEYLLHIGAQKSAQTFLSEIRWEKNITLGEPPGFLHSWWCVFWDLYCAAPDRREACEHSGEAKAFQDYSAAAAPSPVMGSMAPGDTMAAGSMAAGFFQGPPGSQPSPHNPNAPMMGPHGQPFMSPRFPGGPRPTLRMPSQPPAGLPGSQPLLPGAMEPSPRAQGHPSMGGPMQRVTPPRGMASVGPQSYGGGMRPPPNSLAGPGLPAMNMGPGVRGPWASPSGNSIPYSSSSPGSYTGPPGGGGPPGTPIMPSPGDSTNSSENMYTIMNPIGQGAGRANFPLGPGPEGPMAAMSAMEPHHVNGSLGSGDMDGLPKSSPGAVAGLSNAPGTPRDDGEMAAAGTFLHPFPSESYSPGMTMSV

SEQ ID NO: 2727 - protein, 520 aa, Homo sapiens
MSESGHSQPGLYGIERRRRWKEPGSGGPQNLSGPGGRERDYIAPWERERRDASEETSTSVMQKTPIILSKPPAERSKQPPPPTAPAAPPAPAPLEKPIVLMKPREEGKGPVAVTGASTPEGTAPPPPAAPAPPKGEKEGQRPTQPVYQIQNRGMGTAAPAAMDPVVGQAKLLPPERMKHSIKLVDDQMNWCDSAIEYLLDQTDVLVVGVLGLQGTGKSMVMSLLSANTPEEDQRTYVFRAQSAEMKERGGNQTSGIDFFITQERIVFLDTQPILSPSILDHLINNDRKLPPEYNLPHTYVEMQSLQIAAFLFTVCHVVIVVQDWFTDLSLYRFLQTAEMVKPSTPSPSHESSSSSGSDEGTEYYPHLVFLQNKARREDFCPRKLRQMHLMIDQLMAHSHLRYKGTLSMLQCNVFPGLPPDFLDSEVNLFLVPFMDSEAESENPPRAGPGSSPLFSLLPGYRGHPSFQSLVSKLRSQVMSMARPQLSHTILTEKNWFHYAARIWDGVRKSSALAEYSRLLA

SEQ ID NO: 2728 - protein, 557 aa, Homo sapiens
MMVVLLGATTLVLVAVAPWVLSAAAGGKNLKSPQKVEVDIIDDNFILRWNRSDESVGNVTFSFDYQKTGMDNWIKLSGCQNITSTKCNFSSLKLNVYEEIKLRIRAEKENTSSWYEVDSFTPFRKAQIGPPEVHLEAEDKAIVIHISPGTKDSVMWALDGLSFTYSLVIWKNSSGVEERIENIYSRHKIYKLSPETTYCLKVKAALLTSWKIGVYSPVHCIKTTVENELPPPENIEVSVQNQNYVLKWDYTYANMTFQVQWLHAFLKRNPGNHLYKWKQIPDCENVKTTQCVFPQNVFQKGIYLLRVQASDGNNTSFWSEEIKFDTEIQAFLLPPVFNIRSLSDSFHIYIGAPKQSGNTPVIQDYPLIYEIIFWENTSNAERKIIEKKTDVTVPNLKPLTVYCVKARAHTMDEKLNKSSVFSDAVCEKTKPGNTSKIWLIVGICIALFALPFVIYAAKVFLRCINYVFFPSLKPSSSIDEYFSEQPLKNLLLSTSEEQIEKCFIIENISTIATVEETNQTDEDHKKYSSQTSQDSGNYSNEDESESKTSEELQQDFV

SEQ ID NO: 2729 - protein, 154 aa, Homo sapiens [sequence omitted]

SEQ ID NO: 2730 - protein, 808 aa, Homo sapiens
MWFFARDPVRDFPFELIPEPPEGGLPGPWALHRGRKKATGSPVSIFVYDVKPGAEEQTQVAKAAFKRFKTLRHPNILAYIDGLETEKCLHVVTEAVTPLGIYLKARVEAGGLKELEISWGLHQIVKALSFLVNDCSLIHNNVCMAAVFVDRAGEWKLGGLDYMYSAQGNGGGPPRKGIPELEQYDPPELADSSGRVVREKWSADMWRLGCLIWEVFNGPLPRAAALRNPGKIPKTLVPHYCELVGANPKVRPNPARFLQNCRAPGGFMSNRFVETNLFLEEIQIKEPAEKQKFFQELSKSLDAFPEDFCRHKVLPQLLTAFEFGNAGAVVLTPLFKVGKFLSAEEYQQKIIPVVVKMFSSTDRAMRIRLLQQMEQFIQYLDEPTVNTQIFPHVVHGFLDTNPAIREQTVKSMLLLAPKLNEANLNVELMKHFARLQAKDEQGPIRCNTTVCLGKIGSYLSASTRHRVLTSAFSRATRDPFAPSRVAGVLGFAATHNLYSMNDCAQKILPVLCGLTVDPEKSVRDQAFKAIRSFLSKLESVSEDPTQLEEVEKDVHAASSPGMGGAAASWAGWAVTGVSSLTSKLIRSHPTTAPTETNIPQRPTPEGVPAPAPTPVPATPTTSGHWETQEEDKDTAEDSSTADRWDDEDWGSLEQEAESVLAQQDDWSTGGQVSRASQVSNSDHKSSKSPESDWSSWEAEGSWEQGWQEPSSQEPPPDGTRLASEYNWGGPESSDKGDPFATLSARPSTQPRPDSWGEDNWEGLETDSRQVKAELARKKREERRREMEAKRAERKVAKGPMKLGARKLD

SEQ ID NO: 2731 - protein, 516 aa, Homo sapiens
MDAMKRGLCCVLLLCGAVFVSPSQEIHARFRRGARSYQGCSEPRCFNGGTCQQALYFSDFVCQCPEGFAGKCCEIDTRATCYEDQGISYRGTWSTAESGAECTNWNSSALAQKPYSGRRPDAIRLGLGNHNYCRNPDRDSKPWCYVFKAGKYSSEFCSTPACSEGNSDCYFGNGSAYRGTHSLTESGASCLPWNSMILIGKVYTAQNPSAQALGLGKHNYCRNPDGDAKPWCHVLKNRRLTWEYCDVPSCSTCGLRQYSQPQFRIKGGLFADIASHPWQAAIFAKHRRSPGERFLCGGILISSCWILSAAHCFQERFPPHHLTVILGRTYRVVPGEEEQKFEVEKYIVHKEFDDDTYDNDIALLQLKSDSSRCAQESSVVRTVCLPPADLQLPDWTECELSGYGKHEALSPFYSERLKEAHVRLYPSSRCTSQHLLNRTVTDNMLCAGDTRSGGPQANLHDACQGDSGGPLVCLNDGRMTLVGIISWGLGCGQKDVPGVYTKVTNYLDWIRDNMRP

SEQ ID NO: 2732 - protein, 480 aa, Homo sapiens [sequence omitted]

SEQ ID NO: 2733 - protein, 177 aa, Homo sapiens
MKLQCVSLWLLGTILILCSVDNHGLRRCLISTDMHHIEESFQEIKRAIQAKDTFPNVTILSTLETLQIIKPLDVCCVTKNLLAFYVDRVFKDHQEPNPKILRKISSIANSFLYMQKTLRQCQEQRQCHCRQEATNATRVIHDNYDQLEVHAAAIKSLGELDVFLAWINKNHEVMFSA

SEQ ID NO: 2734 - protein, 163 aa, Homo sapiens
MSLLLLVVSALHILILILLFVATLDKSWWTLPGKESLNLWYDCTWNNDTKTWACSNVSENGWLKAVQVLMVLSLILCCLSFILFMFQLYTMRRGGLFYATGLCQLCTSVAVFTGALIYAIHAEEILEKHPRGGSFGYCFALAWVAFPLALVSGIIYIHLRKRE

SEQ ID NO: 2735 - protein, 674 aa, Homo sapiens
MAAGGAEGGSGPGAAMGDCAEIKSQFRTREGFYKLLPGDGAARRSGPASAQTPVPPQPPQPPPGPASASGPGAAGPASSPPPAGPGPGPALPAVRLSLVRLGEPDSAGAGEPPATPAGLGSGGDRVCFNLGRELYFYPGCCRRGSQRSIDLNKPIDKRIYKGTQPTCHDFNQFTAATETISLLVGFSAGQVQYLDLIKKDTSKLFNEERLIDKTKVTYLKWLPESESLFLASHASGHLYLYNVSHPCASAPPQYSLLKQGEGFSVYAAKSKAPRNPLAKWAVGEGPLNEFAFSPDGRHLACVSQDGCLRVFHFDSMLLRGLMKSYFGGLLCVCWSPDGRYVVTGGEDDLVTVWSFTEGRVVARGHGHKSWVNAVAFDPYTTRAEEAATAAGADGERSGEEEEEEPEAAGTGSAGGAPLSPLPKAGSITYRFGSAGQDTQFCLWDLTEDVLYPHPPLARTRTLPGTPGTTPPAASSSRGGEPGPGPLPRSLSRSNSLPHPAGGGKAGGPGVAAEPGTPFSIGRFATLTLQERRDRGAEKEHKRYHSLGNISRGGSGGSGSGGEKPSGPVPRSRLDPAKVLGTALCPRIHEVPLLEPLVCKKIAQERLTVLLFLEDCIITACQEGLICTWARPGKAFTDEETEAQTGEGSWPRSPSKSVVEGISSQPGNSPSGTVV

SEQ ID NO: 2736 - protein, 346 aa, Homo sapiens
MVEKEEAGGGISEEEAAQYDRQIRLWGLEAQKRLRASRVLLVGLKGLGAEIAKNLILAGVKGLTMLDHEQVTPEDPGAQFLIRTGSVGRNRAEASLERAQNLNPMVDVKVDTEDIEKKPESFFTQFDAVCLTCCSRDVIVKVDQICHKNSIKFFTGDVFGYHGYTFANLGEHEFVEEKTKVAKVSQGVEDGPDTKRAKLDSSETTMVKKKVVFCPVKEALEVDWSSEKAKAALKRTTSDYFLLQVLLKFRTDKGRDPSSDTYEEDSELLLQIRNDVLDSLGISPDLLPEDFVRYCFSEMAPVCAVVGGILAQEIVKALSQRDPPHNNFFFFDGMKGNGIVECLGPK

SEQ ID NO: 2737 - protein, 628 aa, Homo sapiens
MEPPDAPAQARGAPRLLLLAVLLAAHPDAQAEVRLSVPPLVEVMRGKSVILDCTPTGTHDHYMLEWFLTDRSGARPRLASAEMQGSELQVTMHDTRGRSPPYQLDSQGRLVLAEAQVGDERDYVCVVRAGAAGTAEATARLNVFAKPEATEVSPNKGTLSVMEDSAQEIATCNSRNGNPAPKITWYRNGQRLEVPVEMNPEGYMTSRTVREASGLLSLTSTLYLRLRKDDRDASFHCAAHYSLPEGRHGRLDSPTFHLTLHYPTEHVQFWVGSPSTPAGWVREGDTVQLLCRGDGSPSPEYTLFRLQDEQEEVLNVNLEGNLTLEGVTRGQSGTYGCRVEDYDAADDVQLSKTLELRVAYLDPLELSEGKVLSLPLNSSAVVNCSVHGLPTPALRWTKDSTPLGDGPMLSLSSITFDSNGTYVCEASLPTVPVLSRTQNFTLLVQGSPELKTAEIEPKADGSWREGDEVTLICSARGHPDPKLSWSQLGGSPAEPIPGRQGWVSSSLTLKVTSALSRDGISCEASNPHGNKRHVFHFGTVSPQTSQAGVAVMAVAVSVGLLLLVVAVFYCVRRKGGPCCRQRREKGAPPPGEPGLSHSGSEQPEQTGLLMGGASGGARGGSGGFGDEC

SEQ ID NO: 2738 - protein, 489 aa, Homo sapiens
MPVTFALLLLLGQATADPCYDPQGRPQFCLPPVTQLAAVAASCPQACALSPGNHLGARETCNGSLTLALGGPFLLTSVSLRFCTPGPPALILSAAWASGGPWRLLWHRPAWPGALGGPERVTFHSTPGPKATVAASHLRVEFGGQAGLAAAGLRGRCQCHGHAARCAARARPPRCHCRHHTTGPGCESCRPSHRDWPWRPATPRHPHPCLPCSCNQHARRCRFNSELFRLSGGRSGGVCERCRHHTAGRHCHYCQPGFWRDPSQPIFSRRACRACQCHPIGATGGTCNQTSGQCTCKLGVTGLTCNRCGPGYQQSRSPRMPCQRIPEATTTLATTPGAYSSDPQCQNYCNMSDTRVHMSLRRYCQQDHVLRAQVLASEAAGPAWQRLAVRVLAVYKQRAQPVRRGDQDAWVPRADLTCGCLRLQPGTDYLLLGSAVGDPDPTRLILDRHGLALPWRPRWARPLKRLQQEERAGGCRGVRAPTPSPRPEH

SEQ ID NO: 2739 - protein, 131 aa, Homo sapiens
MQTPVNIPVPVLRLPRGPDGFSRGFAPDGRRAPLRPEVPEIQECPIAQESLESQEQRARAALRERYLRSLLAMVGHQVSFTLHEGVRVAAHFGATDLDVANFYVSQLQTPIGVQAEALLRCSDIISYTFKP

SEQ ID NO: 2740 - protein, 1103 aa, Homo sapiens
MAPACQILRWALALGLGLMFEVTHAFRSQDEFLSSLESYEIAFPTRVDHNGALLAFSPPPPRRQRRGTGATAESRLFYKVASPSTHFLLNLTRSSRLLAGHVSVEYWTREGLAWQRAARPHCLYAGHLQGQASSSHVAISTCGGLHGLIVADEEEYLIEPLHGGPKGSRSPEESGPHVVYKRSSLRHPHLDTACGVRDEKPWKGRPWWLRTLKPPPARPLGNETERGQPGLKRSVSRERYVETLVVADKMMVAYHGRRDVEQYVLAIMNIVAKLFQDSSLGSTVNILVTRLILLTEDQPTLEITHHAGKSLDSFCKWQKSIVNHSGHGNAIPENGVANHDTAVLITRYDICIYKNKPCGTLGLAPVGGMCERERSCSVNEDIGLATAFTIAHEIGHTFGMNHDGVGNSCGARGQDPAKLMAAHITMKTNPFVWSSCSRDYITSFLDSGLGLCLNNRPPRQDFVYPTVAPGQAYDADEQCRFQHGVKSRQCKYGEVCSELWCLSKSNRCITNSIPAAEGTLCQTHTIDKGWCYKRVCVPFGSRPEGVDGAWGPWTPWGDCSRTCGGGVSSSSRHCDSPRPTIGGKYCLGERRRHRSCNTDDCPPGSQDFREVQCSEFDSIPFRGKFYKWKTYRGGGVKACSLTCLAEGFNFYTERAAAVVDGTPCRPDTVDICVSGECKHVGCDRVLGSDLREDKCRVCGGDGSACETIEGVFSPASPGAGYEDVVWIPKGSVHIFIQDLNLSLSHLALKGDQESLLLEGLPGTPQPHRLPLAGTTFQLRQGPDQVQSLEALGPINASLIVMVLARTELPALRYRFNAPIARDSLPPYSWHYAPWTKCSAQCAGGSQVQAVECRNQLDSSAVAPHYCSAHSKLPKRQRACNTEPCPPDWVVGNWSLCSRSCDAGVRSRSVVCQRRVSAAEEKALDDSACPQPRPPVLEACHGPTCPPEWAALDWSECTPSCGPGLRHRVVLCKSADHRATLPPAHCSPAAKPPATMRCNLRRCPPARWVAGEWGECSAQCGVGQRQRSVRCTSHTGQASHECTEALRPPTTQQCEAKCDSPTPGDGPEECKDVNKVAYCPLVLKFQFCSRAYFRQMCCKTCHGH

SEQ ID NO: 2741 - protein, 725 aa, Homo sapiens
MAAQCCCRQAPGAEAAPVRPPPEPPPALDVASASSAQLFRLRHLQLGLELRPEARELAGCLVLELCALRPAPRALVLDAHPALRLHSAAFRRAPAAAAETPCAFAFSAPGPGPAPPPPLPAFPEAPGSEPACCPLAFRVDPFTDYGSSLTVTLPPELQAHQPFQVILRYTSTDAPAIWWLDPELTYGCAKPFVFTQGHSVCNRSFFPCFDTPAVKCTYSAVVKAPSGVQVLMSATRSAYMEEEGVFHFHMEHPVPAYLVALVAGDLKPADIGPRSRVWAEPCLLPTATSKLSGAVEQWLSAAERLYGPYMWGRYDIVFLPPSFPIVAMENPCLTFIISSILESDEFLVIDVIHEVAHSWFGNAVTNATWEEMWLSEGLATYAQRRITTETYGAAFTCLETAFRLDALHRQMKLLGEDSPVSKLQVKLEPGVNPSHLMNLFTYEKGYCFVYYLSQLCGDPQRFDDFLRAYVEKYKFTSVVAQDLLDSFLSFFPELKEQSVDCRAGLEFERWLNATGPPLAEPDLSQGSSLTRPVEALFQLWTAEPLDQAAASASAIDISKWRTFQTALFLDRLLDGSPLPQEVVMSLSKCYSSLLDSMNAEIRIRWLQIVVRNDYYPDLHRVRRFLESQMSRMYTIPLYEDLCTGALKSFALEVFYQTQGRLHPNLRRAIQQILSQGLGSSTEPASEPSTELGKAEADTDSDAQALLLGDEAPSSAISLRDVNVSA

SEQ ID NO: 2742 - protein, 438 aa, Homo sapiens
MSLTVVSMACVGFFLLQGAWPLMGGQDKPFLSARPSTVVPRGGHVALQCHYRRGFNNFMLYKEDRSHVPIFHGRIFQESFIMGPVTPAHAGTYRCRGSRPHSLTGWSAPSNPLVIMVTGNHRKPSLLAHPGPLLKSGETVILQCWSDVMFEHFFLHREGISEDPSRLVGQIHDGVSKANFSIGPLMPVLAGTYRCYGSVPHSPYQLSAPSDPLDIVITGLYEKPSLSAQPGPTVQAGENVTLSCSSWSSYDIYHLSREGEAHERRLRAVPKVNRTFQADFPLGPATHGGTYRCFGSFRALPCVWSNSSDPLLVSVTGICRHLHVLIGTSVVIFLFILLLFFLLYRWCSNKKNAAVMDQEPAGDRTVNRQDSDEQDPQEVTYAQLDHCVFIQRKISRPSQRPKTPLTDTSVYTELPNAEPRSKVVSCPRAPQSGLEGVF

SEQ ID NO: 2743 - protein, 576 aa, Homo sapiens
MSTSSLRRQMKNIVHNYSEAEIKVREATSNDPWGPSSSLMSEIADLTYNVVAFSEIMSMIWKRLNDHGKNWRHVYKAMTLMEYLIKTGSERVSQQCKENMYAVQTLKDFQYVDRDGKDQGVNVREKAKQLVALLRDEDRLREERAHALKTKEKLAQTATASSAAVGSGPPPEAEQAWPQSSGEEELQLQLALAMSKEEADQPPSCGPEDDAQLQLALSLSREEHDKEERIRRGDDLRLQMAIEESKRETGGKEESSLMDLADVFTAPAPAPTTDPWGGPAPMAAAVPTAAPTSDPWGGPPVPPAADPWGGPAPTPASGDPWRPAAPAGPSVDPWGGTPAPAAGEGPTPDPWGSSDGGVPVSGPSASDPWTPAPAFSDPWGGSPAKPSTNGTTAAGGFDTEPDEFSDFDRLRTALPTSGSSAGELELLAGEVPARSPGAFDMSGVRGSLAEAVGSPPPAATPTPTPPTRKTPESFLGPNAALVDLDSLVSRPGPTPPGAKASNPFLPGGGPATGPSVTNPFQPAPPATLTLNQLRLSPVPPVPGAPPTYISPLGGGPGLPPMMPPGPPAPNTNPFLL

SEQ ID NO: 2744 - protein, 260 aa, Homo sapiens
MAAAALRRFWSRRRAEAGDAVVAKPGVWARLGSWARALLRDYAEACRDASAEARARPGRAAVYVGLLGGAAACFTLAPSEGAFEEALLEASGTLLLLAPATRNRESEAFVQRLLWLRGRGRLRYVNLGLCSLVYEAPFDAQASLYQARCRYLQPRWTDFPGRVLDVGFVGRWWVLGAWMRDCDINDDEFLHLPAHLRVVGPQQLHSETNERLFDEKYKPVVLTDDQVDQALWEEQVLQKEKKDRLALSQAHSLVQAEAPR

SEQ ID NO: 2745 - protein, 2809 aa, Homo sapiens
MTLEGLYLARGPLARLLLAWSALLCMAGGQGRWDGALEAAGPGRVRRRGSPGILQGPNVCGSRFHAYCCPGWRTFPGRSQCVVPICRRACGEGFCSQPNLCTCADGTLAPSCGVSRGSGCSVSCMNGGTCRGASCLCQKGYTGTVCGQPICDRGCHNGGRCIGPNRCACVYGFMGPQCERDYRTGPCFGQVGPEGCQHQLTGLVCTKALCCATVGRAWGLPCELCPAQPHPCRRGFIPNIHTGACQDVDECQAVPGLCQGGSCVNMVGSFHCRCPVGHRLSDSSAACEDYRAGACFSVLFGGRCAGDLAGHYTRRQCCCDRGRCWAAGPVPELCPPRGSNEFQQLCAQRLPLLPGHPGLFPGLLGFGSNGMGPPLGPARLNPHGSDARGIPSLGPGNSNIGTATLNQTIDICRHFTNLCLNGRCLPTPSSYRCECNVGYTQDVRGECIDVDECTSSPCHHGDCVNIPGTYHCRCYPGFQATPTRQACVDVDECIVSGGLCHLGRCVNTEGSFQCVCNAGFELSPDGKNCVDHNECATSTMCVNGVCLNEDGSFSCLCKPGFLLAPGGHYCMDIDECQTPGICVNGHCTNTEGSFRCQCLGGLAVGTDGRVCVDTHVRSTCYGAIEKGSCARPFPGTVTKSECCCANPDHGFGEPCQLCPAKDSAEFQALCSSGLGITTDGRDINECALDPEVCANGVCENLRGSYRCVCNLGYEAGASGKDCTDVDECALNSLLCDNGWCQNSPGSYSCSCPPGFHFWQDTEICKDVDECLSSPCVSGVCRNLAGSYTCKCGPGSRLDPSGTFCLDSTKGTCWLKIQESRCEVNLQGASLRSECCATLGAAWGSPCERCEIDPACARGFARMTGVTCDDVNECESFPGVCPNGRCVNTAGSFRCECPEGLMLDASGRLCVDVRLEPCFLRWDEDECGVTLPGKYRMDVCCCSIGAVWGVECEACPDPESLEFASLCPRGLGFASRDFLSGRPFYKDVNECKVFPGLCTHGTCRNTVGSFHCACAGGFALDAQERNCTDIDECRISPDLCGQGTCVNTPGSFECECFPGYESGFMLMKNCMDVDECARDPLLCRGGTCTNTDGSYKCQCPPGHELTAKGTACEDIDECSLSDGLCPHGQCVNVIGAFQCSCHAGFQSTPDRQGCVDINECRVQNGGCDVHCINTEGSYRCSCGQGYSLMPDGRACADVDECEENPRVCDQGHCTNMPGGHRCLCYDGFMATPDMRTCVDVDECDLNPHICLHGDCENTKGSFVCHCQLGYMVRKGATGCSDVDECEVGGHNCDSHASCLNIPGSFSCRCLPGWVGDGFECHDLDECVSQEHRCSPRGDCLNVPGSYRCTCRQGFAGDGFFCEDRDECAENVDLCDNGQCLNAPGGYRCECEMGFDPTEDHRACQDVDECAQGNLCAFGSCENLPGMFRCICNGGYELDRGGGNCTDINECADPVNCINGVCINTPGSYLCSCPQDFELNPSGVGCVDTRAGNCFLETHDRGDSGISCSAEIGVGVTRASCCCSLGRAWGNPCELCPMANTTEYRTLCPGGEGFQPNRITVILEDIDECQELPGLCQGGDCVNTFGSFQCECPPGYHLSEHTRICEDIDECSTHSGICGPGTCYNTLGNYTCVCPAEYLQVNGGNNCMDMRKSVCFRHYNGTCQNELAFNVTRKMCCCSYNIGQAWNRPCEACPTPISPDYQILCGNQAPGFLTDIHTGKPLDIDECGEIPAICANGICINQIGSFRCECPAGFNYNSILLACEDVDECGSRESPCQQNADCINIPGSYRCKCTRGYKLSPGGACVGRNECREIPNVCSHGDCMDTEGSYMCLCHRGFQASADQTLCMDIDECDRQPCGNGTCKNIIGSYNCLCFPGFVVTHNGDCVDFDECTTLVGQVCRFGHCLNTAGSFHCLCQDGFELTADGKNCVDTNECLSLAGTCLPGTCQNLEGSFRCICPPGFQVQSDHCIDIDECSEEPNLCLFGTCTNSPGSFQCLCPPGFVLSDNGHRCFDTRQSFCFTRFEAGKCSVPKAFNTTKTRCCCSKRPGEGWGDPCELCPQEGSAAFQELCPFGHGAVPGPDDSREDVNECAENPGVCTNGVCVNTDGSFRCECPFGYSLDFTGINCVDTDECSVGHPCGQGTCTNVIGGFECACADGFEPGLMMTCEDIDECSLNPLLCAFRCHNTEGSYLCTCPAGYTLREDGAMCRDVDECADGQQDCHARGMECKNLIGTFACVCPPGMRPLPGSGEGCTDDNECHAQPDLCVNGRCVNTAGSFRCDCDEGFQPSPTLTECHDIRQGPCFAEVLQTMCRSLSSSSEAVTRAECCCGGGRGWGPRCELCPLPGTSAYRKLCPHGSGYTAEGRDVDECRMLAHLCAHGECINSLGSFRCHCQAGYTPDATATTCLDMDECSQVPKPCTFLCKNTKGSFLCSCPRGYLLEEDGRTCKDLDECTSRQHNCQFLCVNTVGAFTCRCPPGFTQHHQACFDNDECSAQPGPCGAHGHCHNTPGSFRCECHQGFTLVSSGHGCEDVNECDGPHRCQHGCQNQLGGYRCSCPQGFTQHSQWAQCVDENECALSPPTCGSASCRNTLGGFRCVCPSGFDFDQALGGCQEVDECAGRRGPCSYSCANTPGGFLCGCPQGYFRAGQGHCVSGLGFSPGPQDTPDKEELLSSEACYECKINGLSPRDRPRRSAHRDHQVNLATLDSEALLTLGLNLSHLGRAERILELRPALEGLEGRIRYVIVRGNEQGFFRMHHLRGVSSLQLGRRRPGPGTYRLEVVSHMAGPWGVQPEGQPGPWGQALRLKVQLQLL

SEQ ID NO: 2746 - protein, 431 aa, Homo sapiens
MSWVQATLLARGLCRAWGGTCGAALTGTSISQVPRRLPRGLHCSAAAHSSEQSLVPSPPEPRQRPTKALVPFEDLFGQAPGGERDKASFLQTVQKFAEHSVRKRGHIDFIYLALRKMREYGVERDLAVYNQLLNIFPKEVFRPRNIIQRIFVHYPRQQECGIAVLEQMENHGVMPNKETEFLLIQIFGRKSYPMLKLVRLKLWFPRFMNVNPFPVPRDLPQDPVELAMFGLRHMEPDLSARVTIYQVPLPKDSTGAADPPQPHIVGIQSPDQQAALARHNPARPVFVEGPFSLWLRNKCVYYHILRADLLPPEEREVEETPEEWNLYYPMQLDLEYVRSGWDNYEFDINEVEEGPVFAMCMAGAHDQATMAKWIQGLQETNPTLAQIPVVFRLAGSTRELQTSSAGLEEPPLPEDHQEEDDNLQRQQQGQS

SEQ ID NO: 2747 - protein, 794 aa, Homo sapiens
MASPTLSPDSSSQEALSAPTCSPTSDSENLSPDELELLAKLEEQNRLLEADSKSMRSMNGSRRNSGSSLVSSSSASSNLSHLEEDTWILWGRIANEWEEWRRRKEKLLKELIRKGIPHHFRAIVWQLLCSATDMPVKNQYSELLKMSSPCEKLIRRDIARTYPEHEFFKGQDSLGQEVLFNVMKAYSLVDREVGYCQGSAFIVGLLLMQMPEEEAFCVFVRLMQEYRLRELFKPSMAELGLCIYQFEYMLQEQLPDLNTHFRSQSFHTSMYASSWFLTLFLTTFPLPVATRVFDIFMYEGLEIVFRVGLALLQVNQAELMQLDMEGMSQYFQRVIPHQFDSCPDKLVLKAYQVKYNPKKMKRLEKEYAAMKSKEMEEQIEIKRLRTENRLLKQRIETLEKGQVTRAQEAEENYVIKRELAVVRQQCSSAAEDLQKAQSTIRQLQEQQENPRLTEDFVSHLETELEQSRLRETETLGALREMQDKVLDMEKRNSSLPDENNVAQLQEELKALKVREGQAVASTRELKLQLQELSDTWQAHLARGGRWKESPRKLVVGELQDELMSVRLREAQALAEGRELRQRVVELETQDHIHRNLLNRVEAERAALQEKLQYLAAQNKGLQTQLSESRRKQAEAECKSKEEVMAVRLREADSMAAVAEMRQRIAELEIQREEGRIQGQLNHSDSSQYIRELKDQIEELKAEVRLLKGPPPFEDPLAFDGLSLARHLDEDSLPSSDEELLGVGVGAALQDALYPLSPRDARFFRRLERPAKDSEGSSDSDADELAAPYSQGLDN

SEQ ID NO: 2748 - protein, 452 aa, Homo sapiens
MAAAALRSGWCRCPRRCLGSGIQFLSSHNLPHGSTYQMRRPGGELPLSKSYSSGNRKGFLSGLLDNVKQELAKNKEMKESIKKFRDEARRLEESDVLQEARRKYKTIESETVRTSEVLRKKLGELTGTVKESLHEVSKSDLGRKIKEGVEEAAKTAKQSAESVSKGGEKLGRTAAFRALSQGVESVKKEIDDSVLGQTGPYRRPQRLRKRTEFAGDKFKEEKVFEPNEEALGVVLHKDSKWYQQWKDFKENNVVFNRFFEMKMKYDESDNAFIRASRALTDKVTDLLGGLFSKTEMSEVLTEILRVDPAFDKDRFLKQCENDIIPNVLEAMISGELDILKDWCYEATYSQLAHPIQQAKALGLQFHSRILDIDNVDLAMGKMMEQGPVLIITFQAQLVMVVRNPKGEVVEGDPDKVLRMLYVWALCRDQDELNPYAAWRLLDISASSTEQIL

SEQ ID NO: 2749 - protein, 197 aa, Homo sapiens
MCTGKCARCVGLSLITLCLVCIVANALLLVPNGETSWTNTNHLSLQVWLMGGFIGGGLMVLCPGIAAVRAGGKGCCGAGCCGNRCRMLRSVFSSAFGVLGAIYCLSVSGAGLRNGPRCLMNGEWGYHFEDTAGAYLLNRTLWDRCEAPPRVVPWNVTLFSLLVAASCLEIVLCGIQLVNATIGVFCGDCRKKQDTPH

SEQ ID NO: 2750 - protein, 520 aa, Homo sapiens
MGKKGKKEKKGRGAEKTAAKMEKKVSKRSRKEEEDLEALIAHFQTLDAKRTQTVELPCPPPSPRLNASLSVHPEKDELILFGGEYFNGQKTFLYNELYVYNTRKDTWTKVDIPSPPPRRCAHQAVVVPQGGGQLWVFGGEFASPNGEQFYHYKDLWVLHLATKTWEQVKSTGGPSGRSGHRMVAWKRQLILFGGFHESTRDYIYYNDVYAFNLDTFTWSKLSPSGTGPTPRSGCQMSVTPQGGIVVYGGYSKQRVKKDVDKGTRHSDMFLLKPEDGREDKWVWTRMNPSGVKPTPRSGFSVAMAPNHQTLFFGGVCDEEEEESLSGEFFNDLYFYDATRNRWFEGQLKGPKSEKKKRRRGRKEEPEGGSRPACGGAGTQGPVQLVKEVVAEDGTVVTIKQVLTAPGSAGQPRSEDEDSLEEAGSPAPGPCPRSNAMLAVKHGVLYVYGGMFEAGDRQVTLSDLHCLDLHRMEAWKALVEMDPETQEWLEETDSEEDSEEVEGAEGGVDDEDSGEESGAED

SEQ ID NO: 2751 - protein, 239 aa, Homo sapiens
MAATLLAARGAGPAPAWGPEAFTPDWESREVSTGTTIMAVQFDGGVVLGADSRTTTGSYIANRVTDKLTPIHDRIFCCRSGSAADTQAVADAVTYQLGFHSIELNEPPLVHTAASLFKEMCYRYREDLMAGIIIAGWDPQEGGQVYSVPMGGMMVRQSFAIGGSGSSYIYGYVDATYREGMTKEECLQFTANALALAMERDGSSGGVIRLAAIAESGVERQVLLGDQIPKFAVATLPPA

SEQ ID NO: 2752 - protein, 426 aa, Homo sapiens
MAGLGFWGHPAGPLLLLLLLVLPPRALPEGPLVFVALVFRHGDRAPLASYPMDPHKEVASTLWPRGLGQLTTEGVRQQLELGRFLRSRYEAFLSPEYRREEVYIRSTDFDRTLESAQANLAGLFPEAAPGSPEARWRPIPVHTVPVAEDKLLRFPMRSCPRYHELLREATEAAEYQEALEGWTGFLSRLENFTGLSLVGEPLRRAWKVLDTLMCQQAHGLPLPAWASPDVLRTLAQISALDIGAHVGPPRAAEKAQLTGGILLNAILANFSRVQRLGLPLKMVMYSAHDSTLLALQGALGLYDGHTPPYAACLGFEFRKHLGNPAKDGGNVTVSLFYRNDSAHLPLPLSLPGCPAPCPLGRFYQLTAPARPPAHGVSCHGPYEAAIPPAPVVPLLAGAVAVLVALSLGLGLLAWRPGCLRALGGPV

SEQ ID NO: 2753 - protein, 158 aa, Homo sapiens [sequence omitted]

SEQ ID NO: 2754 - protein, 336 aa, Homo sapiens
MPPPAPGARLRLLAAAALAGLAVISRGLLSQSLEFNSPADNYTVCEGDNATLSCFIDEHVTRVAWLNRSNILYAGNDRWTSDPRVRLLINTPEEFSILITEVGLGDEGLYTCSFQTRHQPYTTQVYLIVHVPARIVNISSPVTVNEGGNVNLLCLAVGRPEPTVTWRQLRDGFTSEGEILEISDIQRGQAGEYECVTHNGVNSAPDSRRVLVTVNYPPTITDVTSARTALGRAALLRCEAMAVPPADFQWYKDDRLLSSGTAEGLKVQTERTRSMLLFANVSARHYGNYTCRAANRLGASSASMRLLRPGSLENSAPRPPGLLALLSALGWLWWRM

SEQ ID NO: 2755 - protein, 328 aa, Homo sapiens
MMWRPSVLLLLLLLRHGAQGKPSPDAGPHGQGRVHQAAPLSDAPHDDAHGNFQYDHEAFLGREVAKEFDQLTPEESQARLGRIVDRMDRAGDGDGWVSLAELRAWIAHTQQRHIRDSVSAAWDTYDTDRDGRVGWEELRNATYGHYAPGEEFHDVEDAETYKKMLARDERRFRVADQDGDSMATREELTAFLHPEEFPHMRDIVIAETLEDLDRNKDGYVQVEEYIADLYSAEPGEEEPAWVQTERQQFRDFRDLNKDGHLDGSEVGHWVLPPAQDQPLVEANHLLHESDTDKDGRLSKAEILGNWNMFVGSQATNYGEDLTRHHDEL

SEQ ID NO: 2756 - protein, 460 aa, Homo sapiens
MNFSEVFKLSSLLCKFSPDGKYLASCVQYRLVVRDVNTLQILQLYTCLDQIQHIEWSADSLFILCAMYKRGLVQVWSLEQPEWHCKIDEGSAGLVASCWSPDGRHILNTTEFHLRITVWSLCTKSVSYIKYPKACLQGITFTRDGRYMALAERRDCKDYVSIFVCSDWQLLRHFDTDTQDLTGIEWAPNGCVLAVWDTCLEYKILLYSLDGRLLSTYSAYEWSLGIKSVAWSPSSQFLAVGSYDGKVRILNHVTWKMITEFGHPAAINDPKIVVYKEAEKSPQLGLGCLSFPPPRAGAGPLPSSESKYEIASVPVSLQTLKPVTDRANPKIGIGMLAFSPDSYFLATRNDNIPNAVWVWDIQKLRLFAVLEQLSPVRAFQWDPQQPRLAICTGGSRLYLWSPAGCMSVQVPGEGDFAVLSLCWHLSGDSMALLSKDHFCLCFLETEAVVGTACRQLGGHT

SEQ ID NO: 2757 - protein, 483 aa, Homo sapiens
MAQADIALIGLAVMGQNLILNMNDHGFVVCAFNRTVSKVDDFLANEAKGTKVVGAQSLKEMVSKLKKPRRIILLVKAGQAVDDFIEKLVPLLDTGDIIIDGGNSEYRDTTRRCRDLKAKGILFVGSGVSGGEEGARYGPSLMPGGNKEAWPHIKTIFQGIAAKVGTGEPCCDWVGDEGAGHFVKMVHNGIEYGDMQLICEAYHLMKDVLGMAQDEMAQAFEDWNKTELDSFLIEITANILKFQDTDGKHLLPKIRDSAGQKGTGKWTAISALEYGVPVTLIGEAVFARCLSSLKDERIQASKKLKGPQKFQFDGDKKSFLEDIRKALYASKIISYAQGFMLLRQAATEFGWTLNYGGIALMWRGGCIIRSVFLGKIKDAFDRNPELQNLLLDDFFKSAVENCQDSWRRAVSTGVQAGIPMPCFTTALSFYDGYRHEMLPASLIQAQRDYFGAHTYELLAKPGQFIHTNWTGHGGTVSSSSYNA

SEQ ID NO: 2758 - protein, 93 aa, Homo sapiens
MSGLRVYSTSVTGSREIKSQQSEVTRILDGKRIQYQLVDISQDNALRDEMRALAGNPKATPPQIVNGDQYCGDYELFVEAVEQNTLQEFLKLA

SEQ ID NO: 2759 - protein, 574 aa, Homo sapiens
MRTLLTILTVGSLAAHAPEDPSDLLQHVKFQSSNFENILTWDSGPEGTPDTVYSIEYKTYGERDWVAKKGCQRITRKSCNLTVETGNLTELYYARVTAVSAGGRSATKMTDRFSSLQHTTLKPPDVTCISKVRSIQMIVHPTPTPIRAGDGHRLTLEDIFHDLFYHLELQVNRTYQMHLGGKQREYEFFGLTPDTEFLGTIMICVPTWAKESAPYMCRVKTLPDRTWTYSFSGAFLFSMGFLVAVLCYLSYRYVTKPPAPPNSLNVQRVLTFQPLRFIQEHVLIPVFDLSGPSSLAQPVQYSQIRVSGPREPAGAPQRHSLSEITYLGQPDISILQPSNVPPPQILSPLSYAPNAAPEVGPPSYAPQVTPEAQFPFYAPQAISKVQPSSYAPQATPDSWPPSYGVCMEGSGKDSPTGTLSSPKHLRPKGQLQKEPPAGSCMLGGLSLQEVTSLAMEESQEAKSLHQPLGICTDRTSDPNVLHSGEEGTPQYLKGQLPLLSSVQIEGHPMSLPLQPPSRPCSPSDQGPSPWGLLESLVCPKDEAKSPAPETSDLEQPTELDSLFRGLALTVQWES

SEQ ID NO: 2760 - protein, 165 aa, Homo sapiens
MDAPRRDMELLSNSLAAYAHIRANPESFGLYFVLGVCFGLLLTLCLLVISISWAPRPRPRGPAQRRDPRSSTLEPEDDDEDEEDTVTRLGPDDTLPGPELSAEPDGPLNVNVFTSAEELERAQRLEERERILREIWRTGQPDLLGTGTLGPSPTATGTLGRMHYY

SEQ ID NO: 2761 - protein, 299 aa, Homo sapiens
MDLLWILPSLWLLLLGGPACLKTQEHPSCPGPRELEASKVVLLPSCPGAPGSPGEKGAPGPQGPPGPPGKMGPKGEPGDPVNLLRCQEGPRNCRELLSQGATLSGWYHLCLPEGRALPVFCDMDTEGGGWLVFQRRQDGSVDFFRSWSSYRAGFGNQESEFWLGNENLHQLTLQGNWELRVELEDFNGNRTFAHYATFRLLGEVDHYQLALGKFSEGTAGDSLSLHSGRPFTTYDADHDSSNSNCAVIVHGAWWYASCYRSNLNGRYAVSEAAAHKYGIDWASGRGVGHPYRRVRMMLR

SEQ ID NO: 2762 - protein, 177 aa, Homo sapiens
MPVKRSLKLDGLLEENSFDPSKITRKKSVITYSPTTGTCQMSLFASPTSSEEQKHRNGLSNEKRKKLNHPSLTESKESTTKDNDEFMMLLSKVEKLSEEIMEIMQNLSSIQALEGSRELENLIGISCASHFLKREMQKTKELMTKVNKQKLFEKSTGLPHKASRHLDSYEFLKAILN

SEQ ID NO: 2763 - protein, 467 aa, Homo sapiens
MWRCPLGLLLLLPLAGHLALGAQQGRGRRELAPGLHLRGIRDAGGRYCQEQDLCCRGRADDCALPYLGAICYCDLFCNRTVSDCCPDFWDFCLGVPPPFPPIQGCMHGGRIYPVLGTYWDNCNRCTCQENRQWQCDQEPCLVDPDMIKAINQGNYGWQAGNHSAFWGMTLDEGIRYRLGTIRPSSSVMNMHEIYTVLNPGEVLPTAFEASEKWPNLIHEPLDQGNCAGSWAFSTAAVASDRVSIHSLGHMTPVLSPQNLLSCDTHQQQGCRGGRLDGAWWFLRRRGVVSDHCYPFSGRERDEAGPAPPCMMHSRAMGRGKRQATAHCPNSYVNNNDIYQVTPVYRLGSNDKEIMKELMENGPVQALMEVHEDFFLYKGGIYSHTPVSLGRPERYRRHGTHSVKITGWGEETLPDGRTLKYWTAANSWGPAWGERGHFRIVRGVNECDIESFVLGVWGRVGMEDMGHH

SEQ ID NO: 2764 - protein, 511 aa, Homo sapiens
MVPSFLSLSFSSLGLWASGLILVLGFLKLIHLLLRRQTLAKAMDKFPGPPTHWLFGHALEIQETGSLDKVVSWAHQFPYAHPLWFGQFIGFLNIYEPDYAKAVYSRGDPKAPDVYDFFLQWIGRGLLVLEGPKWLQHRKLLTPGFHYDVLKPYVAVFTESTRIMLDKWEEKAREGKSFDIFCDVGHMALNTLMKCTFGRGDTGLGHRDSSYYLAVSDLTLLMQQRLVSFQYHNDFIYWLTPHGRRFLRACQVAHDHTDQVIRERKAALQDEKVRKKIQNRRHLDFLDILLGARDEDDIKLSDADLRAEVDTFMFEGHDTTTSGISWFLYCMALYPEHQHRCREEVREILGDQDFFQWDDLGKMTYLTMCIKESFRLYPPVPQVYRQLSKPVTFVDGRSLPAGSLISMHIYALHRNSAVWPDPEVFDSLRFSTENASKRHPFAFMPFSAGPRNCIGQQFAMSEMKVVTAMCLLRFEFSLDPSRLPIKMPQLVLRSKNGFHLHLKPLGPGSGK

SEQ ID NO: 2765 - protein, 639 aa, Homo sapiens
MNLEKLSKPELLTLFSILEGELEARDLVIEALKAQHRDTFIEERYGKYNISDPLMALQRDFETLKEKNDGEKQPVCTNPLSILKVVMKQCKNMQERMLSQLAAAESRHRKVILDLEEERQRHAQDTAEGDDVTYMLEKERERLTQQLEFEKSQVKKFEKEQKKLSSQLEEERSRHKQLSSMLVLECKKATNKAAEEGQKAGELSLKLEKEKSRVSKLEEELAAERKRGLQTEAQVEKQLSEFDIEREQLRAKLNREENRTKTLKEEMESLKKIVKDLEASHQHSSPNEQLKKPVTVSKGTATEPLMLMSVFCQTESFPAERTHGSNIAKMTNTGLPGPATPAYSYAKTNGHCDPEIQTTRELTAGNNVENQVPPREKSVALAQEKPVENGGCPVGIETPVPMPSPLSSSGSSLSPSSTASSSLTSSPCSSPVLTKRLLGSSASSPGYQSSYQVGINQRFHAARHKFQSQADQDQQASGLQSPPSRDLSPTLIDNSAAKQLARNTVTQVLSRFTSQQGPIKPVSPNSSPFGTDYRNLANTANPRGDTSHSPTPGKVSSPLSPLSPGIKSPTIPRAERGNPPPIPPKKPGLTPSPSATTPLTKTHSQAASLTTAEDLASSCSSNTVVANGKDVELLLPTSS

SEQ ID NO: 2766 - protein, 241 aa, Homo sapiens
MFLTRSEYDRGVNTFSPEGRLFQVEYAIEAIKLGSTAIGIQTSEGVCLAVEKRITSPLMEPSSIEKIVEIDAHIGCAMSGLIADAKTLIDKARVETQNHWFTYNETMTVESVTQAVSNLALQFGEEDADPGAMSRPFGVALLFGGVDEKGPQLFHMDPSGTFVQCDARAIGSASEGAQSSLQEVYHKSMTLKEAIKSSLIILKQVMEEKLNATNIELATVQPGQNFHMFTKEELEEVIKDI

SEQ ID NO: 2767 - protein, 105 aa, Homo sapiens
MRGATRVSIMLLLVTVSDCAVITGACERDVQCGAGTCCAISLWLRGLRMCTPLGREGEECHPGSHKVPFFRKRKHHTCPCLPNLLCSRFPDGRYRCSMDLKNINF

SEQ ID NO: 2768 - protein, 2923 aa, Homo sapiens
MRSPATGVPLPTPPPPLLLLLLLLLPPPLLGDQVGPCRSLGSRGRGSSGACAPMGWLCPSSASNLWLYTSRCRDAGTELTGHLVPHHDGLRVWCPESEAHIPLPPAPEGCPWSCRLLGIGGHLSPQGKLTLPEEHPCLKAPRLRCQSCKLAQAPGLRAGERSPEESLGGRRKRNVNTAPQFQPPSYQATVPENQPAGTPVASLRAIDPDEGEAGRLEYTMDALFDSRSNQFFSLDPVTGAVTTAEELDRETKSTHVFRVTAQDHGMPRRSALATLTILVTDTNDHDPVFEQQEYKESLRENLEVGYEVLTVRATDGDAPPNANILYRLLEGSGGSPSEVFEIDPRSGVIRTRGPVDREEVESYQLTVEASDQGRDPGPRSTTAAVFLSVEDDNDNAPQFSEKRYVVQVREDVTPGAPVLRVTASDRDKGSNAVVHYSIMSGNARGQFYLDAQTGALDVVSPLDYETTKEYTLRVRAQDGGRPPLSNVSGLVTVQVLDINDNAPIFVSTPFQATVLESVPLGYLVLHVQAIDADAGDNARLEYRLAGVGHDFPFTINNGTGWISVAAELDREEVDFYSFGVEARDHGTPALTASASVSVTVLDVNDNNPTFTQPEYTVRLNEDAAVGTSVVTVSAVDRDAHSVITYQITSGNTRNRFSITSQSGGGLVSLALPLDYKLERQYVLAVTASDGTRQDTAQIVVNVTDANTHRPVFQSSHYTVNVNEDRPAGTTVVLISATDEDTGENARITYFMEDSIPQFRIDADTGAVTTQAELDYEDQVSYTLAITARDNGIPQKSDTTYLEILVNDVNDNAPQFLRDSYQGSVYEDVPPFTSVLQISATDRDSGLNGRVFYTFQGGDDGDGDFIVESTSGIVRTLRRLDRENVAQYVLRAYAVDKGMPPARTPMEVTVTVLDVNDNPPVFEQDEFDVFVEENSPIGLAVARVTATDPDEGTNAQIMYQIVEGNIPEVFQLDIFSGELTALVDLDYEDRPEYVLVIQATSAPLVSRATVHVRLLDRNDNPPVLGNFEILFNNYVTNRSSSFPGGAIGRVPAHDPDISDSLTYSFERGNELSLVLLNASTGELKLSRALDNNRPLEAIMSVLVSDGVHSVTAQCALRVTIITDEMLTHSITLRLEDMSPERFLSPLLGLFIQAVAATLATPPDHVVVFNVQRDTDAPGGHILNVSLSVGQPPGPGGGPPFLPSEDLQERLYLNRSLLTAISAQRVLPFDDNICLREPCENYMRCVSVLRFDSSAPFIASSSVLFRPIHPVGGLRCRCPPGFTGDYCETEVDLCYSRPCGPHGRCRSREGGYTCLCRDGYTGEHCEVSARSGRCTPGVCKNGGTCVNLLVGGFKCDCPSGDFEKPYCQVTTRSFPAHSFITFRGLRQRFHFTLALSFATKERDGLLLYNGRFNEKHDFVALEVIQEQVQLTFSAGESTTTVSPFVPGGVSDGQWHTVQLKYYNKPLLGQTGLPQGPSEQKVAVVTVDGCDTGVALRFGSVLGNYSCAAQGTQGGSKKSLDLTGPLLLGGVPDLPESFPVRMRQFVGCMRNLQVDSRHIDMADFIANNGTVPGCPAKKNVCDSNTCHNGGTCVNQWDAFSCECPLGFGGKSCAQEMANPQHFLGSSLVAWHGLSLPISQPWYLSLMFRTRQADGVLLQAITRGRSTITLQLREGHVMLSVEGTGLQASSLRLEPGRANDGDWHHAQLALGASGGPGHAILSFDYGQQRAEGNLGPRLHGLHLSNITVGGIPGPAGGVARGFRGCLQGVRVSDTPEGVNSLDPSHGESINVEQGCSLPDPCDSNPCPANSYCSNDWDSYSCSCDPGYYGDNCTNVCDLNPCEHQSVCTRKPSAPHGYTCECPPNYLGPYCETRIDQPCPRGWWGHPTCGPCNCDVSKGFDPDCNKTSGECHCKENHYRPPGSPTCLLCDCYPTGSLSRVCDPEDGQCPCKPGVIGRQCDRCDNPFAEVTTNGCEVNYDSCPRAIEAGIWWPRTRFGLPAAAPCPKGSFGTAVRHCDEHRGWLPPNLFNCTSITFSELKGFAERLQRNESGLDSGRSQQLALLLRNATQHTAGYFGSDVKVAYQLATRLLAHESTQRGFGLSATQDVHFTENLLRVGSALLDTANKRHWELIQQTEGGTAWLLQHYEAYASALAQNMRHTYLSPFTIVTPNIVISVVRLDKGNFAGAKLPRYEALRGEQPPDLETTVILPESVFRETPPVVRPAGPGEAQEPEELARRQRRHPELSQGEAVASVIIYRTLAGLLPHNYDPDKRSLRVPKRPIINTPVVSISVHDDEELLPRALDKPVTVQFRLLETEERTKPICVFWNHSILVSGTGGWSARGCEVVFRNESHVSCQCNHMTSFAVLMDVSRRENGEILPLKTLTYVALGVTLAALLLTFFFLTLLRILRSNQHGIRRNLTAALGLAQLVFLLGINQADLPFACTVIAILLHFLYLCTFSWALLEALHLYRALTEVRDVNTGPMRFYYMLGWGVPAFITGLAVGLDPEGYGNPDFCWLSIYDTLIWSFAGPVAFAVSMSVFLYILAARASCAAQRQGFEKKGPVSGLQPSFAVLLLLSATWLLALLSVNSDTLLFHYLFATCNCIQGPFIFLSYVVLSKEVRKALKLACSRKPSPDPALTTKSTLTSSYNCPSPYADGRLYQPYGDSAGSLHSTSRSGKSQPSYIPFLLREESALNPGQGPPGLGDPGSLFLEGQDQQHDPDTDSDSDLSLEDDQSGSYASTHSSDSEEEEEEEEEEAAFPGEQGWDSLLGPGAERLPLHSTPKDGGPGPGKAPWPGDFGTTAKESSGNGAPEERLRENGDALSREGSLGPLPGSSAQPHKGILKKKCLPTISEKSSLLRLPLEQCTGSSRGSSASEGSRGGPPPRPPPRQSLQEQLNGVMPIAMSIKAGTVDEDSSGSEFLFFNFLH

SEQ ID NO: 2769 - protein, 127 aa, Homo sapiens [sequence omitted]

SEQ ID NO: 2770 - protein, 160 aa, Homo sapiens
MDKLKKVLSGQDTEDRSGLSEVVEASSLSWSTRIKGFIACFAIGILCSLLGTVLLWVPRKGLHLFAVFYTFGNIASIGSTIFLMGPVKQLKRMFEPTRLIATIMVLLCFALTLCSAFWWHNKGLALIFCILQSLALTWYSLSFIPFARDAVKKCFAVCLA

SEQ ID NO: 2771 - protein, 639 aa, Homo sapiens
MDRVLLRWISLFWLTAMVEGLQVTVPDKKKVAMLFQPTVLRCHFSTSSHQPAVVQWKFKSYCQDRMGESLGMSSTRAQSLSKRNLEWDPYLDCLDSRRTVRVVASKQGSTVTLGDFYRGREITIVHDADLQIGKLMWGDSGLYYCIITTPDDLEGKNEDSVELLVLGRTGLLADLLPSFAVEIMPEWVFVGLVLLGVFLFFVLVGICWCQCCPHSCCCYVRCPCCPDSCCCPQALYEAGKAAKAGYPPSVSGVPGPYSIPSVPLGGAPSSGMLMDKPHPPPLAPSDSTGGSHSVRKGYRIQADKERDSMKVLYYVEKELAQFDPARRMRGRYNNTISELSSLHEEDSNFRQSFHQMRSKQFPVSGDLESNPDYWSGVMGGSSGASRGPSAMEYNKEDRESFRHSQPRSKSEMLSRKNFATGVPAVSMDELAAFADSYGQRPRRADGNSHEARGGSRFERSESRAHSGFYQDDSLEEYYGQRSRSREPLTDADRGWAFSPARRRPAEDAHLPRLVSRTPGTAPKYDHSYLGSARERQARPEGASRGGSLETPSKRSAQLGPRSASYYAWSPPGTYKAGSSQDDQEDASDDALPPYSELELTRGPSYRGRDLPYHSNSEKKRKKEPAKKTNDFPTRMSLVV

SEQ ID NO: 2772 - protein, 317 aa, Homo sapiens
MTMETQMSQNVCPRNLWLLQPLTVLLLLASADSQAAAPPKAVLKLEPPWINVLQEDSVTLTCQGARSPESDSIQWFHNGNLIPTHTQPSYRFKANNNDSGEYTCQTGQTSLSDPVHLTVLSEWLVLQTPHLEFQEGETIMLRCHSWKDKPLVKVTFFQNGKSQKFSHLDPTFSIPQANHSHSGDYHCTGNIGYTLFSSKPVTITVQVPSMGSSSPMGIIVAVVIATAVAAIVAAVVALIYCRKKRISANSTDPVKAAQFEPPGRQMIAIRKRQLEETNNDYETADGGYMTLNPRAPTDDDKNIYLTLPPNDHVNSNN

SEQ ID NO: 2773 - protein, 464 aa, Homo sapiens
METLSFPRYNVAEIVIHIRNKILTGADGKNLTKNDLYPNPKPEVLHMIYMRALQIVYGIRLEHFYMMPVNSEVMYPHLMEGFLPFSNLVTHLDSFLPICRVNDFETADILCPKAKRTSRFLSGIINFIHFREACRETYMEFLWQYKSSADKMQQLNAAHQEALMKLERLDSVPVEEQEEFKQLSDGIQELQQSLNQDFHQKTIVLQEGNSQKKSNISEKTKRLNELKLSVVSLKEIQESLKTKIVDSPEKLKNYKEKMKDTVQKLKNARQEVVEKYEIYGDSVDCLPSCQLEVQLYQKKIQDLSDNREKLASILKESLNLEDQIESDESELKKLKTEENSFKRLMIVKKEKLATAQFKINKKHEDVKQYKRTVIEDCNKVQEKRGAVYERVTTINQEIQKIKLGIQQLKDAAEREKLKSQEIFLNLKTALEKYHDGIEKAAEDSYAKIDEKTAELKRKMFKMST

SEQ ID NO: 2774 - protein, 522 aa, Homo sapiens
MNINDLKLTLSKAGQEHLLRFWNELEEAQQVELYAELQAMNFEELNFFFQKAIEGFNQSSHQKNVDARMEPVPREVLGSATRDQDQLQAWESEGLFQISQNKVAVLLLAGGQGTRLGVAYPKGMYDVGLPSRKTLFQIQAERILKLQQVAEKYYGNKCIIPWYIMTSGRTMESTKEFFTKHKYFGLKKENVIFFQQGMLPAMSFDGKIILEEKNKVSMAPDGNGGLYRALAAQNIVEDMEQRGIWSIHVYCVDNILVKVADPRFIGFCIQKGADCGAKVVEKTNPTEPVGVVCRVDGVYQVVEYSEISLATAQKRSSDGRLLFNAGNIANHFFTVPFLRDVVNVYEPQLQHHVAQKKIPYVDTQGQLIKPDKPNGIKMEKFVFDIFQFAKKFVVYEVLREDEFSPLKNADSQNGKDNPTTARHALMSLHHCWVLNAGGHFIDENGSRLPAIPRSATNGKSETITADVNHNLKDANDVPIQCEISPLISYAGEGLESYVADKEFHAPLIIDENGVHELVKNGI

SEQ ID NO: 2775 - protein, 491 aa, Homo sapiens
MSLVAYASSDESEPDEAEPEPEEEEAVAPTSGPALGGLFASLPAPKGPALLPPPPQMLAPAFPPPLLLPPPTGDPRLQPPPPLPFGLGGFPPPPGVSPAEAAGVGEGLGLGLPSPRGPGLNLPPPIGGAGPPLGLPKPKKRKEPVKIAAPELHKGDSDSEEDEPTKKKTILQGSSEGTGLSALLPQPKNLTVKETNRLLLPHAFSRKPSDGSPDTKPSRLASKTKTSSLAPVVGTTTTTPSPSAIKAAAKSAALQVTKQITQEEDDSDEEVAPENFFSLPEKAEPPGVEPYPYPIPTVPEELPPGTEPEPAFQDDAANAPLEFKMAAGSSGAPWMPKPGDDYSYNQFSTYGDANAAGAYYQDYYSGGYYPAQDPALVPPQEIAPDASFIDDEAFKRLQGKRNRGREEINFVEIKGDDQLSGAQQWMTKSLTEEKTMKSFSKKKGEQPTGQQRRKHQITYLIHQAKERELELKNTWSENKLSRRQTQAKYGF

SEQ ID NO: 2776 - protein, 515 aa, Homo sapiens
MLLWASLLAFAPVCGQSAAAHKPVISVHPPWTTFFKGERVTLTCNGFQFYATEKTTWYHRHYWGEKLTLTPGNTLEVRESGLYRCQARGSPRSNPVRLLFSSDSLILQAPYSVFEGDTLVLRCHRRRKEKLTAVKYTWNGNILSISNKSWDLLIPQASSNNNGNYRCIGYGDENDVFRSNFKIIKIQELFPHPELKATDSQPTEGNSVNLSCETQLPPERSDTPLHFNFFRDGEVILSDWSTYPELQLPTVWRENSGSYWCGAETVRGNIHKHSPSLQIHVQRIPVSGVLLETQPSGGQAVEGEMLVLVCSVAEGTGDTTFSWHREDMQESLGRKTQRSLRAELELPAIRQSHAGGYYCTADNSYGPVQSMVLNVTVRETPGNRDGLVAAGATGGLLSALLLAVALLFHCWRRRKSGVGFLGDETRLPPAPGPGESSHSICPAQVELQSLYVDVHPKKGDLVYSEIQTTQLGEEEEANTSRTLLEDKDVSVVYSEVKTQHPDNSAGKISSKDEES

SEQ ID NO: 2777 - protein, 521 aa, Homo sapiens
MGRKKIQIQRITDERNRQVTFTKRKFGLMKKAYELSVLCDCEIALIIFNHSNKLFQYASTDMDKVLLKYTEYNEPHESRTNADIIETLRKKGFNGCDSPEPDGEDSLEQSPLLEDKYRRASEELDGLFRRYGSTVPAPNFAMPVTVPVSNQSSLQFSNPSGSLVTPSLVTSSLTDPRLLSPQQPALQRNSVSPGLPQRPASAGAMLGGDLNSANGACPSPVGNGYVSARASPGLLPVANGNSLNKVIPAKSPPPPTHSTQLGAPSRKPDLRVITSQAGKGLMHHLTEDHLDLNNAQRLGVSQSTHSLTTPVVSVATPSLLSQGLPFSSMPTAYNTDYQLTSAELSSLPAFSSPGGLSLGNVTAWQQPQQPQQPQQPQPPQQQPPQPQQPQPQQPQQPQQPPQQQSHLVPVSLSNLIPGSPLPHVGAALTVTTHPHISIKSEPVSPSRERSPAPPPPAVFPAARPEPGDGLSSPAGGSYETGDRDDGRGDFGPTLGLLRPAPEPEAEGSAVKRMRLDTWTLK

SEQ ID NO: 2778 - protein, 5635 aa, Homo sapiens
MISWEVVHTVFLFALLYSSLAQDASPQSEIRAEEIPEGASTLAFVFDVTGSMYDDLVQVIEGASKILETSLKRPKRPLFNFALVPFHDPEIGPVTITTDPKKFQYELRELYVQGGGDCPEMSIGAIKIALEISLPGSFIYVFTDARSKDYRLTHEVLQLIQQKQSQVVFVLTGDCDDRTHIGYKVYEEIASTSSGQVFHLDKKQVNEVLKWVEEAVQASKVHLLSTDHLEQAVNTWRIPFDPSLKEVTVSLSGPSPMIEIRNPLGKLIKKGFGLHELLNIHNSAKVVNVKEPEAGMWTVKTSSSGRHSVRITGLSTIDFRAGFSRKPTLDFKKTVSRPVQGIPTYVLLNTSGISTPARIDLLELLSISGSSLKTIPVKYYPHRKPYGIWNISDFVPPNEAFFLKVTGYDKDDYLFQRVSSVSFSSIVPDAPKVTMPEKTPGYYLQPGQIPCSVDSLLPFTLSFVRNGVTLGVDQYLKESASVNLDIAKVTLSDEGFYECIAVSSAGTGRAQTFFDVSEPPPVIQVPNNVTVTPGERAVLTCLIISAVDYNLTWQRNDRDVRLAEPARIRTLANLSLELKSVKFNDAGEYHCMVSSEGGSSAASVFLTVQEPPKVTVMPKNQSFTGGSEVSIMCSATGYPKPKIAWTVNDMFIVGSHRYRMTSDGTLFIKNAAPKDAGIYGCLASNSAGTDKQNSTLRYIEAPKLMVVQSELLVALGDITVMECKTSGIPPPQVKWFKGDLELRPSTFLIIDPLLGLLKIQETQDLDAGDYTCVAINEAGRATGKITLDVGSPPVFIQEPADVSMEIGSNVTLPCYVQGYPEPTIKWRRLDNMPIFSRPFSVSSISQLRTGALFILNLWASDKGTYICEAENQFGKIQSETTVTVTGLVAPLIGISPSVANVIEGQQLTLPCTLLAGNPIPERRWIKNSAMLLQNPYITVRSDGSLHIERVQLQDGGEYTCVASNVAGTNNKTTSVVVHVLPTIQHGQQILSTIEGIPVTLPCKASGNPKPSVIWSKKGELISTSSAKFSAGADGSLYVVSPGGEESGEYVCTATNTAGYAKRKVQLTVYVRPRVFGDQRGLSQDKPVEISVLAGEEVTLPCEVKSLPPPIITWAKETQLISPFSPRHTFLPSGSMKITETRTSDSGMYLCVATNIAGNVTQAVKLNVHVPPKIQRGPKHLKVQVGQRVDIPCNAQGTPLPVITWSKGGSTMLVDGEHHVSNPDGTLSIDQATPSDAGIYTCVATNIAGTDETEITLHVQEPPTVEDLEPPYNTTFQERVANQRIEFPCPAKGTPKPTIKWLHNGRELTGREPGISILEDGTLLVIASVTPYDNGEYICVAVNEAGTTERKYNLKVHVPPVIKDKEQVTNVSVLLNQLTNLFCEVEGTPSPIIMWYKDNVQVTESSTIQTVNNGKILKLFRATPEDAGRYSCKAINIAGTSQKYFNIDVLVPPTIIGTNFPNEVSVVLNRDVALECQVKGTPFPDIHWFKDGKPLFLGDPNVELLDRGQVLHLKNARRNDKGRYQCTVSNAAGKQAKDIKLTIYIPPSIKGGNVTTDISVLINSLIKLECETRGLPMPAITWYKDGQPIMSSSQALYIDKGQYLHIPRAQVSDSATYTCHVANVAGTAEKSFHVDVYVPPMIEGNLATPLNKQVVIAHSLTLECKAAGNPSPILTWLKDGVPVKANDNIRIEAGGKKLEIMSAQEIDRGQYICVATSVAGEKEIKYEVDVLVPPAIEGGDETSYFIVMVNNLLELDCHVTGSPPPTIMWLKDGQLIDERDGFKILLNGRKLVIAQAQVSNTGLYRCMAANTAGDHKKEFEVTVHVPPTIKSSGLSERVVVKYKPVALQCIANGIPNPSITWLKDDQPVNTAQGNLKIQSSGRVLQIAKTLLEDAGRYTCVATNAAGETQQHIQLHVHEPPSLEDAGKMLNETVLVSNPVQLECKAAGNPVPVITWYKDNRLLSGSTSMTFLNRGQIIDIESAQISDAGIYKCVAINSAGATELFYSLQVHVAPSISGSNNMVAVVVNNPVRLECEARGIPAPSLTWLKDGSPVSSFSNGLQVLSGGRILALTSAQISDTGRYTCVAVNAAGEKQRDIDLRVYVPPNIMGEEQNVSVLISQAVELLCQSDAIPPPTLTWLKDGHPLLKKPGLSISENRSVLKIEDAQVQDTGRYTCEATNVAGKTEKNYNVNIWVPPNIGGSDELTQLTVIEGNLISLLCESSGIPPPNLIWKKKGSPVLTDSMGRVRILSGGRQLQISIAEKSDAALYSCVASNVAGTAKKEYNLQVYIRPTITNSGSHPTEIIVTRGKSISLECEVQGIPPPTVTWMKDGHPLIKAKGVEILDEGHILQLKNIHVSDTGRYVCVAVNVAGMTDKKYDLSVHAPPSIIGNHRSPENISVVEKNSVSLTCEASGIPLPSITWFKDGWPVSLSNSVRILSGGRMLRLMQTTMEDAGQYTCVVRNAAGEERKIFGLSVLVPPHIVGENTLEDVKVKEKQSVTLTCEVTGNPVPEITWHKDGQPLQEDEAHHIISGGRFLQITNVQVPHTGRYTCLASSPAGHKSRSFSLNVFVSPTIAGVGSDGNPEDVTVILNSPTSLVCEAYSYPPATITWFKDGTPLESNRNIRILPGGRTLQILNAQEDNAGRYSCVATNEAGEMIKHYEVKVYIPPIINKGDLWGPGLSPKEVKIKVNNTLTLECEAYAIPSASLSWYKDGQPLKSDDHVNIAANGHTLQIKEAQISDTGRYTCVASNIAGEDELDFDVNIQVPPSFQKLWEIGNMLDTGRNGEAKDVIINNPISLYCETNAAPPPTLTWYKDGHPLTSSDKVLILPGGRVLQIPRAKVEDAGRYTCVAVNEAGEDSLQYDVRVLVPPIIKGANSDLPEEVTVLVNKSALIECLSSGSPAPRNSWQKDGQPLLEDDHHKFLSNGRILQILNTQITDIGRYVCVAENTAGSAKKYFNLNVHVPPSVIGPKSENLTVVVNNFISLTCEVSGFPPPDLSWLKNEQPIKLNTNTLIVPGGRTLQIIRAKVSDGGEYTCIAINQAGESKKKFSLTVYVPPSIKDHDSESLSVVNVREGTSVSLECESNAVPPPVITWYKNGRMITESTHVEILADGQMLHIKKAEVSDTGQYVCRAINVAGRDDKNFHLNVYVPPSIEGPEREVIVETISNPVTLTCDATGIPPPTIAWLKNHKRIENSDSLEVRILSGGSKLQIARSQHSDSGNYTCIASNMEGKAQKYYFLSIQVPPSVAGAEIPSDVSVLLGENVELVCNANGIPTPLIQWLKDGKPIASGETERIRVSANGSTLNIYGALTSDTGKYTCVATNPAGEEDRIFNLNVYVTPTIRGNKDEAEKLMTLVDTSINIECRATGTPPPQINWLKNGLPLPLSSHIRLLAAGQVIRIVRAQVSDVAVYTCVASNRAGVDNKHYNLQVFAPPNMDNSMGTEEITVLKGSSTSMACITDGTPAPSMAWLRDGQPLGLDAHLTVSTHGMVLQLLKAETEDSGKYTCIASNEAGEVSKHFILKVLEPPHINGSEEHEEISVIVNNPLELTCIASGIPAPKMTWMKDGRPLPQTDQVQTLGGGEVLRISTAQVEDTGRYTCLASSPAGDDDKEYLVRVHVPPNIAGTDEPRDITVLRNRQVTLECKSDAVPPPVITWLRNGERLQATPRVRILSGGRYLQINNADLGDTANYTCVASNIAGKTTREFILTVNVPPNIKGGPQSLVILLNKSTVLECIAEGVPTPRITWRKDGAVLAGNHARYSILENGFLHIQSAHVTDTGRYLCMATNAAGTDRRRIDLQVHVPPSIAPGPTNMTVIVNVQTTLACEATGIPKPSINWRKNGHLLNVDQNQNSYRLLSSGSLVIISPSVDDTATYECTVTNGAGDDKRTVDLTVQVPPSIADEPTDFLVTKHAPAVITCTASGVPFPSIHWTKNGIRLLPRGDGYRILSSGAIEILATQLNHAGRYTCVARNAAGSAHRHVTLHVHEPPVIQPQPSELHVILNNPILLPCEATGTPSPFITWQKEGINVNTSGRNHAVLPSGGLQISRAVREDAGTYMCVAQNPAGTALGKIKLNVQVPPVISPHLKEYVIAVDKPITLSCEADGLPPPDITWHKDGRAIVESIRQRVLSSGSLQIAFVQPGDAGHYTCMAANVAGSSSTSTKLTVHVPPRIRSTEGHYTVNENSQAILPCVADGIPTPAINWKKDNVLLANLLGKYTAEPYGELILENVVLEDSGFYTCVANNAAGEDTHTVSLTVHVLPTFTELPGDVSLNKGEQLRLSCKATGIPLPKLTWTFNNNIIPAHFDSVNGHSELVIERVSKEDSGTYVCTAENSVGFVKAIGFVYVKEPPVFKGDYPSNWIEPLGGNAILNCEVKGDPTPTIQWNRKGVDIEISHRIRQLGNGSLAIYGTVNEDAGDYTCVATNEAGVVERSMSLTLQSPPIITLEPVETVINAGGKIILNCQATGEPQPTITWSRQGHSISWDDRVNVLSNNSLYIADAQKEDTSEFECVARNLMGSVLVRVPVIVQVHGGFSQWSAWRACSVTCGKGIQKRSRLCNQPLPANGGKPCQGSDLEMRNCQNKPCPVDGSWSEWSLWEECTRSCGRGNQTRTRTCNNPSVQHGGRPCEGNAVEIIMCNIRPCPVHGAWSAWQPWGTCSESCGKGTQTRARLCNNPPPAFGGSYCDGAETQMQVCNERNCPIHGKWATWASWSACSVSCGGGARQRTRGCSDPVPQYGGRKCEGSDVQSDFCNSDPCPTHGNWSPWSGWGTCSRTCNGGQMRRYRTCDNPPPSNGGRACGGPDSQIQRCNTDMCPVDGSWGSWHSWSQCSASCGGGEKTRKRLCDHPVPVKGGRPCPGDTTQVTRCNVQACPGGPQRARGSVIGNINDVEFGIAFLNATITDSPNSDTRIIRAKITNVPRSLGSAMRKIVSILNPIYWTTAKEIGEAVNGFTLTNAVFKRETQVEFATGEILQMSHIARGLDSDGSLLLDIVVSGYVLQLQSPAEVTVKDYTEDYIQTGPGQLYAYSTRLFTIDGISIPYTWNHTVFYDQAQGRMPFLVETLHASSVESDYNQIEETLGFKIHASISKGDRSNQCPSGFTLDSVGPFCADEDECAAGNPCSHSCHNAMGTYYCSCPKGLTIAADGRTCQDIDECALGRHTCHAGQDCDNTIGSYRCVVRCGSGFRRTSDGLSCQDINECQESSPCHQRCFNAIGSFHCGCEPGYQLKGRKCMDVNECRQNVCRPDQHCKNTRGGYKCIDLCPNGMTKAENGTCIDIDECKDGTHQCRYNQICENTRGSYRCVCPRGYRSQGVGRPCMDINECEQVPKPCAHQCSNTPGSFKCICPPGQHLLGDGKSCAGLERLPNYGTQYSSYNLARFSPVRNNYQPQQHYRQYSHLYSSYSEYRNSRTSLSRTRRTIRKTCPEGSEASHDTCVDIDECENTDACQHECKNTFGSYQCICPPGYQLTHNGKTCQDIDECLEQNVHCGPNRMCFNMRGSYQCIDTPCPPNYQRDPVSGFCLKNCPPNDLECALSPYALEYKLVSLPFGIATNQDLIRLVAYTQDGVMHPRTTFLMVDEEQTVPFALRDENLKGVVYTTRPLREAETYRMRVRASSYSANGTIEYQTTFIVYIAVSAYPY

SEQ ID NO: 2779 - protein, 453 aa, Homo sapiens
MEDYLQGCRAALQESRPLHVVLGNEACDLDSTVSALALAFYLAKTTEAEEVFVPVLNIKRSELPLRGDIVFFLQKVHIPESILIFRDEIDLHALYQAGQLTLILVDHHILSKSDTALEEAVAEVLDHRPIEPKHCPPCHVSVELVGSCATLVTERILQGAPEILDRQTAALLHGTIILDCVNMDLKIGKATPKDSKYVEKLEALFPDLPKRNDIFDSLQKAKFDVSGLTTEQMLRKDQKTIYRQGVKVAISAIYMDLEAFLQRSNLLADLHAFCQAHSYDVLVAMTIFFNTHNEPVRQLAIFCPHVALQTTICEVLERSHSPPLKLTPASSTHPNLHAYLQGNTQVSRKKLLPLLQEALSAYFDSMKIPSGQPETADVSREQVDKELDRASNSLISGLSQDEEDPPLPPTPMNSLVDECPLDQGLPKLSAEAVFEKCSQISLSQSTTASLSKK

SEQ ID NO: 2780 - protein, 424 aa, Homo sapiens
MAAGPISERNQDATVYVGGLDEKVSEPLLWELFLQAGPVVNTHMPKDRVTGQHQGYGFVEFLSEEDADYAIKIMNMIKLYGKPIRVNKASAHNKNLDVGANIFIGNLDPEIDEKLLYDTFSAFGVILQTPKIMRDPDTGNSKGYAFINFASFDASDAAIEAMNGQYLCNRPITVSYAFKKDSKGERHGSAAERLLAAQNPLSQADRPHQLFADAPPPPSAPNPVVSSLGSGLPPPGMPPPGSFPPPVPPPGALPPGIPPAMPPPPMPPGAAGHGPPSAGTPGAGHPGHGHSHPHPFPPGGMPHPGMSQMQLAHHGPHGLGHPHAGPPGSGGQPPPRPPPGMPHPGPPPMGMPPRGPPFGSPMGHPGPMPPHGMRGPPPLMPPHGYTGPPRPPPYGYQRGPLPPPRPTPRPPVPPRGPLRGPLPQ

SEQ ID NO: 2781 - protein, 415 aa, Homo sapiens
MGTTARAALVLTYLAVASAASEGGFTATGQRQLRPEHFQEVGYAAPPSPPLSRSLPMDHPDSSQHGPPFEGQSQVQPPPSQEATPLQQEKLLPAQLPAEKEVGPPLPQEAVPLQKELPSLQHPNEQKEGTPAPFGDQSHPEPESWNAAQHCQQDRSQGGWGHRLDGFPPGRPSPDNLNQICLPNRQHVVYGPWNLPQSSYSHLTRQGETLNFLEIGYSRCCHCRSHTNRLECAKLVWEDTLDKYCDREYAVKTHHHLCCRHPPSPTRDECFARRAPYPNYDRDILTIDIGRVTPNLMGHLCGNQRVLTKHKHIPGLIHNMTARCCDLPFPEQACCAEEEKLTFINDLCGPRRNIWRDPALCCYLSPGDEQVNCFNINYLRNVALVSGDTENAKGQGEQGSTGGTNISSTSEPKEE

SEQ ID NO: 2782 - protein, 105 aa, Homo sapiens
MAKISSPTETERCIESLIAVFQKYAGKDGYNYTLSKTEFLSFMNTELAAFTKNQKDPGVLDRMMKKLDTNSDGQLDFSEFLNLIGGLAMACHDSFLKAVPSQKRT

SEQ ID NO: 2783 - protein, 1291 aa, Homo sapiens
MSSLPGCIGLDAATATVESEEIAELQQAVVEELGISMEELRHFIDEELEKMDCVQQRKKQLAELETWVIQKESEVAHVDQLFDDASRAVTNCESLVKDFYSKLGLQYRDSSSEDESSRPTEIIEIPDEDDDVLSIDSGDAGSRTPKDQKLREAMAALRKSAQDVQKFMDAVNKKSSSQDLHKGTLSQMSGELSKDGDLIVSMRILGKKRTKTWHKGTLIAIQTVGPGKKYKVKFDNKGKSLLSGNHIAYDYHPPADKLYVGSRVVAKYKDGNQVWLYAGIVAETPNVKNKLRFLIFFDDGYASYVTQSELYPICRPLKKTWEDIEDISCRDFIEEYVTAYPNRPMVLLKSGQLIKTEWEGTWWKSRVEEVDGSLVRILFLDDKRCEWIYRGSTRLEPMFSMKTSSASALEKKQGQLRTRPNMGAVRSKGPVVQYTQDLTGTGTQFKPVEPPQPTAPPAPPFPPAPPLSPQAGDSDLESQLAQSRKQVAKKSTSFRPGSVGSGHSSPTSPALSENVSGGKPGINQTYRSPLGSTASAPAPSALPAPPAPPVFHGMLERAPAEPSYRAPMEKLFYLPHVCSYTCLSRVRPMRNEQYRGKNPLLVPLLYDFRRMTARRRVNRKMGFHVIYKTPCGLCLRTMQEIERYLFETGCDFLFLEMFCLDPYVLVDRKFQPYKPFYYILDITYGKEDVPLSCVNEIDTTPPPQVAYSKERIPGKGVFINTGPEFLVGCDCKDGCRDKSKCACHQLTIQATACTPGGQINPNSGYQYKRLEECLPTGVYECNKRCKCDPNMCTNRLVQHGLQVRLQLFKTQNKGWGIRCLDDIAKGSFVCIYAGKILTDDFADKEGLEMGDEYFANLDHIESVENFKEGYESDAPCSSDSSGVDLKDQEDGNSGTEDPEESNDDSSDDNFCKDEDFSTSSVWRSYATRRQTRGQKENGLSETTSKDSHPPDLGPPHIPVPPSIPVGGCNPPSSEETPKNKVASWLSCNSVSEGGFADSDSHSSFKTNEGGEGRAGGSRMEAEKASTSGLGIKDEGDIKQAKKEDTDDRNKMSVVTESSRNYGYNPSPVKPEGLRRPPSKTSMHQSRRLMASAQSNPDDVLTLSSSTESEGESGTSRKPTAGQTSATAVDSDDIQTISSGSEGDDFEDKKNMTGPMKRQVAVKSTRGFALKSTHGIAIKSTNMASVDKGESAPVRKNTRQFYDGEESCYIIDAKLEGNLGRYLNHSCSPNLFVQNVFVDTHDLRFPWVAFFASKRIRAGTELTWDYNYEVGSVEGKELLCCCGAIECRGRLL

SEQ ID NO: 2784 - protein, 1074 aa, Homo sapiens
MENWTGRPWLYLLLLLSLPQLCLDQEVLSGHSLQTPTEEGQGPEGVWGPWVQWASCSQPCGVGVQRRSRTCQLPTVQLHPSLPLPPRPPRHPEALLPRGQGPRPQTSPETLPLYRTQSRGRGGPLRGPASHLGREETQEIRAARRSRLRDPIKPGMFGYGRVPFALPLHRNRRHPRSPPRSELSLISSRGEEAIPSPTPRAEPFSANGSPQTELPPTELSVHTPSPQAEPLSPETAQTEVAPRTRPAPLRHHPRAQASGTEPPSPTHSLGEGGFFRASPQPRRPSSQGWASPQVAGRRPDPFPSVPRGRGQQGQGPWGTGGTPHGPRLEPDPQHPGAWLPLLSNGPHASSLWSLFAPSSPIPRCSGESEQLRACSQAPCPPEQPDPRALQCAAFNSQEFMGQLYQWEPFTEVQGSQRCELNCRPRGFRFYVRHTEKVQDGTLCQPGAPDICVAGRCLSPGCDGILGSGRRPDGCGVCGGDDSTCRLVSGNLTDRGGPLGYQKILWIPAGALRLQIAQLRPSSNYLALRGPGGRSIINGNWAVDPPGSYRAGGTVFRYNRPPREEGKGESLSAEGPTTQPVDVYMIFQEENPGVFYQYVISSPPPILENPTPEPPVPQLQPEILRVEPPLAPAPRPARTPGTLQRQVRIPQMPAPPHPRTPLGSPAAYWKRVGHSACSASCGKGVWRPIFLCISRESGEELDERSCAAGARPPASPEPCHGTPCPPYWEAGEWTSCSRSCGPGTQHRQLQCRQEFGGGGSSVPPERCGHLPRPNITQSCQLRLCGHWEVGSPWSQCSVRCGRGQRSRQVRCVGNNGDEVSEQECASGPPQPPSREACDMGPCTTAWFHSDWSSKCSAECGTGIQRRSVVCLGSGAALGPGQGEAGAGTGQSCPTGSRPPDMRACSLGPCERTWRWYTGPWGECSSECGSGTQRRDIICVSKLGTEFNVTSPSNCSHLPRPPALQPCQGQACQDRWFSTPWSPCSRSCQGGTQTREVQCLSTNQTLSTRCPPQLRPSRKRPCNSQPCSQRPDDQCKDSSPHCPLVVQARLCVYPYYTATCCRSCAHVLERSPQDPS

SEQ ID NO: 2785 - protein, 329 aa, Homo sapiens
MWGLKVLLLPVVSFALYPEEILDTHWELWKKTHRKQYNNKVDEISRRLIWEKNLKYISIHNLEASLGVHTYELAMNHLGDMTSEEVVQKMTGLKVPLSHSRSNDTLYIPEWEGRAPDSVDYRKKGYVTPVKNQGQCGSCWAFSSVGALEGQLKKKTGKLLNLSPQNLVDCVSENDGCGGGYMTNAFQYVQKNRGIDSEDAYPYVGQEESCMYNPTGKAAKCRGYREIPEGNEKALKRAVARVGPVSVAIDASLTSFQFYSKGVYYDESCNSDNLNHAVLAVGYGIQKGNKHWIIKNSWGENWGNKGYILMARNKNNACGIANLASFPKM

SEQ ID NO: 2786 - protein, 549 aa, Homo sapiens
MASASSGPSSSVGFSSFDPAVPSCTLSSASGIKRPMASEVPYASGMPIKKIGHRSVDSSGETTYKKTTSSALKGAIQLGITHTVGSLSTKPERDVLMQDFYVVESIFFPSEGSNLTPAHHYNDFRFKTYAPVAFRYFRELFGIRPDDYLYSLCSEPLIELCSSGASGSLFYVSSDDEFIIKTVQHKEAEFLQKLLPGYYMNLNQNPRTLLPKFYGLYCVQAGGKNIRIVVMNNLLPRSVKMHIKYDLKGSTYKRRASQKEREKPLPTFKDLDFLQDIPDGLFLDADMYNALCKTLQRDCLVLQSFKIMDYSLLMSIHNIDHAQREPLSSETQYSVDTRRPAPQKALYSTAMESIQGEARRGGTMETDDHMGGIPARNSKGERLLLYIGIIDILQSYRFVKKLEHSWKALVHDGDTVSVHRPGFYAERFQRFMCNTVFKKIPLKPSPSKKFRSGSSFSRRAGSSGNSCITYQPSVSGEHKAQVTTKAEVEPGVHLGRPDVLPQTPPLEEISEGSPIPDPSFSPLVGETLQMLTTSTTLEKLEVAESEFTH

SEQ ID NO: 2787 - protein, 380 aa, Homo sapiens
MLQTLYDYFWWERLWLPVNLTWADLEDRDGRVYAKASDLYITLPLALLFLIVRYFFELYVATPLAALLNIKEKTRLRAPPNATLEHFYLTSGKQPKQVEVELLSRQSGLSGRQVERWFRRRRNQDRPSLLKKFREASWRFTFYLIAFIAGMAVIVDKPWFYDMKKVWEGYPIQSTIPSQYWYYMIELSFYWSLLFSIASDVKRKDFKEQIIHHVATIILISFSWFANYIRAGTLIMALHDSSDYLLESAKMFNYAGWKNTCNNIFIVFAIVFIITRLVILPFWILHCTLVYPLELYPAFFGYYFFNSMMGVLQLLHIFWAYLILRMAHKFITGKLVEDERSDREETESSEGEEAAAGGGAKSRPLANGHPILNNNHRKND

SEQ ID NO: 2788 - protein, 285 aa, Homo sapiens
MTTLTHRARRTEISKNSEKKMESEEDSNWEKSPDNEDSGDSKDIRLTLMEEVLLLGLKDKEGYTSFWNDCISSGLRGGILIELAMRGRIYLEPPTMRKKRLLDRKVLLKSDSPTGDVLLDETLKHIKATEPTETVQTWIELLTGETWNPFKLQYQLRNVRERIAKNLVEKGILTTEKQNFLLFDMTTHPVTNTTEKQRLVKKLQDSVLERWVNDPQRMDKRTLALLVLAHSSDVLENVFSSLTDDKYDVAMNRAKDLVELDPEVEGTKPSATEMIWAVLAAFNKS

SEQ ID NO: 2789 - protein, 584 aa, Homo sapiens
MFAKAFRVKSNTAIKGSDRRKLRADVTTAFPTLGTDQVSELVPGKEELNIVKLYAHKGDAVTVYVSGGNPILFELEKNLYPTVYTLWSYPDLLPTFTTWPLVLEKLVGGADLMLPGLVMPPAGLPQVQKGDLCAISLVGNRAPVAIGVAAMSTAEMLTSGLKGRGFSVLHTYQDHLWRSGNKSSPPSIAPLALDSADLSEEKGSVQMDSTLQGDMRHMTLEGEEENGEVHQAREDKSLSEAPEDTSTRGLNQDSTDSKTLQEQMDELLQQCFLHALKCRVKKADLPLLTSTFLGSHMFSCCPEGRQLDIKKSSYKKLSKFLQQMQQEQIIQVKELSKGVESIVAVDWKHPRITSFVIPEPSPTSQTIQEGSREQPYHPPDIKPLYCVPASMTLLFQESGHKKGSFLEGSEVRTIVINYAKKNDLVDADNKNLVRLDPILCDCILEKNEQHTVMKLPWDSLLTRCLEKLQPAYQVTLPGQEPIVKKGRICPIDITLAQRASNKKVTVVRNLEAYGLDPYSVAAILQQRCQASTTVNPAPGAKDSLQVQIQGNQVHHLGWLLLEEYQLPRKHIQGLEKALKPGKKK

SEQ ID NO: 2790 - protein, 814 aa, Homo sapiens
MRLALLWALGLLGAGSPLPSWPLPNIGGTEEQQAESEKAPREPLEPQVLQDDLPISLKKVLQTSLPEPLRIKLELDGDSHILELLQNRELVPGRPTLVWYQPDGTRVVSEGHTLENCCYQGRVRGYAGSWVSICTCSGLRGLVVLTPERSYTLEQGPGDLQGPPIISRIQDLHLPGHTCALSWRESVHTQKPPEHPLGQRHIRRRRDVVTETKTVELVIVADHSEAQKYRDFQHLLNRTLEVALLLDTFFRPLNVRVALVGLEAWTQRDLVEISPNPAVTLENFLHWRRAHLLPRLPHDSAQLVTGTSFSGPTVGMAIQNSICSPDFSGGVNMDHSTSILGVASSIAHELGHSLGLDHDLPGNSCPCPGPAPAKTCIMEASTDFLPGLNFSNCSRRALEKALLDGMGSCLFERLPSLPPMAAFCGNMFVEPGEQCDCGFLDDCVDPCCDSLTCQLRPGAQCASDGPCCQNCQLRPSGWQCRPTRGDCDLPEFCPGDSSQCPPDVSLGDGEPCAGGQAVCMHGRCASYAQQCQSLWGPGAQPAAPLCLQTANTRGNAFGSCGRNPSGSYVSCTPRDAICGQLQCQTGRTQPLLGSIRDLLWETIDVNGTELNCSWVHLDLGSDVAQPLLTLPGTACGPGLVCIDHRCQRVDLLGAQECRSKCHGHGVCDSNRHCYCEEGWAPPDCTTQLKATSSLTTGLLLSLLVLLVLVMLGASYWYRARLHQRLCQLKGPTCQYRAAQSGPSERPGPPQRALLARGTKSQGPAKPPPPRKPLPADPQGRCPSGDLPGPGAGIPPLVVPSRPAPPPPTVSSLYL

SEQ ID NO: 2791 - protein, 146 aa, Homo sapiens
MLAGAGRPGLPQGRHLCWLLCAFTLKLCQAEAPVQEEKLSASTSNLPCWLVEEFVVAEECSPCSNFRAKTTPECGPTGYVEKITCSSSKRNEFKSCRSALMEQRLFWKFEGAVVCVALIFACLVIIRQRQLDRKALEKVRKQIESI

SEQ ID NO: 2792 - protein, 1079 aa, Homo sapiens
MMTSVGTNRARGNWEQPQNQNQTQHKQRPQATAEQIRLAQMISDHNDADFEEKVKQLIDITGKNQDECVIALHDCNGDVNRAINVLLEGNPDTHSWEMVGKKKGVSGQKDGGQTESNEEGKENRDRDRDYSRRRGGPPRRGRGASRGRECMHGALSKPAVVRGQENGLDGTKSGGPSGRGTERGRRGRGRGRGGSGRRGGRFSAQGMGTFNPADYAEPANTDDNYGNSSGNTWNNTGHFEPDDGTSAWRTATEEWGTEDWNEDLSETKIFTASNVSSVPLPAENVTITAGQRIDLAVLLGKTPSTMENDSSNLDPSQAPSLAQPLVFSNSKQTAISQPASGNTFSHHSMVSMLGKGFGDVGEAKGGSTTGSQFLEQFKTAQALAQLAAQHSQSGSTTTSSWDMGSTTQSPSLVQYDLKNPSDSAVHSPFTKRQAFTPSSTMMEVFLQEKSPAVATSTAAPPPPSSPLPSKSTSAPQMSPGSSDNQSSSPQPAQQKLKQQKKKASLTSKIPALAVEMPGSADISGLNLQFGALQFGSEPVLSDYESTPTTSASSSQAPSSLYTSTASESSSTISSNQSQESGYQSGPIQSTTYTSQNNAQGPLYEQRSTQTRRYPSSISSSPQKDLTQAKNGFSSVQATQLQTTQSVEGATGSAVKSDSPSTSSIPPLNETVSAASLLTTTNQHSSSLGGLSHSEEIPNTTTTQHSSTLSTQQNTLSSSTSSGRTSTSTLLHTSVESEANLHSSSSTFSTTSSTVSAPPPVVSVSSSLNSGSSLGLSLGSNSTVTASTRSSVATTSGKAPPNLPPGVPPLLPNPYIMAPGLLHAYPPQVYGYDDLQMLQTRFPLDYYSIPFPTPTTPLTGRDGSLASNPYSGDLTKFGRGDASSPAPATTLAQPQQNQTQTHHTTQQTFLNPALPPGYSYTSLPYYTGVPGLPSTFQYGPAVFPVAPTSSKQHGVNVSVNASATPFQQPSGYGSHGYNTGVSVTSSNTGVPDISGSVYSKTQQSFEKQGFHSGTPAASFNLPSALGSGGPINPATAAAYPPAPFMHILTPHQQPHSQILHHHLQQDGQDILNFVDDQLGE

SEQ ID NO: 2793 - protein, 2240 aa, Homo sapiens
MLPCKKRRTTVTESLQHKGNQEENNVDLESAVKPESDQVKDLSSVSLSWDPSHGRVAGFEVQSLQDAGNQLGMEDTSLSSGMLTQNTNVPILEGVDVAISQGITLPSLESFHPLNIHIGKGKLHATGSKRGKKMTLRPGPVTQEDRCDHLTLKEPFSGEPSEEVKEEGGKPQMNSEGEIPSLPSGSQSAKPVSQPRKSTQPDVCASPQEKPLRTLFHQPEEEIEDGGLFIPMEEQDNEESEKRRKKKKGTKRKRDGRGQEGTLAYDLKLDDMLDRTLEDGAKQHNLTAVNVRNILHEVITNEHVVAMMKAAISETEDMPMFEPKMTRSKLKEVVEKGVVIPTWNISPIKKANEIKPPQFVDIHLEEDDSSDEEYQPDDEEEDETAEESLLESDVESTASSPRGAKKSRLRQSSEMTETDEESGILSEAEKVTTPAIRHISAEVVPMGPPPPPKPKQTRDSTFMEKLHAVDEELASSPVCMDSFQPMDDSLIAFRTRSKMPLKDVPLGQLEAELQAPDITPDMYDPNTADDEDWKMWLGGLMNDDVGNEDEADDDDDPEYNFLEDLDEPDTEDFRTDRAVRITKKEVNELMEELFETFQDEMGFSNMEDDGPEEEECVAEPRPNFNTPQALRFEEPLANLLNEQHRTVKELFEQLKMKKSSAKQLQEVEKVKPQSEKVHQTLILDPAQRKRLQQQMQQHVQLLTQIHLLATCNPNLNPEATTTRIFLKELGTFAQSSIALHHQYNPKFQTLFQPCNLMGAMQLIEDFSTHVSIDCSPHKTVKKTANEFPCLPKQVAWILATSKVFMYPELLPVCSLKAKNPQDKIVFTKAEDNLLALGLKHFEGTEFPNPLISKYLLTCKTAHQLTVRIKNLNMNRAPDNIIKFYKKTKQLPVLGKCCEEIQPHQWKPPIEREEHRLPFWLKASLPSIQEELRHMADGAREVGNMTGTTEINSDRSLEKDNLELGSESRYPLLLPKGVVLKLKPVATRFPRKAWRQKRSSVLKPLLIQPSPSLQPSFNPGKTPARSTHSEAPPSKMVLRIPHPIQPATVLQTVPGVPPLGVSGGESFESPAALPAVPPEARTSFPLSESQTLLSSAPVPKVMLPSLAPSKFRKPYVRRRPSKRRGVKASPCMKPAPVIHHPASVIFTVPATTVKIVSLGGGCNMIQPVNAAVAQSPQTIPITTLLVNPTSFPCPLNQSLVASSVSPLIVSGNSVNLPIPSTPEDKAHVNVDIACAVADGENAFQGLEPKLEPQELSPLSATVFPKVEHSPGPPLADAECQEGLSENSACRWTVVKTEEGRQALEPLPQGIQESLNNPTPGDLEEIVKMEPEEAREEISGSPERDICDDIKVEHAVELDTGAPSEELSSAGEVTKQTVLQKEEERSQPTKTPSSSQEPPDEGTSGTDVNKGSSKNALSSMDPEVRLSSPPGKPEDSSSVDGQSVGTPVGPETGGEKNGPEEEEEEDFDDLTQDEEDEMSSASEESVLSVPELQETMEKLTWLASERRMSQEGESEEENSQEENSEPEEEEEEEAEGMESLQKEDEMTDEAVGDSAEKPPTFASPETAPEVETSRTPPGESIKAAGKGRNNHRARNKRGSRARASKDTSKLLLLYDEDILERDPLREQKDLAFAQAYLTRVREALQHIPGKYEDFLQVIYEFESSTQRRTAVDLYKSLQILLQDWPQLLKDFAAFLLPEQALACGLFEEQQAFEKSRKFLRQLEICFAENPSHHQKIIKVLQGCADCLPQEITELKTQMWQLLKGHDHLQDEFSIFFDHLRPAASRMGDFEEINWTEEKEYEFDGFEEVALPDVEEEEEPPKIPTASKNKRKKEIGVQNHDKETEWPDGAKDCACSCHEGGPDSKLKKSKRRSCSHCSSKVCDSKSYKSKEPHELVGSSPHREASPMPGAKEAGQGKDMMEEEAPEERESTEATQSRTVRTTRKGEMPVSGLAVGSTLPSPREVTVTERLLLDGPPPHSPETPQFPPTTGAVLYTVKRNQVGPEVRSCPKASPRLQKEREGQKAVSESEALMLVWDASETEKLPGTVEPPASFLSPVSSKTRDAGRRHVSGKPDTQERWLPSSRARVKTRDRTCPVHESPSGIDTSETSPKAPRGGLAKDSGTQAKGPEGEQQPKAAEATVCANNSKVSSTGEKVVLWTREADRVILTMCQEQGAQPQTFNIISQQLGNKTPAEVSHRFRELMQLFHTACEASSEDEDDATSTSNADQLSDHGDLLSEEELDE

SEQ ID NO: 2794 - protein, 158 aa, Homo sapiens
MAEQATKSVLFVCLGNICRSPIAEAVFRKLVTDQNISENWRVDSAATSGYEIGNPPDYRGQSCMKRHGIPMSHVARQITKEDFATFDYILCMDESNLRDLNRKSNQVKTCKAKIELLGSYDPQKQLIIEDPYYGNDSDFETVYQQCVRCCRAFLEKAH

SEQ ID NO: 2795 - protein, 158 aa, Homo sapiens
MAEQATKSVLFVCLGNICRSPIAEAVFRKLVTDQNISENWVIDSGAVSDWNVGRSPDPRAVSCLRNHGIHTAHKARQITKEDFATFDYILCMDESNLRDLNRKSNQVKTCKAKIELLGSYDPQKQLIIEDPYYGNDSDFETVYQQCVRCCRAFLEKAH

SEQ ID NO: 2796 - protein, 451 aa, Homo sapiens
MAEAAALVWIRGPGFGCKAVRCASGRCTVRDFIHRHCQDQNVPVENFFVKCNGALINTSDTVQHGAVYSLEPRLCGGKGGFGSMLRALGAQIEKTTNREACRDLSGRRLRDVNHEKAMAEWVKQQAEREAEKEQKRLERLQRKLVEPKHCFTSPDYQQQCHEMAERLEDSVLKGMQAASSKMVSAEISENRKRQWPTKSQTDRGASAGKRRCFWLGMEGLETAEGSNSESSDDDSEEAPSTSGMGFHAPKIGSNGVEMAAKFPSGSQRARVVNTDHGSPEQLQIPVTDSGRHILEDSCAELGESKEHMESRMVTETEETQEKKAESKEPIEEEPTGAGLNKDKETEERTDGERVAEVAPEERENVAVAKLQESQPGNAVIDKETIDLLAFTSVAELELLGLEKLKCELMALGLKCGGTLQERAARLFSVRGLAKEQIDPALFAKPLKGKKK

SEQ ID NO: 2797 - protein, 181 aa, Homo sapiens
MGNIFANLFKGLFGKKEMRILMVGLDAAGKTTILYKLKLGEIVTTIPTIGFNVETVEYKNISFTVWDVGGQDKIRPLWRHYFQNTQGLIFVVDSNDRERVNEAREELMRMLAEDELRDAVLLVFANKQDLPNAMNAAEITDKLGLHSLRHRNWYIQATCATSGDGLYEGLDWLSNQLRNQK

SEQ ID NO: 2798 - protein, 366 aa, Homo sapiens
MQPLWLCWALWVLPLASPGAALTGEQLLGSLLRQLQLKEVPTLDRADMEELVIPTHVRAQYVALLQRSHGDRSRGKRFSQSFREVAGRFLALEASTHLLVFGMEQRLPPNSELVQAVLRLFQEPVPKAALHRHGRLSPRSARARVTVEWLRVRDDGSNRTSLIDSRLVSVHESGWKAFDVTEAVNFWQQLSRPRQPLLLQVSVQREHLGPLASGAHKLVRFASQGAPAGLGEPQLELHTLDLGDYGAQGDCDPEAPMTEGTRCCRQEMYIDLQGMKWAENWVLEPPGFLAYECVGTCRQPPEALAFKWPFLGPRQCIASETDSLPMIVSIKEGGRTRPQVVSLPNMRVQKCSCASDGALVPRRLQP

SEQ ID NO: 2799 - protein, 615 aa, Homo sapiens
MPSRKFADGEVVRGRWPGSSLYYEVEILSHDSTSQLYTVKYKDGTELELKENDIKPLTSFRQRKGGSTSSSPSRRRGSRSRSRSRSPGRPPKSARRSASASHQADIKEARREVEVKLTPLILKPFGNSISRYNGEPEHIERNDAPHKNTQEKFSLSQESSYIATQYSLRPRREEVKLKEIDSKEEKYVAKELAVRTFEVTPIRAKDLEFGGVPGVFLIMFGLPVFLFLLLLMCKQKDPSLLNFPPPLPALYELWETRVFGVYLLWFLIQVLFYLLPIGKVVEGTPLIDGRRLKYRLNGFYAFILTSAVIGTSLFQGVEFHYVYSHFLQFALAATVFCVVLSVYLYMRSLKAPRNDLSPASSGNAVYDFFIGRELNPRIGTFDLKYFCELRPGLIGWVVINLVMLLAEMKIQDRAVPSLAMILVNSFQLLYVVDALWNEEALLTTMDIIHDGFGFMLAFGDLVWVPFIYSFQAFYLVSHPNEVSWPMASLIIVLKLCGYVIFRGANSQKNAFRKNPSDPKLAHLKTIHTSTGKNLLVSGWWGFVRHPNYLGDLIMALAWSLPCGFNHILPYFYIIYFTMLLVHREARDEYHCKKKYGVAWEKYCQRVPYRIFPYIY

SEQ ID NO: 2800 - protein, 365 aa, Homo sapiens
MLDGSPLARWLAAAFGLTLLLAALRPSAAYFGLTGSEPLTILPLTLEPEAAAQAHYKACDRLKLERKQRRMCRRDPGVAETLVEAVSMSALECQFQFRFERWNCTLEGRYRASLLKRGFKETAFLYAISSAGLTHALAKACSAGRMERCTCDEAPDLENREAWQWGGCGDNLKYSSKFVKEFLGRRSSKDLRARVDFHNNLVGVKVIKAGVETTCKCHGVSGSCTVRTCWRQLAPFHEVGKHLKHKYETALKVGSTTNEAAGEAGAISPPRGRASGAGGSDPLPRTPELVHLDDSPSFCLAGRFSPGTAGRRCHREKNCESICCGRGHNTQSRVVTRPCQCQVRWCCYVECRQCTQREEVYTCKG

SEQ ID NO: 2801 - protein, 455 aa, Homo sapiens
MWLEILLTSVLGFAIYWFISRDKEETLPLEDGWWGPGTRSAAREDDSIRPFKVETSDEEIHDLHQRIDKFRFTPPLEDSCFHYGFNSNYLKKVISYWRNEFDWKKQVEILNRYPHFKTKIEGLDIHFIHVKPPQLPAGHTPKPLLMVHGWPGSFYEFYKIIPLLTDPKNHGLSDEHVFEVICPSIPGYGFSEASSKKGFNSVATARIFYKLMLRLGFQEFYIQGGDWGSLICTNMAQLVPSHVKGLHLNMALVLSNFSTLTLLLGQRFGRFLGLTERDVELLYPVKEKVFYSLMRESGYMHIQCTKPDTVGSALNDSPVGLAAYILEKFSTWTNTEFRYLEDGGLERKFSLDDLLTNVMLYWTTGTIISSQRFYKENLGQGWMTQKHERMKVYVPTGFSAFPFELLHTPEKWVRFKYPKLISYSYMVRGGHFAAFEEPELLAQDIRKFLSVLERQ

SEQ ID NO: 2802 - protein, 406 aa, Homo sapiens
MDGWRRMPRWGLLLLLWGSCTFGLPTDTTTFKRIFLKRMPSIRESLKERGVDMARLGPEWSQPMKRLTLGNTTSSVILTNYMDTQYYGEIGIGTPPQTFKVVFDTGSSNVWVPSSKCSRLYTACVYHKLFDASDSSSYKHNGTELTLRYSTGTVSGFLSQDIITVGGITVTQMFGEVTEMPALPFMLAEFDGVVGMGFIEQAIGRVTPIFDNIISQGVLKEDVFSFYYNRDSENSQSLGGQIVLGGSDPQHYEGNFHYINLIKTGVWQIQMKGVSVGSSTLLCEDGCLALVDTGASYISGSTSSIEKLMEALGAKKRLFDYVVKCNEGPTLPDISFHLGGKEYTLTSADYVFQESYSSKKLCTLAIHAMDIPPPTGPTWALGATFIRKFYTEFDRRNNRIGFALAR

SEQ ID NO: 2803 - protein, 186 aa, Homo sapiens
MIALFNKLLDWFKALFWKEEMELTLVGLQYSGKTTFVNVIASGQFNEDMIPTVGFNMRKITKGNVTIKLWDIGGQPRFRSMWERYCRGVSAIVYMVDAADQEKIEASKNELHNLLDKPQLQGIPVLVLGNKRDLPGALDEKELIEKMNLSAIQDREICCYSISCKEKDNIDITLQWLIQHSKSRRS

SEQ ID NO: 2804 - protein, 266 aa, Homo sapiens
MGSKTLPAPVPIHPSLQLTNYSFLQAVNGLPTVPSDHLPNLYGFSALHAVHLHQWTLGYPAMHLPRSSFSKVPGTVSSLVDARFQLPAFPWFPHVIQPKPEITAGGSVPALKTKPRFDFANLALAATQEDPAKLGRGEGPGSPAGGLGALLDVTKLSPEKKPTRGRLPSKTKKEFVCKFCGRHFTKSYNLLIHERTHTDERPYTCDICHKAFRRQDHLRDHRYIHSKEKPFKCQECGKGFCQSRTLAVHKTLHSQVKELKTSKIKC

SEQ ID NO: 2805 - protein, 450 aa, Homo sapiens
MDLSAAAALCLWLLSACRPRDGLEAAAVLRAAGAGPVRSPGGGGGGGGGGRTLAQAAGAAAVPAAAVPRARAARRAAGSGFRNGSVVPHHFMMSLYRSLAGRAPAGAAAVSASGHGRADTITGFTDQATQDESAAETGQSFLFDVSSLNDADEVVGAELRVLRRGSPESGPGSWTSPPLLLLSTCPGAARAPRLLYSRAAEPLVGQRWEAFDVADAMRRHRREPRPPRAFCLLLRAVAGPVPSPLALRRLGFGWPGGGGSAAEERAVLVVSSRTQRKESLFREIRAQARALGAALASEPLPDPGTGTASPRAVIGGRRRRRTALAGTRTAQGSGGGAGRGHGRRGRSRCSRKPLHVDFKELGWDDWIIAPLDYEAYHCEGLCDFPLRSHLEPTNHAIIQTLLNSMAPDAAPASCCVPARLSPISILYIDAANNVVYKQYEDMVVEACGCR

SEQ ID NO: 2806 - protein, 440 aa, Homo sapiens
MALLVLGLVSCTFFLAVNGLYSSSDDVIELTPSNFNREVIQSDSLWLVEFYAPWCGHCQRLTPEWKKAATALKDVVKVGAVDADKHHSLGGQYGVQGFPTIKIFGSNKNRPEDYQGGRTGEAIVDAALSALRQLVKDRLGGRSGGYSSGKQGRSDSSSKKDVIELTDDSFDKNVLDSEDVWMVEFYAPWCGHCKNLEPEWAAAASEVKEQTKGKVKLAAVDATVNQVLASRYGIRGFPTIKIFQKGESPVDYDGGRTRSDIVSRALDLFSDNAPPPELLEIINEDIAKRTCEEHQLCVVAVLPHILDTGAAGRNSYLEVLLKLADKYKKKMWGWLWTEAGAQSELETALGIGGFGYPAMAAINARKMKFALLKGSFSEQGINEFLRELSFGRGSTAPVGGGAFPTIVEREPWDGRDGELPVEDDIDLSDVELDDLGKDEL

SEQ ID NO: 2807 - protein, 196 aa, Homo sapiens
MAAIRKKLVVVGDGACGKTCLLIVFSKDEFPEVYVPTVFENYVADIEVDGKQVELALWDTAGQEDYDRLRPLSYPDTDVILMCFSVDSPDSLENIPEKWVPEVKHFCPNVPIILVANKKDLRSDEHVRTELARMKQEPVRTDDGRAMAVRIQAYDYLECSAKTKEGVREVFETATRAALQKRYGSQNGCINCCKVL

SEQ ID NO: 2808 - protein, 342 aa, Homo sapiens
MASVTRAVFGELPSGGGTVEKFQLQSDLLRVDIISWGCTITALEVKDRQGRASDVVLGFAELEGYLQKQPYFGAVIGRVANRIAKGTFKVDGKEYHLAINKEPNSLHGGVRGFDKVLWTPRVLSNGVQFSRISPDGEEGYPGELKVWVTYTLDGGELIVNYRAQASQATPVNLTNHSYFNLAGQASPNINDHEVTIEADTYLPVDETLIPTGEVAPVQGTAFDLRKPVELGKHLQDFHLNGFDHNFCLKGSKEKHFCARVHHAASGRVLEVYTTQPGVQFYTGNFLDGTLKGKNGAVYPKHSGFCLETQNWPDAVNQPRFPPVLLRPGEEYDHTTWFKFSVA

SEQ ID NO: 2809 - protein, 149 aa, Homo sapiens [sequence omitted]

SEQ ID NO: 2810 - protein, 156 aa, Homo sapiens
MQIFVKTLTGKTITLEVEPSDTIENVKAKIQDKEGIPPDQQRLIFAGKQLEDGRTLSDYNIQKESTLHLVLRLRGGAKKRKKKSYTTPKKNKHKRKKVKLAVLKYYKVDENGKISRLRRECPSDECGAGVFMASHFDRHYCGKCCLTYCFNKPEDK

SEQ ID NO: 2811 - protein, 977 aa, Homo sapiens
MASSHSSSPVPQGSSSDVFFKIEVDPSKHIRPVPSLPDVCPKEPTGDSHSLYVAPSLVTDQHRWTVYHSKVNLPAALNDPRLAKRESDFFTKTWGLDFVDTEVIPSFYLPQISKEHFTVYQQEISQREKIHERCKNICPPKDTFERTLLHTHDKSRTDLEQVPKIFMKPDFALDDSLTFNSVLPWSHFNTAGGKGNRDAASSKLLQEKLSHYLDIVEVNIAHQISLRSEAFFHAMTSQHELQDYLRKTSQAVKMLRDKIAQIDKVMCEGSLHILRLALTRNNCVKVYNKLKLMATVHQTQPTVQVLLSTSEFVGALDLIATTQEVLQQELQGIHSFRHLGSQLCELEKLIDKMMIAEFSTYSHSDLNRPLEDDCQVLEEERLISLVFGLLKQRKLNFLEIYGEKMVITAKNIIKQCVINKVSQTEEIDTDVVVKLADQMRMLNFPQWFDLLKDIFSKFTIFLQRVKATLNIIHSVVLSVLDKNQRTRELEEISQQKNAAKDNSLDTEVAYLIHEGMFISDAFGEGELTPIAVDTTSQRNASPNSEPCSSDSVSEPECTTDSSSSKEHTSSSAIPGGVDIMVSEDMKLTDSELGKLANNIQELLYSASDICHDRAVKFLMSRAKDGFLEKLNSMEFITLSRLMETFILDTEQICGRKSTSLLGALQSQAIKFVNRFHEERKTKLSLLLDNERWKQADVPAEFQDLVDSLSDGKIALPEKKSGATEERKPAEVLIVEGQQYAVVGTVLLLIRIILEYCQCVDNIPSVTTDMLTRLSDLLKYFNSRSCQLVLGAGALQVVGLKTITTKNLALSSRCLQLIVHYIPVIRAHFEARLPPKQYSMLRHFDHITKDYHDHIAEISAKLVAIMDSLFDKLLSKYEVKAPVPSACFRNICKQMTKMHEAIFDLLPEEQTQMLFLRINASYKLHLKKQLSHLNVINDGGPQNGLVTADVAFYTGNLQALKGLKDLDLNMAEIWEQKR

SEQ ID NO: 2812 - protein, 175 aa, Homo sapiens
MLPPMALPSVSWMLLSCLILLCQVQGEETQKELPSPRISCPKGSKAYGSPCYALFLSPKSWMDADLACQKRPSGKLVSVLSGAEGSFVSSLVRSISNSYSYIWIGLHDPTQGSEPDGDGWEWSSTDVMNYFAWEKNPSTILNPGHCGSLSRSTGFLKWKDYNCDAKLPYVCKFKD

SEQ ID NO: 2813 - protein, 926 aa, Homo sapiens
MSRRRKHDDSPSPKKTPHKTVAAEECGSVVEPGRRRLRSARGSWPCGAREGPPGPVRQREQPPTAALCSKSNPEERYETPKRALKMDSLSSSFSSPNDPDGQNDIFWDQNSPLTKQLGKGRKKQIYTTDSDEISHIVNRIAPQDEKPTTNSMLDMWIGETAIPCTPSVAKGKSRAKISCTKLKTQSQEEELMKLAKQFDKNMEELDVIQEQNKRNYDFTQMISETEILSNYKDNIQMWSLHNIVPEIDNATKKPIKGNTKISVANNQNSSQKPFDQIAEAAFNAIFDGSTQKCSGQLSQELPEAFWSTSNTTFVKTNALKEEKIITNETLVIEKLSNKTPRSLSSQVDTPIMTKSCVTSCTKEPETSNKYIDAFTTSDFEDDWENLLGSEPFAMQNIDMPELFPSKTAHVTDQKEICTFNSKTVKNTSRANTSPDARLGDSKVLQDLSSKTYDRELIDAEYRFSPNSNKSNKLSTGNKMKFENSSNKIVIQDEIQNCIVTSNLTKIKEDILTNSTEASERKSALNTRYSNEQKNKCILNQSIKAPVNTDLFGSANLGSKTSVSNPNQTSASKVGSFFDDWNDPSFANEIIKACHQLDNTWEADDVDDDLLYQACDDIERLTQQQDIRKDSKTSESICEINNNSEHGAKLTQQQDIRKDSKTSESICEINNNSEHGAKNMFAISKQGSNLVQSKHLNPGSISVQTSLTNSSQIDKPMKMEKGEMYGNSPRFLGATNLTMYSKISNCQINNLHVSYTNTDVPIQVNSSKLVLPGSSSLNVTSDHMNTEITTYKKKLSTNQPCHKTVTDEAQSNLNTTVGFSKFTFTRMKNSQILSQFNQNCITGSMSDTKITQGVEKKKGVNPLLEEAVGQQSLVKLSESLKQSSKEEEEKNRKCSPEEIQRKRQEALVRRMAKARASSVNAAPTSFL

SEQ ID NO: 2814 - protein, 76 aa, Homo sapiens
MSKAHPPELKKFMDKKLSLKLNGGRHVQGILRGFDPFMNLVIDECVEMATSGQQNNIGMVVIRGNSIIMLEALERV

SEQ ID NO: 2815 - protein, 390 aa, Homo sapiens
MAQRYDDLPHYGGMDGVGIPSTMYGDPHAARSMQPVHHLNHGPPLHSHQYPHTAHTNAMAPSMGSSVNDALKRDKDAIYGHPLFPLLALIFEKCELATCTPREPGVAGGDVCSSESFNEDIAVFAKQIRAEKPLFSSNPELDNLMIQAIQVLRFHLLELEKVHELCDNFCHRYISCLKGKMPIDLVIDDREGGSKSDSEDITRSANLTDQPSWNRDHDDTASTRSGGTPGPSSGGHTSHSGDNSSEQGDGLDNSVASPSTGDDDDPDKDKKRHKKRGIFPKVATNIMRAWLFQHLTHPYPSEEQKKQLAQDTGLTILQVNNWFINARRRIVQPMIDQSNRAVSQGTPYNPDGQPMGGFVMDGQQHMGIRAPGPMSGMGMNMGMEGQWHYM

SEQ ID NO: 2816 - protein, 430 aa, Homo sapiens
MATAVRAVGCLPVLCSGTAGHLLGRQCSLNTLPAASILAWKSVLGNGHLSSLGTRDTHPYASLSRALQTQCCISSPSHLMSQQYRPYSFFTKLTADELWKGALAETGAGAKKGRGKRTKKKKRKDLNRGQIIGEGRYGFLWPGLNVPLMKNGAVQTIAQRSKEEQEKVEADMIQQREEWDRKKKMKVKRERGWSGNSWGGISLGPPDPGPCGETYEDFDTRILEVRNVFTMTAKEGRKKSIRVLVAVGNGKGAAGFSIGKATDRMDAFRKAKNRAVHHLHYIERYEDHTIFHDISLRFKRTHIKMKKQPKGYGLRCHRAIITICRLIGIKDMYAKVSGSINMLSLTQGLFRGLSRQETHQQLADKKGLHVVEIREECGPLPIVVASPRGPLRKDPEPEDEVPDVKLDWEDVKTAQGMKRSVWSNLKRAAT

SEQ ID NO: 2817 - protein, 175 aa, Homo sapiens
MQLTHQLDLFPECRVTLLLFKDVKNAGDLRRKAMEGTIDGSLINPTVIVDPFQILVAANKAVHLYKLGKMKTRTLSTEIIFNLSPNNNISEALKKFGISANDTSILIVYIEEGEKQINQEYLISQVEGHQVSLKNLPEIMNITEVKKIYKLSSQEESIGTLLDAIICRMSTKDVL

SEQ ID NO: 2818 - protein, 227 aa, Homo sapiens
MAPCHIRKYQESDRQWVVGLLSRGMAEHAPATFRQLLKLPRTLILLLGGPLALLLVSGSWLLALVFSISLFPALWFLAKKPWTEYVDMTLCTDMSDITKSYLSERGSCFWVAESEEKVVGMVGALPVDDPTLREKRLQLFHLFVDSEHRRQGIAKALVRTVLQFARDQGYSEVILDTGTIQLSAMALYQSMGFKKTGQSFFCVWARLVALHTVHFIYHLPSSKVGSL

SEQ ID NO: 2819 - protein, 811 aa, Homo sapiens
MERGKMAEAESLETAAEHERILREIESTDTACIGPTLRSVYDGEEHGRFMEKLETRIRNHDREIEKMCNFHYQGFVDSITELLKVRGEAQKLKNQVTDTNRKLQHEGKELVIAMEELKQCRLQQRNISATVDKLMLCLPVLEMYSKLRDQMKTKRHYPALKTLEHLEHTYLPQVSHYRFCKVMVDNIPKLREEIKDVSMSDLKDFLESIRKHSDKIGETAMKQAQQQRNLDNIVLQQPRIGSKRKSKKDAYIIFDTEIESTSPKSEQDSGILDVEDEEDDEEVPGAQDLVDFSPVYRCLHIYSVLGARETFENYYRKQRRKQARLVLQPPSNMHETLDGYRKYFNQIVGFFVVEDHILHTTQGLVNRAYIDELWEMALSKTIAALRTHSSYCSDPNLVLDLKNLIVLFADTLQVYGFPVNQLFDMLLEIRDQYSETLLKKWAGIFRNILDSDNYSPIPVTSEEMYKKVVGQFPFQDIELEKQPFPKKFPFSEFVPKVYNQIKEFIYACLKFSEDLHLSSTEVDDMIRKSTNLLLTRTLSNSLQNVIKRKNIGLTELVQIIINTTHLEKSCKYLEEFITNITNVLPETVHTTKLYGTTTFKDARHAAEEEIYTNLNQKIDQFLQLADYDWMTGDLGNKASDYLVDLIAFLRSTFAVFTHLPGKVAQTACMSACKHLATSLMQLLLEAEVRQLTLGALQQFNLDVRECEQFARSGPVPGFQEDTLQLAFIDLRQLLDLFIQWDWSTYLADYGQPNCKYLRVNPVTALTLLEKMKDTSRKNNMFAQFRKNERDKQKLIDTVAKQLRGLISSHHS

SEQ ID NO: 2820 - protein, 196 aa, Homo sapiens
MWFMYLLSWLSLFIQVAFITLAVAAGLYYLAELIEEYTVATSRIIKYMIWFSTAVLIGLYVFERFPTSMIGVGLFTNLVYFGLLQTFPFIMLTSPNFILSCGLVVVNHYLAFQFFAEEYYPFSEVLAYFTFCLWIIPFAFFVSLSAGENVLPSTMQPGDDVVSNYFTKGKRGKRLGILVVFSFIKEAILPSRQKIY

SEQ ID NO: 2821 - protein, 377 aa, Homo sapiens
MRNSETLERGVGGCRVFSCLGSYPGIEGAGLALLADLALGGRLLGTHMSQWHHPRSGWGRRRDFSGRSSAKKKGGNHIPERWKDYLPVGQRMPGTRFIAFKVPLQKSFEKKLAPEECFSPLDLFNKIREQNEELGLIIDLTYTQRYYKPEDLPETVPYLKIFTVGHQVPDDETIFKFKHAVNGFLKENKDNDKLIGVHCTHGLNRTGYLICRYLIDVEGVRPDDAIELFNRCRGHCLERQNYIEDLQNGPIRKNWNSSVPRSSDFEDSAHLMQPVHNKPVKQGPRYNLHQIQGHSAPRHFHTQTQSLQQSVRKFSENPHVYQRHHLPPPGPPGEDYSHRRYSWNVKPNASRAAQDRRRWYPYNYSRLSYPACWEWTQ

SEQ ID NO: 2822 - protein, 206 aa, Homo sapiens
MAANKSKGQSSLALHKVIMVGSGGVGKSALTLQFMYDEFVEDYEPTKADSYRKKVVLDGEEVQIDILDTAGQEDYAAIRDNYFRSGEGFLLVFSITEHESFTATAEFREQILRVKAEEDKIPLLVVGNKSDLEERRQVPVEEARSKAEEWGVQYVETSAKTRANVDKVFFDLMREIRTKKMSENKDKNGKKSSKNKKSFKERCCLL

SEQ ID NO: 2823 - protein, 287 aa, Homo sapiens
MALGLLIAVPLLLQAAPRGAAHYEMMGTCRMICDPYTAAPGGEPPGAKAQPPGPSTAALEVMQDLSANPPPPFIQGPKGDPGRPGKPGPRGPPGEPGPPGPRGPPGEKGDSGRPGLPGLQLTAGTASGVGVVGGGAGVGGDSEGEVTSALSATFSGPKIAFYVGLKSPHEGYEVLKFDDVVTNLGNHYDPTTGKFSCQVRGIYFFTYHILMRGGDGTSMWADLCKNGQVRASAIAQDADQNYDYASNSVVLHLDSGDEVYVKLDGGKAHGGNNNKYSTFSGFLLYPD

SEQ ID NO: 2824 - protein, 679 aa, Homo sapiens
MATLITSTTAATAASGPLVDYLWMLILGFIIAFVLAFSVGANDVANSFGTAVGSGVVTLKQACILASIFETVGSVLLGAKVSETIRKGLIDVEMYNSTQGLLMAGSVSAMFGSAVWQLVASFLKLPISGTHCIVGATIGFSLVAKGQEGVKWSELIKIVMSWFVSPLLSGIMSGILFFLVRAFILHKADPVPNGLRALPVFYACTVGINLFSIMYTGAPLLGFDKLPLWGTILISVGCAVFCALIVWFFVCPRMKRKIEREIKCSPSESPLMEKKNSLKEDHEETKLSVGDIENKHPVSEVGPATVPLQAVVEERTVSFKLGDLEEAPERERLPSVDLKEETSIDSTVNGAVQLPNGNLVQFSQAVSNQINSSGHYQYHTVHKDSGLYKELLHKLHLAKVGDCMGDSGDKPLRRNNSYTSYTMAICGMPLDSFRAKEGEQKGEEMEKLTWPNADSKKRIRMDSYTSYCNAVSDLHSASEIDMSVKAEMGLGDRKGSNGSLEEWYDQDKPEVSLLFQFLQILTACFGSFAHGGNDVSNAIGPLVALYLVYDTGDVSSKVATPIWLLLYGGVGICVGLWVWGRRVIQTMGKDLTPITPSSGFSIELASALTVVIASNIGLPISTTHCKVGSVVSVGWLRSKKAVDWRLFRNIFMAWFVTVPISGVISAAIMAIFRYVILRM

SEQ ID NO: 2825 - protein, 508 aa, Homo sapiens
MLWFQGAIPAAIATAKRSGAVFVVFVAGDDEQSTQMAASWEDDKVTEASSNSFVAIKIDTKSEACLQFSQIYPVVCVPSSFFIGDSGIPLEVIAGSVSADELVTRIHKVRQMHLLKSETSVANGSQSESSVSTPSASFEPNNTCENSQSRNAELCEIPPTSDTKSDTATGGESAGHATSSQEPSGCSDQRPAEDLNIRVERLTKKLEERREEKRKEEEQREIKKEIERRKTGKEMLDYKRKQEEELTKRMLEERNREKAEDRAARERIKQQIALDRAERAARFAKTKEEVEAAKAAALLAKQAEMEVKRESYARERSTVARIQFRLPDGSSFTNQFPSDAPLEEARQFAAQTVGNTYGNFSLATMFPRREFTKEDYKKKLLDLELAPSASVVLLPAGRPTASIVHSSSGDIWTLLGTVLYPFLAIWRLISNFLFSNPPPTQTSVRVTSSEPPNPASSSKSEKREPVRKRVLEKRGDDFKKEGKIYRLRTQDDGEDENNTWNGNSTQQM

SEQ ID NO: 2826 - protein, 264 aa, Homo sapiens
MRLRPLPLVVVPGLLQLLFCDSKEVVHATEGLDWEDKDAPGTLVGNVVHSRIISPLRLFVKQSPVPKPGPMAYADSMENFWDWLANITEIQEPLARTKRRPIVKTGKFKKMFGWGDFHSNIKTVKLNLLITGKIVDHGNGTFSVYFRHNSTGLGNVSVSLVPPSKVVEFEVSPQSTLETKESKSFNCRIEYEKTDRAKKTALCNFDPSKICYQEQTQSHVSWLCSKPFKVICIYIAFYSVDYKLVQKVCPDYNYHSETPYLSSG

SEQ ID NO: 2827 - protein, 1608 aa, Homo sapiens
MFPKSNLTVTCWVWRSMRKLFLLLSLLLSHAAHLEGKKDNQFIWKPGPWGRCTGDCGPGGVQSRAVWCFHVDGWTSHLSNCGESNRPPKERSCFRVCDWHSDLFQWEVSDWHHCVLVPYARGEVKPRTAECVTAQHGLQHRMVRCIQKLNRTVVANEICEHFALQPPTEQACLIPCPRDCVVSEFLPWSNCSKGCGKKLQHRTRAVIAPPLFGGLQCPNLTESRACDAPISCPLGEEEYTFSLKVGPWSKCRLPHLKEINPSGRTVLDFNSDSNERVTFKHQSYKAHHHSKSWAIEIGYQTRQVSCTRSDGQNAMLSLCLQDSFPLTVQSCIMPKDCETSQWSSWSPCSKTCRSGSLLPGFRSRSRNVKHMAIGGGKECPELLEKEACIVEGELLQQCPRYSWRTSEWKECQVSLLLEQQDPHWHVTGPVCGGGIQTREVYCAQSVPAAAALRAKEVSRPVEKALCVGPAPLPSQLCNIPCSTDCIVSSWSAWGLCIHENCHDPQGKKGFRTRQRHVLMESTGPAGHCPHLVESVPCEDPMCYRWLASEGICFPDHGKCGLGHRILKAVCQNDRGEDVSGSLCPVPPPPERKSCEIPCRMDCVLSEWTEWSSCSQSCSNKNSDGKQTRSRTILALAGEGGKPCPPSQALQEHRLCNDHSCMQLHWETSPWGPCSEDTLVTALNATIGWNGEATCGVGIQTRRVFCVKSHVGQVMTKRCPDSTRPETVRPCFLPCKKDCIVTAFSEWTPCPRMCQAGNATVKQSRYRIIIQEAANGGQECPDTLYEERECEDVSLCPVYRWKPQKWSPCILVPESVWQGITGSSEACGKGLQTRAVSCISDDNRSAEMMECLKQTNGMPLLVQECTVPCREDCTFTAWSKFTPCSTNCEATKSRRRQLTGKSRKKEKCQDSDLYPLVETELCPCDEFISQPYGNWSDCILPEGRREPHRGLRVQADSKECGEGLRFRAVACSDKNGRPVDPSFCSSSGYIQEKCVIPCPFDCKLSDWSSWGSCSSSCGIGVRIRSKWLKEKPYNGGRPCPKLDLKNQGQVHEAVPCYSECNQYSWVVEHWSSCKINNELRSLRCGGGTQSRKIRCVNTADGEGGAVDSNLCNQDEIPPETQSCSLMCPNECVMSEWGLWSKCPQSCDPHTMQRRTRHLLRPSLNSRTCAEDSQVQPCLLNENCFQFQYNLTEWSTCQLSENAPCGQGVRTRLLSCVCSDGKPVSMDQCEQHNLEKPQRMSIPCLVECVVNCQLSGWTAWTECSQTCGHGGRMSRTRFIIMPTQGEGRPCPTELTQEKTCPVTPCYSWVLGNWSACKLEGGDCGEGVQIRSLSCMVHSGSISHAAGRVEDALCGEMPFQDSILKQLCSVPCPGDCHLTEWSEWSTCELTCIDGRSFETVGRQSRSRTFIIQSFENQDSCPQQVLETRPCTGGKCYHYTWKASLWNNNERTVWCQRSDGVNVTGGCSPQARPAAIRQCIPACRKPFSYCTQGGVCGCEKGYTEIMKSNGFLDYCMKVPGSEDKKADVKNLSGKNRPVNSKIHDIFKGWSLQPLDPDGRVKIWVYGVSGGAFLIMIFLIFTSYLVCKKPKPHQSTPPQQKPLTLAYDGDLDM

SEQ ID NO: 2828 - protein, 142 aa, Homo sapiens
MAAGGSDPRAGDVEEDASQLIFPKEFETAETLLNSEVHMLLEHRKQQNESAEDEQELSEVFMKTLNYTARFSRFKNRETIASVRSLLLQKKLHKFELACLANLCPETAEESKALIPSLEGRFEDEELQQILDDIQTKRSFQY

SEQ ID NO: 2829 - protein, 310 aa, Homo sapiens
MGKRRCVPPLEPKLAAGCCGVKKPKLSGSGTHSHGNQSTTVPGSSSGPLQNHQHVDSSSGRENVSDLTLGPGNSPITRMNPASGALSPLPRPNGTANTTKNLVVTAEMCCYCFDVLYCHLYGFPQPRLPRFTNDPYPLFVTWKTGRDKRLRGCIGTFSAMNLHSGLREYTLTSALKDSRFPPLTREELPKLFCSVSLLTNFEDASDYLDWEVGVHGIRIEFINEKGVKRTATYLPEVAKEQDWDQIQTIDSLLRKGGFKAPITSEFRKTIKLTRYRSEKVTISYAEYIASRQHCFQNGTLHAPPLYNHYS

SEQ ID NO: 2830 - protein, 424 aa, Homo sapiens
MEPFSCDTFVALPPATVDNRIIFGKNSDRLYDEVQEVVYFPAVVHDNLGERLKCTYIEIDQVPETYAVVLSRPAWLWGAEMGANEHGVCIGNEAVWGREEVCDEEALLGMDLVRLGLERADTAEKALNVIVDLLEKYGQGGNCTEGRMVFSYHNSFLIADRNEAWILETAGKYWAAEKVQEGVRNISNQLSITTKIAREHPDMRNYAKRKGWWDGKKEFDFAAAYSYLDTAKMMTSSGRYCEGYKLLNKHKGNITFETMMEILRDKPSGINMEGEFLTTASMVSILPQDSSLPCIHFFTGTPDPERSVFKPFIFVPHISQLLDTSSPTFELEDLVKKKSHFKPDRRHPLYQKHQQALEVVNNNEEKAKIMLDNMRKLEKELFREMESILQNKHLDVEKIVNLFPQCTKDEIQIYQSNLSVKVSS

SEQ ID NO: 2831 - protein, 510 aa, Homo sapiens
MPVPPPPAPPPPPTFALANTEKPTLNKTEQAGRNALLSDISKGKKLKKTVTNDRSAPILDKPKGAGAGGGGGGFGGGGGFGGGGGGGGGGSFGGGGPPGLGGLFQAGMPKLRSTANRDNDSGGSRPPLLPPGGRSTSAKPFSPPSGPGRFPVPSPGHRSGPPEPQRNRMPPPRPDVGSKPDSIPPPVPSTPRPIQSSPHNRGSPPVPGGPRQPSPGPTPPPFPGNRGTALGGGSIRQSPLSSSSPFSNRPPLPPTPSRALDDKPPPPPPPVGNRPSIHREAVPPPPPQNNKPPVPSTPRPSASSQAPPPPPPPSRPGPPPLPPSSSGNDETPRLPQRNLSLSSSTPPLPSPGRSGPLPPPPSERPPPPVRDPPGRSGPLPPPPPVSRNGSTSRALPATPQLPSRSGVDSPRSGPRPPLPPDRPSAGAPPPPPPSTSIRNGFQDSPCEDEWESRFYFHPISDLPPPEPYVQTTKSYPSKLARNESRSGSNRRERGAPPLPPIPRPPKQAAE

SEQ ID NO: 2832 - protein, 428 aa, Homo sapiens
MGGLFSRWRTKPSTVEVLESIDKEIQALEEFREKNQRLQKLWVGRLILYSSVLYLFTCLIVYLWYLPDEFTARLAMTLPFFAFPLIIWSIRTVIIFFFSKRTERNNEALDDLKSQRKKILEEVMEKETYKTAKLILERFDPDSKKAKECEPPSAGAAVTARPGQEIRQRTAAQRNLSPTPASPNQGPPPQVPVSPGPPKDSSAPGGPPERTVTPALSSNVLPRHLGSPATSVPGMGLHPPGPPLARPILPRERGALDRIVEYLVGDGPQNRYALICQQCFSHNGMALKEEFEYIAFRCAYCFFLNPARKTRPQAPRLPEFSFEKRQVVEGSSSVGPLPSGSVLSSDNQFNEESLEHDVLDDNTEQTDDKIPATEQTNQVIEKASDSEEPEEKQETENEEASVIETNSTVPGADSIPDPELSGESLTAE

SEQ ID NO: 2833 - protein, 550 aa, Homo sapiens
MAGLGASLHVWGWLMLGSCLLARAQLDSDGTITIEEQIVLVLKAKVQCELNITAQLQEGEGNCFPEWDGLICWPRGTVGKISAVPCPPYIYDFNHKGVAFRHCNPNGTWDFMHSLNKTWANYSDCLRFLQPDISIGKQEFFERLYVMYTVGYSISFGSLAVAILIIGYFRRLHCTRNYIHMHLFVSFMLRATSIFVKDRVVHAHIGVKELESLIMQDDPQNSIEATSVDKSQYIGCKIAVVMFIYFLATNYYWILVEGLYLHNLIFVAFFSDTKYLWGFILIGWGFPAAFVAAWAVARATLADARCWELSAGDIKWIYQAPILAAIGLNFILFLNTVRVLATKIWETNAVGHDTRKQYRKLAKSTLVLVLVFGVHYIVFVCLPHSFTGLGWEIRMHCELFFNSFQGFFVSIIYCYCNGEVQAEVKKMWSRWNLSVDWKRTPPCGSRRCGSVLTTVTHSTSSQSQVAASTRMVLISGKAAKIASRQPDSHITLPGYVWSNSEQDCLPHSFHEETKEDSGRQGDDILMEKPSRPMESNPDTEGCQGETEDVL

SEQ ID NO: 2834 - protein, 906 aa, Homo sapiens
MDMFPLTWVFLALYFSRHQVRGQPDPPCGGRLNSKDAGYITSPGYPQDYPSHQNCEWIVYAPEPNQKIVLNFNPHFEIEKHDCKYDFIEIRDGDSESADLLGKHCGNIAPPTIISSGSMLYIKFTSDYARQGAGFSLRYEIFKTGSEDCSKNFTSPNGTIESPGFPEKYPHNLDCTFTILAKPKMEIILQFLIFDLEHDPLQVGEGDCKYDWLDIWDGIPHVGPLIGKYCGTKTPSELRSSTGILSLTFHTDMAVAKDGFSARYYLVHQEPLENFQCNVPLGMESGRIANEQISASSTYSDGRWTPQQSRLHGDDNGWTPNLDSNKEYLQVDLRFLTMLTAIATQGAISRETQNGYYVKSYKLEVSTNGEDWMVYRHGKNHKVFQANNDATEVVLNKLHAPLLTRFVRIRPQTWHSGIALRLELFGCRVTDAPCSNMLGMLSGLIADSQISASSTQEYLWSPSAARLVSSRSGWFPRIPQAQPGEEWLQVDLGTPKTVKGVIIQGARGGDSITAVEARAFVRKFKVSYSLNGKDWEYIQDPRTQQPKLFEGNMHYDTPDIRRFDPIPAQYVRVYPERWSPAGIGMRLEVLGCDWTDSKPTVETLGPTVKSEETTTPYPTEEEATECGENCSFEDDKDLQLPSGFNCNFDFLEEPCGWMYDHAKWLRTTWASSSSPNDRTFPDDRNFLRLQSDSQREGQYARLISPPVHLPRSPVCMEFQYQATGGRGVALQVVREASQESKLLWVIREDQGGEWKHGRIILPSYDMEYQIVFEGVIGKGRSGEIAIDDIRISTDVPLENCMEPISAFAGENFKGGTLLPGTEPTVDTVPMQPIPAYWYYVMAAGGAVLVLVSVALALVLHYHRFRYAAKKTDHSITYKTSHYTNGAPLAVEPTLTIKLEQDRGSHC

SEQ ID NO: 2835 - protein, 374 aa, Homo sapiens
MKPLLETLYLLGMLVPGGLGYDRSLAQHRQEIVDKSVSPWSLETYSYNIYHPMGEIYEWMREISEKYKEVVTQHFLGVTYETHPMYYLKISQPSGNPKKIIWMDCGIHAREWIAPAFCQWFVKEILQNHKDNSSIRKLLRNLDFYVLPVLNIDGYIYTWTTDRLWRKSRSPHNNGTCFGTDLNRNFNASWCSIGASRNCQDQTFCGTGPVSEPETKAVASFIESKKDDILCFLTMHSYGQLILTPYGYTKNKSSNHPEMIQVGQKAANALKAKYGTNYRVGSSADILYASSGSSRDWARDIGIPFSYTFELRDSGTYGFVLPEAQIQPTCEETMEAVLSVLDDVYAKHWHSDSAGRVTSATMLLGLLVSCMSLL

SEQ ID NO: 2836 - protein, 521 aa, Homo sapiens
MKSQGQHWYSSSDKNCKVSFREKLLIIDSNLGVQDVENLKFLCIGLVPNKKLEKSSSASDVFEHLLAEDLLSEEDPFFLAELLYIIRQKKLLQHLNCTKEEVERLLPTRQRVSLFRNLLYELSEGIDSENLKDMIFLLKDSLPKTEMTSLSFLAFLEKQGKIDEDNLTCLEDLCKTVVPKLLRNIEKYKREKAIQIVTPPVDKEAESYQGEEELVSQTDVKTFLEALPQESWQNKHAGSNGNRATNGAPSLVSRGMQGASANTLNSETSTKRAAVYRMNRNHRGLCVIVNNHSFTSLKDRQGTHKDAEILSHVFQWLGFTVHIHNNVTKVEMEMVLQKQKCNPAHADGDCFVFCILTHGRFGAVYSSDEALIPIREIMSHFTALQCPRLAEKPKLFFIQACQGEEIQPSVSIEADALNPEQAPTSLQDSIPAEADFLLGLATVPGYVSFRHVEEGSWYIQSLCNHLKKLVPRMLKFLEKTMEIRGRKRTVWGAKQISATSLPTAISAQTPRPPMRRWSSVS

SEQ ID NO: 2837 - protein, 374 aa, Homo sapiens
MAAPALGLVCGRCPELGLVLLLLLLSLLCGAAGSQEAGTGAGAGSLAGSCGCGTPQRPGAHGSSAAAHRYSREANAPGPVPGERQLAHSKMVPIPAGVFTMGTDDPQIKQDGEAPARRVTIDAFYMDAYEVSNTEFEKFVNSTGYLTEAEKFGDSFVFEGMLSEQVKTNIQQAVAAAPWWLPVKGANWRHPEGPDSTILHRPDHPVLHVSWNDAVAYCTWAGKRLPTEAEWEYSCRGGLHNRLFPWGNKLQPKGQHYANIWQGEFPVTNTGEDGFQGTAPVDAFPPNGYGLYNIVGNAWEWTSDWWTVHHSVEETLNPKGPPSGKDRVKKGGSYMCHRSYCYRYRCAARSQNTPDSSASNLGFRCAADRLPTMD

SEQ ID NO: 2838 - protein, 362 aa, Homo sapiens
MDLHLFDYSEPGNFSDISWPCNSSDCIVVDTVMCPNMPNKSVLLYTLSFIYIFIFVIGMIANSVVVWVNIQAKTTGYDTHCYILNLAIADLWVVLTIPVWVVSLVQHNQWPMGELTCKVTHLIFSINLFGSIFFLTCMSVDRYLSITYFTNTPSSRKKMVRRVVCILVWLLAFCVSLPDTYYLKTVTSASNNETYCRSFYPEHSIKEWLIGMELVSVVLGFAVPFSIIAVFYFLLARAISASSDQEKHSSRKIIFSYVVVFLVCWLPYHVAVLLDIFSILHYIPFTCRLEHALFTALHVTQCLSLVHCCVNPVLYSFINRNYRYELMKAFIFKYSAKTGLTKLIDASRVSETEYSALEQSTK

SEQ ID NO: 2839 - protein, 185 aa, Homo sapiens
MLTLASKLKRDDGLKGSRTAATASDSTRRVSVRDKLLVKEVAELEANLPCTCKVHFPDPNKLHCFQLTVTPDEGYYQGGKFQFETEVPDAYNMVPPKVKCLTKIWHPNITETGEICLSLLREHSIDGTGWAPTRTLKDVVWGLNSLFTDLLNFDDPLNIEAAEHHLRDKEDFRNKVDDYIKRYAR

SEQ ID NO: 2840 - protein, 264 aa, Homo sapiens
MAGEQKPSSNLLEQFILLAKGTSGSALTALISQVLEAPGVYVFGELLELANVQELAEGANAAYLQLLNLFAYGTYPDYIANKESLPELSTAQQNKLKHLTIVSLASRMKCIPYSVLLKDLEMRNLRELEDLIIEAVYTDIIQGKLDQRNQLLEVDFCIGRDIRKKDINNIVKTLHEWCDGCEAVLLGIEQQVLRANQYKENHNRTQQQVEAEVTNIKKTLKATASSSAQEMEQQLAERECPPHAEQRQPTKKMSKVKGLVSSRH

SEQ ID NO: 2841 - protein, 316 aa, Homo sapiens
MALQTLQSSWVTFRKILSHFPEELSLAFVYGSGVYRQAGPSSDQKNAMLDFVFTVDDPVAWHSKNLKKNWSHYSFLKVLGPKIITSIQNNYGAGVYYNSLIMCNGRLIKYGVISTNVLIEDLLNWNNLYIAGRLQKPVKIISVNEDVTLRSALDRNLKSAVTAAFLMLPESFSEEDLFIEIAGLSYSGDFRMVVGEDKTKVLNIVKPNIAHFRELYGSILQENPQVVYKSQQGWLEIDKSPEGQFTQLMTLPKTLQQQINHIMDPPGKNRDVEETLFQVAHDPDCGDVVRLGLKKSVIYSSLKLHKMWKGWLRKTS

SEQ ID NO: 2842 - protein, 290 aa, Homo sapiens
METPLDVLSRAASLVHADDEKREAALRGEPRIQTLPVASALSSHRTGPPPISPSKRKFSMEPGDEDLDCDNDHVSKMSRIFNPHLNKTANGDCRRDPRERSRSPIERAVAPTMSLHGSHLYTSLPSLGLEQPLALTKNSLDASRPAGLSPTLTPGERQQNRPSVITCASAGARNCNLSHCPIAHSGCAAPGPASYRRPPSAATTCDPVVEEHFRRSLGKNYKEPEPAPNSVSITGSVDDHFAKALGDTWLQIKAAKDGASSSPESASRRGQPASPSAHMVSHSHSPSVVS

SEQ ID NO: 2843 - protein, 215 aa, Homo sapiens
MASRGATRPNGPNTGNKICQFKLVLLGESAVGKSSLVLRFVKGQFHEFQESTIGAAFLTQTVCLDDTTVKFEIWDTAGQERYHSLAPMYYRGAQAAIVVYDITNEESFARAKNWVKELQRQASPNIVIALSGNKADLANKRAVDFQEAQSYADDNSLLFMETSAKTSMNVNEIFMAIAKKLPKNEPQNPGANSARGRGVDLTEPTQPTRNQCCSN

SEQ ID NO: 2844 - protein, 299 aa, Homo sapiens
MHSLATAAPVPTTLAQVDREKIYQWINELSSPETRENALLELSKKRESVPDLAPMLWHSFGTIAALLQEIVNIYPSINPPTLTAHQSNRVCNALALLQCVASHPETRSAFLAAHIPLFLYPFLHTVSKTRPFEYLRLTSLGVIGALVKTDEQEVINFLLTTEIIPLCLRIMESGSELSKTVATFILQKILLDDTGLAYICQTYERFSHVAMILGKMVLQLSKEPSARLLKHVVRCYLRLSDNPRAREALRQCLPDQLKDTTFAQVLKDDTTTKRWLAQLVKNLQEGQVTDPRGIPLPPQ

SEQ ID NO: 2845 - protein, 485 aa, Homo sapiens [sequence omitted]

SEQ ID NO: 2846 - protein, 385 aa, Homo sapiens
MAAVVAATALKGRGARNARVLRGILAGATANKASHNRTRALQSHSSPEGKEEPEPLSPELEYIPRKRGKNPMKAVGLAWYSLYTRTWLGYLFYRQQLRRARNRYPKGHSKTQPRLFNGVKVLPIPVLSDNYSYLIIDTQAQLAVAVDPSDPRAVQASIEKEGVTLVAILCTHKHWDHSGGNRDLSRRHRDCRVYGSPQDGIPYLTHPLCHQDVVSVGRLQIRALATPGHTQGHLVYLLDGEPYKGPSCLFSGDLLFLSGCGRTFEGNAETMLSSLDTVLGLGDDTLLWPGHEYAEENLGFAGVVEPENLARERKMQWVQRQRLERKGTCPSTLGEERSYNPFLRTHCLALQEALGPGPGPTGDDDYSRAQLLEELRRLKDMHKSK

SEQ ID NO: 2847 - protein, 523 aa, Homo sapiens
MAAVGRVGSFGSSPPGLSSTYTGGPLGNEIASGNGGAAAGDDEDGQNLWSCILSEVSTRSRSKLPAGKNVLLLGEDGAGKTSLIRKIQGIEEYKKGRGLEYLYLNVHDEDRDDQTRCNVWILDGDLYHKGLLKFSLDAVSLKDTLVMLVVDMSKPWTALDSLQKWASVVREHVDKLKIPPEEMKQMEQKLIRDFQEYVEPGEDFPASPQRRNTASQEDKDDSVVLPLGADTLTHNLGIPVLVVCTKCDAISVLEKEHDYRDEHFDFIQSHIRKFCLQYGAALIYTSVKENKNIDLVYKYIVQKLYGFPYKIPAVVVEKDAVFIPAGWDNDKKIGILHENFQTLKAEDNFEDIITKPPVRKFVHEKEIMAEDDQVFLMKLQSLLAKQPPTAAGRPVDASPRVPGGSPRTPNRSVSSNVASVSPIPAGSKKIDPNMKAGATSEGVLANFFNSLLSKKTGSPGGPGVSGGSPAGGAGGGSSGLPPSTKKSGQKPVLDVHAELDRITRKPVTVSPTTPTSPTEGEAS

SEQ ID NO: 2848 - protein, 589 aa, Homo sapiens
MTGLLKRKFDQLDEDNSSVSSSSSSSGCQSRSCSPSSSVSRAWDSEEEGPWDQMPLPDRDFCGPRSFTPLSILKRARRERPGRVAFDGITVFYFPRCQGFTSVPSRGGCTLGMALRHSACRRFSLAEFAQEQARARHEKLRQRLKEEKLEMLQWKLSAAGVPQAEAGLPPVVDAIDDASVEEDLAVAVAGGRLEEVSFLQPYPARRRRALLRASGVRRIDREEKRELQALRQSREDCGCHCDRICDPETCSCSLAGIKCQMDHTAFPCGCCREGCENPMGRVEFNQARVQTHFIHTLTRLQLEQEAESFRELEAPAQGSPPSPGEEALVPTFPLAKPPMNNELGDNSCSSDMTDSSTASSSASGTSEAPDCPTHPGLPGPGFQPGVDDDSLARILSFSDSDFGGEEEEEEEGSVGNLDNLSCFHPADIFGTSDPGGLASWTHSYSGCSFTSGVLDENANLDASCFLNGGLEGSREGSLPGTSVPPSMDAGRSSSVDLSLSSCDSFELLQALPDYSLGPHYTSQKVSDSLDNIEAPHFPLPGLSPPGDASSCFLESLMGFSEPAAEALDPFIDSQFEDTVPASLMEPVPV

SEQ ID NO: 2849 - protein, 250 aa, Homo sapiens
MSVIFFACVVRVRDGLPLSASTDFYHTQDFLEWRRRLKSLALRLAQYPGRGSAEGCDFSIHFSSFGDVACMAICSCQCPAAMAFCFLETLWWEFTASYDTTCIGLASRPYAFLEFDSIIQKVKWHFNYVSSSQMECSLEKIQEELKLQPPAVLTLEDTDVANGVMNGHTPMHLEPAPNFRMEPVTALGILSLILNIMCAALNLIRGVHLAEHSLQVAHEEIGNILAFLVPFVACIFQDPRSWFCWLDQTS

SEQ ID NO: 2850 - protein, 276 aa, Homo sapiens
MDGPAIITQVTNPKEDEGRLPGAGEKASQCNVSLKKQRSRSILSSFFCCFRDYNVEAPPPSSPSVLPPLVEENGGLQKGDQRQVIPIPSPPAKYLLPEVTVLDYGKKCVVIDLDETLVHSSFKPISNADFIVPVEIDGTIHQVYVLKRPHVDEFLQRMGQLFECVLFTASLAKYADPVADLLDRWGVFRARLFRESCVFHRGNYVKDLSRLGRELSKVIIVDNSPASYIFHPENAVPVQSWFDDMTDTELLDLIPFFEGLSREDDVYSMLHRLCNR

SEQ ID NO: 2851 - protein, 402 aa, Homo sapiens
MIPPSSPREDGVDGLPKEAVGAEQPPSPASTSSQESKLQKLKRSLSFKTKSLRSKSADNFFQRTNSEDMKLQAHMVAEISPSSSPLPAPGSLTSTPARAGLHPGGKAHAFQEYIFKKPTFCDVCNHMIVGTNAKHGLRCKACKMSIHHKCTDGLAPQRCMGKLPKGFRRYYSSPLLIHEQFGCIKEVMPIACGNKVDPVYETLRFGTSLAQRTKKGSSGSGSDSPHRTSTSDLVEVPEEANGPGGGYDLRKRSNSVFTYPENGTDDFRDPAKNINHQGSLSKDPLQMNTYVALYKFVPQENEDLEMRPGDIITLLEDSNEDWWKGKIQDRIGFFPANFVQRLQQNEKIFRCVRTFIGCKEQGQITLKENQICVSSEEEQDGFIRVLSGKKKGLIPLDVLENI

SEQ ID NO: 2852 - protein, 188 aa, Homo sapiens
MDVNIAPLRAWDDFFPGSDRFARPDFRDISKWNNRVVSNLLYYQTNYLVVAAMMISIVGFLSPFNMILGGIVVVLVFTGFVWAAHNKDVLRRMKKRYPTTFVMVVMLASYFLISMFGGVMVFVFGITFPLLLMFIHASLRLRNLKNKLENKMEGIGLKRTPMGIVLDALEQQEEGINRLTDYISKVKE

SEQ ID NO: 2853 - protein, 1093 aa, Homo sapiens
MARPVRGGLGAPRRSPCLLLLWLLLLRLEPVTAAAGPRAPCAAACTCAGDSLDCGGRGLAALPGDLPSWTRSLNLSYNKLSEIDPAGFEDLPNLQEVYLNNNELTAVPSLGAASSHVVSLFLQHNKIRSVEGSQLKAYLSLEVLDLSLNNITEVRNTCFPHGPPIKELNLAGNRIGTLELGAFDGLSRSLLTLRLSKNRITQLPVRAFKLPRLTQLDLNRNRIRLIEGLTFQGLNSLEVLKLQRNNISKLTDGAFWGLSKMHVLHLEYNSLVEVNSGSLYGLTALHQLHLSNNSIARIHRKGWSFCQKLHELVLSFNNLTRLDEESLAELSSLSVLRLSHNSISHIAEGAFKGLRSLRVLDLDHNEISGTIEDTSGAFSGLDSLSKLTLFGNKIKSVAKRAFSGLEGLEHLNLGGNAIRSVQFDAFVKMKNLKELHISSDSFLCDCQLKWLPPWLIGRMLQAFVTATCAHPESLKGQSIFSVPPESFVCDDFLKPQIITQPETTMAMVGKDIRFTCSAASSSSSPMTFAWKKDNEVLTNADMENFVHVHAQDGEVMEYTTILHLRQVTFGHEGRYQCVITNHFGSTYSHKARLTVNVLPSFTKTPHDITIRTTTMARLECAATGHPNPQIAWQKDGGTDFPAARERRMHVMPDDDVFFITDVKIDDAGVYSCTAQNSAGSISANATLTVLETPSLVVPLEDRVVSVGETVALQCKATGNPPPRITWFKGDRPLSLTERHHLTPDNQLLVVQNVVAEDAGRYTCEMSNTLGTERAHSQLSVLPAAGCRKDGTTVGIFTIAVVSSIVLTSLVWVCIIYQTRKKSEEYSVTNTDETVVPPDVPSYLSSQGTLSDRQETVVRTEGGPQANGHIESNGVCPRDASHFPEPDTHSVACRQPKLCAGSAYHKEPWKAMEKAEGTPGPHKMEHGGRVVCSDCNTEVDCYSRGQAFHPQPVSRDSAQPSAPNGPEPGGSDQEHSPHHQCSRTAAGSCPECQGSLYPSNHDRMLTAVKKKPMASLDGKGDSSWTLARLYHPDSTELQPASSLTSGSPERAEAQYLLVSNGHLPKACDASPESTPLTGQLPGKQRVPLLLAPKS

SEQ ID NO: 2854 - protein, 911 aa, Homo sapiens
MDGAMGPRGLLLCMYLVSLLILQAMPALGSATGRSKSSEKRQAVDTAVDGVFIRSLKVNCKVTSRFAHYVVTSQVVNTANEAREVAFDLEIPKTAFISDFAVTADGNAFIGDIKDKVTAWKQYRKAAISGENAGLVRASGRTMEQFTIHLTVNPQSKVTFQLTYEEVLKRNHMQYEIVIKVKPKQLVHHFEIDVDIFEPQGISKLDAQASFLPKELAAQTIKKSFSGKKGHVLFRPTVSQQQSCPTCSTSLLNGHFKVTYDVSRDKICDLLVANNHFAHFFAPQNLTNMNKNVVFVIDISGSMRGQKVKQTKEALLKILGDMQPGDYFDLVLFGTRVQSWKGSLVQASEANLQAAQDFVRGFSLDEATNLNGGLLRGIEILNQVQESLPELSNHASILIMLTDGDPTEGVTDRSQILKNVRNAIRGRFPLYNLGFGHNVDFNFLEVMSMENNGRAQRIYEDHDATQQLQGFYSQVAKPLLVDVDLQYPQDAVLALTQNHHKQYYEGSEIVVAGRIADNKQSSFKADVQAHGEGQEFSITCLVDEEEMKKLLRERGHMLENHVERLWAYLTIQELLAKRMKVDREERANLSSQALQMSLDYGFVTPLTSMSIRGMADQDGLKPTIDKPSEDSPPLEMLGPRRTFVLSALQPSPTHSSSNTQRLPDRVTGVDTDPHFIIHVPQKEDTLCFNINEEPGVILSLVQDPNTGFSVNGQLIGNKARSPGQHDGTYFGRLGIANPATDFQLEVTPQNITLNPGFGGPVFSWRDQAVLRQDGVVVTINKKRNLVVSVDDGGTFEVVLHRVWKGSSVHQDFLGFYVLDSHRMSARTHGLLGQFFHPIGFEVSDIHPGSDPTKPDATMVVRNRRLTVTRGLQKDYSKDPWHGAEVSCWFIHNNGAGLIDGAYTDYIVPDIF

SEQ ID NO: 2855 - protein, 345 aa, Homo sapiens
MKGELLLFSSVIVLLQVVCSCPDKCYCQSSTNFVDCSQQGLAEIPSHLPPQTRTLHLQDNQIHHLPAFAFRSVPWLMTLNLSNNSLSNLAPGAFHGLQHLQVLNLTQNSLLSLESRLFHSLPQLRELDLSSNNISHLPTSLGETWENLTILAVQQNQLQQLDRALLESMPSVRLLLLKDNLWKCNCHLLGLKLWLEKFVYKGGLTDGIICESPDTWKGKDLLRIPHELYQPCPLPAPDPVSSQAQWPGSAHGVVLRPPENHNAGERELLECELKPKPRPANLRHAIATVIITGVVCGIVCLMMLAAAIYGCTYAAITAQYHGGPLAQTNDPGKVEEKERFDSSPA

SEQ ID NO: 2856 - protein, 182 aa, Homo sapiens
MKGWGWLALLLGALLGTAWARRSQDLHCGACRALVDELEWEIAQVDPKKTIQMGSFRINPDGSQSVVEVPYARSEAHLTELLEEICDRMKEYGEQIDPSTHRKNYVRVVGRNGESSELDLQGIRIDSDISGTLKFACESIVEEYEDELIEFFSREADNVKDKLCSKRTDLCDHALHISHDEL

SEQ ID NO: 2857 - protein, 676 aa, Homo sapiens
MDKYDDLGLEASKFIEDLNMYEASKDGLFRVDKGAGNNPEFEETRRVFATKMAKIHLQQQQQQLLQEETLPRGSRGPVNGGGRLGPQARWEVVGSKLTVDGAAKPPLAASTGAPGAVTTLAAGQPPYPPQEQRSRPYLHGTRHGSQDCGSRESLATSEMSAFHQPGPCEDPSCLTHGDYYDNLSLASPKWGDKPGVSPSIGLSVGSGWPSSPGSDPPLPKPCGDHPLNHRQLSLSSSRSSEGSLGGQNSGIGGRSSEKPTGLWSTASSQRVSPGLPSPNLENGAPAVGPVQPRTPSVSAPLALSCPRQGGLPRSNSGLGGEVSGVMSKPNVDPQPWFQDGPKSYLSSSAPSSSPAGLDGSQQGAVPGLGPKPGCTDLGTGPKLSPTSLVHPVMSTLPELSCKEGPLGWSSDGSLGSVLLDSPSSPRVRLPCQPLVPGPELRPSAAELKLEALTQRLEREMDAHPKADYFGACVKCSKGVFGAGQACQAMGNLYHDTCFTCAACSRKLRGKAFYFVNGKVFCEEDFLYSGFQQSADRCFLCGHLIMDMILQALGKSYHPGCFRCVICNECLDGVPFTVDSENKIYCVRDYHKVLAPKCAACGLPILPPEGSDETIRVVSMDRDYHVECYHCEDCGLELNDEDGHRCYPLEDHLFCHSCHVKRLEKRPSSTALHQHHF

SEQ ID NO: 2858 - protein, 1946 aa, Homo sapiens
MVESCLLTFRAFFWWIALIKMDLSDLGEAAAFLRRSEAELLLLQATALDGKKKCWIPDGENAYIEAEVKGSEDDGTVIVETADGESLSIKEDKIQQMNPPEFEMIEDMAMLTHLNEASVLHTLKRRYGQWMIYTYSGLFCVTINPYKWLPVYQKEVMAAYKGKRRSEAPPHIFAVANNAFQDMLHNRENQSILFTGESGAGKTVNSKHIIQYFATIAAMIESRKKQGALEDQIMQANTILEAFGNAKTLRNDNSSRFGKFIRMHFGARGMLSSVDIDIYLLEKSRVIFQQAGERNYHIFYQILSGQKELHDLLLVSANPSDFHFCSCGAVTVESLDDAEELLATEQAMDILGFLPDEKYGCYKLTGAIMHFGNMKFKQKPREEQLEADGTENADKAAFLMGINSSELVKCLIHPRIKVGNEYVTRGQTIEQVTCAVGALSKSMYERMFKWLVARINRALDAKLSRQFFIGILDITGFEILEYNSLEQLCINFTNEKLQQFFNWHMFVLEQEEYKKESIEWVSIGFGLDLQACIDLIEKPMGILSILEEECMFPKATDLTFKTKLFDNHFGKSVHLQKPKPDKKKFEAHFELVHYAGVVPYNISGWLEKNKDLLNETVVAVFQKSSNRLLASLFENYMSTDSAIPFGEKKRKKGASFQTVASLHKENLNKLMTNLKSTAPHFVRCINPNVNKIPGILDPYLVLQQLRCNGVLEGTRICREGFPNRLQYADFKQRYCILNPRTFPKSKFVSSRKAAEELLGSLEIDHTQYRFGITKVFFKAGFLGQLEAIRDERLSKVFTLFQARAQGKLMRIKFQKILEERDALILIQWNIRAFMAVKNWPWMRLFFKIKPLVKSSEVGEEVAGLKEECAQLQKALEKSEFQREELKAKQVSLTQEKNDLILQLQAEQETLANVEEQCEWLIKSKIQLEARVKELSERVEEEEEINSELTARGRKLEDECFELKKEIDDLETMLVKSEKEKRTTEHKVKNLTEEVEFLNEDISKLNRAAKVVQEAHQQTLDDLHMEEEKLSSLSKANLKLEQQVDELEGALEQERKARMNCERELHKLEGNLKLNRESMENLESSQRHLAEELRKKELELSQMNSKVENEKGLVAQLQKTVKELQTQIKDLKEKLEAERTTRAKMERERADLTQDLADLNERLEEVGGSSLAQLEITKKQETKFQKLHRDMEEATLHFETTSASLKKRHADSLAELEGQVENLQQVKQKLEKDKSDLQLEVDDLLTRVEQMTRAKANAEKLCTLYEERLHEATAKLDKVTQLANDLAAQKTKLWSESGEFLRRLEEKEALINQLSREKSNFTRQIEDLRGQLEKETKSQSALAHALQKAQRDCDLLREQYEEEQEVKAELHRTLSKVNAEMVQWRMKYENNVIQRTEDLEDAKKELAIRLQEAAEAMGVANARNASLERARHQLQLELGDALSDLGKVRSAAARLDQKQLQSGKALADWKQKHEESQALLDASQKEVQALSTELLKLKNTYEESIVGQETLRRENKNLQEEISNLTNQVREGTKNLTEMEKVKKLIEEEKTEVQVTLEETEGALERNESKILHFQLELLEAKAELERKLSEKDEEIENFRRKQQCTIDSLQSSLDSEAKSRIEVTRLKKKMEEDLNEMELQLSCANRQVSEATKSLGQLQIQIKDLQMQLDDSTQLNSDLKEQVAVAERRNSLLQSELEDLRSLQEQTERGRRLSEEELLEATERINLFYTQNTSLLSQKKKLEADVARMQKEAEEVVQECQNAEEKAKKAAIEAANLSEELKKKQDTIAHLERTRENMEQTITDLQKRLAEAEQMALMGSRKQIQKLESRVRELEGELEGEIRRSAEAQRGARRLERCIKELTYQAEEDKKNLSRMQTQMDKLQLKVQNYKQQVEVAETQANQYLSKYKKQQHELNEVKERAEVAESQVNKLKIKAREFGKKVQEE

SEQ ID NO: 2859 - protein, 306 aa, Homo sapiens
MAVARLAAVAAWVPCRSWGWAAVPFGPHRGLSVLLARIPQRAPRWLPACRQKTSLSFLNRPDLPNLAYKKLKGKSPGIIFIPGYLSYMNGTKALAIEEFCKSLGHACIRFDYSGVGSSDGNSEESTLGKWRKDVLSIIDDLADGPQILVGSSLGGWLMLHAAIARPEKVVALIGVATAADTLVTKFNQLPVELKKEVEMKGVWSMPSKYSEEGVYNVQYSFIKEAEHHCLLHSPIPVNCPIRLLHGMKDDIVPWHTSMQVADRVLSTDVDVILRKHSDHRMREKADIQLLVYTIDDLIDKLSTIVN

SEQ ID NO: 2860 - protein, 456 aa, Homo sapiens
MPPGPWESCFWVGGLILWLSVGSSGDAPPTPQPKCADFQSANLFEGTDLKVQFLLFVPSNPSCGQLVEGSSDLQNSGFNATLGTKLIIHGFRVLGTKPSWIDTFIRTLLRATNANVIAVDWIYGSTGVYFSAVKNVIKLSLEISLFLNKLLVLGVSESSIHIIGVSLGAHVGGMVGQLFGGQLGQITGLDPAGPEYTRASVEERLDAGDALFVEAIHTDTDNLGIRIPVGHVDYFVNGGQDQPGCPTFFYAGYSYLICDHMRAVHLYISALENSCPLMAFPCASYKAFLAGRCLDCFNPFLLSCPRIGLVEQGGVKIEPLPKEVKVYLLTTSSAPYCMHHSLVEFHLKELRNKDTNIEVTFLSSNITSSSKITIPKQQRYGKGIIAHATPQCQINQVKFKFQSSNRVWKKDRTTIIGKFCTALLPVNDREKMVCLPEPVNLQASVTVSCDLKIACV

SEQ ID NO: 2861 - protein, 236 aa, Homo sapiens
MASLDRVKVLVLGDSGVGKSSLVHLLCQNQVLGNPSWTVGCSVDVRVHDYKEGTPEEKTYYIELWDVGGSVGSASSVKSTRAVFYNSVNGIIFVHDLTNKKSSQNLRRWSLEALNRDLVPTGVLVTNGDYDQEQFADNQIPLLVIGTKLDQIHETKRHEVLTRTAFLAEDFNPEEINLDCTNPRYLAAGSSNAVKLSRFFDKVIEKRYFLREGNQIPGFPDRKRFGAGTLKSLHYD

SEQ ID NO: 2862 - protein, 1115 aa, Homo sapiens
MLRGTMTAWRGMRPEVTLACLLLATAGCFADLNEVPQVTVQPASTVQKPGGTVILGCVVEPPRMNVTWRLNGKELNGSDDALGVLITHGTLVITALNNHTVGRYQCVARMPAGAVASVPATVTLANLQDFKLDVQHVIEVDEGNTAVIACHLPESHPKAQVRYSVKQEWLEASRGNYLIMPSGNLQIVNASQEDEGMYKCAAYNPVTQEVKTSGSSDRLRVRRSTAEAARIIYPPEAQTIIVTKGQSLILECVASGIPPPRVTWAKDGSSVTGYNKTRFLLSNLLIDTTSEEDSGTYRCMADNGVGQPGAAVILYNVQVFEPPEVTMELSQLVIPWGQSAKLTCEVRGNPPPSVLWLRNAVPLISSQRLRLSRRALRVLSMGPEDEGVYQCMAENEVGSAHAVVQLRTSRPSITPRLWQDAELATGTPPVSPSKLGNPEQMLRGQPALPRPPTSVGPASPQCPGEKGQGAPAEAPIILSSPRTSKTDSYELVWRPRHEGSGRAPILYYVVKHRKQVTNSSDDWTISGIPANQHRLTLTRLDPGSLYEVEMAAYNCAGEGQTAMVTFRTGRRPKPEIMASKEQQIQRDDPGASPQSSSQPDHGRLSPPEAPDRPTISTASETSVYVTWIPRGNGGFPIQSFRVEYKKLKKVGDWILATSAIPPSRLSVEITGLEKGTSYKFRVRALNMLGESEPSAPSRPYVVSGYSGRVYERPVAGPYITFTDAVNETTIMLKWMYIPASNNNTPIHGFYIYYRPTDSDNDSDYKKDMVEGDKYWHSISHLQPETSYDIKMQCFNEGGESEFSNVMICETKARKSSGQPGRLPPPTLAPPQPPLPETIERPVGTGAMVARSSDLPYLIVGVVLGSIVLIIVTFIPFCLWRAWSKQKHTTDLGFPRSALPPSCPYTMVPLGGLPGHQASGQPYLSGISGRACANGIHMNRGCPSAAVGYPGMKPQQHCPGELQQQSDTSSLLRQTHLGNGYDPQSHQITRGPKSSPDEGSFLYTLPDDSTHQLLQPHHDCCQRQEQPAAVGQSGVRRAPDSPVLEAVWDPPFHSGPPCCLGLVPVEEVDSPDSCQVSGGDWCPQHPVGAYVGQEPGMQLSPGPLVRVSFETPPLTI

SEQ ID NO: 2863 - protein, 617 aa, Homo sapiens
MDFSKLPKILDEDKESTFGYVHGVSGPVVTACDMAGAAMYELVRVGHSELVGEIIRLEGDMATIQVYEETSGVSVGDPVLRTGKPLSVELGPGIMGAIFDGIQRPLSDISSQTQSIYIPRGVNVSALSRDIKWDFTPCKNLRVGSHITGGDIYGIVSENSLIKHKIMLPPRNRGTVTYIAPPGNYDTSDVVLELEFEGVKEKFTMVQVWPVRQVRPVTEKLPANHPLLTGQRVLDALFPCVQGGTTAIPGAFGCGKTVISQSLSKYSNSDVIIYVGCGERGNEMSEVLRDFPELTMEVDGKVESIMKRTALVANTSNMPVAAREASIYTGITLSEYFRDMGYHVSMMADSTSRWAEALREISGRLAEMPADSGYPAYLGARLASFYERAGRVKCLGNPEREGSVSIVGAVSPPGGDFSDPVTSATLGIVQVFWGLDKKLAQRKHFPSVNWLISYSKYMRALDEYYDKHFTEFVPLRTKAKEILQEEEDLAEIVQLVGKASLAETDKITLEVAKLIKDDFLQQNGYTPYDRFCPFYKTVGMLSNMIAFYDMARRAVETTAQSDNKITWSIIREHMGDILYKLSSMKFKDPLKDGEAKIKSDYAQLLEDMQNAFRSLED

SEQ ID NO: 2864 - protein, 359 aa, Homo sapiens [sequence omitted]

SEQ ID NO: 2865 - protein, 113 aa, Homo sapiens
MADVEDGEETCALASHSGSSGSKSGGDKMFSLKKWNAVAMWSWDVECDTCAICRVQVMDACLRCQAENKQEDCVVVWGECNHSFHNCCMSLWVKQNNRCPLCQQDWVVQRIGK

SEQ ID NO: 2866 - protein, 183 aa, Homo sapiens
MTTASTSQVRQNYHQDSEAAINRQINLELYASYVYLSMSYYFDRDDVALKNFAKYFLHQSHEEREHAEKLMKLQNQRGGRIFLQDIKKPDCDDWESGLNAMECALHLEKNVNQSLLELHKLATDKNDPHLCDFIETHYLNEQVKAIKELGDHVTNLRKMGAPESGLAEYLFDKHTLGDSDNES

SEQ ID NO: 2867 - protein, 103 aa, Homo sapiens
MAESWSGQALQALPATVLGALGSEFLREWEAQDMRVTLFKLLLLWLVLSLLGIQLAWGFYGNTVTGLYHRPGLGGQNGSTPDGSTHFPSWEMAANEPLKTHRE

SEQ ID NO: 2868 - protein, 271 aa, Homo sapiens
MVGALCGCWFRLGGARPLIPLGPTVVQTSMSRSQVALLGLSLLLMLLLYVGLPGPPEQTSCLWGDPNVTVLAGLTPGNSPIFYREVLPLNQAHRVEVVLLHGKAFNSHTWEQLGTLQLLSQRGYRAVALDLPGFGNSAPSKEASTEAGRAALLERALRDLEVQNAVLVSPSLSGHYALPFLMRGHHQLHGFVPIAPTSTQNYTQEQFWAVKTPTLILYGELDHILARESLRQLRHLPNHSVVKLRNAGHACYLHKPQDFHLVLLAFLDHLP

SEQ ID NO: 2869 - protein, 213 aa, Homo sapiens
MSRVLVPCHVKGSVALQVGDVRTSQGRPGVLVIDVTFPSVAPFELQEITFKNYYTAFLSIRVRQYTSAHTPAKWVTCLRDYCLMPDPHSEEGAQEYVSLFKHQMLCDMARISELRLILRQPSPLWLSFTVEELQIYQQGPKSPSVTFPKWLSHPVPCEQPALLREGLPDPSRVSSEVQQMWALTEMIRASHTSARIGRFDVDGCYDLNLLSYT

SEQ ID NO: 2870 - protein, 112 aa, Homo sapiens
MTRCALLLLMVLMLGRVLVVPVTPIPTFQLRPQNSPQTTPRPAASESPSAAPTWPWAAQSHCSPTRHPGSRIVLSLDVPIGLLQILLEQARARAAREQATTNARILARVGHC

SEQ ID NO: 2871 - protein, 502 aa, Homo sapiens
MAWPKLPAPWLLLCTWLPAGCLSLLVTVQHTERYVTLFASIILKCDYTTSAQLQDVVVTWRFKSFCKDPIFDYYSASYQAALSLGQDPSNDCNDNQREVRIVAQRRGQNEPVLGVDYRQRKITIQNRADLVINEVMWWDHGVYYCTIEAPGDTSGDPDKEVKLIVLHWLTVIFIILGALLLLLLIGVCWCQCCPQYCCCYIRCPCCPAHCCCPEEDLSLPSSLPQMPMTQTTNQPPIANGVLEYLEKELRNLNLAQPLPPDLKGRFGHPCSMLSSLGSEVVERRIIHLPPLIRDLSSSRRTSDSLHQQWLTPIPSRPWDLREGRSHHHYPDFHQELQDRGPKSWALERRELDPSWSGRHRSSRLNGSPIHWSDRDSLSDVPSSSEARWRPSHPPFRSRCQERPRRPSPRESTQRHGRRRRHRSYSPPLPSGLSSWSSEEDKERQPQSWRAHRRGSHSPHWPEEKPPSYRSLDITPGKNSRKKGSVERRSEKDSSHSGRSVVI

SEQ ID NO: 2872 - protein, 1542 aa, Homo sapiens
MRGVGWQMLSLSLGLVLAILNKVAPQACPAQCSCSGSTVDCHGLALRSVPRNIPRNTERLDLNGNNITRITKTDFAGLRHLRVLQLMENKISTIERGAFQDLKELERLRLNRNHLQLFPELLFLGTAKLYRLDLSENQIQAIPRKAFRGAVDIKNLQLDYNQISCIEDGAFRALRDLEVLTLNNNNITRLSVASFNHMPKLRTFRLHSNNLYCDCHLAWLSDWLRQRPRVGLYTQCMGPSHLRGHNVAEVQKREFVCSDEEEGHQSFMAPSCSVLHCPAACTCSNNIVDCRGKGLTEIPTNLPETITEIRLEQNTIKVIPPGAFSPYKKLRRIDLSNNQISELAPDAFQGLRSLNSLVLYGNKITELPKSLFEGLFSLQLLLLNANKINCLRVDAFQDLHNLNLLSLYDNKLQTIAKGTFSPLRAIQTMHLAQNPFICDCHLKWLADYLHTNPIETSGARCTSPRRLANKRIGQIKSKKFRCSAKEQYFIPGTEDYRSKLSGDCFADLACPEKCRCEGTTVDCSNQKLNKIPEHIPQYTAELRLNNNEFTVLEATGIFKKLPQLRKINFSNNKITDIEEGAFEGASGVNEILLTSNRLENVQHKMFKGLESLKTLMLRSNRITCVGNDSFIGLSSVRLLSLYDNQITTVAPGAFDTLHSLSTLNLLANPFNCNCYLAWLGEWLRKKRIVTGNPRCQKPYFLKEIPIQDVAIQDFTCDDGNDDNSCSPLSRCPTECTCLDTVVRCSNKGLKVLPKGIPRDVTELYLDGNQFTLVPKELSNYKHLTLIDLSNNRISTLSNQSFSNMTQLLTLILSYNRLRCIPPRTFDGLKSLRLLSLHGNDISVVPEGAFNDLSALSHLAIGANPLYCDCNMQWLSDWVKSEYKEPGIARCAGPGEMADKLLLTTPSKKFTCQGPVDVNILAKCNPCLSNPCKNDGTCNSDPVDFYRCTCPYGFKGQDCDVPIHACISNPCKHGGTCHLKEGEEDGFWCICADGFEGENCEVNVDDCEDNDCENNSTCVDGINNYTCLCPPEYTAANLNEVEKGELCEEKLDFCAQDLNPCQHDSKCILTPKGFKCDCTPGYVGEHCDIDFDDCQDNKCKNGAHCTDAVNGYTCICPEGYSGLFCEFSPPMVLPRTSPCDNFDCQNGAQCIVRINEPICQCLPGYQGEKCEKLVSVNFINKESYLQIPSAKVRPQTNITLQIATDEDSGILLYKGDKDHIAVELYRGRVRASYDTGSHPASAIYSVETINDGNFHIVELLALDQSLSLSVDGGNPKIITNLSKQSTLNFDSPLYVGGMPGKSNVASLRQAPGQNGTSFHGCIRNLYINSELQDFQKVPMQTGILPGCEPCHKKVCAHGTCQPSSQAGFTCECQEGWMGPLCDQRTNDPCLGNKCVHGTCLPINAFSYSCKCLEGHGGVLCDEEEDLFNPCQAIKCKHGKCRLSGLGQPYCECSSGYTGDSCDREISCRGERIRDYYQKQQGYAACQTTKKVSRLECRGGCAGGQCCGPLRSKRRKYSFECTDGSSFVDEVEKVVKCGCTRCVS

SEQ ID NO: 2873 - protein, 368 aa, Homo sapiens
MKSLVLLLCLAQLWGCHSAPHGPGLIYRQPNCDDPETEEAALVAIDYINQNLPWGYKHTLNQIDEVKVWPQQPSGELFEIEIDTLETTCHVLDPTPVARCSVRQLKEHAVEGDCDFQLLKLDGKFSVVYAKCDSSPADSAEDVRKVCQDCPLLAPLNDTRVVHAAKAALAAFNAQNNGSNFQLEEISRAQLVPLPPSTYVEFTVSGTDCVAKEATEAAKCNLLAEKQYGFCKATLSEKLGGAEVAVTCMVFQTQPVSSQPQPEGANEAVPTPVVDPDAPPSPPLGAPGLPPAGSPPDSHVLLAAPPGHQLHRAHYDLRHTFMGVVSLGSPSGEVSHPRKTRTVVQPSVGAAAGPVVPPCPGRIRHFKV

SEQ ID NO: 2874 - protein, 942 aa, Homo sapiens
MAAAAEPGARAWLGGGSPRPGSPACSPVLGSGGRARPGPGPGPGPERAGVRAPGPAAAPGHSFRKVTLTKPTFCHLCSDFIWGLAGFLCDVCNFMSHEKCLKHVRIPCTSVAPSLVRVPVAHCFGPRGLHKRKFCAVCRKVLEAPALHCEVCELHLHPDCVPFACSDCRQCHQDGHQDHDTHHHHWREGNLPSGARCEVCRKTCGSSDVLAGVRCEWCGVQAHSLCSAALAPECGFGRLRSLVLPPACVRLLPGGFSKTQSFRIVEAAEPGEGGDGADGSAAVGPGRETQATPESGKQTLKIFDGDDAVRRSQFRLVTVSRLAGAEEVLEAALRAHHIPEDPGHLELCRLPPSSQACDAWAGGKAGSAVISEEGRSPGSGEATPEAWVIRALPRAQEVLKIYPGWLKVGVAYVSVRVTPKSTARSVVLEVLPLLGRQAESPESFQLVEVAMGCRHVQRTMLMDEQPLLDRLQDIRQMSVRQVSQTRFYVAESRDVAPHVSLFVGGLPPGLSPEEYSSLLHEAGATKATVVSVSHIYSSQGAVVLDVACFAEAERLYMLLKDMAVRGRLLTALVLPDLLHAKLPPDSCPLLVFVNPKSGGLKGRDLLCSFRKLLNPHQVFDLTNGGPLPGLHLFSQVPCFRVLVCGGDGTVGWVLGALEETRYRLACPEPSVAILPLGTGNDLGRVLRWGAGYSGEDPFSVLLSVDEADAVLMDRWTILLDAHEAGSAENDTADAEPPKIVQMSNYCGIGIDAELSLDFHQAREEEPGKFTSRLHNKGVYVRVGLQKISHSRSLHKQIRLQVERQEVELPSIEGLIFINIPSWGSGADLWGSDSDTRFEKPRMDDGLLEVVGVTGVVHMGQVQGGLRSGIRIAQGSYFRVTLLKATPVQVDGEPWVQAPGHMIISAAGPKVHMLRKAKQKPRRAGTTRDARADAAPAPESDPR

SEQ ID NO: 2875 - protein, 943 aa, Homo sapiens
MAASGLDHLKNGYRRRFCRPSRARDINTEQGQNVLEILQDCFEEKSLANDFSTNSTKSVPNSTRKIKDTCIQSPSKECQKSHPKSVPVSSKKKEASLQFVVEPSEATNRSVQAHEVHQKILATDVSSKNTPDSKKISSRNINDHHSEADEEFYLSVGSPSVLLDAKTSVSQNVIPSSAQKRETYTFENSVNMLPSSTEVSVKTKKRLNFDDKVMLKKIEIDNKVSDEEDKTSEGQERKPSGSSQNRIRDSEYEIQRQAKKSFSTLFLETVKRKSESSPIVRHAATAPPHSCPPDDTKLIEDEFIIDESDQSFASRSWITIPRKAGSLKQRTISPAESTALLQGRKSREKHHNILPKTLANDKHSHKPHPVETSQPSDKTVLDTSYALIGETVNNYRSTKYEMYSKNAEKPSRSKRTIKQKQRRKFMAKPAEEQLDVGQSKDENIHTSHITQDEFQRNSDRNMEEHEEMGNDCVSKKQMPPVGSKKSSTRKDKEESKKKRFSSESKNKLVPEEVTSTVTKSRRISRRPSDWWVVKSEESPVYSNSSVRNELPMHHNSSRKSTKKTNQSSKNIRKKTIPLKRQKTATKGNQRVQKFLNAEGSGGIVGHDEISRCSLSEPLESDEADLAKKKNLDCSRSTRSSKNEDNIMTAQNVPLKPQTSGYTCNIPTESNLDSGEHKTSVLEESGPSRLNNNYLMSGKNDVDDEEVHGSSDDSKQSKVIPKNRIHHKLVLPSNTPNVRRTKRTRLKPLEYWRGERIDYQGRPSGGFVISGVLSPDTISSKRKAKENIGKVNKKSNKKRICLDNDERKTNLMVNLGIPLGDPLQPTRVKDPETREIILMDLVRPQDTYQFFVKHGELKVYKTLDTPFFSTGKLILGPQEEKGKQHVGQDILVFYVNFGDLLCTLHETPYILSTGDSFYVPSGNYYNIKNLRNEESVLLFTQIKR

SEQ ID NO: 2876 - protein, 1042 aa, Homo sapiens
MKQSPALAPEERCRRAGSPKPVLRADDNNMGNGCSQKLATANLLRFLLLVLIPCICALVLLLVILLSYVGTLQKVYFKSNGSEPLVTDGEIQGSDVILTNTIYNQSTVVSTAHPDQHVPAWTTDASLPGDQSHRNTSACMNITHSQCQMLPYHATLTPLLSVVRNMEMEKFLKFFTYLHRLSCYQHIMLFGCTLAFPECIIDGDDSHGLLPCRSFCEAAKEGCESVLGMVNYSWPDFLRCSQFRNQTESSNVSRICFSPQQENGKQLLCGRGENFLCASGICIPGKLQCNGYNDCDDWSDEAHCNCSENLFHCHTGKCLNYSLVCDGYDDCGDLSDEQNCDCNPTTEHRCGDGRCIAMEWVCDGDHDCVDKSDEVNCSCHSQGLVECRNGQCIPSTFQCDGDEDCKDGSDEENCSVIQTSCQEGDQRCLYNPCLDSCGGSSLCDPNNSLNNCSQCEPITLELCMNLPYNSTSYPNYFGHRTQKEASISWESSLFPALVQTNCYKYLMFFSCTILVPKCDVNTGEHIPPCRALCEHSKERCESVLGIVGLQWPEDTDCSQFPEENSDNQTCLMPDEYVEECSPSHFKCRSGQCVLASRRCDGQADCDDDSDEENCGCKERDLWECPSNKQCLKHTVICDGFPDCPDYMDEKNCSFCQDDELECANHACVSRDLWCDGEADCSDSSDEWDCVTLSINVNSSSFLMVHRAATEHHVCADGWQEILSQLACKQMGLGEPSVTKLIQEQEKEPRWLTLHSNWESLNGTTLHELLVNGQSCESRSKISLLCTKQDCGRRPAARMNKRILGGRTSRPGRWPWQCSLQSEPSGHICGCVLIAKKWVLTVAHCFEGRENAAVWKVVLGINNLDHPSVFMQTRFVKTIILHPRYSRAVVDYDISIVELSEDISETGYVRPVCLPNPEQWLEPDTYCYITGWGHMGNKMPFKLQEGEVRIISLEHCQSYFDMKTITTRMICAGYESGTVDSCMGDSGGPLVCEKPGGRWTLFGLTSWGSVCFSKVLGPGVYSNVSYFVEWIKRQIYIQTFLLN

SEQ ID NO: 2877 - protein, 1426 aa, Homo sapiens
MTEALQWARYHWRRLIRGATRDDDSGPYNYSSLLACGRKSSQTPKLSGRHRIVVPHIQPFKDEYEKFSGAYVNNRIRTTKYTLLNFVPRNLFEQFHRAANLYFLFLVVLNWVPLVEAFQKEITMLPLVVVLTIIAIKDGLEDYRKYKIDKQINNLITKVYSRKEKKYIDRCWKDVTVGDFIRLSCNEVIPADMVLLFSTDPDGICHIETSGLDGESNLKQRQVVRGYAEQDSEVDPEKFSSRIECESPNNDLSRFRGFLEHSNKERVGLSKENLLLRGCTIRNTEAVVGIVVYAGHETKAMLNNSGPRYKRSKLERRANTDVLWCVMLLVIMCLTGAVGHGIWLSRYEKMHFFNVPEPDGHIISPLLAGFYMFWTMIILLQVLIPISLYVSIEIVKLGQIYFIQSDVDFYNEKMDSIVQCRALNIAEDLGQIQYLFSDKTGTLTENKMVFRRCSVAGFDYCHEENARRLESYQEAVSEDEDFIDTVSGSLSNMAKPRAPSCRTVHNGPLGNKPSNHLAGSSFTLGSGEGASEVPHSRQAAFSSPIETDVVPDTRLLDKFSQITPRLFMPLDETIQNPPMETLYIIDFFIALAICNTVVVSAPNQPRQKIRHPSLGGLPIKSLEEIKSLFQRWSVRRSSSPSLNSGKEPSSGVPNAFVSRLPLFSRMKPASPVEEEVSQVCESPQCSSSSACCTETEKQHGDAGLLNGKAESLPGQPLACNLCYEAESPDEAALVYAARAYQCTLRSRTPEQVMVDFAALGPLTFQLLHILPFDSVRKRMSVVVRHPLSNQVVVYTKGADSVIMELLSVASPDGASLEKQQMIVREKTQKHLDDYAKQGLRTLCIAKKVMSDTEYAEWLRNHFLAETSIDNREELLLESAMRLENKLTLLGATGIEDRLQEGVPESIEALHKAGIKIWMLTGDKQETAVNIAYACKLLEPDDKLFILNTQSKDACGMLMSTILKELQKKTQALPEQVSLSEDLLQPPVPRDSGLRAGLIITGKTLEFALQESLQKQFLELTSWCQAVVCCRATPLQKSEVVKLVRSHLQVMTLAIGDGANDVSMIQVADIGIGVSGQEGMQAVMASDFAVSQFKHLSKLLLVHGHWCYTRLSNMILYFFYKNVAYVNLLFWYQFFCGFSGTSMTDYWVLIFFNLLFTSAPPVIYGVLEKDVSAETLMQLPELYRSGQKSEAYLPHTFWITLLDAFYQSLVCFFVPYFTYQGSDTDIFAFGNPLNTAALFIVLLHLVIESKSLTWIHLLVIIGSILSYFLFAIVFGAMCVTCNPPSNPYWIMQEHMLDPVFYLVCILTTSIALLPRFVYRVLQGSLFPSPILRAKHFDRLTPEERTKALKKWRGAGKMNQVTSKYANQSAGKSGRRPMPGPSAVFAMKSASSCAIEQGNLSLCETALDQGYSETKAFEMAGPSKGKES

SEQ ID NO: 2878 - protein, 261 aa, Homo sapiens
MVVLSVPAEVTVILLDIEGTTTPIAFVKDILFPYIEENVKEYLQTHWEEEECQQDVSLLRKQAEEDAHLDGAVPIPAASGNGVDDLQQMIQAVVDNVCWQMSLDRKTTALKQLQGHMWRAAFTAGRMKAEFFADVVPAVRKWREAGMKVYIYSSGSVEAQKLLFGHSTEGDILELVDGHFDTKIGHKVESESYRKIADSIGCSTNNILFLTDVTREASAAEEADVHVAVVVRPGNAGLTDDEKTYYSLITSFSELYLPSST

SEQ ID NO: 2879 - protein, 474 aa, Homo sapiens
MKRVLVLLLAVAFGHALERGRDYEKNKVCKEFSHLGKEDFTSLSLVLYSRKFPSGTFEQVSQLVKEVVSLTEACCAEGADPDCYDTRTSALSAKSCESNSPFPVHPGTAECCTKEGLERKLCMAALKHQPQEFPTYVEPTNDEICEAFRKDPKEYANQFMWEYSTNYGQAPLSLLVSYTKSYLSMVGSCCTSASPTVCFLKERLQLKHLSLLTTLSNRVCSQYAAYGEKKSRLSNLIKLAQKVPTADLEDVLPLAEDITNILSKCCESASEDCMAKELPEHTVKLCDNLSTKNSKFEDCCQEKTAMDVFVCTYFMPAAQLPELPDVELPTNKDVCDPGNTKVMDKYTFELSRRTHLPEVFLSKVLEPTLKSLGECCDVEDSTTCFNAKGPLLKKELSSFIDKGQELCADYSENTFTEYKKKLAERLKAKLPDATPTELAKLVNKHSDFASNCCSINSPPLYCDSEIDAELKNIL

SEQ ID NO: 2880 - protein, 114 aa, Homo sapiens
MLSGARCRLASALRGTRAPPSAVARRCLHASGSRPLADRGKKTEEPPRDFDPALLEFLVCPLSKKPLRYEASTNELINEELGIAYPIIDGIPNMIPQAARMTRQSKKQEEVEQR

SEQ ID NO: 2881 - protein, 893 aa, Homo sapiens
MFPLKDAEMGAFTFFASALPHDVCGSNGLPLTPNSIKILGRFQILKTITHPRLCQYVDISRGKHERLVVVAEHCERSLEDLLRERKPVSCSTVLCIAFEVLQGLQYMNKHGIVHRALSPHNILLDRKGHIKLAKFGLYHMTAHGDDVDFPIGYPSYLAPEVIAQGIFKTTDHMPSKKPLPSGPKSDVWSLGIILFELCVGRKLFQSLDISERLKFLLTLDCVDDTLIVLAEEHGCLDIIKELPETVIDLLNKCLTFHPSKRPTPDQLMKDKVFSEVSPLYTPFTKPASLFSSSLRCADLTLPEDISQLCKDINNDYLAERSIEEVYYLWCLAGGDLEKELVNKEIIRSKPPICTLPNFLFEDGESFGQGRDRSSLLDDTTVTLSLCQLRNRLKDVGGEAFYPLLEDDQSNLPHSNSNNELSAAATLPLIIREKDTEYQLNRIILFDRLLKAYPYKKNQIWKEARVDIPPLMRGLTWAALLGVEGAIHAKYDAIDKDTPIPTDRQIEVDIPRCHQYDELLSSPEGHAKFRRVLKAWVVSHPDLVYWQGLDSLCAPFLYLNFNNEALAYACMSAFIPKYLYNFFLKDNSHVIQEYLTVFSQMIAFHDPELSNHLNEIGFIPDLYAIPWFLTMFTHVFPLHKIFHLWDTLLLGNSSFPFCIGVAILQQLRDRLLANGFNECILLFSDLPEIDIERCVRESINLFCWTPKSATYRQHAQPPKPSSDSSGGRSSAPYFSAECPDPPKTDLSRESIPLNDLKSEVSPRISAEDLIDLCELTVTGHFKTPSKKTKSSKPKLLVVDIRNSEDFIRGHISGSINIPFSAAFTAEGELTQGPYTAMLQNFKGKVIVIVGHVAKHTAEFAAHLVKMKYPRICILDGGINKIKPTGLLTIPSPQI

SEQ ID NO: 2882 - protein, 135 aa, Homo sapiens
MVLESVARIVKVQLPAYLKRLPVPESITGFARLTVSEWLRLLPFLGVLALLGYLAVRPFLPKKKQQKDSLINLKIQKENPKVVNEINIEDLCLTKAAYCRCWRSKTFPACDGSHNKHNELTGDNVGPLILKKKEV

SEQ ID NO: 2883 - protein, 893 aa, Homo sapiens
MSSKKNRKRLNQSAENGSSLPSAASSCAEARAPSAGSDFAATSGTLTVTNLLEKVDDKIPKTFQNSLIHLGLNTMKSANICIGRPVLLTSLNGKQEVYTAWPMAGFPGGKVGLSEMAQKNVGVRPGDAIQVQPLVGAVLQAEEMDVALSDKDMEINEEELTGCILRKLDGKIVLPGNFLYCTFYGRPYKLQVLRVKGADGMILGGPQSDSDTDAQRMAFEQSSMETSSLELSLQLSQLDLEDTQIPTSRSTPYKPIDDRITNKASDVLLDVTQSPGDGSGLMLEEVTGLKCNFESAREGNEQLTEEERLLKFSIGAKCNTDTFYFISSTTRVNFTEIDKNSKEQDNQFKVTYDMIGGLSSQLKAIREIIELPLKQPELFKSYGIPAPRGVLLYGPPGTGKTMIARAVANEVGAYVSVINGPEIISKFYGETEAKLRQIFAEATLRHPSIIFIDELDALCPKREGAQNEVEKRVVASLLTLMDGIGSEVSEGQVLVLGATNRPHALDAALRRPGRFDKEIEIGVPNAQDRLDILQKLLRRVPHLLTEAELLQLANSAHGYVGADLKVLCNEAGLCALRRILKKQPNLPDVKVAGLVKITLKDFLQAMNDIRPSAMREIAIDVPNVSWSDIGGLESIKLKLEQAVEWPLKHPESFIRMGIQPPKGVLLYGPPGCSKTMIAKALANESGLNFLAIKGPELMNKYVGESERAVRETFRKARAVAPSIIFFDELDALAVERGSSLGAGNVADRVLAQLLTEMDGIEQLKDVTILAATNRPDRIDKALMRPGRIDRIIYVPLPDAATRREIFKLQFHSMPVSNEVDLDELILQTDAYSGAEIVAVCREAALLALEEDIQANLIMKRHFTQALSTVTPRIPESLRRFYEDYQEKSGLHTL

SEQ ID NO: 2884 - protein, 1073 aa, Homo sapiens
MAWVKFLRKPGGNLGKVYQPGSMLSLAPTKGLLNEPGQNSCFLNSAVQVLWQLDIFRRSLRVLTGHVCQGDACIFCALKTIFAQFQHSREKALPSDNIRHALAESFKDEQRFQLGLMDDAAECFENMLERIHFHIVPSRDADMCTSKSCITHQKFAMTLYEQCVCRSCGASSDPLPFTEFVRYISTTALCNEVERMLERHERFKPEMFAELLQAANTTDDYRKCPSNCGQKIKIRRVLMNCPEIVTIGLVWDSEHSDLTEAVVRNLATHLYLPGLFYRVTDENAKNSELNLVGMICYTSQHYCAFAFHTKSSKWVFFDDANVKEIGTRWKDVVSKCIRCHFQPLLLFYANPDGTAVSTEDALRQVISWSHYKSVAENMGCEKPVIHKSDNLKENGFGDQAKQRENQKFPTDNISSSNRSHSHTGVGKGPAKLSHIDQREKIKDISRECALKAIEQKNLLSSQRKDLEKGQRKDLGRHRDLVDEDLSHFQSGSPPAPNGFKQHGNPHLYHSQGKGSYKHDRVVPQSRASAQIISSSKSQILAPGEKITGKVKSDNGTGYDTDSSQDSRDRGNSCDSSSKSRNRGWKPMRETLNVDSIFSESEKRQHSPRHKPNISNKPKSSKDPSFSNWPKENPKQKGLMTIYEDEMKQEIGSRSSLESNGKGAEKNKGLVEGKVHGDNWQMQRTESGYESSDHISNGSTNLDSPVIDGNGTVMDISGVKETVCFSDQITTSNLNKERGDCTSLQSQHHLEGFRKELRNLEAGYKSHEFHPESHLQIKNHLIKRSHVHEDNGKLFPSSSLQIPKDHNAREHIHQSDEQKLEKPNECKFSEWLNIENSERTGLPFHVDNSASGKRVNSNEPSSLWSSHLRTVGLKPETAPLIQQQNIMDQCYFENSLSTECIIRSASRSDGCQMPKLFCQNLPPPLPPKKYAITSVPQSEKSESTPDVKLTEVFKATSHLPKHSLSTASEPSLEVSTHMNDERHKETFQVRECFGNTPNCPSSSSTNDFQANSGAIDAFCQPELDSISTCPNETVSLTTYFSVDSCMTDTYRLKYHQRPKLSFPESSGFCNNSLS

SEQ ID NO: 2885 - protein, 366 aa, Homo sapiens
MDSDDEMVEEAVEGHLDDDGLPHGFCTVTYSSTDRFEGNFVHGEKNGRGKFFFFDGSTLEGYYVDDALQGQGVYTYEDGGVLQGTYVDGELNGPAQEYDTDGRLIFKGQYKDNIRHGVCWIYYPDGGSLVGEVNEDGEMTGEKIAYVYPDERTALYGKFIDGEMIEGKLATLMSTEEGRPHFELMPGNSVYHFDKSTSSCISTNALLPDPYESERVYVAESLISSAGEGLFSKVAVGPNTVMSFYNGVRITHQEVDSRDWALNGNTLSLDEETVIDVPEPYNHVSKYCASLGHKANHSFTPNCIYDMFVHPRFGPIKCIRTLRAVEADEELTVAYGYDHSPPGKSGPEAPEWYQVELKAFQATQQK

SEQ ID NO: 2886 - protein, 494 aa, Homo sapiens
MEVVEAAAAQLETLKFNGTDFGVGEGPAAPSPGSAPVPGTQPPLQSFEGSPDAGQTVEVKPAGEQPLQPVLNAVAAGTPAPQPQPPAESPACGDCVTSPGAAEPARAPDSLETSDSDSDSDSETDSDSSSSSSSSSSSSSSSSSSCISLPPVLSDGDDDLQIEKENKNFPLKTKDELLLNELPSVEELTIILPEDIELKPLGMVSSIIEQLVIIESMTNLPPVNEETVIFKSDRQAAGKIFEIFGPVAHPFYVLRFNSSDHIESKGIKIKETMYFAPSMKDFTQYIFTEKLKQDKGSDASWKNDQEPPPEALDFSDDEKEKEAKQRKKSQIQGRKKLKSEFNEPGEDFTEVHQNWNAHSSASEHAKGYRNREFTRGFSRARYPRSCHGRPPPQHFYNSEHMVSQETSGFPSQRQNNPIMPQYPFPLPVFDMHNFPLRPPPPPPPPPVNMGWATPNMAAHPLLNLPYSLPPPPPPPPLPPPPSSGDSNSHFGPYY

SEQ ID NO: 2887 - protein, 295 aa, Homo sapiens
MLQGPGSLLLLFLASHCCLGSARGLFLFGQPDFSYKRSNCKPIPANLQLCHGIEYQNMRLPNLLGHETMKEVLEQAGAWIPLVMKQCHPDTKKFLCSLFAPVCLDDLDETIQPCHSLCVQVKDRCAPVMSAFGFPWPDMLECDRFPQDNDLCIPLASSDHLLPATEEAPKVCEACKNKNDDDNDIMETLCKNDFALKIKVKEITYINRDTKIILETKSKTIYKLNGVSERDLKKSVLWLKDSLQCTCEEMNDINAPYLVMGQKQGGELVITSVKRWQKGQREFKRISRSIRKLQC

SEQ ID NO: 2888 - protein, 50 aa, Homo sapiens
MSLFGLLLLTSALAGQRQGTQAESNLSSKFQFSSNKEQNGRNYIQASGLA

SEQ ID NO: 2889 - protein, 464 aa, Homo sapiens
MAHVRHFRTLVSGFYFWEAALLLSLVATKETDSARSRSAPMSPSDFLDKLMGRTSGYDARIRPNFKGPPVNVTCNIFINSFGSIAETTMDYRVNIFLRQKWNDPRLAYSEYPDDSLDLDPSMLDSIWKPDLFFANEKGANFHEVTTDNKLLRIFKNGNVLYSIRLTLTLSCPMDLKNFPMDVQTCIMQLESFGYTMNDLIFEWQDEAPVQVAEGLTLPQFLLKEEKDLRYCTKHYNTGKFTCIEVRFHLERQMGYYLIQMYIPSLLIVILSWVSFWINMDAAPARVALGITTVLTMTTQSSGSRASLPKVSYVKAIDIWMAVCLLFVFSALLEYAAVNFVSRQHKELLRFRRKRKNKTEAFALEKFYRFSDMDDEVRESRFSFTAYGMGPCLQAKDGMTPKGPNHPVQVMPKSPDEMRKVFIDRAKKIDTISRACFPLAFLIFNIFYWVIYKILRHEDIHQQQD

SEQ ID NO: 2890 - protein, 124 aa, Homo sapiens
MAAAMTFCRLLNRCGEAARSLPLGARCFGVRVSPTGEKVTHTGQVYDDKDYRRIRFVGRQKEVNENFAIDLIAEQPVSEVETRVIACDGGGGALGHPKVYINLDKETKTGTCGYCGLQFRQHHH

SEQ ID NO: 2891 - protein, 910 aa, Homo sapiens
MDTAEEDICRVCRSEGTPEKPLYHPCVCTGSIKFIHQECLVQWLKHSRKEYCELCKHRFAFTPIYSPDMPSRLPIQDIFAGLVTSIGTAIRYWFHYTLVAFAWLGVVPLTACRIYKCLFTGSVSSLLTLPLDMLSTENLLADCLQGCFVVTCTLCAFISLVWLREQIVHGGAPIWLEHAAPPFNAAGHHQNEAPAGGNGAENVAADQPANPPAENAVVGENPDAQDDQAEEEEEDNEEEDDAGVEDAADANNGAQDDMNWNALEWDRAAEELTWERMLGLDGSLVFLEHVFWVVSLNTLFILVFAFCPYHIGHFSLVGLGFEEHVQASHFEGLITTIVGYILLAITLIICHGLATLVKFHRSRRLLGVCYIVVKVSLLVVVEIGVFPLICGWWLDICSLEMFDATLKDRELSFQSAPGTTMFLHWLVGMVYVFYFASFILLLREVLRPGVLWFLRNLNDPDFNPVQEMIHLPIYRHLRRFILSVIVFGSIVLLMLWLPIRIIKSVLPNFLPYNVMLYSDAPVSELSLELLLLQVVLPALLEQGHTRQWLKGLVRAWTVTAGYLLDLHSYLLGDQEENENSANQQVNNNQHARNNNAIPVVGEGLHAAHQAILQQGGPVGFQPYRRPLNFPLRIFLLIVFMCITLLIASLICLTLPVFAGRWLMSFWTGTAKIHELYTAACGLYVCWLTIRAVTVMVAWMPQGRRVIFQKVKEWSLMIMKTLIVAVLLAGVVPLLLGLLFELVIVAPLRVPLDQTPLFYPWQDWALGVLHAKIIAAITLMGPQWWLKTVIEQVYANGIRNIDLHYIVRKLAAPVISVLLLSLCVPYVIASGVVPLLGVTAEMQNLVHRRIYPFLLMVVVLMAILSFQVRQFKRLYEHIKNDKYLVGQRLVNYERKSGKQGSSPPPPQSSQE

SEQ ID NO: 2892 - protein, 790 aa, Homo sapiens
MKITSTSCICPVLVCLCFVQRCYGTAHHSSIKVMRNQTKHIEGETEVHHRPKRGWVWNQFFVLEEHMGPDPQYVGKLHSNSDKGDGSVKYILTGEGAGTIFIIDDTTGDIHSTKSLDREQKTHYVLHAQAIDRRTNKPLEPESEFIIKVQDINDNAPKFTDGPYIVTVPEMSDMGTSVLQVTATDADDPTYGNSARVVYSILQGQPYFSVDPKTGVIRTALHNMDREAREHYSVVIQAKDMAGQVGGLSGSTTVNITLTDVNDNPPRFPQKHYQLYVPESAQVGSAVGKIKANDADTGSNADMTYSIINGDGMGIFSISTDKETREGILSLKKPLNYEKKKSYTLNIEGANTHLDFRFSHLGPFKDATMLKIIVGDVDEPPLFSMPSYLMEVYENAKIGTVVGTVLAQDPDSTNSLVRYFINYNVEDDRFFNIDANTGTIRTTKVLDREETPWYNITVTASEIDNPDLLSHVTVGIRVLDVNDNPPELAREYDIIVCENSKPGQVIHTISATDKDDFANGPRFNFFLDERLPVNPNFTLKDNEDNTASILTRRRRFSRTVQDVYYLPIMISDGGIPSLSSSSTLTIRVCACERDGRVRTCHAEAFLSSAGLSTGALIAILLCVLILLAIVVLFITLRRSKKEPLIISEEDVRENVVTYDDEGGGEEDTEAFDITALRNPSAAEELKYRRDIRPEVKLTPRHQTSSTLESIDVQEFIKQRLAEADLDPSVPPYDSLQTYAYEGQRSEAGSISSLDSATTQSDQDYHYLGDWGPEFKKLAELYGEIESERTT

SEQ ID NO: 2893 - protein, 1224 aa, Homo sapiens
MKPRARGWRGLAALWMLLAQVAEQAPACAMGPAAAAPGSPSVPRPPPPAERPGWMEKGEYDLVSAYEVDHRGDYVSHEIMHHQRRRRAVPVSEVESLHLRLKGSRHDFHMDLRTSSSLVAPGFIVQTLGKTGTKSVQTLPPEDFCFYQGSLRSHRNSSVALSTCQGLSGMIRTEEADYFLRPLPSHLSWKLGRAAQGSSPSHVLYKRSTEPHAPGASEVLVTSRTWELAHQPLHSSDLRLGLPQKQHFCGRRKKYMPQPPKEDLFILPDEYKSCLRHKRSLLRSHRNEELNVETLVVVDKKMMQNHGHENITTYVLTILNMVSALFKDGTIGGNINIAIVGLILLEDEQPGLVISHHADHTLSSFCQWQSGLMGKDGTRHDHAILLTGLDICSWKNEPCDTLGFAPISGMCSKYRSCTINEDTGLGLAFTIAHESGHNFGMIHDGEGNMCKKSEGNIMSPTLAGRNGVFSWSPCSRQYLHKFLSTAQAICLADQPKPVKEYKYPEKLPGELYDANTQCKWQFGEKAKLCMLDFKKDICKALWCHRIGRKCETKFMPAAEGTICGHDMWCRGGQCVKYGDEGPKPTHGHWSDWSSWSPCSRTCGGGVSHRSRLCTNPKPSHGGKFCEGSTRTLKLCNSQKCPRDSVDFRAAQCAEHNSRRFRGRHYKWKPYTQVEDQDLCKLYCIAEGFDFFFSLSNKVKDGTPCSEDSRNVCIDGICERVGCDNVLGSDAVEDVCGVCNGNNSACTIHRGLYTKHHHTNQYYHMVTIPSGARSIRIYEMNVSTSYISVRNALRRYYLNGHWTVDWPGRYKFSGTTFDYRRSYNEPENLIATGPTNETLIVELLFQGRNPGVAWEYSMPRLGTEKQPPAQPSYTWAIVRSECSVSCGGGQMTVREGCYRDLKFQVNMSFCNPKTRPVTGLVPCKVSACPPSWSVGNWSACSRTCGGGAQSRPVQCTRRVHYDSEPVPASLCPQPAPSSRQACNSQSCPPAWSAGPWAECSHTCGKGWRKRAVACKSTNPSARAQLLPDAVCTSEPKPRMHEACLLQRCHKPKKLQWLVSAWSQCSVTCERGTQKRFLKCAEKYVSGKYRELASKKCSHLPKPSLELERACAPLPCPRHPPFAAAGPSRGSWFASPWSQCTASCGGGVQTRSVQCLAGGRPASGCLLHQKPSASLACNTHFCPIAEKKDAFCKDYFHWCYLVPQHGMCSHKFYGKQCCKTCSKSNL

SEQ ID NO: 2894 - protein, 97 aa, Homo sapiens [sequence omitted]

SEQ ID NO: 2895 - protein, 424 aa, Homo sapiens
MHRKHLQEIPDLSSNVATSFTWGWDSSKTSELLSGMGVSALEKEEPDSENIPQELLSNLGHPESPPRKRLKSKGSDKDFVIVRRPKLNRENFPGVSWDSLPDELLLGIFSCLCLPELLKVSGVCKRWYRLASDESLWQTLDLTGKNLHPDVTGRLLSQGVIAFRCPRSFMDQPLAEHFSPFRVQHMDLSNSVIEVSTLHGILSQCSKLQNLSLEGLRLSDPIVNTLAKNSNLVRLNLSGCSGFSEFALQTLLSSCSRLDELNLSWCFDFTEKHVQVAVAHVSETITQLNLSGYRKNLQKSDLSTLVRRCPNLVHLDLSDSVMLKNDCFQEFFQLNYLQHLSLSRCYDIIPETLLELGEIPTLKTLQVFGIVPDGTLQLLKEALPHLQINCSHFTTIARPTIGNKKNQEIWGIKCRLTLQKPSCL

SEQ ID NO: 2896 - protein, 979 aa, Homo sapiens
MALFAVFQTTFFLTLLSLRTYQSEVLAERLPLTPVSLKVSTNSTRQSLHLQWTVHNLPYHQELKMVFQIQISRIETSNVIWVGNYSTTVKWNQVLHWSWESELPLECATHFVRIKSLVDDAKFPEPNFWSNWSSWEEVSVQDSTGQDILFVFPKDKLVEEGTNVTICYVSRNIQNNVSCYLEGKQIHGEQLDPHVTAFNLNSVPFIRNKGTNIYCEASQGNVSEGMKGIVLFVSKVLEEPKDFSCETEDFKTLHCTWDPGTDTALGWSKQPSQSYTLFESFSGEKKLCTHKNWCNWQITQDSQETYNFTLIAENYLRKRSVNILFNLTHRVYLMNPFSVNFENVNATNAIMTWKVHSIRNNFTYLCQIELHGEGKMMQYNVSIKVNGEYFLSELEPATEYMARVRCADASHFWKWSEWSGQNFTTLEAAPSEAPDVWRIVSLEPGNHTVTLFWKPLSKLHANGKILFYNVVVENLDKPSSSELHSIPAPANSTKLILDRCSYQICVIANNSVGASPASVIVISADPENKEVEEERIAGTEGGFSLSWKPQPGDVIGYVVDWCDHTQDVLGDFQWKNVGPNTTSTVISTDAFRPGVRYDFRIYGLSTKRIACLLEKKTGYSQELAPSDNPHVLVDTLTSHSFTLSWKDYSTESQPGFIQGYHVYLKSKARQCHPRFEKAVLSDGSECCKYKIDNPEEKALIVDNLKPESFYEFFITPFTSAGEGPSATFTKVTTPDEHSSMLIHILLPMVFCVLLIMVMCYLKSQWIKETCYPDIPDPYKSSILSLIKFKENPHLIIMNVSDCIPDAIEVVSKPEGTKIQFLGTRKSLTETELTKPNYLYLLPTEKNHSGPGPCICFENLTYNQAASDSGSCGHVPVSPKAPSMLGLMTSPENVLKALEKNYMNSLGEIPAGETSLNYVSQLASPMFGDKDSLPTNPVEAPHCSEYKMQMAVSLRLALPPPTENSSLSSITLLDPGEHYC

SEQ ID NO: 2897 - protein, 523 aa, Homo sapiens
MVGQRVLLLVAFLLSGVLLSEAAKILTISTLGGSHYLLLDRVSQILQEHGHNVTMLHQSGKFLIPDIKEEEKSYQVIRWFSPEDHQKRIKKHFDSYIETALDGRKESEALVKLMEIFGTQCSYLLSRKDIMDSLKNENYDLVFVEAFDFCSFLIAEKLVKPFVAILPTTFGSLDFGLPSPLSYVPVFPSLLTDHMDFWGRVKNFLMFFSFSRSQWDMQSTFDNTIKEHFPEGSRPVLSHLLLKAELWFVNSDFAFDFARPLLPNTVYIGGLMEKPIKPVPQDLDNFIANFGDAGFVLVAFGSMLNTHQSQEVLKKMHNAFAHLPQGVIWTCQSSHWPRDVHLATNVKIVDWLPQSDLLAHPSIRLFVTHGGQNSVMEAIRHGVPMVGLPVNGDQHGNMVRVVAKNYGVSIRLNQVTADTLTLTMKQVIEDKRYKSAVVAASVILHSQPLSPAQRLVGWIDHILQTGGATHLKPYAFQQPWHEQYLIDVFVFLLGLTLGTMWLCGKLLGVVARWLRGARKVKKT

SEQ ID NO: 2898 - protein, 685 aa, Homo sapiens
MELLRTITYQPAASTKMCEQALGKGCGADSKKKRPPQPPEESQPPQSQAQVPPAAPHHHHHHSHSGPEISRIIVDPTTGKRYCRGKVLGKGGFAKCYEMTDLTNNKVYAAKIIPHSRVAKPHQREKIDKEIELHRILHHKHVVQFYHYFEDKENIYILLEYCSRRSMAHILKARKVLTEPEVRYYLRQIVSGLKYLHEQEILHRDLKLGNFFINEAMELKVGDFGLAARLEPLEHRRRTICGTPNYLSPEVLNKQGHGCESDIWALGCVMYTMLLGRPPFETTNLKETYRCIREARYTMPSSLLAPAKHLIASMLSKNPEDRPSLDDIIRHDFFLQGFTPDRLSSSCCHTVPDFHLSSPAKNFFKKAAAALFGGKKDKARYIDTHNRVSKEDEDIYKLRHDLKKTSITQQPSKHRTDEELQPPTTTVARSGTPAVENKQQIGDAIRMIVRGTLGSCSSSSECLEDSTMGSVADTVARVLRGCLENMPEADCIPKEQLSTSFQWVTKWVDYSNKYGFGYQLSDHTVGVLFNNGAHMSLLPDKKTVHYYAELGQCSVFPATDAPEQFISQVTVLKYFSHYMEENLMDGGDLPSVTDIRRPRLYLLQWLKSDKALMMLFNDGTFQVNFYHDHTKIIICSQNEEYLLTYINEDRISTTFRLTTLLMSGCSSELKNRMEYALNMLLQRCN

SEQ ID NO: 2899 - protein, 262 aa, Homo sapiens
MRNSYRFLASSLSVVVSLLLIPEDVCEKIIGGNEVTPHSRPYMVLLSLDRKTICAGALIAKDWVLTAAHCNLNKRSQVILGAHSITREEPTKQIMLVKKEFPYPCYDPATREGDLKLLQLMEKAKINKYVTILHLPKKGDDVKPGTMCQVAGWGRTHNSASWSDTLREVNITIIDRKVCNDRNHYNFNPVIGMNMVCAGSLRGGRDSCNGDSGSPLLCEGVFRGVTSFGLENKCGDPRGPGVYILLSKKHLNWIIMTIKGAV

SEQ ID NO: 2900 - protein, 385 aa, Homo sapiens
MKLVRKNIEKDNAGQVTLVPEEPEDMWHTYNLVQVGDSLRASTIRKVQTESSTGSVGSNRVRTTLTLCVEAIDFDSQACQLRVKGTNIQENEYVKMGAYHTIELEPNRQFTLAKKQWDSVVLERIEQACDPAWSADVAAVVMQEGLAHICLVTPSMTLTRAKVEVNIPRKRKGNCSQHDRALERFYEQVVQAIQRHIHFDVVKCILVASPGFVREQFCDYLFQQAVKTDNKLLLENRSKFLQVHASSGHKYSLKEALCDPTVASRLSDTKAAGEVKALDDFYKMLQHEPDRAFYGLKQVEKANEAMAIDTLLISDELFRHQDVATRSRYVRLVDSVKENAGTVRIFSSLHVSGEQLSQLTGVAAILRFPVPELSDQEGDSSSEED

SEQ ID NO: 2901 - protein, 354 aa, Homo sapiens
MKSLLLLVLISICWADHLSDNYTLDHDRAIHIQAENGPHLLVEAEQAKVFSHRGGNVTLPCKFYRDPTAFGSGIHKIRIKWTKLTSDYLKEVDVFVSMGYHKKTYGGYQGRVFLKGGSDSDASLVITDLTLEDYGRYKCEVIEGLEDDTVVVALDLQGVVFPYFPRLGRYNLNFHEAQQACLDQDAVIASFDQLYDAWRGGLDWCNAGWLSDGSVQYPITKPREPCGGQNTVPGVRNYGFWDKDKSRYDVFCFTSNFNGRFYYLIHPTKLTYDEAVQACLNDGAQIAKVGQIFAAWKILGYDRCDAGWLADGSVRYPISRPRRRCSPTEAAVRFVGFPDKKHKLYGVYCFRAYN

SEQ ID NO: 2902 - protein, 406 aa, Homo sapiens
MPPVGGKKAKKGILERLNAGEIVIGDGGFVFALEKRGYVKAGPWTPEAAVEHPEAVRQLHREFLRAGSNVMQTFTFYASEDKLENRGNYVLEKISGQEVNEAACDIARQVADEGDALVAGGVSQTPSYLSCKSETEVKKVFLQQLEVFMKKNVDFLIAEYFEHVEEAVWAVETLIASGKPVAATMCIGPEGDLHGVPPGECAVRLVKAGASIIGVNCHFDPTISLKTVKLMKEGLEAARLKAHLMSQPLAYHTPDCNKQGFIDLPEFPFGLEPRVATRWDIQKYAREAYNLGVRYIGGCCGFEPYHIRAIAEELAPERGFLPPASEKHGSWGSGLDMHTKPWVRARARKEYWENLRIASGRPYNPSMSKPDGWGVTKGTAELMQQKEATTEQQLKELFEKQKFKSQ

SEQ ID NO: 2903 - protein, 1047 aa, Homo sapiens
MMAAEAGSEEGGPVTAGAGGGGAAAGSSAYPAVCRVKIPAALPVAAAPYPGLVETGVAGTLGGGAALGSEFLGAGSVAGALGGAGLTGGGTAAGVAGAAAGVAGAAVAGPSGDMALTKLPTSLLAETLGPGGGFPPLPPPPYLPPLGAGLGTVDEGDSLDGPEYEEEEVAIPLTAPPTNQWYHGKLDRTIAEERLRQAGKSGSYLIRESDRRPGSFVLSFLSQMNVVNHFRIIAMCGDYYIGGRRFSSLSDLIGYYSHVSCLLKGEKLLYPVAPPEPVEDRRRVRAILPYTKVPDTDEISFLKGDMFIVHNELEDGWMWVTNLRTDEQGLIVEDLVEEVGREEDPHEGKIWFHGKISKQEAYNLLMTVGQVCSFLVRPSDNTPGDYSLYFRTNENIQRFKICPTPNNQFMMGGRYYNSIGDIIDHYRKEQIVEGYYLKEPVPMQDQEQVLNDTVDGKEIYNTIRRKTKDAFYKNIVKKGYLLKKGKGKRWKNLYFILEGSDAQLIYFESEKRATKPKGLIDLSVCSVYVVHDSLFGRPNCFQIVVQHFSEEHYIFYFAGETPEQAEDWMKGLQAFCNLRKSSPGTSNKRLRQVSSLVLHIEEAHKLPVKHFTNPYCNIYLNSVQVAKTHAREGQNPVWSEEFVFDDLPPDINRFEITLSNKTKKSKDPDILFMRCQLSRLQKGHATDEWFLLSSHIPLKGIEPGSLRVRARYSMEKIMPEEEYSEFKELILQKELHVVYALSHVCGQDRTLLASILLRIFLHEKLESLLLCTLNDREISMEDEATTLFRATTLASTLMEQYMKATATQFVHHALKDSILKIMESKQSCELSPSKLEKNEDVNTNLTHLLNILSELVEKIFMASEILPPTLRYIYGCLQKSVQHKWPTNTTMRTRVVSGFVFLRLICPAILNPRMFNIISDSPSPIAARTLILVAKSVQNLANLVEFGAKEPYMEGVNPFIKSNKHRMIMFLDELGNVPELPDTTEHSRTDLSRDLAALHEICVAHSDELRTLSNERGAQQHVLKKLLAITELLQQKQNQYTKTNDVR

SEQ ID NO: 2904 - protein, 188 aa, Homo sapiens
MATDVFNSKNLAVQAQKKILGKMVSKSIATTLIDDTSSEVLDELYRVTREYTQNKKEAEKIIKNLIKTVIKLAILYRNNQFNQDELALMEKFKKKVHQLAMTVVSFHQVDYTFDRNVLSRLLNECREMLHQIIQRHLTAKSHGRVNNVFDHFSDCEFLAALYNPFGNFKPHLQKLCDGINKMLDEENI

SEQ ID NO: 2905 - protein, 617 aa, Homo sapiens
MDLKTAVFNAARDGKLRLLTKLLASKSKEEVSSLISEKTNGATPLLMAARYGHLDMVEFLLEQCSASIEVGGSVNFDGETIEGAPPLWAASAAGHLKVVQSLLNHGASVNNTTLTNSTPLRAACFDGHLEIVKYLVEHKADLEVSNRHGHTCLMISCYKGHKEIAQYLLEKGADVNRKSVKGNTALHDCAESGSLDIMKMLLMYCAKMEKDGYGMTPLLSASVTGHTNIVDFLTHHAQTSKTERINALELLGATFVDKKRDLLGALKYWKKAMNMRYSDRTNIISKPVPQTLIMAYDYAKEVNSAEELEGLIADPDEMRMQALLIRERILGPSHPDTSYYIRYRGAVYADSGNFKRCINLWKYALDMQQSNLDPLSPMTASSLLSFAELFSFMLQDRAKGLLGTTVTFDDLMGILCKSVLEIERAIKQTQCPADPLQLNKALSIILHLICLLEKVPCTLEQDHFKKQTIYRFLKLHPRGKNNFSPLHLAVDKNTTCVGRYPVCKFPSLQVTAILIECGADVNVRDSDDNSPLHIAALNNHPDIMNLLIKSGAHFDATNLHKQTASDLLDEKEIAKNLIQPINHTTLQCLAARVIVNHRIYYKGHIPEKLETFVSLHR

SEQ ID NO: 2906 - protein, 202 aa, Homo sapiens
MAVPAALILRESPSMKKAVSLINAIDTGRFPRLLTRILQKLHLKAESSFSEEEEEKLQAAFSLEKQDLHLVLETISFILEQAVYHNVKPAALQQQLENIHLRQDKAEAFVNTWSSMGQETVEKFRQRILAPCKLETVGWQLNLQMAHSAQAKLKSPQAVLQLGVNNEDSKSLEKVLVEFSHKELFDFYNKLETIQAQLDSLT

SEQ ID NO: 2907 - protein, 1140 aa, Homo sapiens
MVISLNSCLSFICLLLCHWIGTASPLNLEDPNVCSHWESYSVTVQESYPHPFDQIYYTSCTDILNWFKCTRHRVSYRTAYRHGEKTMYRRKSQCCPGFYESGEMCVPHCADKCVHGRCIAPNTCQCEPGWGGTNCSSACDGDHWGPHCTSRCQCKNGALCNPITGACHCAAGFRGWRCEDRCEQGTYGNDCHQRCQCQNGATCDHVTGECRCPPGYTGAFCEDLCPPGKHGPQCEQRCPCQNGGVCHHVTGECSCPSGWMGTVCGQPCPEGRFGKNCSQECQCHNGGTCDAATGQCHCSPGYTGERCQDECPVGTYGVLCAETCQCVNGGKCYHVSGACLCEAGFAGERCEARLCPEGLYGIKCDKRCPCHLENTHSCHPMSGECACKPGWSGLYCNETCSPGFYGEACQQICSCQNGADCDSVTGKCTCAPGFKGIDCSTPCPLGTYGINCSSRCGCKNDAVCSPVDGSCTCKAGWHGVDCSIRCPSGTWGFGCNLTCQCLNGGACNTLDGTCTCAPGWRGEKCELPCQDGTYGLNCAERCDCSHADGCHPTTGHCRCLPGWSGVHCDSVCAEGRWGPNCSLPCYCKNGASCSPDDGICECAPGFRGTTCQRICSPGFYGHRCSQTCPQCVHSSGPCHHITGLCDCLPGFTGALCNEVCPSGRFGKNCAGICTCTNNGTCNPIDRSCQCYPGWIGSDCSQPCPPAHWGPNCIHTCNCHNGAFCSAYDGECKCTPGWTGLYCTQRCPLGFYGKDCALICQCQNGADCDHISGQCTCRTGFMGRHCEQKCPSGTYGYGCRQICDCLNNSTCDHITGTCYCSPGWKGARCDQAGVIIVGNLNSLSRTSTALPADSYQIGAIAGIIILVLVVLFLLALFIIYRHKQKGKESSMPAVTYTPAMRVVNADYTISGTLPHSNGGNANSHYFTNPSYHTLTQCATSPHVNNRDRMTVTKSKNNQLFVNLKNVNPGKRGPVGDCTGTLPADWKHGGYLNELGAFGLDRSYMGKSLKDLGKNSEYNSSNCSLSSSENPYATIKDPPVLIPKSSECGYVEMKSPARRDSPYAEINNSTSANRNVYEVEPTVSVVQGVFSNNGRLSQDPYDLPKNSHIPCHYDLLPVRDSSSSPKQEDSGGSSSNSSSSSE

SEQ ID NO: 2908 - protein, 257 aa, Homo sapiens
MSGFENLNTDFYQTSYSIDDQSQQSYDYGGSGGPYSKQYAGYDYSQQGRFVPPDMMQPQQPYTGQIYQPTQAYTPASPQPFYGNNFEDEPPLLEELGINFDHIWQKTLTVLHPLKVADGSIMNETDLAGPMVFCLAFGATLLLAGKIQFGYVYGISAIGCLGMFCLLNLMSMTGVSFGCVASVLGYCLLPMILLSSFAVIFSLQGMVGIILTAGIIGWCSFSASKIFISALAMEGQQLLVAYPCALLYGVFALISVF

SEQ ID NO: 2909 - protein, 814 aa, Homo sapiens
MGLPALEFSDCCLDSPHFRETLKSHEAELDKTNKFIKELIKDGKSLISALKNLSSAKRKFADSLNEFKFQCIGDAETDDEMCIARSLQEFATVLRNLEDERIRMIENASEVLITPLEKFRKEQIGAAKEAKKKYDKETEKYCGILEKHLNLSSKKKESQLQEADSQVDLVRQHFYEVSLEYVFKVQEVQERKMFEFVEPLLAFLQGLFTFYHHGYELAKDFGDFKTQLTISIQNTRNRFEGTRSEVESLMKKMKENPLEHKTISPYTMEGYLYVQEKRHFGTSWVKHYCTYQRDSKQITMVPFDQKSGGKGGEDESVILKSCTRRKTDSIEKRFCFDVEAVDRPGVITMQALSEEDRRLWMEAMDGREPVYNSNKDSQSEGTAQLDSIGFSIIRKCIHAVETRGINEQGLYRIVGVNSRVQKLLSVLMDPKTASETETDICAEWEIKTITSALKTYLRMLPGPLMMYQFQRSFIKAAKLENQESRVSEIHSLVHRLPEKNRQMLQLLMNHLANVANNHKQNLMTVANLGVVFGPTLLRPQEETVAAIMDIKFQNIVIEILIENHEKIFNTVPDMPLTNAQLHLSRKKSSDSKPPSCSERPLTLFHTVQSTEKQEQRNSIINSSLESVSSNPNSILNSSSSLQPNMNSSDPDLAVVKPTRPNSLPPNPSPTSPLSPSWPMFSAPSSPMPTSSTSSDSSPVRSVAGFVWFSVAAVVLSLARSSLHAVFSLLVNFVPCHPNLHLLFDRPEEAVHEDSSTPFRKAKALYACKAEHDSELSFTAGTVFDNVHPSQEPGWLEGTLNGKTGLIPENYVEFL

SEQ ID NO: 2910 - protein, 151 aa, Homo sapiens
MFSTKALLLAGLISTALAGPWANICAGKSSNEIRTCDRHGCGQYSAQRSQRPHQGVDILCSAGSTVYAPFTGMIVGQEKPYQNKNAINNGVRISGRGFCVKMFYIKPIKYKGPIKKGEKLGTLLPLQKVYPGIQSHVHIENCDSSDPTAYL

SEQ ID NO: 2911 - protein, 144 aa, Homo sapiens
MLLAMVLTSALLLCSVAGQGCPTLAGILDINFLINKMQEDPASKCHCSANVTSCLCLGIPSDNCTRPCFSERLSQMTNTTMQTRYPLIFSRVKKSVEVLKNNKCPYFSCEQPCNQTTAGNALTFLKSLLEIFQKEKMRGMRGKI

SEQ ID NO: 2912 - protein, 378 aa, Homo sapiens
MSKEPLILWLMIEFWWLYLTPVTSETVVTEVLGHRVTLPCLYSSWSHNSNSMCWGKDQCPYSGCKEALIRTDGMRVTSRKSAKYRLQGTIPRGDVSLTILNPSESDSGVYCCRIEVPGWFNDVKINVRLNLQRASTTTHRTATTTTRRTTTTSPTTTRQMTTTPAALPTTVVTTPDLTTGTPLQMTTIAVFTTANTCLSLTPSTLPEEATGLLTPEPSKEGPILTAESETVLPSDSWSSVESTSADTVLLTSKESKVWDLPSTSHVSMWKTSDSVSSPQPGASDTAVPEQNKTTKTGQMDGIPMSMKNEMPISQLLMIIAPSLGFVLFALFVAFLLRGKLMETYCSQKHTRLDYIGDSKNVLNDVQHGREDEDGLFTL

SEQ ID NO: 2913 - protein, 453 aa, Homo sapiens
MASSLPWLCIILWLENALGKLEVEGNFYSENVSRILDNLLEGYDNRLRPGFGGAVTEVKTDIYVTSFGPVSDVEMEYTMDVFFRQTWTDERLKFGGPTEILSLNNLMVSKIWTPDTFFRNGKKSIAHNMTTPNKLFRIMQNGTILYTMRLTINADCPMRLVNFPMDGHACPLKFGSYAYPKSEIIYTWKKGPLYSVEVPEESSSLLQYDLIGQTVSSETIKSNTGEYVIMTVYFHLQRKMGYFMIQIYTPCIMTVILSQVSFWINKESVPARTVFGITTVLTMTTLSISARHSLPKVSYATAMDWFIAVCFAFVFSALIEFAAVNYFTNLQTQKAKRKAQFAAPPTVTISKATEPLEAEIVLHPDSKYHLKKRITSLSLPIVSSSEANKVLTRAPILQSTPVTPPPLSPAFGGTSKIDQYSRILFPVAFAGFNLVYWVVYLSKDTMEVSSSVE

SEQ ID NO: 2914 - protein, 474 aa, Homo sapiens
MWRVRKRGYFGIWSFPLIIAAVCAQSVNDPSNMSLVKETVDRLLKGYDIRLRPDFGGPPVAVGMNIDIASIDMVSEVNMDYTLTMYFQQAWRDKRLSYNVIPLNLTLDNRVADQLWVPDTYFLNDKKSFVHGVTVKNRMIRLHPDGTVLYGLRITTTAACMMDLRRYPLDEQNCTLEIESYGYTTDDIEFYWRGDDNAVTGVTKIELPQFSIVDYKLITKKVVFSTGSYPRLSLSFKLKRNIGYFILQTYMPSILITILSWVSFWINYDASAARVALGITTVLTMTTINTHLRETLPKIPYVKAIDMYLMGCFVFVFMALLEYALVNYIFFGRGPQRQKKAAEKAASANNEKMRLDVNKMDPHENILLSTLEIKNEMATSEAVMGLGDPRSTMLAYDASSIQYRKAGLPRHSFGRNALERHVAQKKSRLRRRASQLKITIPDLTDVNAIDRWSRIFFPVVFSFFNIVYWLYYVN

SEQ ID NO: 2915 - protein, 512 aa, Homo sapiens
MWRVRKRGYFGIWSFPLIIAAVCAQSVNDPSNMSLVKETVDRLLKGYDIRLRPDFGGPPVAVGMNIDIASIDMVSEVNMDYTLTMYFQQAWRDKRLSYNVIPLNLTLDNRVADQLWVPDTYFLNDKKSFVHGVTVKNRMIRLHPDGTVLYGLRITTTAACMMDLRRYPLDEQNCTLEIESYGYTTDDIEFYWRGDDNAVTGVTKIELPQFSIVDYKLITKKVVFSTGSYPRLSLSFKLKRNIGYFILQTYMPSILITILSWVSFWINYDASAARVALGITTVLTMTTINTHLRETLPKIPYVKAIDMYLMGCFVFVFMALLEYALVNYIFFGRGPQRQKKAAEKAASANNEKMRLDVNKIFYKDIKQNGTQYRSLWDPTGNLSPTRRTTNYDFSLYTMDPHENILLSTLEIKNEMATSEAVMGLGDPRSTMLAYDASSIQYRKAGLPRHSFGRNALERHVAQKKSRLRRRASQLKITIPDLTDVNAIDRWSRIFFPVVFSFFNIVYWLYYVN

SEQ ID NO: 2916 - protein, 85 aa, Homo sapiens
MKITGGLLLLCTVVYFCSSSEAASLSPKKVDCSIYKKYPVVAIPCPITYLPVCGSDYITYGNECHLCTESLKSNGRVQFLHDGSC

SEQ ID NO: 2917 - protein, 494 aa, Homo sapiens
MARAAPLLAALTALLAAAAAGGDAPPGKIAVVGAGIGGSAVAHFLQQHFGPRVQIDVYEKGTVGGRLATISVNKQHYESGAASFHSLSLHMQDFVKLLGLRHRREVVGRSAIFGGEHFMLEETDWYLLNLFRLWWHYGISFLRLQMWVEEVMEKFMRIYKYQAHGYAFSGVEELLYSLGESTFVNMTQHSVAESLLQVGVTQRFIDDVVSAVLRASYGQSAAMPAFAGAMSLAGAQGSLWSVEGGNKLVCSGLLKLTKANVIHATVTSVTLHSTEGKALYQVAYENEVGNSSDFYDIVVIATPLHLDNSSSNLTFAGFHPPIDDVQGSFQPTVVSLVHGYLNSSYFGFPDPKLFPFANILTTDFPSFFCTLDNICPVNISASFRRKQPQEAAVWRVQSPKPLFRTQLKTLFRSYYSVQTAEWQAHPLYGSRPTLPRFALHDQLFYLNALEWAASSVEVMAVAAKNVALLAYNRWYQDLDKIDQKDLMHKVKTEL

SEQ ID NO: 2918 - protein, 449 aa, Homo sapiens
MYSFNTLRLYLWETIVFFSLAASKEAEAARSAPKPMSPSDFLDKLMGRTSGYDARIRPNFKGPPVNVSCNIFINSFGSIAETTMDYRVNIFLRQQWNDPRLAYNEYPDDSLDLDPSMLDSIWKPDLFFANEKGAHFHEITTDNKLLRISRNGNVLYSIRITLTLACPMDLKNFPMDVQTCIMQLESFGYTMNDLIFEWQEQGAVQVADGLTLPQFILKEEKDLRYCTKHYNTGKFTCIEARFHLERQMGYYLIQMYIPSLLIVILSWISFWINMDAAPARVGLGITTVLTMTTQSSGSRASLPKVSYVKAIDIWMAVCLLFVFSALLEYAAVNFVSRQHKELLRFRRKRRHHKEDEAGEGRFNFSAYGMGPACLQAKDGISVKGANNSNTTNPPPAPSKSPEEMRKLFIQRAKKIDKISRIGFPMAFLIFNMFYWIIYKIVRREDVHNQ

SEQ ID NO: 2919 - protein, 153 aa, Homo sapiens
MTKIKADPDGPEAQAEACSGERTYQELLVNQNPIAQPLASRRLTRKLYKCIKKAVKQKQIRRGVKEVQKFVNKGEKGIMVLAGDTLPIEVYCHLPVMCEDRNLPYVYIPSKTDLGAAAGSKRPTCVIMVKPHEEYQEAYDECLEEVQSLPLPL

SEQ ID NO: 2920 - protein, 566 aa, Homo sapiens
MDPPAGAARRLLCPALLLLLLLLPPPLLPPPPPPANARLAAAADPPGGPLGHGAERILAVPVRTDAQGRLVSHVVSAATSRAGVRARRAAPVRTPSFPGGNEEEPGSHLFYNVTVFGRDLHLRLRPNARLVAPGATMEWQGEKGTTRVEPLLGSCLYVGDVAGLAEASSVALSNCDGLAGLIRMEEEEFFIEPLEKGLAAQEAEQGRVHVVYRRPPTSPPLGGPQALDTGASLDSLDSLSRALGVLEEHANSSRRRARRHAADDDYNIEVLLGVDDSVVQFHGKEHVQKYLLTLMNIVNEIYHDESLGAHINVVLVRIILLSYGKSMSLIEIGNPSQSLENVCRWAYLQQKPDTGHDEYHDHAIFLTRQDFGPSGMQGYAPVTGMCHPVRSCTLNHEDGFSSAFVVAHETGHVLGMEHDGQGNRCGDEVRLGSIMAPLVQAAFHRFHWSRCSQQELSRYLHSYDCLLDDPFAHDWPALPQLPGLHYSMNEQCRFDFGLGYMMCTAFRTFDPCKQLWCSHPDNPYFCKTKKGPPLDGTMCAPGKFRPGAVAHACYPSTLGGQGRWIA

SEQ ID NO: 2921 - protein, 207 aa, Homo sapiens
MYSAPSACTCLCLHFLLLCFQVQVLVAEENVDFRIHVENQTRARDDVSRKQLRLYQLYSRTSGKHIQVLGRRISARGEDGDKYAQLLVETDTFGSQVRIKGKETEFYLCMNRKGKLVGKPDGTSKECVFIEKVLENNYTALMSAKYSGWYVGFTKKGRPRKGPKTRENQQDVHFMKRYPKGQPELQKPFKYTTVTKRSRRIRPTHPA

SEQ ID NO: 2922 - protein, 451 aa, Homo sapiens
MVGSALRRGAHAYVYLVSKASHISRGHQHQAWGSRPPAAECATQRAPGSVVELLGKSYPQDDHSNLTRKVLTRVGRNLHNQQHHPLWLIKERVKEHFYKQYVGRFGTPLFSVYDNLSPVVTTWQNFDSLLIPADHPSRKKGDNYYLNRTHMLRAHTSAHQWDLLHAGLDAFLVVGDVYRRDQIDSQHYPIFHQLEAVRLFSKHELFAGIKDGESLQLFEQSSRSAHKQETHTMEAVKLVEFDLKQTLTRLMAHLFGDELEIRWVDCYFPFTHPSFEMEINFHGEWLEVLGCGVMEQQLVNSAGAQDRIGWAFGLGLERLAMILYDIPDIRLFWCEDERFLKQFCVSNINQKVKFQPLSKYPAVINDISFWLPSENYAENDFYDLVRTIGGDLVEKVDLIDKFVHPKTHKTSHCYRITYRHMERTLSQREVRHIHQALQEAAVQLLGVEGRF

SEQ ID NO: 2923 - protein, 579 aa, Homo sapiens
MPSASCDTLLDDIEDIVSQEDSKPQDRHFVRKDVVPKVRRRNTQKYLQEEENSPPSDSTIPGIQKIWIRTWGCSHNNSDGEYMAGQLAAYGYKITENASDADLWLLNSCTVKNPAEDHFRNSIKKAQEENKKIVLAGCVPQAQPRQDYLKGLSIIGVQQIDRVVEVVEETIKGHSVRLLGQKKDNGRRLGGARLDLPKIRKNPLIEIISINTGCLNACTYCKTKHARGNLASYPIDELVDRAKQSFQEGVCEIWLTSEDTGAYGRDIGTNLPTLLWKLVEVIPEGAMLRLGMTNPPYILEHLEEMAKILNHPRVYAFLHIPVQSASDSVLMEMKREYCVADFKRVVDFLKEKVPGITIATDIICGFPGETDQDFQETVKLVEEYKFPSLFINQFYPRPGTPAAKMEQVPAQVKKQRTKDLSRVFHSYSPYDHKIGERQQVLVTEESFDSKFYVAHNQFYEQVLVPKNPAFMGKMVEVDIYESGKHFMKGQPVSDAKVYTPSISKPLAKGEVSGLTKDFRNGLGNQLSSGSHTSAASQCDSASSRMVLPMPRLHQDCALRMSVGLALLGLLFAFFVKVYN

SEQ ID NO: 2924 - protein, 516 aa, Homo sapiens
MGLHFKWPLGAPMLAAIYAMSMVLKMLPALGMACPPKCRCEKLLFYCDSQGFHSVPNATDKGSLGLSLRHNHITELERDQFASFSQLTWLHLDHNQISTVKEDAFQGLYKLKELILSSNKIFYLPNTTFTQLINLQNLDLSFNQLSSLHPELFYGLRKLQTLHLRSNSLRTIPVRLFWDCRSLEFLDLSTNRLRSLARNGFAGLIKLRELHLEHNQLTKINFAHFLRLSSLHTLFLQWNKISNLTCGMEWTWGTLEKLDLTGNEIKAIDLTVFETMPNLKILLMDNNKLNSLDSKILNSLRSLTTVGLSGNLWECSARICALASWLGSFQGRWEHSILCHSPDHTQGEDILDAVHGFQLCWNLSTTVTVMATTYRDPTTEYTKRISSSSYHVGDKEIPTTAGIAVTTEEHFPEPDNAIFTQRVITGTMALLFSFFFIIFIVFISRKCCPPTLRRIRQCSMVQNHRQLRSQTRLHMSNMSDQGPYNEYEPTHEGPFIIINGYGQCKCQQLPYKECEV

SEQ ID NO: 2925 - protein, 199 aa, Homo sapiens
MASGSGTKNLDFRRKWDKDEYEKLAEKRLTEEREKKDGKPVQPVKRELLRHRDYKVDLESKLGKTIVITKTTPQSEMGGYYCNVCDCVVKDSINFLDHINGKKHQRNLGMSMRVERSTLDQVKKRFEVNKKKMEEKQKDYDFEERMKELREEEEKAKAYKKEKQKEKKRRAEEDLTFEEDDEMAAVMGFSGFGSTKKSY

SEQ ID NO: 2926 - protein, 400 aa, Homo sapiens
MVRPLNPRPLPPVVLMLLLLLPPSPLPLAAGDPLPTESRLMNSCLQARRKCQADPTCSAAYHHLDSCTSSISTPLPSEEPSVPADCLEAAQQLRNSSLIGCMCHRRMKNQVACLDIYWTVHRARSLGNYELDVSPYEDTVTSKPWKMNLSKLNMLKPDSDLCLKFAMLCTLNDKCDRLRKAYGEACSGPHCQRHVCLRQLLTFFEKAAEPHAQGLLLCPCAPNDRGCGERRRNTIAPNCALPPVAPNCLELRRLCFSDPLCRSRLVDFQTHCHPMDILGTCATEQSRCLRAYLGLIGTAMTPNFVSNVNTSVALSCTCRGSGNLQEECEMLEGFFSHNPCLTEAIAAKMRFHSQLFSQDWPHPTFAVMAHQNENPAVRPQPWVPSLFSCTLPLILLLSLW

SEQ ID NO: 2927 - protein, 106 aa, Homo sapiens
MATPGPVIPEVPFEPSKPPVIEGLSPTVYRNPESFKEKFVRKTRENPVVPIGCLATAAALTYGLYSFHRGNSQRSQLMMRTRIAAQGFTVAAILLGLAVTAMKSRP

SEQ ID NO: 2928 - protein, 750 aa, Homo sapiens
MLRAKNQLFLLSPHYLRQVKESSGSRLIQQRLLHQQQPLHPEWAALAKKQLKGKNPEDLIWHTPEGISIKPLYSKRDTMDLPEELPGVKPFTRGPYPTMYTFRPWTIRQYAGFSTVEESNKFYKDNIKAGQQGLSVAFDLATHRGYDSDNPRVRGDVGMAGVAIDTVEDTKILFDGIPLEKMSVSMTMNGAVIPVLANFIVTGEEQGVPKEKLTGTIQNDILKEFMVRNTYIFPPEPSMKIIADIFEYTAKHMPKFNSISISGYHMQEAGADAILELAYTLADGLEYSRTGLQAGLTIDEFAPRLSFFWGIGMNFYMEIAKMRAGRRLWAHLIEKMFQPKNSKSLLLRAHCQTSGWSLTEQDPYNNIVRTAIEAMAAVFGGTQSLHTNSFDEALGLPTVKSARIARNTQIIIQEESGIPKVADPWGGSYMMECLTNDVYDAALKLINEIEEMGGMAKAVAEGIPKLRIEECAARRQARIDSGSEVIVGVNKYQLEKEDAVEVLAIDNTSVRNRQIEKLKKIKSSRDQALAERCLAALTECAASGDGNILALAVDASRARCTVGEITDALKKVFGEHKANDRMVSGAYRQEFGESKEITSAIKRVHKFMEREGRRPRLLVAKMGQDGHDRGAKVIATGFADLGFDVDIGPLFQTPREVAQQAVDADVHAVGISTLAAGHKTLVPELIKELNSLGRPDILVMCGGVIPPQDYEFLFEVGVSNVFGPGTRIPKAAVQVLDDIEKCLEKKQQSV

SEQ ID NO: 2929 - protein, 272 aa, Homo sapiens
MEAEESEKAATEQEPLEGTEQTLDAEEEQEESEEAACGSKKRVVPGIVYLGHIPPRFRPLHVRNLLSAYGEVGRVFFQAEDRFVRRKKKAAAAAGGKKRSYTKDYTEGWVEFRDKRIAKRVAASLHNTPMGARRRSPFRYDLWNLKYLHRFTWSHLSEHLAFERQVRRQRLRAEVAQAKRETDFYLQSVERGQRFLAADGDPARPDGSWTFAQRPTEQELRARKAARPGGRERARLATAQDKARSNKGLLARIFGAPPPSESMEGPSLVRDS

SEQ ID NO: 2930 - protein, 613 aa, Homo sapiens
MATIPDWKLQLLARRRQEEASVRGREKAERERLSQMPAWKRGLLERRRAKLGLSPGEPSPVLGTVEAGPPDPDESAVLLEAIGPVHQNRFIRQERQQQQQQQQRSEELLAERKPGPLEARERRPSPGEMRDQSPKGRESREERLSPRETRERRLGIGGAQELSLRPLEARDWRQSPGEVGDRSSRLSEAWKWRLSPGETPERSLRLAESREQSPRRKEVESRLSPGESAYQKLGLTEAHKWRPDSRESQEQSLVQLEATEWRLRSGEERQDYSEECGRKEEWPVPGVAPKETAELSETLTREAQGNSSAGVEAAEQRPVEDGERGMKPTEGWKWTLNSGKAREWTPRDIEAQTQKPEPPESAEKLLESPGVEAGEGEAEKEEAGAQGRPLRALQNCCSVPSPLPPEDAGTGGLRQQEEEAVELQPPPPAPLSPPPPAPTAPQPPGDPLMSRLFYGVKAGPGVGAPRRSGHTFTVNPRRSVPPATPATPTSPATVDAAVPGAGKKRYPTAEEILVLGGYLRLSRSCLAKGSPERHHKQLKISFSETALETTYQYPSESSVLEELGPEPEVPSAPNPPAAQPDDEEDEEELLLLQPELQGGLRTKALIVDESCRR

SEQ ID NO: 2931 - protein, 1068 aa, Homo sapiens
MAPRKRSHHGLGFLCCFGGSDIPEINLRDNHPLQFMEFSSPIPNAEELNIRFAELVDELDLTDKNREAMFALPPEKKWQIYCSKKKEQEDPNKLATSWPDYYIDRINSMAAMQSLYAFDEEETEMRNQVVEDLKTALRTQPMRFVTRFIELEGLTCLLNFLRSMDHATCESRIHTSLIGCIKALMNNSQGRAHVLAQPEAISTIAQSLRTENSKTKVAVLEILGAVCLVPGGHKKVLQAMLHYQVYAAERTRFQTLLNELDRSLGRYRDEVNLKTAIMSFINAVLNAGAGEDNLEFRLHLRYEFLMLGIQPVIDKLRQHENAILDKHLDFFEMVRNEDDLELARRFDMVHIDTKSASQMFELIHKKLKYTEAYPCLLSVLHHCLQMPYKRNGGYFQQWQLLDRILQQIVLQDERGVDPDLAPLENFNVKNIVNMLINENEVKQWRDQAEKFRKEHMELVSRLERKERECETKTLEKEEMMRTLNKMKDKLARESQELRQARGQVAELVAQLSELSTGPVSSPPPPGGPLTLSSSMTTNDLPPPPPPLPFACCPPPPPPPLPPGGPPTPPGAPPCLGMGLPLPQDPYPSSDVPLRKKRVPQPSHPLKSFNWVKLNEERVPGTVWNEIDDMQVFRILDLEDFEKMFSAYQRHQKELGSTEDIYLASRKVKELSVIDGRRAQNCIILLSKLKLSNEEIRQAILKMDEQEDLAKDMLEQLLKFIPEKSDIDLLEEHKHEIERMARADRFLYEMSRIDHYQQRLQALFFKKKFQERLAEAKPKVEAILLASRELVRSKRLRQMLEVILAIGNFMNKGQRGGAYGFRVASLNKIADTKSSIDRNISLLHYLIMILEKHFPDILNMPSELQHLPEAAKVNLAELEKEVGNLRRGLRAVEVELEYQRRQVREPSDKFVPVMSDFITVSSFSFSELEDQLNEARDKFAKALMHFGEHDSKMQPDEFFGIFDTFLQAFSEARQDLEAMRRRKEEEERRARMEAMLKEQRERERWQRQRKVLAAGSSLEEGGEFDDLVSALRSGEVFDKDLCKLKRSRKRSGSQALEVTRERAINRLNY

SEQ ID NO: 2932 - protein, 993 aa, Homo sapiens
MGSGRVPGLCLLVLLVHARAAQYSKAAQDVDECVEGTDNCHIDAICQNTPRSYKCICKSGYTGDGKHCKDVDECEREDNAGCVHDCVNIPGNYRCTCYDGFHLAHDGHNCLDVDECAEGNGGCQQSCVNMMGSYECHCREGFFLSDNQHTCIQRPEEGMNCMNKNHGCAHICRETPKGGIACECRPGFELTKNQRDCKLTCNYGNGGCQHTCDDTEQGPRCGCHIKFVLHTDGKTCIETCAVNNGGCDSKCHDAATGVHCTCPVGFMLQPDRKTCKDIDECRLNNGGCDHICRNTVGSFECSCKKGYKLLINERNCQDIDECSFDRTCDHICVNTPGSFQCLCHRGYLLYGITHCGDVDECSINRGGCRFGCINTPGSYQCTCPAGQGRLHWNGKDCTEPLKCQGSPGASKAMLSCNRSGKKDTCALTCPSRARFLPESENGFTVSCGTPSPRAAPARAGHNGNSTNSNHCHEAAVLSIKQRASFKIKDAKCRLHLRNKGKTEEAGRITGPGGAPCSECQVTFIHLKCDSSRKGKGRRARTPPGKEVTRLTLELEAEVRAEETTASCGLPCLRQRMERRLKGSLKMLRKSINQDRFLLRLAGLDYELAHKPGLVAGERAEPMESCRPGQHRAGTKCVSCPQGTYYHGQTEQCVPCPAGTFQEREGQLSCDLCPGSDAHGPLGATNVTTCAGQCPPGQHSVDGFKPCQPCPRGTYQPEAGRTLCFPCGGGLTTKHEGAISFQDCDTKVQCSPGHYYNTSIHRCIRCAMGSYQPDFRQNFCSRCPGNTSTDFDGSTSVAQCKNRQCGGELGEFTGYIESPNYPGNYPAGVECIWNINPPPKRKILIVVPEIFLPSEDECGDVLVMRKNSSPSSITTYETCQTYERPIAFTARSRKLWINFKTSEANSARGFQIPYVTYDEDYEQLVEDIVRDGRLYASENHQEILKDKKLIKAFFEVLAHPQNYFKYTEKHKEMLPKSFIKLLRSKVSSFLRPYK

SEQ ID NO: 2933 - protein, 469 aa, Homo sapiens
MELISPTVIIILGCLALFLLLQRKNLRRPPCIKGWIPWIGVGFEFGKAPLEFIEKARIKYGPIFTVFAMGNRMTFVTEEEGINVFLKSKKVDFELAVQNIVYRTASIPKNVFLALHEKLYIMLKGKMGTVNLHQFTGQLTEELHEQLENLGTHGTMDLNNLVRHLLYPVTVNMLFNKSLFSTNKKKIKEFHQYFQVYDEDFEYGSQLPECLLRNWSKSKKWFLELFEKNIPDIKACKSAKDNSMTLLQATLDIVETETSKENSPNYGLLLLWASLSNAVPVAFWTLAYVLSHPDIHKAIMEGISSVFGKAGKDKIKVSEDDLENLLLIKWCVLETIRLKAPGVITRKVVKPVEILNYIIPSGDLLMLSPFWLHRNPKYFPEPELFKPERWKKANLEKHSFLDCFMAFGSGKFQCPARWFALLEVQMCIILILYKYDCSLLDPLPKQSYLHLVGVPQPEGQCRIEYKQRI

SEQ ID NO: 2934 - protein, 1821 aa, Homo sapiens
MSCERKGLSELRSELYFLIARFLEDGPCQQAAQVLIREVAEKELLPRRTDWTGKEHPRTYQNLVKYYRHLAPDHLLQICHRLGPLLEQEIPQSVPGVQTLLGAGRQSLLRTNKSCKHVVWKGSALAALHCGRPPESPVNYGSPPSIADTLFSRKLNGKYRLERLVPTAVYQHMKMHKRILGHLSSVYCVTFDRTGRRIFTGSDDCLVKIWATDDGRLLATLRGHAAEISDMAVNYENTMIAAGSCDKMIRVWCLRTCAPLAVLQGHSASITSLQFSPLCSGSKRYLSSTGADGTICFWLWDAGTLKINPRPAKFTERPRPGVQMICSSFSAGGMFLATGSTDHIIRVYFFGSGQPEKISELEFHTDKVDSIQFSNTSNRFVSGSRDGTARIWQFKRREWKSILLDMATRPAGQNLQGIEDKITKMKVTMVAWDRHDNTVITAVNNMTLKVWNSYTGQLIHVLMGHEDEVFVLEPHPFDPRVLFSAGHDGNVIVWDLARGVKIRSYFNMIEGQGHGAVFDCKCSPDGQHFACTDSHGHLLIFGFGSSSKYDKIADQMFFHSDYRPLIRDANNFVLDEQTQQAPHLMPPPFLVDVDGNPHPSRYQRLVPGRENCREEQLIPQMGVTSSGLNQVLSQQANQEISPLDSMIQRLQQEQDLRRSGEAVISNTSRLSRGSISSTSEVHSPPNVGLRRSGQIEGVRQMHSNAPRSEIATERDLVAWSRRVVVPELSAGVASRQEEWRTAKGEEEIKTYRSEEKRKHLTVPKENKIPTVSKNHAHEHFLDLGESKKQQTNQHNYRTRSALEETPRPSEEIENGSSSSDEGEVVAVSGGTSEEEERAWHSDGSSSDYSSDYSDWTADAGINLQPPKKVPKNKTKKAESSSDEEEESEKQKQKQIKKEKKKVNEEKDGPISPKKKKPKERKQKRLAVGELTENGLTLEEWLPSTWITDTIPRRCPFVPQMGDEVYYFRQGHEAYVEMARKNKIYSINPKKQPWHKMELREQELMKIVGIKYEVGLPTLCCLKLAFLDPDTGKLTGGSFTMKYHDMPDVIDFLVLRQQFDDAKYRRWNIGDRFRSVIDDAWWFGTIESQEPLQLEYPDSLFQCYNVCWDNGDTEKMSPWDMELIPNNAVFPEELGTSVPLTDGECRSLIYKPLDGEWGTNPRDEECERIVAGINQLMTLDIASAFVAPVDLQAYPMYCTVVAYPTDLSTIKQRLENRFYRRVSSLMWEVRYIEHNTRTFNEPGSPIVKSAKFVTDLLLHFIKDQTCYNIIPLYNSMKKKVLSDSEDEEKDADVPGTSTRKRKDHQPRRRLRNRAQSYDIQAWKKQCEELLNLIFQCEDSEPFRQPVDLLEYPDYRDIIDTPMDFATVRETLEAGNYESPMELCKDVRLIFSNSKAYTPSKRSRIYSMSLRLSAFFEEHISSVLSDYKSALRFHKRNTITKRRKKRNRSSSVSSSAASSPERKKRILKPQLKSESSTSAFSTPTRSIPPRHNAAQINGKTESSSVVRTRSNRVVVDPVVTEQPSTSSAAKTFITKANASAIPGKTILENSVKHSKALNTLSSPGQSSFSHGTRNNSAKENMEKEKPVKRKMKSSVLPKASTLSKSSAVIEQGDCKNNALVPGTIQVNGHGGQPSKLVKRGPGRKPKVEVNTNSGEIIHKKRGRKPKKLQYAKPEDLEQNNVHPIRDEVLPSSTCNFLSETNNVKEDLLQKKNRGGRKPKRKMKTQKLDADLLVPASVKVLRRSNRKKIDDPIDEEEEFEELKGSEPHMRTRNQGRRTAFYNEDDSEEEQRQLLFEDTSLTFGTSSRGRVRKLTEKAKANLIGW

SEQ ID NO: 2935 - protein, 1243 aa, Homo sapiens
MENCSAASTFLTDSLELELGTEWCKPPYFSCAVDNRGGGKHFSGESYLCSGALKRLILNLDPLPTNFEEDTLEIFGIQWVTETALVNSSRELFHLFRQQLYNLETLLQSSCDFGKVSTLHCKADNIRQQCVLFLHYVKVFIFRYLKVQNAESHVPVHPYEALEAQLPSVLIDELHGLLLYIGHLSELPSVNIGAFVNQNQIKLFPPSWHLLHLHLDIHWLVLEILYMLGEKLKQVVYGHQFMNLASDNLTNISLFEEHCETLLCDLISLSLNRYDKVRSSESLMSDQCPCLCIKELWVLLIHLLDHRSKWFVSESFWNWLNKLLKTLLEKSSDRRRSSMPVIQSRDPLGFSWWIITHVASFYKFDRHGVPDEMRKVESNWNFVEELLKKSISVQGVILEEQLRMYLHCCLTLCDFWEPNIAIVTILWEYYSKNLNSSFSISWLPFKGLANTMKSPLSMLEMVKTCCCDKQDQELYKSSSSYTIFLCILAKVVKKAMKSNGPHPWKQVKGRIYSKFHQKRMEELTEVGLQNFFSLFLLLAAVAEVEDVASHVLDLLNFLKPAFVTSQRALIWKGHMAFLLMYAQKNLDIGVLAEKFSCAFREKAKEFLVSKNEEMVQRQTIWTLLSIYIDGVQEVFETSYCLYPSHEKLLNDGFSMLLRACRESELRTVLSFLQAVLARIRSMHQQLCQELQRDNVDLFVQSSLSAKERHLAAVASALWRHFFSFLKSQRMSQVVPFSQLADAAADFTLLAMDMPSTAPSDFQPQPVISIIQLFGWDDIICPQVVARYLSHVLQNSTLCEALSHSGYVSFQALTVRSWIRCVLQMYIKNLSGPDDLLIDKNLEEAVEKEYMKQLVKLTRLLFNLSEVKSIFSKAQVEYLSISEDPKKALVRFFEAVGVTYGNVQTLSDKSAMVTKSLEYLGEVLKYIKPYLGKKVFSAGLQLTYGMMGILVKSWAQIFATSKAQKLLFRIIDCLLLPHAVLQQEKELPAPMLSAIQKSLPLYLQGMCIVCCQSQNPNAYLNQLLGNVIEQYIGRFLPASPYVSDLGQHPVLLALRNTATIPPISSLKKCIVQVIRKSYLEYKGSSPPPRLASILAFILQLFKETNTDIYEVELLLPGILKCLVLVSEPQVKRLATENLQYMVKACQVGSEEEPSSQLTSVFRQFIQDYGMRYYYQVYSILETVATLDQQVVIHLISTLTQSLKDSEQKWGLGRNIAQREAYSKLLSHLGQMGQDEMQRLENDNT

SEQ ID NO: 2936 - protein, 436 aa, Homo sapiens
MRPGGERPVEGGACNGRSELELLKLRSAECIDEAAERLGALSRAIWSQPELAYEEHHAHRVLTHFFEREPPAASWAVQPHYQLPTAFRAEWEPPEARAPSATPRPLHLGFLCEYDALPGIGHACGHNLIAEVGAAAALGVRGALEGLPRPPPPVKVVVLGTPAEEDGGGKIDLIEAGAFTNLDVVFMAHPSQENAAYLPDMAEHDVTVKYYGKASHSASYPWEGLNALDAAVLAYNNLSVFRQQMKPTWRVHGIIKNGGVKPNIIPSYSELIYYFRAPSMKELQVLTKKAEDCFRAAALASGCTVEIKGGAHDYYNVLPNKSLWKAYMENGRKLGIEFISEDTMLNGPSGSTDFGNVSFVVPGIHPYFHIGSNALNHTEQYTEAAGSQEAQFYTLRTAKALAMTALDVIFKPELLEGIREDFKLKLQEEQFVNAVE

SEQ ID NO: 2937 - protein, 184 aa, Homo sapiens
MSRLSRSLLWAATCLGVLCVLSADKNTTQHPNVTTLAPISNVTSAPVTSLPLVTTPAPETCEGRNSCVSCFNVSVVNTTCFWIECKDESYCSHNSTVSDCQVGNTTDFCSAKPTVQPSPSTTSKTVTTSGTTNNTVTPTSQPVRKSTFDAASFIGGIVLVLGVQAVIFFLYKFCKSKERNYHTL

SEQ ID NO: 2938 - protein, 1298 aa, Homo sapiens
MAHFSSEDQAMLQAMLRRLFQSVKEKITGAPSLECAEEILLHLEETDENFHNYEFVKYLRQHIGNTLGSMIEEEMEKCTSDRNQGEECGYDTVVQQVTKRTQESKEYKEMMHYLKNIMIAVVESMINKFEEDETRNQERQKKIQKEKSHSYRTDNCSDSDSSLNQSYKFCQGKLQLILDQLDPGQPKEVRYEALQTLCSAPPSDVLNCENWTTLCEKLTVSLSDPDPVFSDRILKFCAQTFLLSPLHMTKEIYTSLAKYLESYFLSRENHIPTLSAGVDITNPNMTRLLKKVRLLNEYQKEAPSFWIRHPEKYMEEIVESTLSLLTVKHNQSHVVSQKILDPIYFFALVDTKAVWFKKWMHAHYSRTTVLRLLETKYKSLVTTAIQQCVQYFEMCKTRKADETLGHSKHCRNKQKTFYYLGQELQYIYFIHSLCLLGRLLIYKQGRKLFPIKLKNKKGLVSLIDLLVLFTQLIYYSPSCPKMTSAAHSENYSPASMVTEVLWILSDQKECAVECLYNNIVIETLLQPIHNLMKGNEASPNCSETALIHIAGILARIASVEEGLILLLYGANMNSSEESPTGAHIIAQFSKKLLDEDISIFSGSEMLPVVKGAFISVCRHIYSTCEGLQVLITYNLHESIAKAWKKTSLLSERIPTPVEGSDSVSSVSQESQNIMAWEDNLLDDLLHFAATPKGLLLLQRTGAINECVTFIFNRYAKKLQVSRHKKFGYGVLVTRVASTAAGGIALKKSGFINELITELWSNLEYGRDDVRVTHPRTTPVDPIDRSCQKSFLALVNLLSYPAIYELVRNQDLPNKTEYSLREVPTCVIDIIDRLIILNSEAKIRSLFNYEQSHIFGLRLLSVICCDLDTLLLLEAQYQVSEMLLNAQEENILEISESHRDFIIDGLSVERNHVLVRINLVGGPLERILPPRLLEKSDNPYPWPMFSSYPLPNCYLSDITRNAGIKQDNDLDKLLLCLKISDKQTEWIENCQRQFCKMMKAKPDIISGEALIELLEKFVLHLTESPSECYFPSVEYTATDANVKNESLSSVQQLGIKMTVRYGKFLSLLKDGAENDLTWVLKHCERFLKQQQTSIKSSLLCLQGNYAGHDWFVSSLFMIMLGDKEKTFQFLHQFSRLLTSAFLWLPRLHISSYLPNDTVESGIHPVYFCSTHYIEMLLKAELPLVFSAFHMSGFAPSQICLQWITQCFWNYLDWIEICHYIATCVFLGPDYQVYICIAVFKHLQQDILQHTQTQDLQVFLKEEALHGFRVSDYFEYMEILEQNYRTVLLRDMRNIRLQST

SEQ ID NO: 2939 - protein, 1683 aa, Homo sapiens
MSSRRKRAPPVRVDEEKRQQLHWNMHEDRRNEPIIISDDDEQPCPGSDTSSAHYIILSDSLKEEVAHRDKKRCSKVVSFSKPIEKEETVGIFSPLSVKLNIVISPYHFDNSWKAFLGELTLQLLPAQSLIENFSERSITLMSSESSNQFLIYVHSKGEDVEKQKKEPMSICDKGILVESSFSGEMLEDLGWLQKKRRIKLYQKPEGNHIIKVGIYLLEAGLAKLDFLSDANSRMKKFNQLMKKVMEKLHNSIIPDVLEEDEDDPESEPEGQDIDELYHFVKQTHQQETQSIQVDVQHPALIPVLRPYQREAVNWMLQQECFRSSPATESALHFLWREIVTSEGLKLYYNPYTGCIIREYPNSGPQLLGGILADEMGLGKTVEVLALILTHTRQDVKQDALTLPEGKVVNYFIPSHYFGGKLKKTEIQNIEFEPKEKVQCPPTRVMILTAVKEMNGKKGVSILSIYKYVSSIYRYDVQRNRSLLKRMLKCLIFEGLVKQIKGHGFSGTFTLGKNYKEEDICDKTKKQAVGSPRKIQKETRKSGNKDTDSEYLPSDTSDDDDDPYYYYYKSRRNRSKLRKKLVPSTKKGKSQPFINPDSQGHCPATSDSGITDVAMSKSTCISEFNQEHETEDCAESLNHADSDVPPSNTMSPFNTSDYRFECICGELDQIDRKPRVQCLKCHLWQHAKCVNYDEKNLKIKPFYCPHCLVAMEPVSTRATLIISPSSICHQWVDEINRHVRSSSLRVLVYQGVKKDGFLQPHFLAEQDIVIITYDVLRSELNYVDIPHSNSEDGRRLRNQKRYMAIPSPLVAVEWWRICLDEAQMVECPTVKAAEMAQRLSGINRWCISGTPVQRGLEDLFGLVVFLGIEPYCVKHWWVRLLYRPYCKKNPQHLYSFIAKILWRSAKKDVIDQIQIPPQTEEIHWLHFSPVERHFYHRQHEVCCQDVVVKLRKISDWALKLSSLDRRTVTSILYPLLRLRQACCHPQAVRGEFLPLQKSTMTMEELLTSLQKKCGTECEEAHRQLVCALNGLAGIHIIKGEYALAAELYREVLRSSEEHKGKLKTDSLQRLHATHNLMELLIARHPGIPPTLRDGRLEEEAKQLREHYMSKCNTEVAEAQQALYPVQQTIHELQRKIHSNSPWWLNVIHRAIEFTIDEELVQRVRNEITSNYKQQTGKLSMSEKFRDCRGLQFLLTTQMEELNKCQKLVREAVKNLEGPPSRNVIESATVCHLRPARLPLNCCVFCKADELFTEYESKLFSNTVKGQTAIFEEMIEDEEGLVDDRAPTTTRGLWAISETERSMKAILSFAKSHRFDVEFVDEGSTSMDLFEAWKKEYKLLHEYWMALRNRVSAVDELAMATERLRVRDPREPKPNPPVLHIIEPHEVEQNRIKLLNDKAVATSQLQKKLGQLLYLTNLEKSQDKTSGGVNPEPCPICARQLGKQWAVLTCGHCFCNECISIIIEQYSVGSHRSSIKCAICRQTTSHKEISYVFTSEKANQEEDIPVKGSHSTKVEAVVRTLMKIQLRDPGAKALVFSTWQDVLDIISKALTDNNMEFAQISRVKTFQENLSAFKRDPQINILLLPLHTGSNGLTIIEATHVLLVEPILNPAHELQAIGRVHRIGQTKPTIVHRFLIKATIEERMQAMLKTAERSHTNSSAKHSEASVLTVADLADLFTKETEELE

SEQ ID NO: 2940 - protein, 245 aa, Homo sapiens
MALVPCQVLRMAILLSYCSILCNYKAIEMPSHQTYGGSWKFLTFIDLVIQAVFFGICVLTDLSSLLTRGSGNQEQERQLKKLISLRDWMLAVLAFPVGVFVVAVFWIIYAYDREMIYPKLLDNFIPGWLNHGMHTTVLPFILIEMRTSHHQYPSRSSGLTAICTFSVGYILWVCWVHHVTGMWVYPFLEHIGPGARIIFFGSTTILMNFLYLLGEVLNNYIWDTQKKPPSWQDMKIKFMYLGPSS

SEQ ID NO: 2941 - protein, 325 aa, Homo sapiens
MVGEMETKEKPKPTPDYLMQLMNDKKLMSSLPNFCGIFNHLERLLDEEISRVRKDMYNDTLNGSTEKRSAELPDAVGPIVQLQEKLYVPVKEYPDFNFVGRILGPRGLTAKQLEAETGCKIMVRGKGSMRDKKKEEQNRGKPNWEHLNEDLHVLITVEDAQNRAEIKLKRAVEEVKKLLVPAAEGEDSLKKMQLMELAILNGTYRDANIKSPALAFSLAATAQAAPRIITGPAPVLPPAALRTPTPAGPTIMPLIRQIQTAVMPNGTPHPTAAIVPPGPEAGLIYTPYEYPYTLAPATSILEYPIEPSGVLEWIEMPVMPDISAH

SEQ ID NO: 2942 - protein, 1590 aa, Homo sapiens
MPGGACVLVIALMFLAWGEAQECSPGGHQFLRSPYRSVRFDSWHLQQSAVQDLICDHSLSPGWYRFLILDRPAEMPTKCVEMNHCGTQAPIWLSLRDSETLPSPGEIKQLTACATWQFLFSTTKDCCLFQIPVSVRNCGNFSVYLLQPTQGCMGYCAEAISDARLHPCGSDETETGGDCVRQLAASLPPPPAGRPEVLVELIESRLFCRCSFDVPATKNSVGFHIAWSRLSSQEVKEELTQETTVQAFSLLELDGINLRLGDRIFCSASVFFLENPHVQSVAIESQEFFAGFKLQPELSTISEDGKEYYLRIESTVPIICSEFSELDQECKISLKLKTIGQGREHLGLNLALSSCHVDLLQTSSCANGTCSHTFVYYTAVTDFSRDGDRVSNIVVQPIVNEDFLWNNYIPDSIQIKVKDVPTAYCYTFTDPHIITFDGRVYDNFKTGTFVLYKSMSRDFEVHVRQWDCRSLHYPVSCNCGFVAQEGGDIVTFDMCNGQLRESQPYLFIKSQDVTRNIKISESYLGRKVTIWFSSGAFIRADLGEWGMSLTIRAPSVDYRNTLGLCGTFDENPENDFHDKNGMQIDQNFNNYVAFINEWRILPGKSMSDTLPVSMTSPGKPSYCSCSLDTAAYPSSEDLDSVSRSEIALGCKDLNHVSLSSLIPELDVTSEYINSDTLVREINKHTSPEEYNLNLFLQEKKHINLTKLGLNVQKHPGNEKEDSLQYLANKKYTQGRGSHSQEMRYNRQNRWKRQNFHEFPPLFAFPSLSQTDLEELTYFFPEDHAEDVQQEFFPSWPTPSGLTEYSTLTLCQETLANSSIGRLCLAFLGKRLDSVIEMCVKDVLLKDDLSWAEAGVALLENECEKRIVEEGKYNTEEYGTSIEDILSVLKCPNLCSGNGQCMEWGCACSPSFSSYDCSDSYDKAPEITELGNAGFCDVQKYNCMMVRVFGKGFKELPSIKCEVTKLQYNSSEWMPGEPIYTQTVFHNSRAVDCQLPTDVQQFDTMDLVGGKPTGKWQLKVSNDGYKFSNPKITVIYDGACQVCGLYKNDSCTIKENVCIIDGLCYVEGDKNPTSPCLICRPKISRFTWSFLENNQPPVIQALQDKLQTFYGENFEYQFVAFDPEGSDIHFTLDSGPEGASVSSAGLFMWKTDLLTTQQITVRLNDDCDAETRVTIEVTVKSCDCLNGGSCVSDRNFSPGSGVYLCVCLPGFHGSLCEVDISGCQSNPCGLGSYISGFHSYSCDCPPELKVETQFVNQFTTQTVVLTRSDKSVNKEEDDKNAQGRKRHVKPTSGNAFTICKYPCGKSRECVAPNICKCKPGYIGSNCQTALCDPDCKNHGKCIKPNICQCLPGHGGATCDEEHCNPPCQHGGTCLAGNLCTCPYGFVGPRCETMVCNRHCENGGQCLTPDICQCKPGWYGPTCSTALCDPVCLNGGSCNKPNTCLCPNGFFGEHCQNAFCHPPCKNGGHCMRNNVCVCREGYTGRRFQKSICDPTCMNGGKCVGPSTCSCPSGWSGKRCNTPICLQKCKNGGECIAPSICHCPSSWEGVRCQIPICNPKCLYGGRCIFPNVCSCRTEYSGVKCEKKIQIRRH

SEQ ID NO: 2943 - protein, 381 aa, Homo sapiens
MSGVVRTLSRCLLPAEAGGARERRAGSGARDAEREARRRSRDIDALLARERRAVRRLVKILLLGAGESGKSTFLKQMRIIHGREFDQKALLEFRDTIFDNILKGSRVLVDARDKLGIPWQYSENEKHGMFLMAFENKAGLPVEPATFQLYVPALSALWRDSGIREAFSRRSEFQLGESVKYFLDNLDRIGQLNYFPSKQDILLARKATKGIVEHDFVIKKIPFKMVDVGGQRSQRQKWFQCFDGITSILFMVSSSEYDQVLMEDRRTNRLVESMNIFETIVNNKLFFNVSIILFLNKMDLLVEKVKTVSIKKHFPDFRGDPHRLEDVQRYLVQCFDRKRRNRSKPLFHHFTTAIDTENVRFVFHAVKDTILQENLKDIMLQ

SEQ ID NO: 2944 - protein, 714 aa, Homo sapiens
MNTLQGPVSFKDVAVDFTQEEWQQLDPDEKITYRDVMLENYSHLVSVGYDTTKPNVIIKLEQGEEPWIMGGEFPCQHSPEAWRVDDLIERIQENEDKHSRQAACINSKTLTEEKENTFSQIYMETSLVPSSIIAHNCVSCGKNLESISQLISSDGSYARTKPDECNECGKTYHGEKMCEFNQNGDTYSHNEENILQKISILEKPFEYNECMEALDNEAVFIAHKRAYIGEKPYEWNDSGPDFIQMSNFNAYQRSQMEMKPFECSECGKSFCKKSKFIIHQRAHTGEKPYECNVCGKSFSQKGTLTVHRRSHLEEKPYKCNECGKTFCQKLHLTQHLRTHSGEKPYECSECGKTFCQKTHLTLHQRNHSGERPYPCNECGKSFSRKSALSDHQRTHTGEKLYKCNECGKSYYRKSTLITHQRTHTGEKPYQCSECGKFFSRVSYLTIHYRSHLEEKPYECNECGKTFNLNSAFIRHRKVHTEEKSHECSECGKFSQLYLTDHHTAHLEEKPYECNECGKTFLVNSAFDGHQPLPKGEKSYECNVCGKLFNELSYYTEHYRSHSEEKPYGCSECGKTFSHNSSLFRHQRVHTGEKPYECYECGKFFSQKSYLTIHHRIHSGEKPYECSKCGKVFSRMSNLTVHYRSHSGEKPYECNECGKVFSQKSYLTVHYRTHSGEKPYECNECGKKFHHRSAFNSHQRIHRRGNMNVLDVENL

SEQ ID NO: 2945 - protein, 188 aa, Homo sapiens
MANSGCKDVTGPDEESFLYFAYGSNLLTERIHLRNPSAAFFCVARLQDFKLDFGNSQGKTSQTWHGGIATIFQSPGDEVWGVVWKMNKSNLNSLDEQEGVKSGMYVVIEVKVATQEGKEITCRSYLMTNYESAPPSPQYKKIICMGAKENGLPLEYQEKLKAIEPNDYTGKVSEEIEDIIKKGETQTL

SEQ ID NO: 2946 - protein, 1210 aa, Homo sapiens [sequence omitted]

SEQ ID NO: 2947 - protein, 291 aa, Homo sapiens
MQRARPTLWAAALTLLVLLRGPPVARAGASSAGLGPVVRCEPCDARALAQCAPPPAVCAELVREPGCGCCLTCALSEGQPCGIYTERCGSGLRCQPSPDEARPLQALLDGRGLCVNASAVSRLRAYLLPAPPAPGNASESEEDRSAGSVESPSVSSTHRVSDPKFHPLHSKIIIIKKGHAKDSQRYKVDYESQSTDTQNFSSESKRETEYGPCRREMEDTLNHLKFLNVLSPRGVHIPNCDKKGFYKKKQCRPSKGRKRGFCWCVDKYGQPLPGYTTKGKEDVHCYSMQSK

SEQ ID NO: 2948 - protein, 259 aa, Homo sapiens
MSEVPVARVWLVLLLLTVQVGVTAGAPWQCAPCSAEKLALCPPVSASCSEVTRSAGCGCCPMCALPLGAACGVATARCARGLSCRALPGEQQPLHALTRGQGACVQESDASAPHAAEAGSPESPESTEITEEELLDNFHLMAPSEEDHSILWDAISTYDGSKALHVTNIKKWKEPCRIELYRVVESLAKAQETSGEEISKFYLPNCNKNGFYHSRQCETSMDGEAGLCWCVYPWNGKRIPGSPEIRGDPNCQIYFNVQN

SEQ ID NO: 2949 - protein, 531 aa, Homo sapiens
MAAVKTLNPKAEVARAQAALAVNISAARGLQDVLRTNLGPKGTMKMLVSGAGDIKLTKDGNVLLHEMQIQHPTASLIAKVATAQDDITGDGTTSNVLIIGELLKQADLYISEGLHPRIITEGFEAAKEKALQFLEEVKVSREMDRETLIDVARTSLRTKVHAELADVLTEAVVDSILAIKKQDEPIDLFMIEIMEMKHKSETDTSLIRGLVLDHGARHPDMKKRVEDAYILTCNVSLEYEKTEVNSGFFYKSAEEREKLVKAERKFIEDRVKKIIELKRKVCGDSDKGFVVINQKGIDPFSLDALSKEGIVALRRAKRRNMERLTLACGGVALNSFDDLSPDCLGHAGLVYEYTLGEEKFTFIEKCNNPRSVTLLIKGPNKHTLTQIKDAVRDGLRAVKNAIDDGCVVPGAGAVEVAMAEALIKHKPSVKGRAQLGVQAFADALLIIPKVLAQNSGFDLQETLVKIQAEHSESGQLVGVDLNTGEPMVAAEVGVWDNYCVKKQLLHSCTVIATNILLVDEIMRAGMSSLKG

SEQ ID NO: 2950 - protein, 225 aa, Homo sapiens
MVSHSELRKLFYSADAVCFDVDSTVIREEGIDELAKICGVEDAVSEMTRRAMGGAVPFKAALTERLALIQPSREQVQRLIAEQPPHLTPGIRELVSRLQERNVQVFLISGGFRSIVEHVASKLNIPATNVFANRLKFYFNGEYAGFDETQPTAESGGKGKVIKLLKEKFHFKKIIMIGDGATDMEACPPADAFIGFGGNVIRQQVKDNAKWYITDFVELLGELEE

SEQ ID NO: 2951 - protein, 914 aa, Homo sapiens
MASESSPLLAYRLLGEEGVALPANGAGGPGGASARKLSTFLGVVVPTVLSMFSIVVFLRIGFVVGHAGLLQALAMLLVAYFILALTVLSVCAIATNGAVQGGGAYFMISRTLGPEVGGSIGLMFYLANVCGCAVSLLGLVESVLDVFGADATGPSGLRVLPQGYGWNLLYGSLLLGLVGGVCTLGAGLYARASFLTFLLVSGSLASVLISFVAVGPRDIRLTPRPGPNGSSLPPRFGHFTGFNSSTLKDNLGAGYAEDYTTGAVMNFASVFAVLFNGCTGIMAGANMSGELKDPSRAIPLGTIVAVAYTFFVYVLLFFLSSFTCDRTLLQEDYGFFRAISLWPPLVLIGIYATALSASMSSLIGASRILHALARDDLFGVILAPAKVVSRGGNPWAAVLYSWGLVQLVLLAGKLNTLAAVVTVFYLVAYAAVDLSCLSLEWASAPNFRPTFSLFSWHTCLLGVASCLLMMFLISPGAAGGSLLLMGLLAALLTARGGPSSWGYVSQALLFHQVRKYLLRLDVRKDHVKFWRPQLLLLVGNPRGALPLLRLANQLKKGGLYVLGHVTLGDLDSLPSDPVQPQYGAWLSLVDRAQVKAFVDLTLSPSVRQGAQHLLRISGLGGMKPNTLVLGFYDDAPPQDHFLTDPAFSEPADSTREGSSPALSTLFPPPRAPGSPRALNPQDYVATVADALKMNKNVVLARASGALPPERLSRGSGGTSQLHHVDVWPLNLLRPRGGPGYVDVCGLFLLQMATILGMVPAWHSARLRIFLCLGPREAPGAAEGRLRALLSQLRIRAEVQEVVWGEGAGAGEPEAEEEGDFVNSGRGDAEAEALARSANALVRAQQGRGTGGGPGGPEGGDAEGPITALTFLYLPRPPADPARYPRYLALLETLTRDLGPTLLVHGVTPVTCTDL

SEQ ID NO: 2952 - protein, 1035 aa, Homo sapiens
MAAETLNFGPEWLRALSGGGSVASPPPSPAMPKYKLADYRYGREEMLALYVKENKVPEELQDKEFAAVLQDEPLQPLALEPLTEEEQRNFSLSVNSVAVLRLMGKGAGPPLAGTSRGRGSTRSRGRGRGDSCFYQRSIEEGDGAFGRSPREIQRSQSWDDRGERRFEKSARRDGARCGFEEGGAGPRKEHARSDSENWRSLREEQEEEEEGSWRLGAGPRRDGDRWRSASPDGGPRSAGWREHGERRRKFEFDLRGDRGGCGEEEGRGGGGSSHLRRCRAPEGFEEDKDGLPEWCLDDEDEEMGTFDASGAFLPLKKGPKEPIPEEQELDFQGLEEEEEPSEGLEEEGPEAGGKELTPLPPQEEKSSSPSPLPTLGPLWGTNGDGDETAEKEPPAAEDDIRGIQLSPGVGSSAGPPGDLEDDEGLKHLQQEAEKLVASLQDSSLEEEQFTAAMQTQGLRHSAAATALPLSHGAARKWFYKDPQGEIQGPFTTQEMAEWFQAGYFSMSLLVKRGCDEGFQPLGEVIKMWGRVPFAPGPSPPPLLGNMDQERLKKQQELAAAALYQQLQHQQFLQLVSSRQLPQCALREKAALGDLTPPPPPPPQQQQQQLTAFLQQLQALKPPRGGDQNLLPTMSRSLSVPDSGRLWDVHTSASSQSGGEASLWDIPINSSTQGPILEQLQLQHKFQERREVELRAKREEEERKRREEKRRQQQQEEQKRRQEEEELFRRKHVRQQELLLKLLQQQQAVPVPPAPSSPPPLWAGLAKQGLSMKTLLELQLEGERQLHKQPPPREPARAQAPNHRVQLGGLGTAPLNQWVSEAGPLWGGPDKSGGGSSGLGLWEDTPKSGGSLVRGLGLKNSRSSPSLSDSYSHLSGRPIRKKTEEEEKLLKLLQGIPRPQDGFTQWCEQMLHTLSATGSLDVPMAVAILKEVESPYDVHDYIRSCLGDTLEAKEFAKQFLERRAKQKASQQRQQQQEAWLSSASLQTAFQANHSTKLGPGEGSKAKRRALMLHSDPSILGYSLHGSSGEIESVDDY

SEQ ID NO: 2953 - protein, 474 aa, Homo sapiens
MEAEDIQEELTCPICLDYFQDPVSIECGHNFCRGCLHRNWAPGGGPFPCPECRHPSAPAALRPNWALARLTEKTQRRRLGPVPPGLCGRHWEPLRLFCEDDQRPVCLVCRESQEHQTHAMAPIDEAFESYREKLLKSQRNLVAKMKKVMHLQDVEVKNATQWKDKIKSQRMRISTEFSKLHNFLVEEEDLFLQRLNKEEEETKKKLNENTLKLNQTIASLKKLILEVGEKSQAPTLELLQNPKEVLTRSEIQDVNYSLEAVKVKTVCQIPLMKEMLKRFQVAVNLAEDTAHPKLVFSQEGRYVKNTASASSWPVFSSAWNYFAGWRNPQKTAFVERFQHLPCVLGKNVFTSGKHYWEVESRDSLEVAVGVCREDVMGITDRSKMSPDVGIWAIYWSAAGYWPLIGFPGTPTQQEPALHRVGVYLDRGTGNVSFYSAVDGVHLHTFSCSSVSRLRPFFWLSPLASLVIPPVTDRK

SEQ ID NO: 2954 - protein, 300 aa, Homo sapiens
MAEPTVCSFLTKVLCAHGGRMFLKDLRGHVELSEARLRDVLQRAGPERFLLQEVETQEGLGDAEAEAAAGAVGGGGTSAWRVVAVSSVRLCARYQRGECQACDQLHFCRRHMLGKCPNRDCWSTCTLSHDIHTPVNMQVLKSHGLFGLNENQLRILLLQNDPCLLPEVCLLYNKGEALYGYCNLKDKCNKFHVCKSFVKGECKLQTCKRSHQLIHAASLKLLQDQGLNIPSVVNFQIISTYKHMKLHKMLENTDNSSPSTEHSQGLEKQGVHAAGAAEAGPLASVPAQSAKKPCPVSCEK

SEQ ID NO: 2955 - protein, 976 aa, Homo sapiens
MERRWPLGLGLVLLLCAPLPPGARAKEVTLMDTSKAQGELGWLLDPPKDGWSEQQQILNGTPLYMYQDCPMQGRRDTDHWLRSNWIYRGEEASRVHVELQFTVRDCKSFPGGAGPLGCKETFNLLYMESDQDVGIQLRRPLFQKVTTVAADQSFTIRDLVSGSVKLNVERCSLGRLTRRGLYLAFHNPGACVALVSVRVFYQRCPETLNGLAQFPDTLPGPAGLVEVAGTCLPHARASPRPSGAPRMHCSPDGEWLVPVGRCHCEPGYEEGGSGEACVACPSGSYRMDMDTPHCLTCPQQSTAESEGATICTCESGHYRAPGEGPQVACTGPPSAPRNLSFSASGTQLSLRWEPPADTGGRQDVRYSVRCSQCQGTAQDGGPCQPCGVGVHFSPGARGLTTPAVHVNGLEPYANYTFNVEAQNGVSGLGSSGHASTSVSISMGHAESLSGLSLRLVKKEPRQLELTWAGSRPRSPGANLTYELHVLNQDEERYQMVLEPRVLLTELQPDTTYIVRVRMLTPLGPGPFSPDHEFRTSPPVSRGLTGGEIVAVIFGLLLGAALLLGILVFRSRRAQRQRQQRQRDRATDVDREDKLWLKPYVDLQAYEDPAQGALDFTRELDPAWLMVDTVIGEGEFGEVYRGTLRLPSQDCKTVAIKTLKDTSPGGQWWNFLREATIMGQFSHPHILHLEGVVTKRKPIMIITEFMENGALDAFLREREDQLVPGQLVAMLQGIASGMNYLSNHNYVHRDLAARNILVNQNLCCKVSDFGLTRLLDDFDGTYETQGGKIPIRWTAPEAIAHRIFTTASDVWSFGIVMWEVLSFGDKPYGEMSNQEVMKSIEDGYRLPPPVDCPAPLYELMKNCWAYDRARRPHFQKLQAHLEQLLANPHSLRTIANFDPRMTLRLPSLSGSDGIPYRTVSEWLESIRMKRYILHFHSAGLDTMECVLELTAEDLTQMGITLPGHQKRILCSIQGFKD

SEQ ID NO: 2956 - protein, 860 aa, Homo sapiens
MAASRSAGEAGPGGSQGRVVRMKRRGGRGPRRGPAGGGEKALKRLKLAVEEFVHATSEGEAPGGCEGRGAPVSFRPGGRKSRKELRKEKRHLRKARRLQRTAGPEQGPGLGGRSGAEEASGHRQDTEERARPAPSRDPSPPRKPRPSRVKAKATAATAKTRPSAAATAAARKRALLAANEEEDREIRKLERCLGLNKRKKKDGSSSVPLSFARDGLDYILGALESGKNSGLYDSSGEEEEDAGQTLPESDLESDSQDESEEEEEGDVEKEKKAQEAEAQSEDDDEDTEEEQGEEKEKGAQEKRRGKRVRFAEDEEKSENSSEDGDITDKSLCGSGEKYIPPHVRQAEETVDFKKKEELERLKKHVKGLLNRLSEPNMASISGQLEELYMAHSRKDMNDTLTSALMGACVTASAMPSRLMMEHVLLVSILHHTVGIEVGAHFLEAVVRKFDAIYKYGSEGKECDNLFTVIAHLYNFHVVQSLLIFDILKKLIGTFTEKDIELILLMLKNVGFSLRKDDALSLKELITEAQTKASGAGSEFQDQTRIRFMLETMLALKNNDMRKIPGYDPEPVEKLRKLQRALVRNAGSGSETQLRVSWDSVLSAEQTGRWWIVGSAWSGAPMIDNSHHTHLQKQLVGTVSSKILELARKQRMNTDIRRNIFCTIMTSEDFLDAFEKLLKLGLKDQQEREIIHVLMDCCLQEKTYNPFYAFLASKFCEYERRFQMTFQFSIWDKFRDLENLPATNFSNLVHLVAHLLKTKSLSLSILKVVEFSELDKPRVRFLRKVLSILLMETEVEDLSLIFTRVSDNPKLGVLREGLKLFISHFLLKNAQAHRSADEANVLREKADLATKCLQGKASLRM

SEQ ID NO: 2957 - protein, 181 aa, Homo sapiens
MASAGSGMEEVRVSVLTPLKLVGLVCIFLALCLDLGAVLSPAWVTADHQYYLSLWESCRKPASLDIWHCESTLSSDWQIATLALLLGGAAIILIAFLVGLISICVGSRRRFYRPVAVMLFAAVVLQVCSLVLYPIKFIETVSLKIYHEFNWGYGLAWGATIFSFGGAILYCLNPKNYEDYY

SEQ ID NO: 2958 - protein, 486 aa, Homo sapiens
MKGRRRRRREYCKFALLLVLYTLVLLLVPSVLDGGRDGDKGAEHCPGLQRSLGVWSLEAAAAGEREQGAEARAAEEGGANQSPRFPSNLSGAVGEAVSREKQHIYVHATWRTGSSFLGELFNQHPDVFYLYEPMWHLWQALYPGDAESLQGALRDMLRSLFRCDFSVLRLYAPPGDPAARAPDTANLTTAALFRWRTNKVICSPPLCPGAPRARAEVGLVEDTACERSCPPVAIRALEAECRKYPVVVIKDVRLLDLGVLVPLLRDPGLNLKVVQLFRDPRAVHNSRLKSRQGLLRESIQVLRTRQRGDRFHRVLLAHGVGARPGGQSRALPAAPRADFFLTGALEVICEAWLRDLLFARGAPAWLRRRYLRLRYEDLVRQPRAQLRRLLRFSGLRALAALDAFALNMTRGAAYGADRPFHLSARDAREAVHAWRERLSREQVRQVEAACAPAMRLLAYPRSGEEGDAEQPREGETPLEMDADGAT

SEQ ID NO: 2959 - protein, 163 aa, Homo sapiens
MAAGLFGLSARRLLAAAATRGLPAARVRWESSFSRTVVAPSAVAGKRPPEPTTPWQEDPEPEDENLYEKNPDSHGYDKDPVLDVWNMRLVFFFGVSIILVLGSTFVAYLPDYRCTGCPRAWDGMKEWSRREAERLVKYREANGLPIMESNCFDPSKIQLPEDE

SEQ ID NO: 2960 - protein, 1893 aa, Homo sapiens
MGPGCDLLLRTAATITAAAIMSDTDSDEDSAGGGPFSLAGFLFGNINGAGQLEGESVLDDECKKHLAGLGALGLGSLITELTANEELTGTDGALVNDEGWVRSTEDAVDYSDINEVAEDESRRYQQTMGSLQPLCHSDYDEDDYDADCEDIDCKLMPPPPPPPGPMKKDKDQDSITGVSENGEGIILPSIIAPSSLASEKVDFSSSSDSESEMGPQEATQAESEDGKLTLPLAGIMQHDATKLLPSVTELFPEFRPGKVLRFLRLFGPGKNVPSVWRSARRKRKKKHRELIQEEQIQEVECSVESEVSQKSLWNYDYAPPPPPEQCLSDDEITMMAPVESKFSQSTGDIDKVTDTKPRVAEWRYGPARLWYDMLGVPEDGSGFDYGFKLRKTEHEPVIKSRMIEEFRKLEENNGTDLLADENFLMVTQLHWEDDIIWDGEDVKHKGTKPQRASLAGWLPSSMTRNAMAYNVQQGFAATLDDDKPWYSIFPIDNEDLVYGRWEDNIIWDAQAMPRLLEPPVLTLDPNDENLILEIPDEKEEATSNSPSKESKKESSLKKSRILLGKTGVIKEEPQQNMSQPEVKDPWNLSNDEYYYPKQQGLRGTFGGNIIQHSIPAVELRQPFFPTHMGPIKLRQFHRPPLKKYSFGALSQPGPHSVQPLLKHIKKKAKMREQERQASGGGEMFFMRTPQDLTGKDGDLILAEYSEENGPLMMQVGMATKIKNYYKRKPGKDPGAPDCKYGETVYCHTSPFLGSLHPGQLLQAFENNLFRAPIYLHKMPETDFLIIRTRQGYYIRELVDIFVVGQQCPLFEVPGPNSKRANTHIRDFLQVFIYRLFWKSKDRPRRIRMEDIKKAFPSHSESSIRKRLKLCADFKRTGMDSNWWVLKSDFRLPTEEEIRAMVSPEQCCAYYSMIAAEQRLKDAGYGEKSFFAPEEENEEDFQMKIDDEVRTAPWNTTRAFIAAMKGKCLLEVTGVADPTGCGEGFSYVKIPNKPTQQKDDKEPQPVKKTVTGTDADLRRLSLKNAKQLLRKFGVPEEEIKKLSRWEVIDVVRTMSTEQARSGEGPMSKFARGSRFSVAEHQERYKEECQRIFDLQNKVLSSTEVLSTDTDSSSAEDSDFEEMGKNIENMLQNKKTSSQLSREREEQERKELQRMLLAAGSAASGNNHRDDDTASVTSLNSSATGRCLKIYRTFRDEEGKEYVRCETVRKPAVIDAYVRIRTTKDEEFIRKFALFDEQHREEMRKERRRIQEQLRRLKRNQEKEKLKGPPEKKPKKMKERPDLKLKCGACGAIGHMRTNKFCPLYYQTNAPPSNPVAMTEEQEEELEKTVIHNDNEELIKVEGTKIVLGKQLIESADEVRRKSLVLKFPKQQLPPKKKRRVGTTVHCDYLNRPHKSIHRRRTDPMVTLSSILESIINDMRDLPNTYPFHTPVNAKVVKDYYKIITRPMDLQTLRENVRKRLYPSREEFREHLELIVKNSATYNGPKHSLTQISQSMLDLCDEKLKEKEDKLARLEKAINPLLDDDDQVAFSFILDNIVTQKMMAVPDSWPFHHPVNKKFVPDYYKVIVNPMDLETIRKNISKHKYQSRESFLDDVNLILANSVKYNGPESQYTKTAQEIVNVCYQTLTEYDEHLTQLEKDICTAKEAALEEAELESLDPMTPGPYTPQPPDLYDTNTSLSMSRDASVFQDESNMSVLDIPSATPEKQVTQEGEDGDGDLADEEEGTVQQPQASVLYEDLLMSEGEDDEEDAGSDEEGDNPFSAIQLSESGSDSDVGSGGIRPKQPRMLQENTRMDMENEESMMSYEGDGGEASHGLEDSNISYGSYEEPDPKSNTQDTSFSSIGGYEVSEEEEDEEEEEQRSGPSVLSQVHLSEDEEDSEDFHSIAGDSDLDSDE

SEQ ID NO: 2961 - protein, 471 aa, Homo sapiens
MQSNKTFNLEKQNHTPRKHHQHHHQQQHHQQQQQQPPPPPIPANGQQASSQNEGLTIDLKNFRKPGEKTFTQRSRLFVGNLPPDITEEEMRKLFEKYGKAGEVFIHKDKGFGFIRLETRTLAEIAKVELDNMPLRGKQLRVRFACHSASLTVRNLPQYVSNELLEEAFSVFGQVERAVVIVDDRGRPSGKGIVEFSGKPAARKALDRCSEGSFLLTTFPRPVTVEPMDQLDDEEGLPEKLVIKNQQFHKEREQPPRFAQPGSFEYEYAMRWKALIEMEKQQQDQVDRNIKEAREKLEMEMEAARHEHQVMLMRQDLMRRQEELRRMEELHNQEVQKRKQLELRQEEERRRREEEMRRQQEEMMRRQQEGFKGTFPDAREQEIRMGQMAMGGAMGINNRGAMPPAPVPAGTPAPPGPATMMPDGTLGLTPPTTERFGQAATMEGIGAIGGTPPAFNRAAPGAEFAPNKRRRY

SEQ ID NO: 2962 - protein, 2073 aa, Homo sapiens
MAEVRKFTKRLSKPGTAAELRQSVSEAVRGSVVLEKAKVVEPLDYENVIAQRKTQIYSDPLRDLLMFPMEDISISVIGRQRRTVQSTVPEDAEKRAQSLFVKECIKTYSTDWHVVNYKYEDFSGDFRMLPCKSLRPEKIPNHVFEIDEDCEKDEDSSSLCSQKGGVIKQGWLHKANVNSTITVTMKVFKRRYFYLTQLPDGSYILNSYKDEKNSKESKGCIYLDACIDVVQCPKMRRHAFELKMLDKYSHYLAAETEQEMEEWLITLKKIIQINTDSLVQEKKETVETAQDDETSSQGKAENIMASLERSMHPELMKYGRETEQLNKLSRGDGRQNLFSFDSEVQRLDFSGIEPDIKPFEEKCNKRFLVNCHDLTFNILGQIGDNAKGPPTNVEPFFINLALFDVKNNCKISADFHVDLNPPSVREMLWGSSTQLASDGSPKGSSPESYIHGIAESQLRYIQQGIFSVTNPHPEIFLVARIEKVLQGNITHCAEPYIKNSDPVKTAQKVHRTAKQVCSRLGQYRMPFAWAARPIFKDTQGSLDLDGRFSPLYKQDSSKLSSEDILKLLSEYKKPEKTKLQIIPGQLNITVECVPVDLSNCITSSYVPLKPFEKNCQNITVEVEEFVPEMTKYCYPFTIYKNHLYVYPLQLKYDSQKTFAKARNIAVCVEFRDSDESDASALKCIYGKPAGSVFTTNAYAVVSHHNQNPEFYDEIKIELPIHLHQKHHLLFTFYHVSCEINTKGTTKKQDTVETPVGFAWVPLLKDGRIITFEQQLPVSANLPPGYLNLNDAESRRQCNVDIKWVDGAKPLLKIKSHLESTIYTQDLHVHKFFHHCQLIQSGSKEVPGELIKYLKCLHAMEIQVMIQFLPVILMQLFRVLTNMTHEDDVPINCTMVLLHIVSKCHEEGLDSYLRSFIKYSFRPEKPSAPQAQLIHETLATTMIAILKQSADFLSINKLLKYSWFFFEIIAKSMATYLLEENKIKLPRGQRFPETYHHVLHSLLLAIIPHVTIRYAEIPDESRNVNYSLASFLKRCLTLMDRGFIFNLINDYISGFSPKDPKVLAEYKFEFLQTICNHEHYIPLNLPMAFAKPKLQRVQDSNLEYSLSDEYCKHHFLVGLLLRETSIALQDNYEIRYTAISVIKNLLIKHAFDTRYQHKNQQAKIAQLYLPFVGLLLENIQRLAGRDTLYSCAAMPNSASRDEFPCGFTSPANRGSLSTDKDTAYGSFQNGHGIKREDSRGSLIPEGATGFPDQGNTGENTRQSSTRSSVSQYNRLDQYEIRSLLMCYLYIVKMISEDTLLTYWNKVSPQELINILILLEVCLFHFRYMGKRNIARVHDAWLSKHFGIDRKSQTMPALRNRSGVMQARLQHLSSLESSFTLNHSSTTTEADIFHQALLEGNTATEVSLTVLDTISFFTQCFKTQLLNNDGHNPLMKKVFDIHLAFLKNGQSEVSLKHVFASLRAFISKFPSAFFKGRVNMCAAFCYEVLKCCTSKISSTRNEASALLYLLMRNNFEYTKRKTFLRTHLQIIIAVSQLIADVALSGGSRFQESLFIINNFANSDRPMKATAFPAEVKDLTKRIRTVLMATAQMKEHEKDPEMLIDLQYSLAKSYASTPELRKTWLDSMAKIHVKNGDFSEAAMCYVHVAALVAEFLHRKKLFPNGCSAFKKITPNIDEEGAMKEDAGMMDVHYSEEVLLELLEQCVDGLWKAERYEIISEISKLIVPIYEKRREFEKLTQVYRTLHGAYTKILEVMHTKKRLLGTFFRVAFYGQSFFEEEDGKEYIYKEPKLTGLSEISLRLVKLYGEKFGTENVKIIQDSDKVNAKELDPKYAHIQVTYVKPYFDDKELTERKTEFERNHNISRFVFEAPYTLSGKKQGCIEEQCKRRTILTTSNSFPYVKKRIPINCEQQINLKPIDVATDEIKDKTAELQKLCSSTDVDMIQLQLKLQGCVSVQVNAGPLAYARAFLNDSQASKYPPKKVSELKDMFRKFIQACSIALELNERLIKEDQVEYHEGLKSNFRDMVKELSDIIHEQILQEDTMHSPWMSNTLHVFCAISGTSSDRGYGSPRYAEV

SEQ ID NO: 2963 - protein, 264 aa, Homo sapiens
MLRLLRLALAFYGRTADPAERQGPQQQGLPQGDTQLTTVQGVVTSFCGDYGMIDESIYFSSDVVTGNVPLKVGQKVNVVVEEDKPHYGLRAIKVDVVPRHLYGAGPSDSGTRVLIGCVTSINEDNIYISNSIYFSIAIVSEDFVPYKGDLLEVEYSTEPGISNIKATSVKPIRCIHTEEVCITSVHGRNGVIDYTIFFTLDSVKLPDGYVPQVDDIVNVVMVESIQFCFIWRAISITPVHKSSSGFQDDGGLGRPKRERRSQSI

SEQ ID NO: 2964 - protein, 1528 aa, Homo sapiens
MSVAIRKRSWEEHVTHWMGQPFNSDDRNTACHHGLVADSLQASMEKDATLNVDRKEKCVSLPDCCHGSELRDFPGRPMGHLSKDVDENDSHEGEDQFLSLEASTETLVHVSDEDNNADLCLTDDKQVLNTQGQKTSGQHMIQGAGSLEKALPIIQSNQVSSNSWGIAGETELALVKESGERKVTDSISKSLELCNEISLSEIKDAPKVNAVDTLNVKDIAPEKQLLNSAVIAQQRRKPDPPKDENERSTCNVVQNEFLDTPCTNRGLPLLKTDFGSCLLQPPSCPNGMSAENGLEKSGFSQHQNKSPPKVKAEDGMQCLQLKETLATQEPTDNQVRLRKRKEIREDRDRARLDSMVLLIMKLDQLDQDIENALSTSSSPSGTPTNLRRHVPDLESGSESGADTISVNQTRVNLSSDTESTDLPSSTPVANSGTKPKTTAIQGISEKEKAEIEAKEACDWLRATGFPQYAQLYEDFLFPIDISLVKREHDFLDRDAIEALCRRLNTLNKCAVMKLEISPHRKRSDDSDEDEPCAISGKWTFQRDSKRWSRLEEFDVFSPKQDLVPGSPDDSHPKDGPSPGGTLMDLSERQEVSSVRSLSSTGSLPSHAPPSEDAATPRTNSVISVCSSSNLAGNDDSFGSLPSPKELSSFSFSMKGHEKTAKSKTRSLLKRMESLKLKSSHHSKHKAPSKLGLIISGPILQEGMDEEKLKQLNCVEISALNGNRINVPMVRKRSVSNSTQTSSSSSQSETSSAVSTPSPVTRTRSLSACNKRVGMYLEGFDPFNQSTFNNVVEQNFKNRESYPEDTVFYIPEDHKPGTFPKALTNGSFSPSGNNGSVNWRTGSFHGPGHISLRRENSSDSPKELKRRNSSSSMSSRLSIYDNVPGSILYSSSGDLADLENEDIFPELDDILYHVKGMQRIVNQWSEKFSDEGDSDSALDSVSPCPSSPKQIHLDVDNDRTTPSDLDSTGNSLNEPEEPSEIPERRDSGVGASLTRSNRHRLRWHSFQSSHRPSLNSVSLQINCQSVAQMNLLQKYSLLKLTALLEKYTPSNKHGFSWAVPKFMKRIKVPDYKDRSVFGVPLTVNVQRTGQPLPQSIQQAMRYLRNHCLDQVGLFRKSGVKSRIQALRQMNEGAIDCVNYEGQSAYDVADMLKQYFRDLPEPLMTNKLSETFLQIYQYVPKDQRLQAIKAAIMLLPDENREVLQTLLYFLSDVTAAVKENQMTPTNLAVCLAPSLFHLNTLKRENSSPRVMQRKQSLGKPDQKDLNENLAATQGLAHMIAECKKLFQVPEEMSRCRNSYTEQELKPLTLEALGHLGNDDSADYQHFLQDCVDGLFKEVKEKFKGWVSYSTSEQAELSYKKVSEGPPLRLWRSVIEVPAVPEEILKRLLKEQHLWDVDLLDSKVIEILDSQTEIYQYVQNSMAPHPARDYVVLRTWRTNLPKGACALLLTSVDHDRAPVVGVRVNVLLSRYLIEPCGPGKSKLTYMCRVDLRGHMPEWYTKSFGHLCAAEVVKIRDSFSNQNTETKDTKSR

SEQ ID NO: 2965 - protein, 511 aa, Homo sapiens
MALRAMRGIVNGAAPELPVPTGGPAVGAREQALAVSRNYLSQPRLTYKTVSGVNGPLVILDHVKFPRYAEIVHLTLPDGTKRSGQVLEVSGSKAVVQVFEGTSGIDAKKTSCEFTGDILRTPVSEDMLGRVFNGSGKPIDRGPVVLAEDFLDIMGQPINPQCRIYPEEMIQTGISAIDGMNSIARGQKIPIFSAAGLPHNEIAAQICRQAGLVKKSKDVVDYSEENFAIVFAAMGVNMETARFFKSDFEENGSMDNVCLFLNLANDPTIERIITPRLALTTAEFLAYQCEKHVLVILTDMSSYAEALREVSAAREEVPGRRGFPGYMYTDLATIYERAGRVEGRNGSITQIPILTMPNDDITHPIPDLTGYITEGQIYVDRQLHNRQIYPPINVLPSLSRLMKSAIGEGMTRKDHADVSNQLYACYAIGKDVQAMKAVVGEEALTSDDLLYLEFLQKFERNFIAQGPYENRTVFETLDIGWQLLRIFPKEMLKRIPQSTLSEFYPRDSAKH

SEQ ID NO: 2966 - protein, 494 aa, Homo sapiens
MLTSKGQGFLHGGLCLWLCVFTPFFKGCVGCATEERLFHKLFSHYNQFIRPVENVSDPVTVHFEVAITQLANVDEVNQIMETNLWLRHIWNDYKLRWDPMEYDGIETLRVPADKIWKPDIVLYNNAVGDFQVEGKTKALLKYNGMITWTPPAIFKSSCPMDITFFPFDHQNCSLKFGSWTYDKAEIDLLIIGSKVDMNDFWENSEWEIIDASGYKHDIKYNCCEEIYTDITYSFYIRRLPMFYTINLIIPCLFISFLTVLVFYLPSDCGEKVTLCISVLLSLTVFLLVITETIPSTSLVVPLVGEYLLFTMIFVTLSIVVTVFVLNIHYRTPTTHTMPRWVKTVFLKLLPQVLLMRWPLDKTRGTGSDAVPRGLARRPAKGKLASHGEPRHLKECFHCHKSNELATSKRRLSHQPLQWVVENSEHSPEVEDVINSVQFIAENMKSHNETKEVEDDWKYVAMVVDRVFLWVFIIVCVFGTAGLFLQPLLGNTGKS

SEQ ID NO: 2967 - protein, 92 aa, Homo sapiens
MKPIQKLLAGLILLTWCVEGCSSQHWSYGLRPGGKRDAENLIDSFQEIVKEVGQLAETQRFECTTHQPRSPLRDLKGALESLIEEETGQKKI

SEQ ID NO: 2968 - protein, 253 aa, Homo sapiens
MSWIPFKIGQPKKQIVPKTVERDFEREYGKLQQLEEQTRRLQKDMKKSTDADLAMSKSAVKISLDLLSNPLCEQDQDLLNMVTALDTAMKRMDAFNQEKVNQIQKTVIEPLKKFGSVFPSLNMAVKRREQALQDYRRLQAKVEKYEEKEKTGPVLAKLHQAREELRPVREDFEAKNRQLLEEMPRFYGSRLDYFQPSFESLIRAQVVYYSEMHKIFGDLSHQLDQPGHSDEQRERENEAKLSELRALSIVADD

SEQ ID NO: 2969 - protein, 440 aa, Homo sapiens
MEQRGQNAPAASGARKRHGPGPREARGARPGPRVPKTLVLVVAAVLLLVSAESALITQQDLAPQQRAAPQQKRSSPSEGLCPPGHHISEDGRDCISCKYGQDYSTHWNDLLFCLRCTRCDSGEVELSPCTTTRNTVCQCEEGTFREEDSPEMCRKCRTGCPRGMVKVGDCTPWSDIECVHKESGTKHSGEVPAVEETVTSSPGTPASPCSLSGIIIGVTVAAVVLIVAVFVCKSLLWKKVLPYLKGICSGGGGDPERVDRSSQRPGAEDNVLNEIVSILQPTQVPEQEMEVQEPAEPTGVNMLSPGESEHLLEPAEAERSQRRRLLVPANEGDPTETLRQCFDDFADLVPFDSWEPLMRKLGLMDNEIKVAKAEAAGHRDTLYTMLIKWVNKTGRDASVHTLLDALETLGERLAKQKIEDHLLSSGKFMYLEGNADSAMS

SEQ ID NO: 2970 - protein, 282 aa, Homo sapiens
MNSSTSTMSEEPDALSVVNQLRDLAADPLNRRAIVQDQGCLPGLILFMDHPNPPVVHSALLALRYLAECRANREKMKGELGMMLSLQNVIQKTTTPGETKLLASEIYDILQSSNMADGDSFNEMNSRRRKAQFFLGTTNKRAKTVVLHIDGLDDTSRRNLCEEALLKIKGVISFTFQMAVQRCVVRIRSDLKAEALASAIASTKVMKAQQVVKSESGEEMLVPFQDTPVEVEQNTELPDYLPEDESPTKEQDKAVSRVGSHPEGGASWLSTAANFLSRSFYW

SEQ ID NO: 2971 - protein, 196 aa, Homo sapiens
MRLPLLVSAGVLLVALLPCPPCRALLSRGPVPGARQAPQHPQPLDFFQPPPQSEQPQQPQARPVLLRMGEEYFLRLGNLNKSPAAPLSPASSLLAGGSGSRPSPEQATANFFRVLLQQLLLPRRSLDSPAALAERGARNALGGHQEAPERERRSEEPPISLDLTFHLLREVLEMARAEQLAQQAHSNRKLMEIIGK

SEQ ID NO: 2972 - protein, 187 aa, Homo sapiens
MAALCRTRAVAAESHFLRVFLFFRPFRGVGTESGSESGSSNAKEPKTRAGGFASALERHSELLQKVEPLQKGSPKNVESFASMLRHSPLTQMGPAKDKLVIGRIFHIVENDLYIDFGGKFHCVCRRPEVDGEKYQKGTRVRLRLLDLELTSRFLGATTDTTVLEANAVLLGIQESKDSRSKEEHHEK

SEQ ID NO: 2973 - protein, 288 aa, Homo sapiens
MAAVLQRVERLSNRVVRVLGCNPGPMTLQGTNTYLVGTGPRRILIDTGEPAIPEYISCLKQALTEFNTAIQEIVVTHWHRDHSGGIGDICKSINNDTTYCIKKLPRNPQREEIIGNGEQQYVYLKDGDVIKTEGATLRVLYTPGHTDDHMALLLEEENAIFSGDCILGEGTTVFEDLYDYMNSLKELLKIKADIIYPGHGPVIHNAEAKIQQYISHRNIREQQILTLFRENFEKSFTVMELVKIIYKNTPENLHEMAKHNLLLHLKKLEKEGKIFSNTDPDKKWKAHL

SEQ ID NO: 2974 - protein, 663 aa, Homo sapiens
MGPLRESKKEHRVQHHDKEISRSRIPRLILRPHMPQQQHKVSPASESPFSEEESREFNPSSSGRSARTVSSNSFCSDDTGCPSSQSVSPVKTPSDAGNSPIGFCPGSDEGFTRKKCTIGMVGEGSIQSSRYKKESKSGLVKPGSEADFSSSSSTGSISAPEVHMSTAGSKRSSSSRNRGPHGRSNGASSHKPGSSPSSPREKDLLSMLCRNQLSPVNIHPSYAPSSPSSSNSGSYKGSDCSPIMRRSGRYMSCGENHGVRPPNPEQYLTPLQQKEVTVRHLKTKLKESERRLHERESEIVELKSQLARMREDWIEEECHRVEAQLALKEARKEIKQLKQVIETMRSSLADKDKGIQKYFVDINIQNKKLESLLQSMEMAHSGSLRDELCLDFPCDSPEKSLTLNPPLDTMADGLSLEEQVTGEGADRELLVGDSIANSTDLFDEIVTATTTESGDLELVHSTPGANVLELLPIVMGQEEGSVVVERAVQTDVVPYSPAISELIQSVLQKLQDPCPSSLASPDESEPDSMESFPESLSALVVDLTPRNPNSAILLSPVETPYANVDAEVHANRLMRELDFAACVEERLDGVIPLARGGVVRQYWSSSFLVDLLAVAAPVVPTVLWAFSTQRGGTDPVYNIGALLRGCCVVALHSLRRTAFRIKT

SEQ ID NO: 2975 - protein, 859 aa, Homo sapiens
MACRWSTKESPRWRSALLLLFLAGVYGNGALAEHSENVHISGVSTACGETPEQIRAPSGIITSPGWPSEYPAKINCSWFIRANPGEIITISFQDFDIQGSRRCNLDWLTIETYKNIESYRACGSTIPPPYISSQDHIWIRFHSDDNISRKGFRLAYFSGKSEEPNCACDQFRCGNGKCIPEAWKCNNMDECGDSSDEEICAKEANPPTAAAFQPCAYNQFQCLSRFTKVYTCLPESLKCDGNIDCLDLGDEIDCDVPTCGQWLKYFYGTFNSPNYPDFYPPGSNCTWLIDTGDHRKVILRFTDFKLDGTGYGDYVKIYDGLEENPHKLLRVLTAFDSHAPLTVVSSSGQIRVHFCADKVNAARGFNATYQVDGFCLPWEIPCGGNWGCYTEQQRCDGYWHCPNGRDETNCTMCQKEEFPCSRNGVCYPRSDRCNYQNHCPNGSDEKNCFFCQPGNFHCKNNRCVFESWVCDSQDDCGDGSDEENCPVIVPTRVITAAVIGSLICGLLLVIALGCTCKLYSLRMFERRSFETQLSRVEAELLRREAPPSYGQLIAQGLIPPVEDFPVCSPNQASVLENLRLAVRSQLGFTSVRLPMAGRSSNIWNRIFNFARSRHSGSLALVSADGDEVVPSQSTSREPERNHTHRSLFSVESDDTDTENERRDMAGASGGVAAPLPQKVPPTTAVEATVGACASSSTQSTRGGHADNGRDVTSVEPPSVSPARHQLTSALSRMTQGLRWVRFTLGRSSSLSQNQSPLRQLDNGVSGREDDDDVEMLIPISDGSSDFDVNDCSRPLLDLASDQGQGLRQPYNATNPGVRPSNRDGPCERCGIVHTAQIPDTCLEVTLKNETSDDEALLLC

SEQ ID NO: 2976 - protein, 243 aa, Homo sapiens
MQFRLFSFALIILNCMDYSHCQGNRWRRSKRASYVSNPICKGCLSCSKDNGCSRCQQKLFFFLRREGMRQYGECLHSCPSGYYGHRAPDMNRCARCRIENCDSCFSKDFCTKCKVGFYLHRGRCFDECPDGFAPLEETMECVEGCEVGHWSEWGTCSRNNRTCGFKWGLETRTRQIVKKPVKDTILCPTIAESRRCKMTMRHCPGGKRTPKAKEKRNKKKKRKLIERAQEQHSVFLATDRANQ

SEQ ID NO: 2977 - protein, 366 aa, Homo sapiens
MYSRHAQRIPPGKKMASRKEGTGSTATSSSSTAGAAGKGKGKGGSGDSAVKQVQIDGLVVLKIIKHYQEEGQGTEVVQGVLLGLVVEDRLEITNCFPFPQHTEDDADFDEVQYQMEMMRSLRHVNIDHLHVGWYQSTYYGSFVTRALLDSQFSYQHAIEESVVLIYDPIKTAQGSLSLKAYRLTPKLMEVCKEKDFSPEALKKANITFEYMFEEVPIVIKNSHLINVLMWELEKKSAVADKHELLSLASSNHLGKNLQLLMDRVDEMSQDIVKYNTYMRNTSKQQQQKHQYQQRRQQENMQRQSRGEPPLPEEDLSKLFKPPQPPARMDSLLIAGQINTYCQNIKEFTAQNLGKLFMAQALQEYNN

SEQ ID NO: 2978 - protein, 179 aa, Homo sapiens
MAFLASGPYLTHQQKVLRLYKRALRHLESWCVQRDKYRYFACLMRARFEEHKNEKDMAKATQLLKEAEEEFWYRQHPQPYIFPDSPGGTSYERYDCYKVPEWCLDDWHPSEKAMYPDYFAKREQWKKLRRESWEREVKQLQEETPPGGPLTEALPPARKEGDLPPLWWYIVTRPRERPM

SEQ ID NO: 2979 - protein, 297 aa, Homo sapiens
MSRFKFIDIGINLTDPMFRGIYRGVQKHQDDLQDVIGRAVEIGVKKFMITGGNLQDSKDALHLAQTNGMFFSTVGCHPTRCGEFEKNNPDLYLKELLNLAENNKGKVVAIGECGLDFDRLQFCPKDTQLKYFEKQFELSEQTKLPMFLHCRNSHAEFLDIMKRNRDRCVGGVVHSFDGTKEAAAALIDLDLYIGFNGCSLKTEANLEVLKSIPSEKLMIETDAPWCGVKSTHAGSKYIRTAFPTKKKWESGHCLKDRNEPCHIIQILEIMSAVRDEDPLELANTLYNNTIKVFFPGI

SEQ ID NO: 2980 - protein, 380 aa, Homo sapiens
MDSGCWLFGGEFEDSVFEERPERRSGPPASYCAKLCEPQWFYEETESSDDVEVLTLKKFKGDLAYRRQEYQKALQEYSSISEKLSSTNFAMKRDVQEGQARCLAHLGRHMEALEIAANLENKATNTDHLTTVLYLQLAICSSLQNLEKTIFCLQKLISLHPFNPWNWGKLAEAYLNLGPALSAALASSQKQHSFTSSDKTIKSFFPHSGKDCLLCFPETLPESSLFSVEANSSNSQKNEKALTNIQNCMAEKRETVLIETQLKACASFIRTRLLLQFTQPQQTSFALERNLRTQQEIEDKMKGFSFKEDTLLLIAEVMGEDIPEKIKDEVHPEVKCVGSVALTALVTVSSEEFEDKWFRKIKDHFCPFENQFHTEIQILA

SEQ ID NO: 2981 - protein, 682 aa, Homo sapiens
MPSLRTRREEAEMELSVPGPSPWTPAAQARVRDAPAVTHPGSAACGTPCCSDTELEAICPHYQQPDCDTRTEDKEFLHKEDIHEDLESQAEISENYAGDVSQVPELGDLCDDVSERDWGVPEGRRLPQSLSQEGDFTPAAMGLLRGPLGEKDLDCNGFDSRFSLSPNLMACQEIPTEERPHPYDMGGQSFQHSVDLTGHEGVPTAESPLICNECGKTFQGNPDLIQRQIVHTGEASFMCDDCGKTFSQNSVLKNRHRSHMSEKAYQCSECGKAFRGHSDFSRHQSHHSSERPYMCNECGKAFSQNSSLKKHQKSHMSEKPYECNECGKAFRRSSNLIQHQRIHSGEKPYVCSECGKAFRRSSNLIKHHRTHTGEKPFECGECGKAFSQSAHLRKHQRVHTGEKPYECNDCGKPFSRVSNLIKHHRVHTGEKPYKCSDCGKAFSQSSSLIQHRRIHTGEKPHVCNVCGKAFSYSSVLRKHQIIHTGEKPYRCSVCGKAFSHSSALIQHQGVHTGDKPYACHECGKTFGRSSNLILHQRVHTGEKPYECTECGKTFSQSSTLIQHQRIHNGLKPHECNQCGKAFNRSSNLIHHQKVHTGEKPYTCVECGKGFSQSSHLIQHQIIHTGERPYKCSECGKAFSQRSVLIQHQRIHTGVKPYDCAACGKAFSQRSKLIKHQLIHTRE

SEQ ID NO: 2982 - protein, 802 aa, Homo sapiens
MWIQVRTIDGSKTCTIEDVSRKATIEELRERVWALFDVRPECQRLFYRGKQLENGYTLFDYDVGLNDIIQLLVRPDPDHLPGTSTQIEAKPCSNSPPKVKKAPRVGPSNQPSTSARARLIDPGFGIYKVNELVDARDVGLGAWFEAHIHSVTRASDGQSRGKTPLKNGSSCKRTNGNIKHKSKENTNKLDSVPSTSNSDCVAADEDVIYHIQYDEYPESGTLEMNVKDLRPRARTILKWNELNVGDVVMVNYNVESPGQRGFWFDAEITTLKTISRTKKELRVKIFLGGSEGTLNDCKIISVDEIFKIERPGAHPLSFADGKFLRRNDPECDLCGGDPEKKCHSCSCRVCGGKHEPNMQLLCDECNVAYHIYCLNPPLDKVPEEEYWYCPSCKTDSSEVVKAGERLKMSKKKAKMPSASTESRRDWGRGMACVGRTRECTIVPSNHYGPIPGIPVGSTWRFRVQVSEAGVHRPHVGGIHGRSNDGAYSLVLAGGFADEVDRGDEFTYTGSGGKNLAGNKRIGAPSADQTLTNMNRALALNCDAPLDDKIGAESRNWRAGKPVRVIRSFKGRKISKYAPEEGNRYDGIYKVVKYWPEISSSHGFLVWRYLLRRDDVEPAPWTSEGIERSRRLCLRLQYPAGYPSDKEGKKPKGQSKKQPSGTTKRPISDDDCPSASKVYKASDSAEAIEAFQLTPQQQHLIREDCQNQKLWDEVLSHLVEGPNFLKKLEQSFMCVCCQELVYQPVTTECFHNVCKDCLQRSFKAQVFSCPACRHDLGQNYIMIPNEILQTLLDLFFPGYSKGR

SEQ ID NO: 2983 - protein, 437 aa, Homo sapiens
MASVAVDPQPSVVTRVVNLPLVSSTYDLMSSAYLSTKDQYPYLKSVCEMAENGVKTITSVAMTSALPIIQKLEPQIAVANTYACKGLDRIEERLPILNQPSTQIVANAKGAVTGAKDAVTTTVTGAKDSVASTITGVMDKTKGAVTGSVEKTKSVVSGSINTVLGSRMMQLVSSGVENALTKSELLVEQYLPLTEEELEKEAKKVEGFDLVQKPSYYVRLGSLSTKLHSRAYQQALSRVKEAKQKSQQTISQLHSTVHLIEFARKNVYSANQKIQDAQDKLYLSWVEWKRSIGYDDTDESHCAEHIESRTLAIARNLTQQLQTTCHTLLSNIQGVPQNIQDQAKHMGVMAGDIYSVFRNAASFKEVSDSLLTSSKGQLQKMKESLDDVMDYLVNNTPLNWLVGPFYPQLTESQNAQDQGAEMDKSSQETQRSEHKTH

SEQ ID NO: 2984 - protein, 189 aa, Homo sapiens
MASPFALLMVLVVLSCKSSCSLGCDLPETHSLDNRRTLMLLAQMSRISPSSCLMDRHDFGFPQEEFDGNQFQKAPAISVLHELIQQIFNLFTTKDSSAAWDEDLLDKFCTELYQQLNDLEACVMQEERVGETPLMNADSILAVKKYFRRITLYLTEKKYSPCAWEVVRAEIMRSLSLSTNLQERLRRKE

SEQ ID NO: 2985 - protein, 683 aa, Homo sapiens
MECCRRATPGTLLLFLAFLLLSSRTARSEEDRDGLWDAWGPWSECSRTCGGGASYSLRRCLSSKSCEGRNIRYRTCSNVDCPPEAGDFRAQQCSAHNDVKHHGQFYEWLPVSNDPDNPCSLKCQAKGTTLVVELAPKVLDGTRCYTESLDMCISGLCQIVGCDHQLGSTVKEDNCGVCNGDGSTCRLVRGQYKSQLSATKSDDTVVAIPYGSRHIRLVLKGPDHLYLETKTLQGTKGENSLSSTGTFLVDNSSVDFQKFPDKEILRMAGPLTADFIVKIRNSGSADSTVQFIFYQPIIHRWRETDFFPCSATCGGGYQLTSAECYDLRSNRVVADQYCHYYPENIKPKPKLQECNLDPCPASDGYKQIMPYDLYHPLPRWEATPWTACSSSCGGGIQSRAVSCVEEDIQGHVTSVEEWKCMYTPKMPIAQPCNIFDCPKWLAQEWSPCTVTCGQGLRYRVVLCIDHRGMHTGGCSPKTKPHIKEECIVPTPCYKPKEKLPVEAKLPWFKQAQELEEGAAVSEEPSFIPEAWSACTVTCGVGTQVRIVRCQVLLSFSQSVADLPIDECEGPKPASQRACYAGPCSGEIPEFNPDETDGLFGGLQDFDELYDWEYEGFTKCSESCGGGVQEAVVSCLNKQTREPAEENLCVTSRRPPQLLKSCNLDPCPARSSIDSAWNACNVLC

SEQ ID NO: 2986 - protein, 380 aa, Homo sapiens
MASVAWAVLKVLLLLPTQTWSPVGAGNPPDCDSPLASALPRSSFSSSSELSSSHGPGFSRLNRRDGAGGWTPLVSNKYQWLQIDLGERMEVTAVATQGGYGSSDWVTSYLLMFSDGGRNWKQYRREESIWGFPGNTNADSVVHYRLQPPFEARFLRFLPLAWNPRGRIGMRIEVYGCAYKSEVVYFDGQSALLYTLDKKPLKPIRDVISLKFKAMQSNGILLHREGQHGNHITLELIKGKLVFFLNSGNAKLPSTIAPVTLTLGSLLDDQHWHSVLIELLDTQVNFTVDKHTHHFQAKGDSSNLDLNFEISFGGILSPGRSRAFTRKSFHGCLENLYYNGVDVTELAKKHKPQILMMELAHGLQDQNLKISLTVCHQTTQ

SEQ ID NO: 2987 - protein, 223 aa, Homo sapiens
MQWAVGRRWAWAALLLAVAAVLTQVVWLWLGTQSFVFQREEIAQLARQYAGLDHELAFSRLIVELRRLHPGHVLPDEELQWVFVNAGGWMGAMCLLHASLSEYVLLFGTALGSRGHSGRYWAEISDTIISGTFHQWREGTTKSEVFYPGETVVHGPGEATAVEWGPNTWMVEYGRGVIPSTLAFALADTVFSTQDFLTLFYTLRSYARGLRLELTTYLFGQDP

SEQ ID NO: 2988 - protein, 784 aa, Homo sapiens
MGNEHISVHPENSDCIQADVNSDDYKGDKVYHPETGRKNEKEKVGRKGKHLLTVDQKRGEHVVCGSTRNNESESTLDLEGFQNPTAKECEGLATLDNKADLDGESTEGTEELEDSLNHFTHSVQGQTSEMIPSDEEEEDDEEEEEEEEPRLTINQREDEDGMANEDELDNTYTGSGDEDALSEEDDELGEAAKYEDVKECGKHVERALLVELNKISLKEENVCEEKNSPVDQSDFFYEFSKLIFTKGKSPTVVCSLCKREGHLKKDCPEDFKRIQLEPLPPLTPKFLNILDQVCIQCYKDFSPTIIEDQAREHIRQNLESFIRQDFPGTKLSLFGSSKNGFGFKQSDLDVCMTINGLETAEGLDCVRTIEELARVLRKHSGLRNILPITTAKVPIVKFFHLRSGLEVDISLYNTLALHNTRLLSAYSAIDPRVKYLCYTMKVFTKMCDIGDASRGSLSSYAYTLMVLYFLQQRNPPVIPVLQEIYKGEKKPEIFVDGWNIYFFDQIDELPTYWSECGKNTESVGQLWLGLLRFYTEEFDFKEHVISIRRKSLLTTFKKQWTSKYIVIEDPFDLNHNLGAGLSRKMTNFIMKAFINGRRVFGIPVKGFPKDYPSKMEYFFDPDVLTEGELAPNDRCCRICGKIGHFMKDCPMRRKVRRRRDQEDALNQRYPENKEKRSKEDKEIHNKYTEREVSTKEDKPIQCTPQKAKPMRAAADLGREKILRPPVEKWKRQDDKDLREKRCFICGREGHIKKECPQFKGSSGSLSSKYMTQGKASAKRTQQES

SEQ ID NO: 2989 - protein, 1118 aa, Homo sapiens
MGVQGFQDYIEKHCPSAVVPVELQKLARGSLVGGGRQRPPQTPLRLLVDADNCLHRLYGGFYTDWVSGGQWNHMLGYLAALAKACFGGNIELFVFFNGALEKARLHEWVKRQGNERQTAQQIVSHVQNKGTPPPKVWFLPPVCMAHCIRLALIRFHVKVAQSIEDHHQEVIGFCRENGFHGLVAYDSDYALCNIPYYFSAHALKLSRNGKSLTTSQYLMHEVAKQLDLNPNRFPIFAALLGNHILPDEDLASFHWSLLGPEHPLASLKVRAHQLVLPPCDVVIKAVADYVRNIQDTSDLDAIAKDVFQHSQSRTDDKVIRFKRAIGYYSATSKPMSFHPPHYLAARPGPFGMPGMVPPHVPPQMLNIPQTSLQAKPVAPQVPSPGGAPGQGPYPYSLSEPAPLTLDTSGKNLTEQNSYSNIPHEGKHTPLYERSSPINPAQSGSPNHVDSAYFPGSSTSSSSDNDEGSGGATNHISGNKIGWEKTGSHSEPQARGDPGDQTKAEGSSTASSGSQLAEGKGSQMGTVQPIPCLLSMPTRNHMDITTPPLPPVAPEVLRVAEHRHKKGLMYPYIFHVLTKGEIKIAVSIEDEANKDLPPAALLYRPVRQYVYGVLFSLAESRKKTERLAFRKNRLPPEFSPVIIKEWAAYKGKSPQTPELVEALAFREWTCPNLKRLWLGKAVEDKNRRMRAFLACMRSDTPAMLNPANVPTHLMVLCCVLRYMVQWPGARILRRQELDAFLAQALSPKLYEPDQLQELKIENLDPRGIQLSALFMSGVDMALFANDACGQPIPWEHCCPWMYFDGKLFQSKLLKASREKTPLIDLCDGQADQAAKVEKMRQSVLEGLSFSRQSHTLPFPPPPALPFYPASAYPRHFGPVPPSQGRGRGFAGVCGFGGPYGETVATGPYRAFRVAAASGHCGAFSGSDSSRTSKSQGGVQPIPSQGGKLEIAGTVVGHWAGSRRGRGGRGPFPLQVVSVGGPARGRPRGVISTPVIRTFGRGGRYYGRGYKNQAAIQGRPPYAASAEEVAKELKSKSGESKSSAMSSDGSLAENGVMAEEKPAPQMNGSTGDARAPSHSESALNNDSKTCNTNPHLNALSTDSACRREAALEAAVLNKEE

SEQ ID NO: 2990 - protein, 566 aa, Homo sapiens
MDIQLDPARDDLPLMANTSHILVKHYVLDLDVDFESQVIEGTIVLFLEDGNRFKKQNSSIEEACQSESNKACKFGMPEPCHIPVTNARTFSSEMEYNDFAICSKGEKDTSDKDGNHDNQEHASGISSSKYCCDTGNHGSEDFLLVLDCCDLSVLKVEEVDVAAVPGLEKFTRSPELTVVSEEFRNQIVRELVTLPANRWREQLDYYARCSQAPGCGELLFDTDTWSLQIRKTGAQTATDFPHAIRIWYKTKPEGRSVTWTSDQSGRPCVYTVGSPINNRALFPCQEPPVAMSTWQATVRAAASFVVLMSGENSAKPTQLWEECSSWYYYVTMPMPASTFTIAVGCWTEMKMETWSSNDLATERPFSPSEANFRHVGVCSHMEYPCRFQNASATTQEIIPHRVFAPVCLTGACQETLLRLIPPCLSAAHSVLGAHPFSRLDVLIVPANFPSLGMASPHIMFLSQSILTGGNHLCGTRLCHEIAHAWFGLAIGARDWTEEWLSEGFATHLEDVFWATAQQLAPYEAREQQELRACLRWRRLQDEMQCSPEEMQVLRFPHVGGCSGSFS

SEQ ID NO: 2991 - protein, 2506 aa, Homo sapiens
MEVLQCDGCDFRAPSYEDLKAHIQDVHTAFLQPTDVAEDNVNELRCGSVNASNQTEVEFSSIKDEFAIAEDLSGQNATSLGTGGYYGHSPGYYGQHIAANPKPTNKFFQCKFCVRYFRSKNLLIEHTRKVHGAQAEGSSSGPPVPGSLNYNIMMHEGFGKVFSCQFCTYKSPRRARIIKHQKMYHKNNLKETTAPPPAPAPMPDPVVPPVSLQDPCKELPAEVVERSILESMVKPLTKSRGNFCCEWCSYQTPRRERWCDHMMKKHRSMVKILSSLRQQQEGTNLPDVPNKSAPSPTSNSTYLTMNAASREIPNTTVSNFRGSMGNSIMRPNSSASKFSPMSYPQMKPKSPHNSGLVNLTERSRYGMTDMTNSSADLETNSMLNDSSSDEELNEIDSENGLSAMDHQTSGLSAEQLMGSDGNKLLETKGIPFRRFMNRFQCPFCPFLTMHRRSISRHIENIHLSGKTAVYKCDECPFTCKSSLKLGAHKQCHTGTTSDWDAVNSQSESISSSLNEGVVSYESSSINGRKSGVMLDPLQQQQPPQPPPPPPPPPPSQPQPLQQPQPPQLQPPHQVPPQPQTQPPPTQQPQPPTQAAPLHPYKCTMCNYSTTTLKGLRVHQQHKHSFCDNLPKFEGQPSSLPLENETDSHPSSSNTVKKSQTSILGLSSKNNFVAKASRKLANDFPLDLSPVKKRTRIDEIASNLQSKINQTKQQEDAVINVEDDEEEEEDNEVEIEVELDREEEPTEPIIEVPTSFSAQQIWVRDTSEPQKEPNFRNITHDYNATNGAEIELTLSEDEEDYYGSSTNLKDHQVSNTALLNTQTPIYGTEHNSENTDFGDSGRLYYCKHCDFNNKSARSVSTHYQRMHPYIKFSFRYILDPNDHSAVYRCLECYIDYTNFEDLQQHYGEHHPEAMNVLNFDHSDLIYRCRFCSYTSPNVRSLMPHYQRMHPTVKINNAMIFSSYVVEQQEGLNTESQTLREILNSAPKNMATSTPVARGGGLPATFNKNTPKTFTPECENQKDPLVNTVVVYDCDVCSFASPNMHSVLVHYQKKHPEEKASYFRIQKTMRMVSVDRGSALSQLSFEVGAPMSPKMSNMGSPPPPQPPPPDLSTELYYCKHCSYSNRSVVGVLVHYQKRHPEIKVTAKYIRQAPPTAAMMRGVEGPQGSPRPPAPIQQLNRSSSERDGPPVENEMFFCQHCDYGNRTVKGVLIHYQKKHRDFKANADVIRQHTATIRSLCDRNQKKPASCVLVSPSNLERDKTKLRALKCRQCSYTSPYFYALRKHIKKDHPALKATVTSIMRWAFLDGLIEAGYHCEWCIYSHTEPNGLLLHYQRRHPEHYVDYTYMATKLWAGPDPSPPSLTMPAEAKTYRCRDCVFEAVSIWDITNHYQAFHPWAMNGDESVLLDIIKEKDAVEKPILSSEELAGPVNCENSIPTPFPEQEAECPEDARLSPEKSLQLASANPAISSTPYQCTVCQSEYNNLHGLLTHYGKKHPGMKVKAADFAQDIDINPGAVYKCRHCPYINTRIHGVLTHYQKRHPSIKVTAEDFVHDVEQSADISQNDVEETSRIFKQGYGAYRCKLCPYTHGTLEKLKIHYEKYHNQPEFDVFSQSPPKLPVPLEPEMTTEVSPSQVSITEEEVGEEPVSTSHFSTSHLVSHTVFRCQLCKYFCSTRKGIARHYRIKHNNVRAQPEGKNNLFKCALCAYTNPIRKGLAAHYQKRHDIDAYYTHCLAASRTISDKPNKVIIPSPPKDDSPQLSEELRRAVEKKKCSLCSFQSFSKKGIVSHYMKRHPGVFPKKQHASKLGGYFTAVYADEHEKPTLMEEEERGNFEKAEVEGEAQEIEWLPFRCIKCFKLSFSTAELLCMHYTDHHSRDLKRDFIILGNGPRLQNSTYQCKHCDSKLQSTAELTSHLNIHNEEFQKRAKRQERRKQLLSKQKYADGAFADFKQERPFGHLEEVPKIKERKVVGYKCKFCVEVHPTLRAICNHLRKHVQYGNVPAVSAAVKGLRSHERSHLALAMFTREDKYSCQYCSFVSAFRHNLDRHMQTHHGHHKPFRCKLCSFKSSYNSRLKTHILKAHAGEHAYKCSWCSFSTMTISQLKEHSLKVHGKALTLPRPRIVSLLSSHSHHSSQKATPAEEVEDSNDSSYSEPPDVQQQLNHYQSAALARNNSRVSPVPLSGAAAGTEQKTEAVLHCEFCEFSSGYIQSIRRHYRDKHGGKKLFKCKDCSFYTGFKSAFTMHVEAGHSAVPEEGPKDLRCPLCLYHTKYKRNMIDHIVLHREERVVPIEVCRSKLSKYLQGVVFRCDKCTFTCSSDESLQQHIEKHNELKPYKCQLCYYETKHTEELDSHLRDEHKVSRNFELVGRVNLDQLEQMKEKMESSSSDDEDKEEEMNSKAEDRELMRFSDHGAALNTEKRFPCEFCGRAFSQGSEWERHVLRHGMALNDTKQVSREEIHPKEIMENSVKMPSIEEKEDDEAIGIDFSLKNETVAICVVTADKSLLENAEAKKE

SEQ ID NO: 2992 - protein, 135 aa, Homo sapiens
MPGRWRWQRDMHPARKLLSLLFLILMGTELTQVLPTNPEESWQVYSSAQDSEGRCICTVVAPQQTMCSRDARTKQLRQLLEKVQNMSQSIEVLDRRTQRDLQYVEKMENQMKGLESKFKQVEESHKQHLARQFKG

SEQ ID NO: 2993 - protein, 421 aa, Homo sapiens
MPFLHGFRRIIFEYQPLVDAILGSLGIQDPERQESLDRPSYVASEESRILVLTELLERKAHSPFYQEGVSNALLKMAELGLTRAADVLLRHGANLNFEDPVTYYTALHIAVLRNQPDMVELLVHHGADVNRRDRIHESSPLDLASEEPERLPCLQRLLDLGADVNAADKHGKTALLHALASSDGVQIHNTENIRLLLEGGADVKATTKDGDTVFTCIIFLLGETVGGDKEEAQMINRFCFQVTRLLLAHGADPSECPAHESLTHICLKSFKLHFPLLRFLLESGAAYNCSLHGASCWSGFHIIFERLCSHPGCTEDESHADLLRKAETVLDLMVTNSQKLQLPENFDIHPVGSLAEKIQALHFSLRQLESYPPPLKHLCRVAIRLYLQPWPVDVKVKALPLPDRLKWYLLSEHSGSVEDDI

SEQ ID NO: 2994 - protein, 198 aa, Homo sapiens
MPLGLLWLGLALLGALHAQAQDSTSDLIPAPPLSKVPLQQNFQDNQFQGKWYVVGLAGNAILREDKDPQKMYATIYELKEDKSYNVTSVLFRKKKCDYWIRTFVPGCQPGEFTLGNIKSYPGLTSYLVRVVSTNYNQHAMVFFKKVSQNREYFKITLYGRTKELTSELKENFIRFSKSLGLPENHIVFPVPIDQCIDG

SEQ ID NO: 2995 - protein, 180 aa, Homo sapiens
MLCLLLTLGVALVCGVPAMDIPQTKQDLELPKLAGTWHSMAMATNNISLMATLKAPLRVHITSLLPTPEDNLEIVLHRWENNSCVEKKVLGEKTENPKKFKINYTVANEATLLDTDYDNFLFLCLQDTTTPIQSMMCQYLARVLVEDDEIMQGFIRAFRPLPRHLWYLLDLKQMEEPCRF

SEQ ID NO: 2996 - protein, 176 aa, Homo sapiens
MALLLLSLGLSLIAAQEFDPHTVMQRNYNVARVSGVWYSIFMASDDLNRIKENGDLRVFVRNIEHLKNGSLIFDFEYMVQGECVAVVVVCEKTEKNGEYSINYEGQNTVAVSETDYRLFITFHLQNFRNGTETHTLALYETCEKYGLGSQNIIDLTNKDPCYSKHYRSPPRPPMRW

SEQ ID NO: 2997 - protein, 587 aa, Homo sapiens
MSQMLHIEIPNFGNTVLGCLNEQRLLGLYCDVSIVVKGQAFKAHRAVLAASSLYFRDLFSGNSKSAFELPGSVPPACFQQILSFCYTGRLTMTASEQLVVMYTAGFLQIQHIVERGTDLMFKVSSPHCDSQTAVIEDAGSEPQSPCNQLQPAAAAAAPYVVSPSVPIPLLTRVKHEAMELPPAGPGLAPKRPLETGPRDGVAVAAGAAVAAGTAPLKLPRVSYYGVPSLATLIPGIQQMPYPQGERTSPGASSLPTTDSPTSYHNEEDEEDDEAYDTMVEEQYGQMYIKASGSYAVQEKPEPVPLESRSCVLIRRDLVALPASLISQIGYRCHPKLYSEGDPGEKLELVAGSGVYITRGQLMNCHLCAGVKHKVLLRRLLATFFDRNTLANSCGTGIRSSTSDPSRKPLDSRVLNAVKLYCQNFAPSFKESEMNVIAADMCTNARRVRKRWLPKIKSMLPEGVEMYRTVMGSAAASVPLDPEFPPAAAQVFEQRIYAERRGDAATIVALRTDAVNVDLSAAANPAFDAGEEVDGAGSVIQEVAAPEPLPADGQSPPQPFEQGGGGPSRPQTPAAAARRPEGTYAGTL

SEQ ID NO: 2998 - protein, 445 aa, Homo sapiens
MSELTKELMELVWGTKSSPGLSDTIFCRWTQGFVFSESEGSALEQFEGGPCAVIAPVQAFLLKKLLFSSEKSSWRDCSEEEQKELLCHTLCDILESACCDHSGSYCLVSWLRGKTTEETASISGSPAESSCQVEHSSALAVEELGFERFHALIQKRSFRSLPELKDAVLDQYSMWGNKFGVLLFLYSVLLTKGIENIKNEIEDASEPLIDPVYGHGSQSLINLLLTGHAVSNVWDGDRECSGMKLLGIHEQAAVGFLTLMEALRYCKVGSYLKSPKFPIWIVGSETHLTVFFAKDMALVAPEAPSEQARRVFQTYDPEDNGFIPDSLLEDVMKALDLVSDPEYINLMKNKLDPEGLGIILLGPFLQEFFPDQGSSGPESFTVYHYNGLKQSNYNEKVMYVEGTAVVMGFEDPMLQTDDTPIKRCLQTKWPYIELLWTTDRSPSLN

SEQ ID NO: 2999 - protein, 287 aa, Homo sapiens
MEVMEGPLNLAHQQSRRADRLLAAGKYEEAISCHKKAAAYLSEAMKLTQSEQAHLSLELQRDSHMKQLLLIQERWKRAQREERLKAQQNTDKDAAAHLQTSHKPSAEDAEGQSPLSQKYSPSTEKCLPEIQGIFDRDPDTLLYLLQQKSEPAEPCIGSKAPKDDKTIIEEQATKIADLKRHVEFLVAENERLRKENKQLKAEKARLLKGPIEKELDVDADFVETSELWSLPPHAETATASSTWQKFAANTGKAKDIPIPNLPPLDFPSPELPLMELSEDILKGFMNN

SEQ ID NO: 3000 - protein, 495 aa, Homo sapiens
MATTATCTRFTDDYQLFEELGKGAFSVVRRCVKKTSTQEYAAKIINTKKLSARDHQKLEREARICRLLKHPNIVRLHDSISEEGFHYLVFDLVTGGELFEDIVAREYYSEADASHCIHQILESVNHIHQHDIVHRDLKPENLLLASKCKGAAVKLADFGLAIEVQGEQQAWFGFAGTPGYLSPEVLRKDPYGKPVDIWACGVILYILLVGYPPFWDEDQHKLYQQIKAGAYDFPSPEWDTVTPEAKNLINQMLTINPAKRITADQALKHPWVCQRSTVASMMHRQETVECLRKFNARRKLKGAILTTMLVSRNFSAAKSLLNKKSDGGVKEPQTTVVHNATDGIKGSTESCNTTTEDEDLKVRKQEIIKITEQLIEAINNGDFEAYTKICDPGLTSFEPEALGNLVEGMDFHKFYFENLLSKNSKPIHTTILNPHVHVIGEDAACIAYIRLTQYIDGQGRPRTSQSEETRVWHRRDGKWLNVHYHCSGAPAAPLQ

SEQ ID NO: 3001 - protein, 558 aa, Homo sapiens
MYRYLGEALLLSRAGPAALGSASADSAALLGWARGQPAAAPQPGLALAARRHYSEAVADREDDPNFFKMVEGFFDRGASIVEDKLVEDLRTRESEEQKRNRVRGILRIIKPCNHVLSLSFPIRRDDGSWEVIEGYRAQHSQHRTPCKGGIRYSTDVSVDEVKALASLMTYKCAVVDVPFGGAKAGVKINPKNYTDNELEKITRRFTMELAKKGFIGPGIDVPAPDMSTGEREMSWIADTYASTIGHYDINAHACVTGKPISQGGIHGRISATGRGVFHGIENFINEASYMSILGMTPGFGDKTFVVQGFGNVGLHSMRYLHRFGAKCIAVGESDGSIWNPDGIDPKELEDFKLQHGSILGFPKAKPYEGSILEADCDILIPAASEKQLTKSNAPRVKAKIIAEGANGPTTPEADKIFLERNIMVIPDLYLNAGGVTVSYFEWLKNLNHVSYGRLTFKYERDSNYHLLMSVQESLERKFGKHGGTIPIVPTAEFQDRISGASEKDIVHSGLAYTMERSARQIMRTAMKYNLGLDLRTAAYVNAIEKVFKVYNEAGVTFT

SEQ ID NO: 3002 - protein, 778 aa, Homo sapiens
MPAFLGLKCLGKLCSSEKSKVTSSERTSARGSNRKRLIVEDRRVSGTSFTAHRRATITHLLYLCPKDYCPRGRVCNSVDPFVAHPQDPHHPSEKPVIHCHKCGEPCKGEVLRVQTKHFHIKCFTCKVCGCDLAQGGFFIKNGEYLCTLDYQRMYGTRCHGCGEFVEGEVVTALGKTYHPNCFACTICKRPFPPGDRVTFNGRDCLCQLCAQPMSSSPKETTFSSNCAGCGRDIKNGQALLALDKQWHLGCFKCKSCGKVLTGEYISKDGAPYCEKDYQGLFGVKCEACHQFITGKVLEAGDKHYHPSCARCSRCNQMFTEGEEMYLQGSTVWHPDCKQSTKTEEKLRPTRTSSESIYSRPGSSIPGSPGHTIYAKVDNEILDYKDLAAIPKVKAIYDIERPDLITYEPFYTSGYDDKQERQSLGESPRTLSPTPSAEGYQDVRDRMIHRSTSQGSINSPVYSRHSYTPTTSRSPQHFHRPGNEPSSGRNSPLPYRPDSRPLTPTYAQAPKHFHVPDQGINIYRKPPIYKQHAALAAQSKSSEDIIKFSKFPAAQAPDPSETPKIETDHWPGPPSFAVVGPDMKRRSSGREEDDEELLRRRQLQEEQLMKLNSGLGQLILKEEMEKESRERSSLLASRYDSPINSASHIPSSKTASLPGYGRNGLHRPVSTDFAQYNSYGDVSGGVRDYQTLPDGHMPAMRMDRGVSMPNMLEPKIFPYEMLMVTNRGRNKILREVDRTRLERHLAPEVFREIFGMSIQEFDRLPLWRRNDMKKKAKLF

SEQ ID NO: 3003 - protein, 674 aa, Homo sapiens
MSSDASQGVITTPPPPSMPHKERYFDRINENDPEYIRERNMSPDLRQDFNMMEQRKRVTQILQSPAFREDLECLIQEQMKKGHNPTGLLALQQIADYIMANSFSGFSSPPLSLGMVTPINDLPGADTSSYVKGEKLTRCKLASLYRLVDLFGWAHLANTYISVRISKEQDHIIIIPRGLSFSEATASNLVKVNIIGEVVDQGSTNLKIDHTGFSPHAAIYSTRPDVKCVIHIHTLATAAVSSMKCGILPISQESLLLGDVAYYDYQGSLEEQEERIQLQKVLGPSCKVLVLRNHGVVALGETLEEAFHYIFNVQLACEIQVQALAGAGGVDNLHVLDFQKYKAFTYTVAASGGGGVNMGSHQKWKVGEIEFEGLMRTLDNLGYRTGYAYRHPLIREKPRHKSDVEIPATVTAFSFEDDTVPLSPLKYMAQRQQREKTRWLNSPNTYMKVNVPEESRNGETSPRTKITWMKAEDSSKVSGGTPIKIEDPNQFVPLNTNPNEVLEKRNKIREQNRYDLKTAGPQSQLLAGIVVDKPPSTMQFEDDDHGPPAPPNPFSHLTEGELEEYKRTIERKQQGLEENHELFSKSFISMEVPVMVVNGKDDMHDVEDELAKRVSRLSTSTTIENIEITIKSPEKIEEVLSPEGSPSKSPSKKKKKFRTPSFLKKNKKKEKVEA

SEQ ID NO: 3004 - protein, 560 aa, Homo sapiens
MFARMSDLHVLLLMALVGKTACGFSLMSLLESLDPDWTPDQYDYSYEDYNQEENTSSTLTHAENPDWYYTEDQADPCQPNPCEHGGDCLVHGSTFTCSCLAPFSGNKCQKVQNTCKDNPCGRGQCLITQSPPYYRCVCKHPYTGPSCSQVVPVCRPNPCQNGATCSRHKRRSKFTCACPDQFKGKFCEIGSDDCYVGDGYSYRGKMNRTVNQHACLYWNSHLLLQENYNMFMEDAETHGIGEHNFCRNPDADEKPWCFIKVTNDKVKWEYCDVSACSAQDVAYPEESPTEPSTKLPGFDSCGKTEIAERKIKRIYGGFKSTAGKHPWQASLQSSLPLTISMPQGHFCGGALIHPCWVLTAAHCTDIKTRHLKVVLGDQDLKKEEFHEQSFRVEKIFKYSHYNERDEIPHNDIALLKLKPVDGHCALESKYVKTVCLPDGSFPSGSECHISGWGVTETGKGSRQLLDAKVKLIANTLCNSRQLYDHMIDDSMICAGNLQKPGQDTCQGDSGGPLTCEKDGTYYVYGIVSWGLECGKRPGVYTQVTKFLNWIKATIKSESGF

SEQ ID NO: 3005 - protein, 154 aa, Homo sapiens
MVALKGVPALLSPELLYALARMGHGDEIVLADLNFPASSICQCGPMEIRADGLGIPQLLEAVLKLLPLDTYVESPAAVMELVPSDKERGLQTPVWTEYESILRRAGCVRALAKIERFEFYERAKKAFAVVATGETALYGNLILRKGVLALNPLL

SEQ ID NO: 3006 - protein, 511 aa, Homo sapiens [sequence omitted]

SEQ ID NO: 3007 - protein, 1664 aa, Homo sapiens
MAARRGRRDGVAPPPSGGPGPDPGGGARGSGWGSRSQAPYGTLGAVSGGEQVLLHEEAGDSGFVSLSRLGPSLRDKDLEMEELMLQDETLLGTMQSYMDASLISLIEDFGSLGESRLSLEDQNEVSLLTALTEILDNADSENLSPFDSIPDSELLVSPREGSSLHKLLTLSRTPPERDLITPVDPLGPSTGSSRGSGVEMSLPDPSWDFSPPSFLETSSPKLPSWRPPRSRPRWGQSPPPQQRSDGEEEEEVASFSGQILAGELDNCVSSIPDFPMHLACPEEEDKATAAEMAVPAAGDESISSLSELVRAMHPYCLPNLTHLASLEDELQEQPDDLTLPEGCVVLEIVGQAATAGDDLEIPVVVRQVSPGPRPVLLDDSLETSSALQLLMPTLESETEAAVPKVTLCSEKEGLSLNSEEKLDSACLLKPREVVEPVVPKEPQNPPANAAPGSQRARKGRKKKSKEQPAACVEGYARRLRSSSRGQSTVGTEVTSQVDNLQKQPQEELQKESGPLQGKGKPRAWARAWAAALENSSPKNLERSAGQSSPAKEGPLDLYPKLADTIQTNPIPTHLSLVDSAQASPMPVDSVEADPTAVGPVLAGPVPVDPGLVDLASTSSELVEPLPAEPVLINPVLADSAAVDPAVVPISDNLPPVDAVPSGPAPVDLALVDPVPNDLTPVDPVLVKSRPTDPRRGAVSSALGGSAPQLLVESESLDPPKTIIPEVKEVVDSLKIESGTSATTHEARPRPLSLSEYRRRRQQRQAETEERSPQPPTGKWPSLPETPTGLADIPCLVIPPAPAKKTALQRSPETPLEICLVPVGPSPASPSPEPPVSKPVASSPTEQVPSQEMPLLARPSPPVQSVSPAVPTPPSMSAALPFPAGGLGMPPSLPPPPLQPPSLPLSMGPVLPDPFTHYAPLPSWPCYPHVSPSGYPCLPPPPTVPLVSGTPGAYAVPPTCSVPWAPPPAPVSPYSSTCTYGPLGWGPGPQHAPFWSTVPPPPLPPASIGRAVPQPKMESRGTPAGPPENVLPLSMAPPLSLGLPGHGAPQTEPTKVEVKPVPASPHPKHKVSALVQSPQMKALACVSAEGVTVEEPASERLKPETQETRPREKPPLPATKAVPTPRQSTVPKLPAVHPARLRKLSFLPTPRTQGSEDVVQAFISEIGIEASDLSSLLEQFEKSEAKKECPPPAPADSLAVGNSGGVDIPQEKRPLDRLQAPELANVAGLTPPATPPHQLWKPLAAVSLLAKAKSPKSTAQEGTLKPEGVTEAKHPAAVRLQEGVHGPSRVHVGSGDHDYCVRSRTPPKKMPALVIPEVGSRWNVKRHQDITIKPVLSLGPAAPPPPCIAASREPLDHRTSSEQADPSAPCLAPSSLLSPEASPCRNDMNTRTPPEPSAKQRSMRCYRKACRSASPSSQGWQGRRGRNSRSVSSGSNRTSEASSSSSSSSSSSRSRSRSLSPPHKRWRRSSCSSSGRSRRCSSSSSSSSSSSSSSSSSSSSRSRSRSPSPRRRSDRRRRYSSYRSHDHYQRQRVLQKERAIEERRVVFIGKIPGRMTRSELKQRFSVFGEIEECTIHFRVQGDNYGFVTYRYAEEAFAAIESGHKLRQADEQPFDLCFGGRRQFCKRSYSDLDSNREDFDPAPVKSKFDSLDFDTLLKQAQKNLRR

SEQ ID NO: 3008 - protein, 547 aa, Homo sapiens
MAMGLFRVCLVVVTAIINHPLLFPRENATVPENEEEIIRKMQAHQEKLQLEQLRLEEEVARLAAEKEALEQVAEEGRQQNETRVAWDLWSTLCMILFLMIEVWRQDHQEGPSPECLGGEEDELPGLGGAPLQGLTLPNKATLGHFYERCIRGATADAARTREFLEGFVDDLLEALRSLCNRDTDMEVEDFIGVDSMYENWQVDRPLLCHLFVPFTPPEPYRFHPELWCSGRSVPLDRQGYGQIKVVRADGDTLSCICGKTKLGEDMLCLLHGRNSMAPPCGDMENLLCATDSLYLDTMQVMKWFQTALTRAWKGIAHKYEFDLAFGQLDSPGSLKIKFRSGKFMPFNLIPVIQCDDSDLYFVSHLPREPSEGTPASSTDWLLSFAVYERHFLRTTLKALPEGACHLSCLQIASFLLSKQSRLTGPSGLSSYHLKTALLHLLLLRQAADWKAGQLDARLHELLCFLEKSLLQKKLHHFFIGNRKVPEAMGLPEAVLRAEPLNLFRPFVLQRSLYRKTLDSFYEMLKNAPALISEYSLHVPSDQPTPKS

SEQ ID NO: 3009 - protein, 314 aa, Homo sapiens
MASRSKRRAVESGVPQPPDPPVQRDEEEEKEVENEDEDDDDSDKEKDEEDEVIDEEVNIEFEAYSLSDNDYDGIKKLLQQLFLKAPVNTAELTDLLIQQNHIGSVIKQTDVSEDSNDDMDEDEVFGFISLLNLTERKGTQCVEQIQELVLRFCEKNCEKSMVEQLDKFLNDTTKPVGLLLSERFINVPPQIALPMYQQLQKELAGAHRTNKPCGKCYFYLLISKTFVEAGKNNSKKKPSNKKKAALMFANAEEEFFYEKAILKFNYSVQEESDTCLGGKWSFDDVPMTPLRTVMLIPGDKMNEIMDKLKEYLSV

SEQ ID NO: 3010 - protein, 185 aa, Homo sapiens
MKLVSVALMYLGSLAFLGADTARLDVASEFRKKWNKWALSRGKRELRMSSSYPTGLADVKAGPAQTLIRPQDMKGASRSPEDSSPDAARIRVKRYRQSMNNFQGLRSFGCRFGTCTVQKLAHQIYQFTDKDKDNVAPRSKISPQGYGRRRRRSLPEAGPGRTLVSSKPQAHGAPAPPSGSAPHFL

SEQ ID NO: 3011 - protein, 197 aa, Homo sapiens
MAALGEPVRLERDICRAIELLEKLQRSGEVPPQKLQALQRVLQSEFCNAVREVYEHVYETVDISSSPEVRANATAKATVAAFAASEGHSHPRVVELPKTEEGLGFNIMGGKEQNSPIYISRIIPGGIADRHGGLKRGDQLLSVNGVSVEGEHHEKAVELLKAAQGKVKLVVRYTPKVLEEMESRFEKMRSAKRRQQT

SEQ ID NO: 3012 - protein, 130 aa, Homo sapiens
MRLFTGIVFCSLVMGVTSESWRSFFKEALQGVGDMGRAYWDIMISNHQNSNRYLYARGNYDAAQRGPGGVWAAKLISRSRVYLQGLIDCYLFGNSSTVLEDSKSNEKAEEWGRSGKDPDRFRPDGLPKKY

SEQ ID NO: 3013 - protein, 726 aa, Homo sapiens
MADSSGQQGKGRRVQPQWSPPAGTQPCRLHLYNSLTRNKEVFIPQDGKKVTWYCCGPTVYDASHMGHARSYISFDILRRVLKDYFKFDVFYCMNITDIDDKIIKRARQNHLFEQYREKRPEAAQLLEDVQAALKPFSVKLNETTDPDKKQMLERIQHAVQLATEPLEKAVQSRLTGEEVNSCVEVLLEEAKDLLSDWLDSTLGCDVTDNSIFSKLPKFWEGDFHRDMEALNVLPPDVLTRVSEYVPEIVNFVQKIVDNGYGYVSNGSVYFDTAKFASSEKHSYGKLVPEAVGDQKALQEGEGDLSISADRLSEKRSPNDFALWKASKPGEPSWPCPWGKGRPGWHIECSAMAGTLLGASMDIHGGGFDLRFPHHDNELAQSEAYFENDCWVRYFLHTGHLTIAGCKMSKSLKNFITIKDALKKHSARQLRLAFLMHSWKDTLDYSSNTMESALQYEKFLNEFFLNVKDILRAPVDITGQFEKWGEEEAELNKNFYDKKTAIHKALCDNVDTRTVMEEMRALVSQCNLYMAARKAVRKRPNQALLENIALYLTHMLKIFGAVEEDSSLGFPVGGPGTSLSLEATVMPYLQVLSEFREGVRKIAREQKVPEILQLSDALRDNILPELGVRFEDHEGLPTVVKLVDRNTLLKEREEKRRVEEEKRKKKEEAARRKQEQEAAKLAKMKIPPSEMFLSETDKYSKFDENVSMVCPHMTWRAKSSAKGKPRS

SEQ ID NO: 3014 - protein, 91 aa, Homo sapiens
MKLAVTLTLVTLALCCSSASAEICPSFQRVIETLLMDTPSSYEAAMELFSPDQDMREAGAQLKKLVDTLPQKPRESIIKLMEKIAQSSLCN

SEQ ID NO: 3015 - protein, 488 aa, Homo sapiens
MTSPVLVDIREEVTCPICLELLTEPLSIDCGHSFCQACITPNGRESVIGQEGERSCPVCQTSYQPGNLRPNRHLANIVRRLREVVLGPGKQLKAVLCADHGEKLQLFCQEDGKVICWLCERSQEHRGHHTFLVEEVAQEYQEKFQESLKKLKNEEQEAEKLTAFIREKKTSWKNQMEPERCRIQTEFNQLRNILDRVEQRELKKLEQEEKKGLRIIEEAENDLVHQTQSLRELISDLERRCQGSTMELLQDVSDVTERSEFWTLRKPEALPTKLRSMFRAPDLKRMLRVCRELTDVQSYWVDVTLNPHTANLNLVLAKNRRQVRFVGAKVSGPSCLEKHYDCSVLGSQHFSSGKHYWEVDVAKKTAWILGVCSNSLGPTFSFNHFAQNHSAYSRYQPQSGYWVIGLQHNHEYRAYEDSSPSLLLSMTVPPRRVGVFLDYEAGTVSFYNVTNHGFPIYTFSKYYFPTTLCPYFNPCNCVIPMTLRRPSS

SEQ ID NO: 3016 - protein, 312 aa, Homo sapiens
MESALPAAGFLYWVGAGTVAYLALRISYSLFTALRVWGVGNEAGVGPGLGEWAVVTGSTDGIGKSYAEELAKHGMKVVLISRSKDKLDQVSSEIKEKFKVETRTIAVDFASEDIYDKIKTGLAGLEIGILVNNVGMSYEYPEYFLDVPDLDNVIKKMININILSVCKMTQLVLPGMVERSKGAILNISSGSGMLPVPLLTIYSATKTFVDFFSQCLHEEYRSKGVFVQSVLPYFVATKLAKIRKPTLDKPSPETFVKSAIKTVGLQSRTNGYLIHALMGSIISNLPSWIYLKIVMNMNKSTRAHYLKKTKKN

SEQ ID NO: 3017 - protein, 139 aa, Homo sapiens
MDKFWWHAAWGLCLVPLSLAQIDLNITCRFAGVFHVEKNGRYSISRTEAADLCKAFNSTLPTMAQMEKALSIGFETCSLHCSQQSKKVWAEEKASDQQWQWSCGGQKAKWTQRRGQQVSGNGAFGEQGVVRNSRPVYDS

SEQ ID NO: 3018 - protein, 500 aa, Homo sapiens
MASRLTLLTLLLLLLAGDRASSNPNATSSSSQDPESLQDRGEGKVATTVISKMLFVEPILEVSSLPTTNSTTNSATKITANTTDEPTTQPTTEPTTQPTIQPTQPTTQLPTDSPTQPTTGSFCPGPVTLCSDLESHSTEAVLGDALVDFSLKLYHAFSAMKKVETNMAFSPFSIASLLTQVLLGAGENTKTNLESILSYPKDFTCVHQALKGFTTKGVTSVSQIFHSPDLAIRDTFVNASRTLYSSSPRVLSNNSDANLELINTWVAKNTNNKISRLLDSLPSDTRLVLLNAIYLSAKWKTTFDPKKTRMEPFHFKNSVIKVPMMNSKKYPVAHFIDQTLKAKVGQLQLSHNLSLVILVPQNLKHRLEDMEQALSPSVFKAIMEKLEMSKFQPTLLTLPRIKVTTSQDMLSIMEKLEFFDFSYDLNLCGLTEDPDLQVSAMQHQTVLELTETGVEAAAASAISVARTLLVFEVQQPFLFVLWDQQHKFPVFMGRVYDPRA

SEQ ID NO: 3019 - protein, 709 aa, Homo sapiens
MAETLEFNDVYQEVKGSMNDGRLRLSRQGIIFKNSKTGKVDNIQAGELTEGIWRRVALGHGLKLLTKNGHVYKYDGFRESEFEKLSDFFKTHYRLELMEKDLCVKGWNWGTVKFGGQLLSFDIGDQPVFEIPLSNVSQCTTGKNEVTLEFHQNDDAEVSLMEVRFYVPPTQEDGVDPVEAFAQNVLSKADVIQATGDAICIFRELQCLTPRGRYDIRIYPTFLHLHGKTFDYKIPYTTVLRLFLLPHKDQRQMFFVISLDPPIKQGQTRYHFLILLFSKDEDISLTLNMNEEEVEKRFEGRLTKNMSGSLYEMVSRVMKALVNRKITVPGNFQGHSGAQCITCSYKASSGLLYPLERGFIYVHKPPVHIRFDEISFVNFARGTTTTRSFDFEIETKQGTQYTFSSIEREEYGKLFDFVNAKKLNIKNRGLKEGMNPSYDEYADSDEDQHDAYLERMKEEGKIREENANDSSDDSGEETDESFNPGEEEEDVAEEFDSNASASSSSNEGDSDRDEKKRKQLKKAKMAKDRKSRKKPVEVKKGKDPNAPKRPMSAYMLWLNASREKIKSDHPGISITDLSKKAGEIWKGMSKEKKEEWDRKAEDARRDYEKAMKEYEGGRGESSKRDKSKKKKKVKVKMEKKSTPSRGSSSKSSSRQLSESFKSKEFVSSDESSSGENKSKKKRRRSEDSEEEELASTPPSSEDSASGSDE

SEQ ID NO: 3020 - protein, 296 aa, Homo sapiens
MAVLAPLIALVYSVPRLSRWLAQPYYLLSALLSAAFLLVRKLPPLCHGLPTQREDGNPCDFDWREVEILMFLSAIVMMKNRRSITVEQHIGNIFMFSKVANTILFFRLDIRMGLLYITLCIVFLMTCKPPLYMGPEYIKYFNDKTIDEELERDKRVTWIVEFFANWSNDCQSFAPIYADLSLKYNCTGLNFGKVDVGRYTDVSTRYKVSTSPLTKQLPTLILFQGGKEAMRRPQIDKKGRAVSWTFSEENVIREFNLNELYQRAKKLSKAGDNIPEEQPVASTPTTVSDGENKKDK

SEQ ID NO: 3021 - protein, 559 aa, Homo sapiens
MAPTLQQAYRRRWWMACTAVLENLFFSAVLLGWGSLLIILKNEGFYSSTCPAESSTNTTQDEQRRWPGCDQQDEMLNLGFTIGSFVLSATTLPLGILMDRFGPRPVRLVGSACFTASCTLMALASRDVEALSPLIFLALSLNGFGGICLTFTSLTLPNMFGNLRSTLMALMIGSYASSAITFPGIKLIYDAGVAFVVIMFTWSGLACLIFLNCTLNWPIEAFPAPEEVNYTKKIKLSGLALDHKVTGDLFYTHVTTMGQRLSQKAPSLEDGSDAFMSPQDVRGTSENLPERSVPLRKSLCSPTFLWSLLTMGMTQLRIIFYMAAVNKMLEYLVTGGQEHETNEQQQKVAETVGFYSSVFGAMQLLCLLTCPLIGYIMDWRIKDCVDAPTQGTVLGDARDGVATKSIRPRYCKIQKLTNAISAFTLTNLLLVGFGITCLINNLHLQFVTFVLHTIVRGFFHSACGSLYAAVFPSNHFGTLTGLQSLISAVFALLQQPLFMAMVGPLKGEPFWVNLGLLLFSLLGFLLPSYLFYYRARLQQEYAANGMGPLKVLSGSEVTA

SEQ ID NO: 3022 - protein, 197 aa, Homo sapiens
MFGCLVAGRLVQTAAQQVAEDKFVFDLPDYESINHVVVFMLGTIPFPEGMGGSVYFSYPDSNGMPVWQLLGFVTNGKPSAIFKISGLKSGEGSQHPFGAMNIVRTPSVAQIGISVELLDSMAQQTPVGNAAVSSVDSFTQFTQKMLDNFYNFASSFAVSQAQMTPSPSEMFIPANVVLKWYENFQRRLAQNPLFWKT

SEQ ID NO: 3023 - protein, 500 aa, Homo sapiens
MGTARWLALGSLFALAGLLEGRLVGEEEAGFGECDKFFYAGTPPAGLAADSHVKICQRAEGAERFATLYSTRDRIPVYSAFRAPRPAPGGAEQRWLVEPQIDDPNSNLEEAINEAEAITSVNSLGSKQALNTDYLDSDYQRGQLYPFSLSSDVQVATFTLTNSAPMTQSFQERWYVNLHSLMDRALTPQCGSGEDLYILTGTVPSDYRVKDKVAVPEFVWLAACCAVPGGGWAMGFVKHTRDSDIIEDVMVKDLQKLLPFNPQLFQNNCGETEQDTEKMKKILEVVNQIQDEERMVQSQKSSSPLSSTRSKRSTLLPPEASEGSSSFLGKLMGFIATPFIKLFQLIYYLVVAILKNIVYFLWCVTKQVINGIESCLYRLGSATISYFMAIGEELVSIPWKVLKVVAKVIRALLRILCCLLKAICRVLSIPVRVLVDVATFPVYTMGAIPIVCKDIALGLGGTVSLLFDTAFGTLGGLFQVVFSVCKRIGYKVTFDNSGEL

SEQ ID NO: 3024 - protein, 544 aa, Homo sapiens
MIHVRRHETRRNSKSHVPEQKSRVDWRRTKRSSISQLLDSDEELDSEEFDSDEELDSDESFENDEELDSNKGPDCNKTPGSERELNLSKIQSEGNDSKCLINSGNGSTYEEETNKIKHRNIDLQDQEKHLSQEDNDLNKQTGQIIEDDQEKHLSQEDNDLNKQTGQIIEDDLEEEDIKRGKRKRLSSVMCDSDESDDSDILVRKVGVKRPRRVVEDEGSSVEMEQKTPEKTLAAQKREKLQKLKELSKQRSRQRRSSGRDFEDSEKESCPSSDEVDEEEEEDNYESDEDGDDYIIDDFVVQDEEGDEENKNQQGEKLTTSQLKLVKQNSLYSFSDHYTHFERVVKALLINALDESFLGTLYDGTRQKSYAKDMLTSLHYLDNRFVQPRLESLVSRSRWKEQYKERVENYSNVSIHLKNPENCSCQACGLHRYCKYSVHLSGELYNTRTMQIDNFMSHDKQVFTVGRICASRTRIYHKLKHFKFKLYQECCTIAMTEEVEDEQVKETVERIFRRSKENGWIKEKYGQLEEYLNFADYFQEEKFEL

SEQ ID NO: 3025 - protein, 2769 aa, Homo sapiens
MDVKERKPYRSLTRRRDAERRYTSSSADSEEGKAPQKSYSSSETLKAYDQDARLAYGSRVKDIVPQEAEEFCRTGANFTLRELGLEEVTPPHGTLYRTDIGLPHCGYSMGAGSDADMEADTVLSPEHPVRLWGRSTRSGRSSCLSSRANSNLTLTDTEHENTETDHPGGLQNHARLRTPPPPLSHAHTPNQHHAASINSLNRGNFTPRSNPSPAPTDHSLSGEPPAGGAQEPAHAQENWLLNSNIPLETRNLGKQPFLGTLQDNLIEMDILGASRHDGAYSDGHFLFKPGGTSPLFCTTSPGYPLTSSTVYSPPPRPLPRSTFARPAFNLKKPSKYCNWKCAALSAIVISATLVILLAYFVAMHLFGLNWHLQPMEGQMYEITEDTASSWPVPTDVSLYPSGGTGLETPDRKGKGTTEGKPSSFFPEDSFIDSGEIDVGRRASQKIPPGTFWRSQVFIDHPVHLKFNVSLGKAALVGIYGRKGLPPSHTQFDFVELLDGRRLLTQEARSLEGTPRQSRGTVPPSSHETGFIQYLDSGIWHLAFYNDGKESEVVSFLTTAIESVDNCPSNCYGNGDCISGTCHCFLGFLGPDCGRASCPVLCSGNGQYMKGRCLCHSGWKGAECDVPTNQCIDVACSNHGTCITGTCICNPGYKGESCEEVDCMDPTCSGRGVCVRGECHCSVGWGGTNCETPRATCLDQCSGHGTFLPDTGLCSCDPSWTGHDCSIEICAADCGGHGVCVGGTCRCEDGWMGAACDQRACHPRCAEHGTCRDGKCECSPGWNGEHCTIAHYLDRVVKEGCPGLCNGNGRCTLDLNGWHCVCQLGWRGAGCDTSMETACGDSKDNDGDGLVDCMDPDCCLQPLCHINPLCLGSPNPLDIIQETQVPVSQQNLHSFYDRIKFLVGRDSTHIIPGENPFDGGHACVIRGQVMTSDGTPLVGVNISFVNNPLFGYTISRQDGSFDLVTNGGISIILRFERAPFITQEHTLWLPWDRFFVMETIIMRHEENEIPSCDLSNFARPNPVVSPSPLTSFASSCAEKGPIVPEIQALQEEISISGCKMRLSYLSSRTPGYKSVLRISLTHPTIPFNLMKVHLMVAVEGRLFRKWFAAAPDLSYYFIWDKTDVYNQKVFGLSEAFVSVGYEYESCPDLILWEKRTTVLQGYEIDASKLGGWSLDKHHALNIQSGILHKGNGENQFVSQQPPVIGSIMGNGRRRSISCPSCNGLADGNKLLAPVALTCGSDGSLYVGDFNYIRRIFPSGNVTNILELRNKDFRHSHSPAHKYYLATDPMSGAVFLSDSNSRRVFKIKSTVVVKDLVKNSEVVAGTGDQCLPFDDTRCGDGGKATEATLTNPRGITVDKFGLIYFVDGTMIRRIDQNGIISTLLGSNDLTSARPLSCDSVMDISQVHLEWPTDLAINPMDNSLYVLDNNVVLQISENHQVRIVAGRPMHCQVPGIDHFLLSKVAIHATLESATALAVSHNGVLYIAETDEKKINRIRQVTTSGEISLVAGAPSGCDCKNDANCDCFSGDDGYAKDAKLNTPSSLAVCADGELYVADLGNIRIRFIRKNKPFLNTQNMYELSSPIDQELYLFDTTGKHLYTQSLPTGDYLYNFTYTGDGDITLITDNNGNMVNVRRDSTGMPLWLVVPDGQVYWVTMGTNSALKSVTTQGHELAMMTYHGNSGLLATKSNENGWTTFYEYDSFGRLTNVTFPTGQVSSFRSDTDSSVHVQVETSSKDDVTITTNLSASGAFYTLLQDQVRNSYYIGADGSLRLLLANGMEVALQTEPHLLAGTVNPTVGKRNVTLPIDNGLNLVEWRQRKEQARGQVTVFGRRLRVHNRNLLSLDFDRVTRTEKIYDDHRKFTLRILYDQAGRPSLWSPSSRLNGVNVTYSPGGYIAGIQRGIMSERMEYDQAGRITSRIFADGKTWSYTYLEKSMVLLLHSQRQYIFEFDKNDRLSSVTMPNVARQTLETIRSVGYYRNIYQPPEGNASVIQDFTEDGHLLHTFYLGTGRRVIYKYGKLSKLAETLYDTTKVSFTYDETAGMLKTINLQNEGFTCTIRYRQIGPLIDRQIFRFTEEGMVNARFDYNYDNSFRVTSMQAVINETPLPIDLYRYDDVSGKTEQFGKFGVIYYDINQIITTAVMTHTKHFDAYGRMKEVQYEIFRSLMYWMTVQYDNMGRVVKKELKVGPYANTTRYSYEYDADGQLQTVSINDKPLWRYSYDLNGNLHLLSPGNSARLTPLRYDIRDRITRLGDVQYKMDEDGFLRQRGGDIFEYNSAGLLIKAYNRAGSWSVRYRYDGLGRRVSSKSSHSHHLQFFYADLTNPTKVTHLYNHSSSEITSLYYDLQGHLFAMELSSGDEFYIACDNIGTPLAVFSGTGLMIKQILYTAYGEIYMDTNPNFQIIIGYHGGLYDPLTKLVHMGRRDYDVLAGRWTSPDHELWKHLSSSNVMPFNLYMFKNNNPISNSQDIKCFMTDVNSWLLTFGFQLHNVIPGYPKPDMDAMEPSYELIHTQMKTQEWDNSKSILGVQCEVQKQLKAFVTLERFDQLYGSTITSCQQAPKTKKFASSGSVFGKGVKFALKDGRVTTDIISVANEDGRRVAAILNHAHYLENLHFTIDGVDTHYFVKPGPSEGDLAILGLSGGRRTLENGVNVTVSQINTVLNGRTRRYTDIQLQYGALCLNTRYGTTLDEEKARVLELARQRAVRQAWAREQQRLREGEEGLRAWTEGEKQQVLSTGRVQGYDGFFVISVEQYPELSDSANNIHFMRQSEMGRR

SEQ ID NO: 3026 - protein, 883 aa, Homo sapiens
MPGGGSQEYGVLCIQEYRKNSKVESSTRNNFMGLKDHLGHDLGHLYVESTDPQLSPAVPWSTVENPSMDTVNVGKDEKEASEENASSGDSEENTNSDHESEQLGSISVEPGLITKTHRQLCRSPCLEPHILKRNEILQDFKPEESQTTSKEAKKPPDVVREYQTKLEFALKLGYSEEQVQLVLNKLGTDALINDILGELVKLGNKSEADQTVSTINTITRETSSLESQRSESPMQEIVTDDGENLRPIVIDGSNVAMSHGNKEVFSCRGIKLAVDWFLERGHKDITVFVPAWRKEQSRPDALITDQEILRKLEKEKILVFTPSRRVQGRRVVCYDDRFIVKLAFESDGIIVSNDNYRDLANEKPEWKKFIDERLLMYSFVNDKFMPPDDPLGRHGPSLDNFLRKKPIVPEHKKQPCPYGKKCTYGHKCKYYHPERGSQPQRSVADELRAMSRNTAAKTANEGGLVKSNSVPCSTKADSTSDVKRGAPKRQSDPSIRTQVYQDLEEKLPTKNKLETRSVPSLVSIPATSTAKPQSTTSLSNGLPSGVHFPPQDQRPQGQYPSMMMATKNHGTPMPYEQYPKCDSPVDIGYYSMLNAYSNLSLSGPRSPERRFSLDTDYRISSVASDCSSEGSMSCGSSDSYVGYNDRSYVSSPDPQLEENLKCQHMHPHSRLNPQPFLQNFHDPLTRGQSYSHEEPKFHHKPPLPHLALHLPHSAVGARSSCPGDYPSPPSSAHSKAPHLGRSLVATRIDSISDSRLYDSSPSRQRKPYSRQEGLGSWERPGYGIDAYGYRQTYSLPDNSTQPCYEQFTFQSLPEQQEPAWRIPYCGMPQDPPRYQDNREKIYINLCNIFPPDLVRIVMKRNPHMTDAQQLAAAILVEKSQLGY

SEQ ID NO: 3027 - protein, 3056 aa, Homo sapiens
MSLVLNDLLICCRQLEHDRATERKKEVEKFKRLIRDPETIKHLDRHSDSKQGKYLNWDAVFRFLQKYIQKETECLRIAKPNVSASTQASRQKKMQEISSLVKYFIKCANRRAPRLKCQELLNYIMDTVKDSSNGAIYGADCSNILLKDILSVRKYWCEISQQQWLELFSVYFRLYLKPSQDVHRVLVARIIHAVTKGCCSQTDGLNSKFLDFFSKAIQCARQEKSSSGLNHILAALTIFLKTLAVNFRIRVCELGDEILPTLLYIWTQHRLNDSLKEVIIELFQLQIYIHHPKGAKTQEKGAYESTKWRSILYNLYDLLVNEISHIGSRGKYSSGFRNIAVKENLIELMADICHQVFNEDTRSLEISQSYTTTQRESSDYSVPCKRKKIELGWEVIKDHLQKSQNDFDLVPWLQIATQLISKYPASLPNCELSPLLMILSQLLPQQRHGERTPYVLRCLTEVALCQDKRSNLESSQKSDLLKLWNKIWCITFRGISSEQIQAENFGLLGAIIQGSLVEVDREFWKLFTGSACRPSCPAVCCLTLALTTSIVPGTVKMGIEQNMCEVNRSFSLKESIMKWLLFYQLEGDLENSTEVPPILHSNFPHLVLEKILVSLTMKNCKAAMNFFQSVPECEHHQKDKEELSFSEVEELFLQTTFDKMDFLTIVRECGIEKHQSSIGFSVHQNLKESLDRCLLGLSEQLLNNYSSEITNSETLVRCSRLLVGVLGCYCYMGVIAEEEAYKSELFQKAKSLMQCAGESITLFKNKTNEEFRIGSLRNMMQLCTRCLSNCTKKSPNKIASGFFLRLLTSKLMNDIADICKSLASFIKKPFDRGEVESMEDDTNGNLMEVEDQSSMNLFNDYPDSSVSDANEPGESQSTIGAINPLAEEYLSKQDLLFLDMLKFLCLCVTTAQTNTVSFRAADIRRKLLMLIDSSTLEPTKSLHLHMYLMLLKELPGEEYPLPMEDVLELLKPLSNVCSLYRRDQDVCKTILNHVLHVVKNLGQSNMDSENTRDAQGQFLTVIGAFWHLTKERKYIFSVRMALVNCLKTLLEADPYSKWAILNVMGKDFPVNEVFTQFLADNHHQVRMLAAESINRLFQDTKGDSSRLLKALPLKLQQTAFENAYLKAQEGMREMSHSAENPETLDEIYNRKSVLLTLIAVVLSCSPICEKQALFALCKSVKENGLEPHLVKKVLEKVSETFGYRRLEDFMASHLDYLVLEWLNLQDTEYNLSSFPFILLNYTNIEDFYRSCYKVLIPHLVIRSHFDEVKSIANQIQEDWKSLLTDCFPKILVNILPYFAYEGTRDSGMAQQRETATKVYDMLKSENLLGKQIDHLFISNLPEIVVELLMTLHEPANSSASQSTDLCDFSGDLDPAPNPPHFPSHVIKATFAYISNCHKTKLKSILEILSKSPDSYQKILLAICEQAAETNNVYKKHRILKIYHLFVSLLLKDIKSGLGGAWAFVLRDVIYTLIHYINQRPSCIMDVSLRSFSLCCDLLSQVCQTAVTYCKDALENHLHVIVGTLIPLVYEQVEVQKQVLDLLKYLVIDNKDNENLYITIKLLDPFPDHVVFKDLRITQQKIKYSRGPFSLLEEINHFLSVSVYDALPLTRLEGLKDLRRQLELHKDQMVDIMRASQDNPQDGIMVKLVVNLLQLSKMAINHTGEKEVLEAVGSCLGEVGPIDFSTIAIQHSKDASYTKALKLFEDKELQWTFIMLTYLNNTLVEDCVKVRSAAVTCLKNILATKTGHSFWEIYKMTTDPMLAYLQPFRTSRKKFLEVPRFDKENPFEGLDDINLWIPLSENHDIWIKTLTCAFLDSGGTKCEILQLLKPMCEVKTDFCQTVLPYLIHDILLQDTNESWRNLLSTHVQGFFTSCLRHFSQTSRSTTPANLDSESEHFFRCCLDKKSQRTMLAVVDYMRRQKRPSSGTIFNDAFWLDLNYLEVAKVAQSCAAHFTALLYAEIYADKKSMDDQEKRSLAFEEGSQSTTISSLSEKSKEETGISLQDLLLEIYRSIGEPDSLYGCGGGKMLQPITRLRTYEHEAMWGKALVTYDLETAIPSSTRQAGIIQALQNLGLCHILSVYLKGLDYENKDWCPELEELHYQAAWRNMQWDHCTSVSKEVEGTSYHESLYNALQSLRDREFSTFYESLKYARVKEVEEMCKRSLESVYSLYPTLSRLQAIGELESIGELFSRSVTHRQLSEVYIKWQKHSQLLKDSDFSFQEPIMALRTVILEILMEKEMDNSQRECIKDILTKHLVELSILARTFKNTQLPERAIFQIKQYNSVSCGVSEWQLEEAQVFWAKKEQSLALSILKQMIKKLDASCAANNPSLKLTYTECLRVCGNWLAETCLENPAVIMQTYLEKAVEVAGNYDGESSDELRNGKMKAFLSLARFSDTQYQRIENYMKSSEFENKQALLKRAKEEVGLLREHKIQTNRYTVKVQRELELDELALRALKEDRKRFLCKAVENYINCLLSGEEHDMWVFRLCSLWLENSGVSEVNGMMKRDGMKIPTYKFLPLMYQLAARMGTKMMGGLGFHEVLNNLISRISMDHPHHTLFIILALANANRDEFLTKPEVARRSRITKNVPKQSSQLDEDRTEAANRIICTIRSRRPQMVRSVEALCDAYIILANLDATQWKTQRKGINIPADQPITKLKNLEDVVVPTMEIKVDHTGEYGNLVTIQSFKAEFRLAGGVNLPKIIDCVGSDGKERRQLVKGRDDLRQDAVMQQVFQMCNTLLQRNTETRKRKLTICTYKVVPLSQRSGVLEWCTGTVPIGEFLVNNEDGAHKRYRPNDFSAFQCQKKMMEVQKKSFEEKYEVFMDVCQNFQPVFRYFCMEKFLDPAIWFEKRLAYTRSVATSSIVGYILGLGDRHVQNILINEQSAELVHIDLGVAFEQGKILPTPETVPFRLTRDIVDGMGITGVEGVFRRCCEKTMEVMRNSQETLLTIVEVLLYDPLFDWTMNPLKALYLQQRPEDETELHPTLNADDQECKRNLSDIDQSFNKVAERVLMRLQEKLKGVEEGTVLSVGGQVNLLIQQAIDPKNLSRLFPGWKAWV

SEQ ID NO: 3028 - protein, 309 aa, Homo sapiens
MVFPAKRFCLVPSMEGVRWAFSCGTWLPSRAEWLLAVRSIQPEEKERIGQFVFARDAKAAMAGRLMIRKLVAEKLNIPWNHIRLQRTAKGKPVLAKDSSNPYPNFNFNISHQGDYAVLAAEPELQVGIDIMKTSFPGRGSIPEFFHIMKRKFTNKEWETIRSFKDEWTQLDMFYRNWALKESFIKAIGVGLGFELQRLEFDLSPLNLDIGQVYKETRLFLDGEEEKEWAFEESKIDEHHFVAVALRKPDGSRHQDVPSQDDSKPTQRQFTILNFNDLMSSAVPMTPEDPSFWDCFCFTEEIPIRNGTKS

SEQ ID NO: 3029 - protein, 161 aa, Homo sapiens
MGCCYSSENEDSDQDREERKLLLDPSSPPTKALNGAEPNYHSLPSARTDEQALLSSILAKTASNIIDVSAADSQGMEQHEYMDRARQYSTRLAVLSSSLTHWKKLPPLPSLTSQPHQVLASEPIPFSDLQQVSRIAAYAYSALSQIRVDAKEELVVQFGIP

SEQ ID NO: 3030 - protein, 668 aa, Homo sapiens
MAANMYRVGDYVYFENSSSNPYLVRRIEELNKTANGNVEAKVVCLFRRRDISSSLNSLADSNAREFEEESKQPGVSEQQRHQLKHRELFLSRQFESLPATHIRGKCSVTLLNETDILSQYLEKEDCFFYSLVFDPVQKTLLADQGEIRVGCKYQAEIPDRLVEGESDNRNQQKMEMKVWDPDNPLTDRQIDQFLVVARAVGTFARALDCSSSIRQPSLHMSAAAASRDITLFHAMDTLQRNGYDLAKAMSTLVPQGGPVLCRDEMEEWSASEAMLFEEALEKYGKDFNDIRQDFLPWKSLASIVQFYYMWKTTDRYIQQKRLKAAEADSKLKQVYIPTYTKPNPNQIISVGSKPGMNGAGFQKGLTCESCHTTQSAQWYAWGPPNMQCRLCASCWIYWKKYGGLKTPTQLEGATRGTTEPHSRGHLSRPEAQSLSPYTTSANRAKLLAKNRQTFLLQTTKLTRLARRMCRDLLQPRRAARRPYAPINANAIKAECSIRLPKAAKTPLKIHPLVRLPLATIVKDLVAQAPLKPKTPRGTKTPINRNQLSQNRGLGGIMVKRAYETMAGAGVPFSANGRPLASGIRSSSQPAAKRQKLNPADAPNPVVFVATKDTRALRKALTHLEMRRAARRPNLPLKVKPTLIAVRPPVPLPAPSHPASTNEPIVLED

SEQ ID NO: 3031 - protein, 162 aa, Homo sapiens
MLQTSNYSLVLSLQFLLLSYDLFVNSFSELLQKTPVIQLVLFIIQDIAVLFNIIIIFLMFFNTFVFQAGLVNLLFHKFKGTIILTAVYFALSISLHVWVMNLRWKNSNSFIWTDGLQMLFVFQRLAAVLYCYFYKRTAVRLGDPHFYQDSLWLRKEFMQVRR

SEQ ID NO: 3032 - protein, 445 aa, Homo sapiens
MGGVGEPGPREGPAQPGAPLPTFCWEQIRAHDQPGDKWLVIERRVYDISRWAQRHPGGSRLIGHHGAEDATDAFRAFHQDLNFVRKFLQPLLIGELAPEEPSQDGPLNAQLVEDFRALHQAAEDMKLFDASPTFFAFLLGHILAMEVLAWLLIYLLGPGWVPSALAAFILAISQAQSWCLQHDLGHASIFKKSWWNHVAQKFVMGQLKGFSAHWWNFRHFQHHAKPNIFHKDPDVTVAPVFLLGESSVEYGKKKRRYLPYNQQHLYFFLIGPPLLTLVNFEVENLAYMLVCMQWADLLWAASFYARFFLSYLPFYGVPGVLLFFVAVRVLESHWFVWITQMNHIPKEIGHEKHRDWVSSQLAATCNVEPSLFTNWFSGHLNFQIEHHLFPRMPRHNYSRVAPLVKSLCAKHGLSYEVKPFLTALVDIVRSLKKSGDIWLDAYLHQ

SEQ ID NO: 3033 - protein, 351 aa, Homo sapiens
MAPVLPLVLPLQPRIRLAQGLWLLSWLLALAGGVILLCSGHLLVQLRHLGTFLAPSCQFPVLPQAALAAGAVALGTGLVGVGASRASLNAALYPPWRGVLGPLLVAGTAGGGGLLVVGLGLALALPGSLDEALEEGLVTALAHYKDTEVPGHCQAKRLVDELQLRYHCCGRHGYKDWFGVQWVSSRYLDPGDRDVADRIQSNVEGLYLTDGVPFSCCNPHSPRPCLQNRLSDSYAHPLFDPRQPNQNLWAQGCHEVLLEHLQDLAGTLGSMLAVTFLLQALVLLGLRYLQTALEGLGGVIDAGGETQGYLFPSGLKDMLKTAWLQGGVACRPAPEEAPPGEAPPKEDLSEA

SEQ ID NO: 3034 - protein, 444 aa, Homo sapiens
MGKGGNQGEGAAEREVSVPTFSWEEIQKHNLRTDRWLVIDRKVYNITKWSIQHPGGQRVIGHYAGEDATDAFRAFHPDLEFVGKFLKPLLIGELAPEEPSQDHGKNSKITEDFRALRKTAEDMNLFKTNHVFFLLLLAHIIALESIAWFTVFYFGNGWIPTLITAFVLATSQAQAGWLQHDYGHLSVYRKPKWNHLVHKFVIGHLKGASANWWNHRHFQHHAKPNIFHKDPDVNMLHVFVLGEWQPIEYGKKKLKYLPYNHQHEYFFLIGPPLLIPMYFQYQIIMTMIVHKNWVDLAWAVSYYIRFFITYIPFYGILGALLFLNFIRFLESHWFVWVTQMNHIVMEIDQEAYRDWFSSQLTATCNVEQSFFNDWFSGHLNFQIEHHLFPTMPRHNLHKIAPLVKSLCAKHGIEYQEKPLLRALLDIIRSLKKSGKLWLDAYLHK

SEQ ID NO: 3035 - protein, 897 aa, Homo sapiens
MDGAAGPGDGPAREALQSLSQRLRVQEQEMELVKAALAEALRLLRLQVPPSSLQGSGTPAPPGDSSLAAPPGLPPTCTPSLVSRGTQTETEVELKSSPGPPGLSNGPPAPQGASEEPSGTQSEGGGSSSSGAGSPGPPGILRPLQPPQRADTPRRNSSSSSSPSERPRQKLSRKAISSANLLVRSGSTESRGGKDPLSSPGGPGSRRSNYNLEGISVKMFLRGRPITMYIPSGIRSLEELPSGPPPETLSLDWVYGYRGRDSRSNLFVLRSGEVVYFIACVVVLYRPGGGPGGPGGGGQRHYRGHTDCVRCLAVHPDGVRVASGQTAGVDKDGKPLQPVVHIWDSETLLKLQEIGLGAFERGVGALAFSAADQGAFLCVVDDSNEHMLSVWDCSRGMKLAEIKSTNDSVLAVGFNPRDSSCIVTSGKSHVHFWNWSGGVGVPGNGTLTRKQGVFGKYKKPKFIPCFVFLPDGDILTGDSEGNILTWGRSPSDSKTPGRGGAKETYGIVAQAHAHEGSIFALCLRRDGTVLSGGGRDRRLVQWGPGLVALQEAEIPEHFGAVRAIAEGLGSELLVGTTKNALLRGDLAQGFSPVIQGHTDELWGLCTHPSQNRFLTCGHDRQLCLWDGESHALAWSIDLKETGLCADFHPSGAVVAVGLNTGRWLVLDTETREIVSDVIDGNEQLSVVRYSPDGLYLAIGSHDNVIYIYSVSSDGAKSSRFGRCMGHSSFITHLDWSKDGNFIMSNSGDYEILYWDVAGGCKQLKNRYESRDREWATYTCVLGFHVYGVWPDGSDGTDINSLCRSHNERVVAVADDFCKVHLFQYPCARAKAPSRMYGGHGSHVTSVRFTHDDSHLVSLGGKDASIFQWRVLGAGGAGPAPATPSRTPSLSPASSLDV

SEQ ID NO: 3036 - protein, 914 aa, Homo sapiens
MGTTAPGPIHLLELCDQKLMEFLCNMDNKDLVWLEEIQEEAERMFTREFSKEPELMPKTPSQKNRRKKRRISYVQDENRDPIRRRLSRRKSRSSQLSSRRLRSKDSVEKLATVVGENGSVLRRVTRAAAAAAAATMALAAPSSPTPESPTMLTKKPEDNHTQCQLVPVVEIGISERQNAEQHVTQLMSTEPLPRTLSPTPASATAPTSQGIPTSDEESTPKKSKARILESITVSSLMATPQDPKGQGVGTGRSASKLRIAQVSPGPRDSPAFPDSPWRERVLAPILPDNFSTPTGSRTDSQSVRHSPIAPSSPSPQVLAQKYSLVAKQESVVRRASRRLAKKTAEEPAASGRIICHSYLERLLNVEVPQKVGSEQKEPPEEAEPVAAAEPEVPENNGNNSWPHNDTEIANSTPNPKPAASSPETPSAGQQEAKTDQADGPREPPQSARRKRSYKQAVSELDEEQHLEDEELQPPRSKTPSSPCPASKVVRPLRTFLHTVQRNQMLMTPTSAPRSVMKSFIKRNTPLRMDPKEKERQRLENLRRKEEAEQLRRQKVEEDKRRRLEEVKLKREERLRKVLQARERVEQMKEEKKKQIEQKFAQIDEKTEKAKEERLAEEKAKKKAAAKKMEEVEARRKQEEEARRLRWLQQEEEERRHQELLQKKKEEEQERLRKAAEAKRLAEQREQERREQERREQERREQERREQERREQERQLAEQERRREQERLQAERELQEREKALRLQKEQLQRELEEKKKKEEQQRLAERQLQEEQEKKAKEAAGASKALNVTVDVQSPACTSYQMTPQGHRAPPKINPDNYGMDLNSDDSTDDEAHPRKPIPTWARGTPLSQAIIHQYYHPPNLLELFGTILPLDLEDIFKKSKPRYHKRTSSAVWNSPPLQGARVPSSLAYSLKKH

SEQ ID NO: 3037 - protein, 638 aa, Homo sapiens
MAGGSATTWGYPVALLLLVATLGLGRWLQPDPGLPGLRHSYDCGIKGMQLLVFPRPGQTLRFKVVDEFGNRFDVNNCSICYHWVTSRPQEPAVFSADYRGCHVLEKDGRFHLRVFMEAVLPNGRVDVAQDATLICPKPDPSRTLDSQLAPPAMFSVSTPQTLSFLPTSGHTSQGSGHAFPSPLDPGHSSVHPTPALPSPGPGPTLATLAQPHWGTLEHWDVNKRDYIGTHLSQEQCQVASGHLPCIVRRTSKEACQQAGCCYDNTREVPCYYGNTATVQCFRDGYFVLVVSQEMALTHRITLANIHLAYAPTSCSPTQHTEAFVVFYFPLTHCGTTMQVAGDQLIYENWLVSGIHIQKGPQGSITRDSTFQLHVRCVFNASDFLPIQASIFPPPSPAPMTQPGPLRLELRIAKDETFSSYYGEDDYPIVRLLREPVHVEVRLLQRTDPNLVLLLHQCWGAPSANPFQQPQWPILSDGCPFKGDSYRTQMVALDGATPFQSHYQRFTVATFALLDSGSQRALRGLVYLFCSTSACHTSGLETCSTACSTGTTRQRRSSGHRNDTARPQDIVSSPGPVGFEDSYGQEPTLGPTDSNGNSSLRPLLWAVLLLPAVALVLGFGVFVGLSQTWAQKLWESNRQ

SEQ ID NO: 3038 - protein, 158 aa, Homo sapiens
MALEVLMLLAVLIWTGAENLHVKISCSLDWLMVSVIPVAESRNLYIFADELHLGMGCPANRIHTYVYEFIYLVRDCGIRTRVVSEETLLFQTELYFTPRNIDHDPQEIHLECSTSRKSVWLTPVSTENEIKLDPSPFIADFQTTAEELGLLSSSPNLL

SEQ ID NO: 3039 - protein, 340 aa, Homo sapiens
MADSVKTFLQDLARGIKDSIWGICTISKLDARIQQKREEQRRRRASSVLAQRRAQSIERKQESEPRIVSRIFQCCAWNGGVFWFSLLLFYRVFIPVLQSVTARIIGDPSLHGDVWSWLEFFLTSIFSALWVLPLFVLSKVVNAIWFQDIADLAFEVSGRKPHPFPSVSKIIADMLFNLLLQALFLIQGMFVSLFPIHLVGQLVSLLHMSLLYSLYCFEYRWFNKGIEMHQRLSNIERNWPYYFGFGLPLAFLTAMQSSYIISGCLFSILFPLFIISANEAKTPGKAYLFQLRLFSLVVFLSNRLFHKTVYLQSALSSSTSAEKFPSPHPSPAKLKATAGH

SEQ ID NO: 3040 - protein, 392 aa, Homo sapiens
MEAPLVSLDEEFEDLRPSCSEDPEEKPQCFYGSSPHHLEDPSLSELENFSSEIISFKSMEDLVNEFDEKLNVCFRNYNAKTENLAPVKNQLQIQEEEETLQDEEVWDALTDNYIPSLSEDWRDPNIEALNGNCSDTEIHEKEEEEFNEKSENDSGINEEPLLTADQVIEEIEEMMQNSPDPEEEEEVLEEEDGGETSSQADSVLLQEMQALTQTFNNNWSYEGLRHMSGSELTELLDQVEGAIRDFSEELVQQLARRDELEFEKEVKNSFITVLIEVQNKQKEQRELMKKRRKEKGLSLQSSRIEKGNQMPLKRFSMEGISNILQSGIRQTFGSSGTDKQYLNTVIPYEKKASPPSVEDLQMLTNILFAMKEDNEKVPTLLTDYILKVLCPT

SEQ ID NO: 3041 - protein, 390 aa, Homo sapiens
MISLPGPLVTNLLRFLFLGLSALAPPSRAQLQLHLPANRLQAVEGGEVVLPAWYTLHGEVSSSQPWEVPFVMWFFKQKEKEDQVLSYINGVTTSKPGVSLVYSMPSRNLSLRLEGLQEKDSGPYSCSVNVQDKQGKSRGHSIKTLELNVLVPPAPPSCRLQGVPHVGANVTLSCQSPRSKPAVQYQWDRQLPSFQTFFAPALDVIRGSLSLTNLSSSMAGVYVCKAHNEVGTAQCNVTLEVSTGPGAAVVAGAVVGTLVGLGLLAGLVLLYHRRGKALEEPANDIKEDAIAPRTLPWPKSSDTISKNGTLSSVTSARALRPPHGPPRPGALTPTPSLSSQALPSPRLPTTDGAHPQPISPIPGGVSSSGLSRMGAVPVMVPAQSQAGSLV

SEQ ID NO: 3042 - protein, 1460 aa, Homo sapiens
MAGRPLRIGDQLVLEEDYDETYIPSEQEILEFAREIGIDPIKEPELMWLAREGIVAPLPGEWKPCQDITGDIYYFNFANGQSMWDHPCDEHYRSLVIQERAKLSTSGAIKKKKKKKEKKDKKDRDPPKSSLALGSSLAPVHVPLGGLAPLRGLVDTPPSALRGSQSVSLGSSVESGRQLGELMLPSQGLKTSAYTKGLLGSIYEDKTALSLLGLGEETNEEDEEESDNQSVHSSSEPLRNLHLDIGALGGDFEYEESLRTSQPEEKKDVSLDSDAAGPPTPCKPSSPGADSSLSSAVGKGRQGSGARPGLPEKEENEKSEPKICRNLVTPKADPTGSEPAKASEKEAPEDTVDAGEEGSRREEAAKEPKKKASALEEGSSDASQELEISEHMKEPQLSDSIASDPKSFHGLDFGFRSRISEHLLDVDVLSPVLGGACRQAQQPLGIEDKDDSQSSQDELQSKQSKGLEERLSPPLPHEERAQSPPRSLATEEEPPQGPEGQPEWKEAEELGEDSAASLSLQLSLQREQAPSPPAACEKGKEQHSQAEELGPGQEEAEDPEEKVAVSPTPPVSPEVRSTEPVAPPEQLSEAALKAMEEAVAQVLEQDQRHLLESKQEKMQQLREKLCQEEEEEILRLHQQKEQSLSSLRERLQKAIEEEEARMREEESQRLSWLRAQVQSSTQADEDQIRAEQEASLQKLREELESQQKAERASLEQKNRQMLEQLKEEIEASEKSEQAALNAAKEKALQQLREQLEGERKEAVATLEKEHSAELERLCSSLEAKHREVVSSLQKKIQEAQQKEEAQLQKCLGQVEHRVHQKSYHVAGYEHELSSLLREKRQEVEGEHERRLDKMKEEHQQVMAKAREQYEAEERKQRAELLGHLTGELERLQRAHERELETVRQEQHKRLEDLRRRHREQERKLQDLELDLETRAKDVKARLALLEVQEETARREKQQLLDVQRQVALKSEEATATHQQLEEAQKEHTHLLQSNQQLREILDELQARKLKLESQVDLLQAQSQQLQKHFSSLEAEAQKKQHLLREVTVEENNASPHFEPDLHIEDLRKSLGTNQTKEVSSSLSQSKEDLYLDSLSSHNVWHLLSAEGVALRSAKEFLVQQTRSMRRRQTALKAAQQHWRHELASAQEVAKDPPGIKALEDMRKNLEKETRHLDEMKSAMRKGHNLLKKKEEKLNQLESSLWEEASDEGTLGGSPTKKAVTFDLSDMDSLSSESSESFSPPHREWWRQQRIDSTPSLTSRKIHGLSHSLRQISSQLSSVLSILDSLNPQSPPPLLASMPAQLPPRDPKSTPTPTYYGSLARFSALSSATPTSTQWAWDSGQGPRLPSSVAQTVDDFLLEKWRKYFPSGIPLLSNSPTPLESRLGYMSASEQLRLLQHSHSQVPEAGSTTFQGIIEANRRWLERVKNDPRLPLFSSTPKPKATLSLLQLGLDEHNRVKVYRF

SEQ ID NO: 3043 - protein, 215 aa, Homo sapiens
MYGKSSTRAVLLLLGIQLTALWPIAAVEIYTSRVLEAVNGTDARLKCTFSSFAPVGDALTVTWNFRPLDGGPEQFVFYYHIDPFQPMSGRFKDRVSWDGNPERYDASILLWKLQFDDNGTYTCQVKNPPDVDGVIGEIRLSVVHTVRFSEIHFLALAIGSACALMIIIVIVVVLFQHYRKKRWAERAHKVVEIKSKEEERLNQEKKVSVYLEDTD

SEQ ID NO: 3044 - protein, 215 aa, Homo sapiens
MHRDAWLPRPAFSLTGLSLFFSLVPPGRSMEVTVPATLNVLNGSDARLPCTFNSCYTVNHKQFSLNWTYQECNNCSEEMFLQFRMKIINLKLERFQDRVEFSGNPSKYDVSVMLRNVQPEDEGIYNCYIMNPPDRHRGHGKIHLQVLMEEPPERDSTVAVIVGASVGGFLAVVILVLMVVKCVRRKKEQKLSTDDLKTEEEGKTDGEGNPDDGAK

SEQ ID NO: 3045 - protein, 855 aa, Homo sapiens
MFALGLPFLVLLVASVESHLGVLGPKNVSQKDAEFERTYVDEVNSELVNIYTFNHTVTRNRTEGVRVSVNVLNKQKGAPLLFVVRQKEAVVSFQVPLILRGMFQRKYLYQKVERTLCQPPTKNESEIQFFYVDVSTLSPVNTTYQLRVSRMDDFVLRTGEQFSFNTTAAQPQYFKYEFPEGVDSVIVKVTSNKAFPCSVISIQDVLCPVYDLDNNVAFIGMYQTMTKKAAITVQRKDFPSNSFYVVVVVKTEDQACGGSLPFYPFAEDEPVDQGHRQKTLSVLVSQAVTSEAYVSGMLFCLGIFLSFYLLTVLLACWENWRQKKKTLLVAIDRACPESGHPRVLADSFPGSSPYEGYNYGSFENVSGSTDGLVDSAGTGDLSYGYQGHDQFKRRLPSGQMRQLCIAMGRSFEPVGTRPRVDSMSSVEEDDYDTLTDIDSDKNVIRTKQYLYVADLARKDKRVLRKKYQIYFWNIATIAVFYALPVVQLVITYQTVVNVTGNQDICYYNFLCAHPLGNLSAFNNILSNLGYILLGLLFLLIILQREINHNRALLRNDLCALECGIPKHFGLFYAMGTALMMEGLLSACYHVCPNYTNFQFDTSFMYMIAGLCMLKLYQKRHPDINASAYSAYACLAIVIFFSVLGVVFGKGNTAFWIVFSIIHIIATLLLSTQLYYMGRWKLDSGIFRRILHVLYTDCIRQCSGPLYVDRMVLLVMGNVINWSLAAYGLIMRPNDFASYLLAIGICNLLLYFAFYIIMKLRSGERIKLIPLLCIVCTSVVWGFALFFFFQGLSTWQKTPAESREHNRDCILLDFFDDHDIWHFLSSIAMFGSFLVSGPPGRAGWVREGSSCLLLCG

SEQ ID NO: 3046 - protein, 201 aa, Homo sapiens
MANKGPSYGMSREVQSKIEKKYDEELEERLVEWIIVQCGPDVGRPDRGRLGFQVWLKNGVILSKLVNSLYPDGSKPVKVPENPPSMVFKQMEQVAQFLKAAEDYGVIKTDMFQTVDLFEGKDMAAVQRTLMALGSLAVTKNDGHYRGDPNWFMKKAQEHKREFTESQLQEGKHVIGLQMGSNRGASQAGMTGYGRPRQIIS

SEQ ID NO: 3047 - protein, 172 aa, Homo sapiens
MSSKRAKAKTTKKRPQRATSNVFAMFDQSQIQEFKEAFNMIDQNRDGFIDKEDLHDMLASLGKNPTDEYLEGMMSEAPGPINFTMFLTMFGEKLNGTDPEDVIRNAFACFDEEASGFIHEDHLRELLTTMGDRFTDEEVDEMYREAPIDKKGNFNYVEFTRILKHGAKDKDD

SEQ ID NO: 3048 - protein, 476 aa, Homo sapiens
MAAAMPLALLVLLLLGPGGWCLAEPPRDSLREELVITPLPSGDVAATFQFRTRWDSELQREGDTDHYFLRYAVLPREVVCTENLTPWKKLLPCSSKAGLSVLLKADRLFHTSYHSQAVHIRPVCRNARCTSISWELRQTLSVVFDAFITGQGKKDWSLFRMFSRTLTEPCPLASESRVYVDITTYNQDNETLEVHPPPTTTYQDVILGTRKTYAIYDLLDTAMINNSRNLNIQLKWKRPPENEAPPVPFLHAQRYVSGYGLQKGELSTLLYNTHPYRAFPVLLLDTVPWYLRLYVHTLTITSKGKENKPSYIHYQPAQDRLQPHLLEMLIQLPANSVTKVSIQFERALLKWTEYTPDPNHGFYVSPSVLSALVPSMVAAKPVDWEESPLFNSLFPVSDGSNYFVRLYTEPLLVNLPTPDFSMPYNVICLTCTVVAVCYGSFYNLLTRTFHIEEPRTGGLAKRLANLIRRARGVPPL

SEQ ID NO: 3049 - protein, 578 aa, Homo sapiens
MAAAMPLALLVLLLLGPGGWCLAEPPRDSLREELVITPLPSGDVAATFQFRTRWDSELQREGVSHYRLFPKALGQLISKYSLRELHLSFTQGFWRTRYWGPPFLQAPSGAELWVWFQDTVTDVDKSWKELSNVLSGIFCASLNFIDSTNTVTPTASFKPLGLANDTDHYFLRYAVLPREVVCTENLTPWKKLLPCSSKAGLSVLLKADRLFHTSYHSQAVHIRPVCRNARCTSISWELRQTLSVVFDAFITGQGKKDWSLFRMFSRTLTEPCPLASESRVYVDITTYNQDNETLEVHPPPTTTYQDVILGTRKTYAIYDLLDTAMINNSRNLNIQLKWKRPPENEAPPVPFLHAQRYVSGYGLQKGELSTLLYNTHPYRAFPVLLLDTVPWYLRLYVHTLTITSKGKENKPSYIHYQPAQDRLQPHLLEMLIQLPANSVTKVSIQFERALLKWTEYTPDPNHGFYVSPSVLSALVPSMVAAKPVDWEESPLFNSLFPVSDGSNYFVRLYTEPLLVNLPTPDFSMPYNVICLTCTVVAVCYGSFYNLLTRTFHIEEPRTGGLAKRLANLIRRARGVPPL

SEQ ID NO: 3050 - protein, 99 aa, Homo sapiens
MKSAKLGFLLRFFIFCSLNTLLLGGVNKIAEKICGDLKDPCKLDMNFGSCYEVHFRYFYNRTSKRCETFVFSGCNGNLNNFKLKIEREVACVAKYKPPR

SEQ ID NO: 3051 - protein, 385 aa, Homo sapiens
MSGSSGTPYLGSKISLISKAQIRYEGILYTIDTDNSTVALAKVRSFGTEDRPTDRPAPPREEIYEYIIFRGSDIKDITVCEPPKAQHTLPQDPAIVQSSLGSASASPFQPHVPYSPFRGMAPYGPLAASSLLSQQYAASLGLGAGFPSIPVGKSPMVEQAVQTGSADNLNAKKLLPGKGTTGTQLNGRQAQPSSKTASDVVQPAAVQAQGQVNDENRRPQRRRSGNRRTRNRSRGQNRPTNVKENTIKFEGDFDFESANAQFNREELDKEFKKKLNFKDDKAEKGEEKDLAVVTQSAEAPAEEDLLGPNCYYDKSKSFFDNISSELKTSSRRTTWAEERKLNTETFGVSGRFLRGRSSRGGFRGGRGNGTTRRNPTSHRAGTGRV

SEQ ID NO: 3052 - protein, 330 aa, Homo sapiens
MADIIARLREDGIQKRVIQEGRGELPDFQDGTKATFHYRTLHSDDEGTVLDDSRARGKPMELIIGKKFKLPVWETIVCTMREGEIAQFLCDIKHVVLYPLVAKSLRNIAVGKDPLEGQRHCCGVAQMREHSSLGHADLDALQQNPQPLIFHMEMLKVESPGTYQQDPWAMTDEEKAKAVPLIHQEGNRLYREGHVKEAAAKYYDAIACLKNLQMKEQPGSPEWIQLDQQITPLLLNYCQCKLVVEEYYEVLDHCSSILNKYDDNVKAYFKRGKAHAAVWNAQEAQADFAKVLELDPALAPVVSRELRALEARIRQKDEEDKARFRGIFSH

SEQ ID NO: 3053 - protein, 137 aa, Homo sapiens
MAGSQDIFDAIVMADERFHGEGYREGYEEGSSLGVMEGRQHGTLHGAKIGSEIGCYQGFAFAWKCLLHSCTTEKDSRKMKVLESLIGMIQKFPYDDPTYDKLHEDLDKIRGKFKQFCSLLNVQPDFKISAEGSGLSF

SEQ ID NO: 3054 - protein, 129 aa, Homo sapiens
MPMASPQTLVLYLLVLAVTEAWGQEAVIPGCHLHPFNVTVRSDRQGTCQGSHVAQACVGHCESSAFPSRYSVLVASGYRHNITSVSQCCTISGLKKVKVQLQCVGSRREELEIFTARACQCDMCRLSRY

SEQ ID NO: 3055 - protein, 303 aa, Homo sapiens
MDPEVTLLLQCPGGGLPQEQIQAELSPAHDRRPLPGGDEAITAIWETRLKAQPWLFDAPKFRLHSATLAPIGSRGPQLLLRLGLTSYRDFLGTNWSSSAAWLRQQGATDWGDTQAYLADPLGVGAALATADDFLVFLRRSRQVAEAPGLVDVPGGHPEPQALCPGGSPQHQDLAGQLVVHELFSSVLQEICDEVNLPLLTLSQPLLLGIARNETSAGRASAEFYVQCSLTSEQVRKHYLSGGPEAHESTGIFFVETQNVQRLLETEMWAELCPSAKGAIILYNRVQGSPTGAALGSPALLPPL

SEQ ID NO: 3056 - protein, 1234 aa, Homo sapiens
MAGAQPGVHALQLEPPTVVETLRRGSKFIKWDEETSSRNLVTLRVDPNGFFLYWTGPNMEVDTLDISSIRDTRTGRYARLPKDPKIREVLGFGGPDARLEEKLMTVVSGPDPVNTVFLNFMAVQDDTAKVWSEELFKLAMNILAQNASRNTFLRKAYTKLKLQVNQDGRIPVKNILKMFSADKKRVETALESCGLKFNRSESIRPDEFSLEIFERFLNKLCLRPDIDKILLEIGAKGKPYLTLEQLMDFINQKQRDPRLNEVLYPPLRPSQARLLIEKYEPNQQFLERDQMSMEGFSRYLGGEENGILPLEALDLSTDMTQPLSAYFINSSHNTYLTAGQLAGTSSVEMYRQALLWGCRCVELDVWKGRPPEEEPFITHGFTMTTEVPLRDVLEAIAETAFKTSPYPVILSFENHVDSAKQQAKMAEYCRSIFGDALLIEPLDKYPLAPGVPLPSPQDLMGRILVKNKKRHRPSAGGPDSAGRKRPLEQSNSALSESSAATEPSSPQLGSPSSDSCPGLSNGEEVGLEKPSLEPQKSLGDEGLNRGPYVLGPADREDEEEDEEEEEQTDPKKPTTDEGTASSEVNATEEMSTLVNYIEPVKFKSFEAARKRNKCFEMSSFVETKAMEQLTKSPMEFVEYNKQQLSRIYPKGTRVDSSNYMPQLFWNVGCQLVALNFQTLDVAMQLNAGVFEYNGRSGYLLKPEFMRRPDKSFDPFTEVIVDGIVANALRVKVISGQFLSDRKVGIYVEVDMFGLPVDTRRKYRTRTSQGNSFNPVWDEEPFDFPKVVLPTLASLRIAAFEEGGKFVGHRILPVSAIRSGYHYVCLRNEANQPLCLPALLIYTEASDYIPDDHQDYAEALINPIKHVSLMDQRARQLAALIGESEAQAGQETCQDTQSQQLGSQPSSNPTPSPLDASPRRPPGPTTSPASTSLSSPGQRDDLIASILSEVAPTPLDELRGHKALVKLRSRQERDLRELRKKHQRKAVTLTRRLLDGLAQAQAEGRCRLRPGALGGAADVEDTKEGEDEAKRYQEFQNRQVQSLLELREAQVDAEAQRRLEHLRQALQRLREVVLDANTTQFKRLKEMNEREKKELQKILDRKRHNSISEAKMRDKHKKEAELTEINRRHITESVNSIRRLEEAQKQRHDRLVAGQQQVLQQLAEEEPKLLAQLAQECQEQRARLPQEIRRSLLGEMPEGLGDGPLVACASNGHAPGSSGHLSGADSESQEENTQL

SEQ ID NO: 3057 - protein, 166 aa, Homo sapiens
MAATMFRATLRGWRTGVQRGCGLRLLSQTQGPPDYPRFVESVDEYQFVERLLPATRIPDPPKHEHYPTPSGWQPPRDPPPNLPYFVRRSRMHNIPVYKDITHGNRQMTVIRKVEGDIWALQKDVEDFLSPLLGKTPVTQVNEVTGTLRIKGYFDQELKAWLLEKGF

SEQ ID NO: 3058 - protein, 714 aa, Homo sapiens
MSEEIITPVYCTGVSAQVQKQRARELGLGRHENAIKYLGQDYEQLRVRCLQSGTLFRDEAFPPVPQSLGYKDLGPNSSKTYGIKWKRPTELLSNPQFIVDGATRTDICQGALGDCWLLAAIASLTLNDTLLHRVVPHGQSFQNGYAGIFHFQLWQFGEWVDVVVDDLLPIKDGKLVFVHSAEGNEFWSALLEKAYAKVNGSYEALSGGSTSEGFEDFTGGVTEWYELRKAPSDLYQIILKALERGSLLGCSIDISSVLDMEAITFKKLVKGHAYSVTGAKQVNYRGQVVSLIRMRNPWGEVEWTGAWSDSSSEWNNVDPYERDQLRVKMEDGEFWMSFRDFMREFTRLEICNLTPDALKSRTIRKWNTTLYEGTWRRGSTAGGCRNYPATFWVNPQFKIRLDETDDPDDYGDRESGCSFVLALMQKHRRRERRFGRDMETIGFAVYEVPPELVGQPAVHLKRDFFLANASRARSEQFINLREVSTRFRLPPGEYVVVPSTFEPNKEGDFVLRFFSEKSAGTVELDDQIQANLPDEQVLSEEEIDENFKALFRQLAGEDMEISVKELRTILNRIISKHKDLRTKGFSLESCRSMVNLMDRDGNGKLGLVEFNILWNRIRNYLSIFRKFDLDKSGSMSAYEMRMAIESAGFKLNKKLYELIITRYSEPDLAVDFDNFVCCLVRLETMFRFFKTLDTDLDGVVTFDLFKWLQLTMFA

SEQ ID NO: 3059 - protein, 210 aa, Homo sapiens
MSTKVPIYLKRGSRKGKKEKLRDLLSSDMISPPLGDFRHTIHIGSGGGSDMFGDISFLQGKFHLLPGTMVEGPEEDGTFDLPFQFTRTATVCGRELPDGPSPLLKNAISLPVIGGPQALTLPTAQAPPKPPRLHLETPQPSPQEGGSVDIWRIPETGSPNSGLTPESGAEEPFLSNASSLLSLHVDLGPSILDDVLQIMDQDLDSMQIPT

SEQ ID NO: 3060 - protein, 87 aa, Homo sapiens
MQLFVRAQELHTFEVTGQETVAQIKAHVASLEGIAPEDQVVLLAGAPLEDEATLGQCGVEALTTLEVAGRMLGGGQTGEEEEEDRSG

SEQ ID NO: 3061 - protein, 782 aa, Homo sapiens
MAAAAAAGPSPGSGPGDSPEGPEGEAPERRRKAHGMLKLYYGLSEGEAAGRPAGPDPLDPTDLNGAHFDPEVYLDKLRRECPLAQLMDSETDMVRQIRALDSDMQTLVYENYNKFISATDTIRKMKNDFRKMEDEMDRLATNMAVITDFSARISATLQDRHERITKLAGVHALLRKLQFLFELPSRLTKCVELGAYGQAVRYQGRAQAVLQQYQHLPSFRAIQDDCQVITARLAQQLRQRFREGGSGAPEQAECVELLLALGEPAEELCEEFLAHARGRLEKELRNLEAELGPSPPAPDVLEFTDHGGSGFVGGLCQVAAAYQELFAAQGPAGAEKLAAFARQLGSRYFALVERRLAQEQGGGDNSLLVRALDRFHRRLRAPGALLAAAGLADAATEIVERVARERLGHHLQGLRAAFLGCLTDVRQALAAPRVAGKEGPGLAELLANVASSILSHIKASLAAVHLFTAKEVSFSNKPYFRGEFCSQGVREGLIVGFVHSMCQTAQSFCDSPGEKGGATPPALLLLLSRLCLDYETATISYILTLTDEQFLVQDQFPVTPVSTLCAEARETARRLLTHYVKVQGLVISQMLRKSVETRDWLSTLEPRNVRAVMKRVVEDTTAIDVQVGLLYEEGVRKAQSSDSSKRTFSVYSSSRQQGRYAPSYTPSAPMDTNLLSNIQKLFSERIDVFSPVEFNKVSVLTGIIKISLKTLLECVRLRTFGRFGLQQVQVDCHFLQLYLWRFVADEELVHLLLDEVVASAALRCPDPVPMEPSVVEVICERG

SEQ ID NO: 3062 - protein, 307 aa, Homo sapiens
MAEISDLDRQIEQLRRCELIKESEVKALCAKAREILVEESNVQRVDSPVTVCGDIHGQFYDLKELFRVGGDVPETNYLFMGDFVDRGFYSVETFLLLLALKVRYPDRITLIRGNHESRQITQVYGFYDECLRKYGSVTVWRYCTEIFDYLSLSAIIDGKIFCVHGGLSPSIQTLDQIRTIDRKQEVPHDGPMCDLLWSDPEDTTGWGVSPRGAGYLFGSDVVAQFNAANDIDMICRAHQLVMEGYKWHFNETVLTVWSAPNYCYRCGNVAAILELDEHLQKDFIIFEAAPQETRGIPSKKPVADYFL

SEQ ID NO: 3063 - protein, 556 aa, Homo sapiens
MAREKEMQEFTRSFFRGRPDLSTLTHSIVRRRYLAHSGRSHLEPEEKQALKRLVEEELLKMQVDEAASREDKLDLTKKGKRPPTPCSDPERKRFRFNSESESGSEASSPDYFGPPAKNGVAAEVSPAKEENPRRASKAVEESSDEERQRDLPAQRGEESSEEEEKGYKGKTRKKPVVKKQAPGKASVSRKQAREESEESEAEPVQRTAKKVEGNKGTKSLKESEQESEEEILAQKKEQREEEVEEEEKEEDEEKGDWKPRTRSNGRRKSAREERSCKQKSQAKRLLGDSDSEEEQKEAASSGDDSGRDREPPVQRKSEDRTQLKGGKRLSGSSEDEEDSGKGEPTAKGSRKMARLGSTSGEESDLEREVSDSEAGGGPQGERKNRSSKKSSRKGRTRSSSSSSDGSPEAKGGKAGSGRRGEDHPAVMRLKRYIRACGAHRNYKKLLGSCCSHKERLSILRAELEALGMKGTPSLGKCRALKEQREEAAEVASLDVANIISGSGRPRRRTAWNPLGEAAPPGELYRRTLDSDEERPRPAPPDWSHMRGIISSDGESN

SEQ ID NO: 3064 - protein, 1049 aa, Homo sapiens
MPAGGRAGSLKDPDVAELFFKDDPEKLFSDLREIGHGSFGAVYFARDVRNSEVVAIKKMSYSGKQSNEKWQDIIKEVRFLQKLRHPNTIQYRGCYLREHTAWLVMEYCLGSASDLLEVHKKPLQEVEIAAVTHGALQGLAYLHSHNMIHRDVKAGNILLSEPGLVKLGDFGSASIMAPANSFVGTPYWMAPEVILAMDEGQYDGKVDVWSLGITCIELAERKPPLFNMNAMSALYHIAQNESPVLQSGHWSEYFRNFVDSCLQKIPQDRPTSEVLLKHRFVLRERPPTVIMDLIQRTKDAVRELDNLQYRKMKKILFQEAPNGPGAEAPEEEEEAEPYMHRAGTLTSLESSHSVPSMSISASSQSSSVNSLADASDNEEEEEEEEEEEEEEEGPEAREMAMMQEGEHTVTSHSSIIHRLPGSDNLYDDPYQPEITPSPLQPPAAPAPTSTTSSARRRAYCRNRDHFATIRTASLVSRQIQEHEQDSALREQLSGYKRMRRQHQKQLLALESRLRGEREEHSARLQRELEAQRAGFGAEAEKLARRHQAIGEKEARAAQAEERKFQQHILGQQKKELAALLEAQKRTYKLRKEQLKEELQENPSTPKREKAEWLLRQKEQLQQCQAEEEAGLLRRQRQYFELQCRQYKRKMLLARHSLDQDLLREDLNKKQTQKDLECALLLRQHEATRELELRQLQAVQRTRAELTRLQHQTELGNQLEYNKRREQELRQKHAAQVRQQPKSLKSKELQIKKQFQETCKIQTRQYKALRAHLLETTPKAQHKSLLKRLKEEQTRKLAILAEQYDQSISEMLSSQALRLDETQEAEFQALRQQLQQELELLNAYQSKIKIRTESQHERELRELEQRVALRRALLEQRVEEELLALQTGRSERIRSLLERQAREIEAFDAESMRLGFSSMALGGIPAEAAAQGYPAPPPAPAWPSRPVPRSGAHWSHGPPPPGMPPPAWRQPSLLAPPGPPNWLGPPTQSGTPRGGALLLLRNSPQPLRRAASGGSGSENVGPPAAAVPGPLSRSTSVASHILNGSSHFYS

SEQ ID NO: 3065 - protein, 240 aa, Homo sapiens
MGNCQAGHNLHLCLAHHPPLVCATLILLLLGLSGLGLGSFLLTHRTGLRSPDIPQDWVSFLRSFGQLTLCPRNGTVTGKWRGSHVVGLLTTLNFGDGPDRNKTRTFQATVLGSQMGLKGSSAGQLVLITARVTTERTAGTCLYFSAVPGILPSSQPPISCSEEGAGNATLSPRMGEECVSVWSHEGLVLTKLLTSEELALCGSRLLVLGSFLLLFCGLLCCVTAMCFHPRRESHWSRTRL

SEQ ID NO: 3066 - protein, 476 aa, Homo sapiens
MMHLAFLVLLCLPVCSAYPLSGAAKEEDSNKDLAQQYLEKYYNLEKDVKQFRRKDSNLIVKKIQGMQKFLGLEVTGKLDTDTLEVMRKPRCGVPDVGHFSSFPGMPKWRKTHLTYRIVNYTPDLPRDAVDSAIEKALKVWEEVTPLTFSRLYEGEADIMISFAVKEHGDFYSFDGPGHSLAHAYPPGPGLYGDIHFDDDEKWTEDASGTNLFLVAAHELGHSLGLFHSANTEALMYPLYNSFTELAQFRLSQDDVNGIQSLYGPPPASTEEPLVPTKSVPSGSEMPAKCDPALSFDAISTLRGEYLFFKDRYFWRRSHWNPEPEFHLISAFWPSLPSYLDAAYEVNSRDTVFIFKGNEFWAIRGNEVQAGYPRGIHTLGFPPTIRKIDAAVSDKEKKKTYFFAADKYWRFDENSQSMEQGFPRLIADDFPGVEPKVDAVLQAFGFFYFFSGSSQFEFDPNARMVTHILKSNSWLHC

SEQ ID NO: 3067 - protein, 398 aa, Homo sapiens
MPVPASWPHLPSPFLLMTLLLGRLTGVAGEEELQVIQPDKSISVAAGESATLHCTVTSLIPVGPIQWFRGAGPGRELIYNQKEGHFPRVTTVSDLTKRNNMDFSIRISNITPADAGTYYCVKFRKGSPDHVEFKSGAGTELSVRAKPSAPVVSGPAARATPQHTVSFTCESHGFSPRDITLKWFKNGNELSDFQTNVDPAGDSVSYSIHSTAKVVLTREDVHSQVICEVAHVTLQGDPLRGTANLSETIRVPPTLEVTQQPVRAENQVNVTCQVRKFYPQRLQLTWLENGNVSRTETASTLTENKDGTYNWMSWLLVNVSAHRDDVKLTCQVEHDGQPAVSKSHDLKVSAHPKEQGSNTAPGPALASAAPLLIAFLLGPKVLLVVGVSVIYVYWKQKA

SEQ ID NO: 3068 - protein, 303 aa, Homo sapiens
MSEAGEATTTTTTTLPQAPTEAAAAAPQDPAPKSPVGSGAPQAAAPAPAAHVAGNPGGDAAPAATGTAAAASLATAAGSEDAEKKVLATKVLGTVKWFNVRNGYGFINRNDTKEDVFVHQTAIKKNNPRKYLRSVGDGETVEFDVVEGEKGAEAANVTGPDGVPVEGSRYAADRRRYRRGYYGRRRGPPRNAGEIGEMKDGVPEGAQLQGPVHRNPTYRPRYRSRGPPRPRPAPAVGEAEDKENQQATSGPNQPSVRRGYRRPYNYRRRPRPPNAPSQDGKEAKAGEAPTENPAPPTQQSSAE

SEQ ID NO: 3069 - protein, 247 aa, Homo sapiens
MLLILLSVALLALSSAESSSEDVSQEESLFLISGKPEGRRPQGGNQPQRPPPPPGKPQGPPPQGGNQSQGPPPPPGKPEGRPPQGGNQSQGPPPHPGKPERPPPQGGNQSQGTPPPPGKPERPPPQGGNQSHRPPPPPGKPERPPPQGGNQSQGPPPHPGKPEGPPPQEGNKSRSARSPPGKPQGPPQQEGNKPQGPPPPGKPQGPPPAGGNPQQPQAPPAGKPQGPPPPPQGGRPPRPAQGQQPPQ

SEQ ID NO: 3070 - protein, 1188 aa, Homo sapiens
MEPNSLQWVGSPCGLHGPYIFYKAFQFHLEGKPRILSLGDFFFVRCTPKDPICIAELQLLWEERTSRQLLSSSKLYFLPEDTPQGRNSDHGEDEVIAVSEKVIVKLEDLVKWVHSDFSKWRCGFHAGPVKTEALGRNGQKEALLKYRQSTLNSGLNFKDVLKEKADLGEDEEETNVIVLSYPQYCRYRSMLKRIQDKPSSILTDQFALALGGIAVVSRNPQILYCRDTFDHPTLIENESICDEFAPNLKGRPRKKKPCPQRRDSFSGVKDSNNNSDGKAVAKVKCEARSALTKPKNNHNCKKVSNEEKPKVAIGEECRADEQAFLVALYKYMKERKTPIERIPYLGFKQINLWTMFQAAQKLGGYETITARRQWKHIYDELGGNPGSTSAATCTRRHYERLILPYERFIKGEEDKPLPPIKPRKQENSSQENENKTKVSGTKRIKHEIPKSKKEKENAPKPQDAAEVSSEQEKEQETLISQKSIPEPLPAADMKKKIEGYQEFSAKPLASRVDPEKDNETDQGSNSEKVAEEAGEKGPTPPLPSAPLAPEKDSALVPGASKQPLTSPSALVDSKQESKLCCFTESPESEPQEASFPSFPTTQPPLANQNETEDDKLPAMADYIANCTVKVDQLGSDDIHNALKQTPKVLVVQSFDMFKDKDLTGPMNENHGLNYTPLLYSRGNPGIMSPLAKKKLLSQVSGASLSSSYPYGSPPPLISKKKLIARDDLCSSLSQTHHGQSTDHMAVSRPSVIQHVQSFRSKPSEERKTINDIFKHEKLSRSDPHRCSFSKHHLNPLADSYVLKQEIQEGKDKLLEKRALPHSHMPSFLADFYSSPHLHSLYRHTEHHLHNEQTSKYPSRDMYRESENSSFPSHRHQEKLHVNYLTSLHLQDKKSAAAEAPTDDQPTDLSLPKNPHKPTGKVLGLAHSTTGPQESKGISQFQVLGSQSRDCHPKACRVSPMTMSGPKKYPESLSRSGKPHHVRLENFRKMEGMVHPILHRKMSPQNIGAARPIKRSLEDLDLVIAGKKARAVSPLDPSKEVSGKEKASEQESEGSKAAHGGHSGGGSEGHKLPLSSPIFPGLYSGSLCNSGLNSRLPAGYSHSLQYLKNQTVLSPLMQPLAFHSLVMQRGIFTSPTNSQQLYRHLAAATPVGSSYGDLLHNSIYPLAAINPQAAFPSSQLSSVHPSTKL

SEQ ID NO: 3071 - protein, 654 aa, Homo sapiens
MAKFGVHRILLLAISLTKCLESTKLLADLKKCGDLECEALINRVSAMRDYRGPDCRYLNFTKGEEISVYVKLAGEREDLWAGSKGKEFGYFPRDAVQIEEVFISEEIQMSTKESDFLCLLGVSYTFDNEDSELNGDYGENIYPYEEDKDEKSSIYESDFQIEPGFYATYESTLFEDQVPALEAPEDIGSTSESKDWEEVVVESMEQDRIPEVHVPPSSAVSGVKEWFGLGGEQAEEKAFESVIEPVQESSFRSRKIAVEDENDLEELNNGEPQTEHQQESESEIDSVPKTQSELASESEHIPKPQSTGWFGGGFTSYLGFGDEDTGLELIAEESNPPLQDFPNSISSDKEATVPCTEILTEKKDTITNDSLSLKPSWFDFGFAILGFAYAKEDKIMLDDRKNEEDGGADEHEHPLTSELDPEKEQEIETIKIIETEDQIDKKPVSEKTDESDTIPYLKKFLYNFDNPWNFQNIPKETELPFPKQILDQNNVIENEETGEFSIDNYPTDNTKVMIFKSSYSLSDMVSNIELPTRIHEEVYFEPSSSKDSDENSKPSVDTEGPALVEIDRSVENTLLNSQMVSTDNSLSSQNYISQKEDASEFQILKYLFQIDVYDFMNSAFSPIVILTERVSLPFKPFAIILPILLNIRVATKYV

SEQ ID NO: 3072 - protein, 51 aa, Homo sapiens
MASSMRSLFSDHGKYVESFRRFLNHSTEHQCMQEFMDKKLPGIIGRYQNCC

SEQ ID NO: 3073 - protein, 292 aa, Homo sapiens
MASSMRSLFSDHGKYVESFRRFLNHSTEHQCMQEFMDKKLPGIIGRIGDTKSEIKILSIGGGAGEIDLQILSKVQAQYPGVCINNEVVEPSAEQIAKYKELVAKTSNLENVKFAWHKETSSEYQSRMLEKKELQKWDFIHMIQMLYYVKDIPATLKFFHSLLGTNAKMLIIVVSGSSGWDKLWKKYGSRFPQDDLCQYITSDDLTQMLDNLGLKYECYDLLSTMDISDCFIDGNENGDLLWDFLTETCNFNATAPPDLRAELGKDLQEPEFSAKKEGKVLFNNTLSFIVIEA

SEQ ID NO: 3074 - protein, 392 aa, Homo sapiens
MSREPTPPLPGDMSTGPIAESWCYTQVKVVKFSYMWTINNFSFCREEMGEVLKSSTFSSGPSDKMKWCLRVNPKGLDDESKDYLSLYLLLVSCPKSEVRAKFKFSLLNAKREETKAMESQRAYRFVQGKDWGFKKFIRRDFLLDEANGLLPDDKLTLFCEVSVVQDSVNISGHTNTNTLKVPECRLAEDLGNLWENTRFTDCSFFVRGQEFKAHKSVLAARSPVFNAMFEHEMEESKKNRVEINDLDPEVFKEMMRFIYTGRAPNLDKMADNLLAAADKYALERLKVMCEEALCSNLSVENVADTLVLADLHSAEQLKAQAIDFINRCSVLRQLGCKDGKNWNSNQATDIMETSGWKSMIQSHPHLVAEAFRALASAQCPQFGIPRKRLKQS

SEQ ID NO: 3075 - protein, 469 aa, Homo sapiens
MDVENEQILNVNPADPDNLSDSLFSGDEENAGTEEIKNEINGNWISASSINEARINAKAKRRLRKNSSRDSGRGDSVSDSGSDALRSGLTVPTSPKGRLLDRRSRSGKGRGLPKKGGAGGKGVWGTPGQVYDVEEVDVKDPNYDDDQENCVYETVVLPLDERAFEKTLTPIIQEYFEHGDTNEVAEMLRDLNLGEMKSGVPVLAVSLALEGKASHREMTSKLLSDLCGTVMSTTDVEKSFDKLLKDLPELALDTPRAPQLVGQFIARAVGDGILCNTYIDSYKGTVDCVQARAALDKATVLLSMSKGGKRKDSVWGSGGGQQSVNHLVKEIDMLLKEYLLSGDISEAEHCLKELEVPHFHHELVYEAIIMVLESTGESTFKMILDLLKSLWKSSTITVDQMKRGYERIYNEIPDINLDVPHSYSVLERFVEECFQAGIISKQLRDLCPSRGRKRFVSEGDGGRLKPESY

SEQ ID NO: 3076 - protein, 336 aa, Homo sapiens
MDYPTLLLALLHVYRALCEEVLWHTSVPFAENMSLECVYPSMGILTQVEWFKIGTQQDSIAIFSPTHGMVIRKPYAERVYFLNSTMASNNMTLFFRNASEDDVGYYSCSLYTYPQGTWQKVIQVVQSDSFEAAVPSNSHIVSEPGKNVTLTCQPQMTWPVQAVRWEKIQPRQIDLLTYCNLVHGRNFTSKFPRQIVSNCSHGRWSVIVIPDVTVSDSGLYRCYLQASAGENETFVMRLTVAEGKTDNQYTLFVAGGTVLLLLFVISITTIIVIFLNRRRRRERRDLFTESWDTQKAPNNYRSPISTSQPTNQSMDDTREDIYVNYPTFSRRPKTRV

SEQ ID NO: 3077 - protein, 581 aa, Homo sapiens
MDIIKGNLDGISKPASNSRIRPGSRSSNASLEVLSTEPGSFKVDTASNLNSGKEDHSESSNTENRRTSNDDKQESCSEKIKLAEEGSDEDLDLVQHQIISECSDEPKLKELDSQLQDAIQKMKKLDKILAKKQRREKEIKKQGLEMRIKLWEEIKSAKYSEAWQSKEEMENTKKFLSLTAVSEETVGPSHEEEDTFSSVFHTQIPPEEYEMQMQKLNKDFTCDVERNESLIKSGKKPFSNTEKIELRGKHNQDFIKRNIELAKESRNPVVMVDREKKRLVELLKDLDEKDSGLSSSEGDQSGWVVPVKGYELAVTQHQQLAEIDIKLQELSAASPTISSFSPRLENRNNQKPDRDGERNMEVTPGEKILRNTKEQRDLHNRLREIDEKLKMMKENVLESTSCLSEEQLKCLLDECILKQKSIIKLSSERKKEDIEDVTPVFPQLSRSIISKLLNESETKVQKTEVEDADMLESEECEASKGYYLTKALTGHNMSEALVTEAENMKCLQFSKDVIISDTKDYFMSKTLGIGRLKRPSFLDDPLYGISVSLSSEDQHLKLSSPENTIADEQETKDAAEECKEP

SEQ ID NO: 3078 - protein, 909 aa, Homo sapiens
MNAYLTKQHSCSRGSDGMDAVRSAPTLIRDAHCACGWQRNCQGLGYSSQTMPSSGPGGPASNRTGGSSFNRTLWDSVRKSPHKTSTKGKGTCGEHCTCPHGWFSPAQASPAPIIVNTDTLDTIPYVNGTEIEYEFEEITLERGNSGLGFSIAGGTDNPHIGDDPGIFITKIIPGGAAAEDGRLRVNDCILRVNEVDVSEVSHSKAVEALKEAGSIVRLYVRRRRPILETVVEIKLFKGPKGLGFSIAGGVGNQHIPGDNSIYVTKIIDGGAAQKDGRLQVGDRLLMVNNYSLEEVTHEEAVAILKNTSEVVYLKVGKPTTIYMTDPYGPPDITHSYSPPMENHLLSGNNGTLEYKTSLPPISPGRYSPIPKHMLVDDDYTRPPEPVYSTVNKLCDKPASPRHYSPVECDKSFLLSAPYSHYHLGLLPDSEMTSHSQHSTATRQPSMTLQRAVSLEGEPRKVVLHKGSTGLGFNIVGGEDGEGIFVSFILAGGPADLSGELQRGDQILSVNGIDLRGASHEQAAAALKGAGQTVTIIAQYQPEDYARFEAKIHDLREQMMNHSMSSGSGSLRTNQKRSLYVRAMFDYDKSKDSGLPSQGLSFKYGDILHVINASDDEWWQARRVMLEGDSEEMGVIPSKRRVERKERARLKTVKFNAKPGVIDSKGSFNDKRKKSFIFSRKFPFYKNKEQSEQETSDPERGQEDLILSYEPVTRQEINYTRPVIILGPMKDRINDDLISEFPDKFGSCVPHTTRPKRDYEVDGRDYHFVISREQMEKDIQEHKFIEAGQYNDNLYGTSVQSVRFVAERGKHCILDVSGNAIKRLQVAQLYPIAIFIKPRSLEPLMEMNKRLTEEQAKKTYDRAIKLEQEFGEYFTAIVQGDTLEDIYNQCKLVIEEQSGPFIWIPSKEKL

SEQ ID NO: 3079 - protein, 383 aa, Homo sapiens
MAGIPGLLFLLFFLLCAVGQVSPYSAPWKPTWPAYRLPVVLPQSTLNLAKPDFGAEAKLEVSSSCGPQCHKGTPLPTYEEAKQYLSYETLYANGSRTETQVGIYILSSSGDGAQHRDSGSSGKSRRKRQIYGYDSRFSIFGKDFLLNYPFSTSVKLSTGCTGTLVAEKHVLTAAHCIHDGKTYVKGTQKLRVGFLKPKFKDGGRGANDSTSAMPEQMKFQWIRVKRTHVPKGWIKGNANDIGMDYDYALLELKKPHKRKFMKIGVSPPAKQLPGGRIHFSGYDNDRPGNLVYRFCDVKDETYDLLYQQCDAQPGASGSGVYVRMWKRQQQKWERKIIGIFSGHQWVDMNGSPQDFNVAVRITPLKYAQICYWIKGNYLDCREG

SEQ ID NO: 3080 - protein, 693 aa, Homo sapiens
MLGKGVVGGGGGTKAPKPSFVSYVRPEEIHTNEKEVTEKEVTLHLLPGEQLLCEASTVLKYVQEDSCQHGVYGRLVCTDFKIAFLGDDESALDNDETQFKNKVIGENDITLHCVDQIYGVFDEKKKTLFGQLKKYPEKLIIHCKDLRVFQFCLRYTKEEEVKRIVSGIIHHTQAPKLLKRLFLFSYATAAQNNTVTDPKNHTVMFDTLKDWCWELERTKGNMKYKAVSVNEGYKVCERLPAYFVVPTPLPEENVQRFQGHGIPIWCWSCHNGSALLKMSALPKEQDDGILQIQKSFLDGIYKTIHRPPYEIVKTEDLSSNFLSLQEIQTAYSKFKQLFLIDNSTEFWDTDIKWFSLLESSSWLDIIRRCLKKAIEITECMEAQNMNVLLLEENASDLCCLISSLVQLMMDPHCRTRIGFQSLIQKEWVMGGHCFLDRCNHLRQNDKEEVPVFLLFLDCVWQLVHQHPPAFEFTETYLTVLSDSLYIPIFSTFFFNSPHQKDTNMHQRQLSLPLTQSKSSPKRGFFREETDHLIKNLLGKRISKLINSSDELQDNFREFYDSWHSKSTDYHGLLLPHIEGPEIKVWAQRYLRWIPEAQILGGGQVATLSKLLEMMEEVQSLQEKIDERHHSQQAPQAEAPCLLRNSARLSSLFPFALLQRHSSKPVLPTSGWKALGDEDDLAKREDEFVDLGDV

SEQ ID NO: 3081 - protein, 541 aa, Homo sapiens
MASMGTLAFDEYGRPFLIIKDQDRKSRLMGLEALKSHIMAAKAVANTMRTSLGPNGLDKMMVDKDGDVTVTNDGATILSMMDVDHQIAKLMVELSKSQDDEIGDGTTGVVVLAGALLEEAEQLLDRGIHPIRIADGYEQAARVAIEHLDKISDSVLVDIKDTEPLIQTAKTTLGSKVVNSCHRQMAEIAVNAVLTVADMERRDVDFELIKVEGKVGGRLEDTKLIKGVIVDKDFSHPQMPKKVEDAKIAILTCPFEPPKPKTKHKLDVTSVEDYKALQKYEKEKFEEMIQQIKETGANLAICQWGFDDEANHLLLQNNLPAVRWVGGPEIELIAIATGGRIVPRFSELTAEKLGFAGLVQEISFGTTKDKMLVIEQCKNSRAVTIFIRGGNKMIIEEAKRSLHDALCVIRNLIRDNRVVYGGGAAEISCALAVSQEADKCPTLEQYAMRAFADALEVIPMALSENSGMNPIQTMTEVRARQVKEMNPALGIDCLHKGTNDMKQQHVIETLIGKKQQISLATQMVRMILKIDDIRKPGESEE

SEQ ID NO: 3082 - protein, 1865 aa, Homo sapiens
MTRWVPTKREEKYGVAFYNYDARGADELSLQIGDTVHILETYEGWYRGYTLRKKSKKGIFPASYIHLKEAIVEGKGQHETVIPGDLPLIQEVTTTLREWSTIWRQLYVQDNREMFRSVRHMIYDLIEWRSQILSGTLPQDELKELKKKVTAKIDYGNRILDLDLVVRDEDGNILDPELTSTISLFRAHEIASKQVEERLQEEKSQKQNIDINRQAKFAATPSLALFVNLKNVVCKIGEDAEVLMSLYDPVESKFISENYLVRWSSSGLPKDIDRLHNLRAVFTDLGSKDLKREKISFVCQIVRVGRMELRDNNTRKLTSGLRRPFGVAVMDVTDIINGKVDDEDKQHFIPFQPVAGENDFLQTVINKVIAAKEVNHKGQGLWVTLKLLPGDIHQIRKEFPHLVDRTTAVARKTGFPEIIMPGDVRNDIYVTLVQGDFDKGSKTTAKNVEVTVSVYDEDGKRLEHVIFPGAGDEAISEYKSVIYYQVKQPRWFETVKVAIPIEDVNRSHLRFTFRHRSSQDSKDKSEKIFALAFVKLMRYDGTTLRDGEHDLIVYKAEAKKLEDAATYLSLPSTKAELEEKGHSATGKSMQSLGSCTISKDSFQISTLVCSTKLTQNVDLLGLLKWRSNTSLLQQNLRQLMKVDGGEVVKFLQDTLDALFNIMMENSESETFDTLVFDALVFIIGLIADRKFQHFNPVLETYIKKHFSATLAYTKLTKVLKNYVDGAEKPGVNEQLYKAMKALESIFKFIVRSRILFNQLYENKGEADFVESLLQLFRSINDMMSSMSDQTVRVKGAALKYLPTIVNDVKLVFDPKELSKMFTEFILNVPMGLLTIQKLYCLIEIVHSDLFTQHDCREILLPMMTDQLKYHLERQEDLEACCQLLSHILEVLYRKDVGPTQRHVQIIMEKLLRTVNRTVISMGRDSELIGNFVACMTAILRQMEDYHYAHLIKTFGKMRTDVVDFLMETFIMFKNLIGKNVYPFDWVIMNMVQNKVFLRAINQYADMLNKKFLDQANFELQLWNNYFHLAVAFLTQESLQLENFSSAKRAKILNKYGDMRRQIGFEIRDMWYNLGQHKIKFIPEMVGPILEMTLIPETELRKATIPIFFDMMQCEFHSTRSFQMFENEIITKLDHEVEGGRGDEQYKVLFDKILLEHCRKHKYLAKTGETFVKLVVRLMERLLDYRTIMHDENKENRMSCTVNVLNFYKEIEREEMYIRYLYKLCDLHKECDNYTEAAYTLLLHAKLLKWSEDVCVAHLTQRDGYQATTQGQLKEQLYQEIIHYFDKGKMWEEAIALGKELAEQYENEMFDYEQLSELLKKQAQFYENIVKVIRPKPDYFAVGYYGQGFPTFLRGKVFIYRGKEYERREDFEARLLTQFPNAEKMKTTSPPGDDIKNSPGQYIQCFTVKPKLDLPPKFHRPVSEQIVSFYRVNEVQRFEYSRPIRKGEKNPDNEFANMWIERTIYTTAYKLPGILRWFEVKSVFMVEISPLENAIETMQLTNDKINSMVQQHLDDPSLPINPLSMLLNGIVDPAVMGGFANYEKAFFTDRYLQEHPEAHEKIEKLKDLIAWQIPFLAEGIRIHGDKVTEALRPFHERMEACFKQLKEKVEKEYGVRIMPSSLDDRRGSRPRSMVRSFTMPSSSRPLSVASVSSLSSDSTPSRPGSDGFALEPLLPKKMHSRSQDKLDKDDLEKEKKDKKKEKRNSKHQEIFEKEFKPTDISLQQSEAVILSETISPLRPQRPKSQVMNVIGSERRFSVSPSSPSSQQTPPPVTPRAKLSFSMQSSLELNGMTGADVADVPPPLPLKGSVADYGNLMENQDLLGSPTPPPPPPHQRHLPPPLPSKTPPPPPPKTTRKQASVDSGIVQ

SEQ ID NO: 3083 - protein, 647 aa, Homo sapiens
MWRVCARRAQNVAPWAGLEARWTALQEVPGTPRVTSRSGPAPARRNSVTTGYGGVRALCGWTPSSGATPRNRLLLQLLGSPGRRYYSLPPHQKVPLPSLSPTMQAGTIARWEKKEGDKINEGDLIAEVETDKATVGFESLEECYMAKILVAEGTRDVPIGAIICITVGKPEDIEAFKNYTLDSSAAPTPQAAPAPTPAATASPPTPSAQAPGSSYPPHMQVLLPALSPTMTMGTVQRWEKKVGEKLSEGDLLAEIETDKATIGFEVQEEGYLAKILVPEGTRDVPLGTPLCIIVEKEADISAFADYRPTEVTDLKPQVPPPTPPPVAAVPPTPQPLAPTPSAPCPATPAGPKGRVFVSPLAKKLAVEKGIDLTQVKGTGPDGRITKKDIDSFVPSKVAPAPAAVVPPTGPGMAPVPTGVFTDIPISNIRRVIAQRLMQSKQTIPHYYLSIDVNMGEVLLVRKELNKILEGRSKISVNDFIIKASALACLKVPEANSSWMDTVIRQNHVVDVSVAVSTPAGLITPIVFNAHIKGVETIANDVVSLATKAREGKLQPHEFQGGTFTISNLGMFGIKNFSAIINPPQACILAIGASEDKLVPADNEKGFDVASMMSVTLSCDHRVVDGAVGAQWLAEFRKYLEKPITMLL

SEQ ID NO: 3084 - protein, 193 aa, Homo sapiens
MAAEPVEDNCINFVAMKFIDNTLYFIAEDDENLESDYFGKLESKLSVIRNLNDQVLFIDQGNRPLFEDMTDSDCRDNAPRTIFIISMYKDSQPRGMAVTISVKCEKISTLSCENKIISFKEMNPPDNIKDTKSDIIFFQRSVPGHDNKMQFESSSYEGYFLACEKERDLFKLILKKEDELGDRSIMFTVQNED

SEQ ID NO: 3085 - protein, 145 aa, Homo sapiens
MSTEGGGRRCQAQVSRRISFSASHRLYSKFLSDEENLKLFGKCNNPNGHGHNYKVVVTVHGEIDPATGMVMNLADLKKYMEEAIMQPLDHKNLDMDVPYFADVVSTTENVAVYIWDNLQKVLPVGVLYKVKVYETDNNIVVYKGE

SEQ ID NO: 3086 - protein, 981 aa, Homo sapiens
MAEGGAADLDTQRSDIATLLKTSLRKGDTWYLVDSRWFKQWKKYVGFDSWDKYQMGDQNVYPGPIDNSGLLKDGDAQSLKEHLIDELDYILLPTEGWNKLVSWYTLMEGQEPIARKVVEQGMFVKHCKVEVYLTELKLCENGNMNNVVTRRFSKADTIDTIEKEIRKIFSIPDEKETRLWNKYMSNTFEPLNKPDSTIQDAGLYQGQVLVIEQKNEDGTWPRGPSTPKSPGASNFSTLPKISPSSLSNNYNNMNNRNVKNSNYCLPSYTAYKNYDYSEPGRNNEQPGLCGLSNLGNTCFMNSAIQCLSNTPPLTEYFLNDKYQEELNFDNPLGMRGEIAKSYAELIKQMWSGKFSYVTPRAFKTQVGRFAPQFSGYQQQDCQELLAFLLDGLHEDLNRIRKKPYIQLKDADGRPDKVVAEEAWENHLKRNDSIIVDIFHGLFKSTLVCPECAKISVTFDPFCYLTLPLPMKKERTLEVYLVRMDPLTKPMQYKVVVPKIGNILDLCTALSALSGIPADKMIVTDIYNHRFHRIFAMDENLSSIMERDDIYVFEININRTEDTEHVIIPVCLREKFRHSSYTHHTGSSLFGQPFLMAVPRNNTEDKLYNLLLLRMCRYVKISTETEETEGSLHCCKDQNINGNGPNGIHEEGSPSEMETDEPDDESSQDQELPSENENSQSEDSVGGDNDSENGLCTEDTCKGQLTGHKKRLFTFQFNNLGNTDINYIKDDTRHIRFDDRQLRLDERSFLALDWDPDLKKRYFDENAAEDFEKHESVEYKPPKKPFVKLKDCIELFTTKEKLGAEDPWYCPNCKEHQQATKKLDLWSLPPVLVVHLKRFSYSRYMRDKLDTLVDFPINDLDMSEFLINPNAGPCRYNLIAVSNHYGGMGGGHYTAFAKNKDDGKWYYFDDSSVSTASEDQIVSKAAYVLFYQRQDTFSGTGFFPLDRETKGASAATGIPLESDEDSNDNDNDIENENCMHTN

SEQ ID NO: 3087 - protein, 1036 aa, Homo sapiens
MYLVAGDRGLAGCGHLLVSLLGLLLLLARSGTRALVCLPCDESKCEEPRNCPGSIVQGVCGCCYTCASQRNESCGGTFGIYGTCDRGLRCVIRPPLNGDSLTEYEAGVCEDENWTDDQLLGFKPCNENLIAGCNIINGKCECNTIRTCSNPFEFPSQDMCLSALKRIEEEKPDCSKARCEVQFSPRCPEDSVLIEGYAPPGECCPLPSRCVCNPAGCLRKVCQPGNLNILVSKASGKPGECCDLYECKPVFGVDCRTVECPPVQQTACPPDSYETQVRLTADGCCTLPTRCECLSGLCGFPVCEVGSTPRIVSRGDGTPGKCCDVFECVNDTKPACVFNNVEYYDGDMFRMDNCRFCRCQGGVAICFTAQCGEINCERYYVPEGECCPVCEDPVYPFNNPAGCYANGLILAHGDRWREDDCTFCQCVNGERHCVATVCGQTCTNPVKVPGECCPVCEEPTIITVDPPACGELSNCTLTGKDCINGFKRDHNGCRTCQCINTEELCSERKQGCTLNCPFGFLTDAQNCEICECRPRPKKCRPIICDKYCPLGLLKNKHGCDICRCKKCPELSCSKICPLGFQQDSHGCLICKCREASASAGPPILSGTCLTVDGHHHKNEESWHDGCRECYCLNGREMCALITCPVPACGNPTIHPGQCCPSCADDFVVQKPELSTPSICHAPGGEYFVEGETWNIDSCTQCTCHSGRVLCETEVCPPLLCQNPSRTQDSCCPQCTDQPFRPSLSRNNSVPNYCKNDEGDIFLAAESWKPDVCTSCICIDSVISCFSESCPSVSCERPVLRKGQCCPYCIEDTIPKKVVCHFSGKAYADEERWDLDSCTHCYCLQGQTLCSTVSCPPLPCVEPINVEGSCCPMCPEMYVPEPTNIPIEKTNHRGEVDLEVPLWPTPSENDIVHLPRDMGHLQVDYRDNRLHPSEDSSLDSIASVVVPIIICLSIIIAFLFINQKKQWIPLLCWYRTPTKPSSLNNQLVSVDCKKGTRVQVDSSQRMLRIAEPDARFSGFYSMQKQNHLQADNFYQTV

SEQ ID NO: 3088 - protein, 1032 aa, Homo sapiens
MSQQGYVATPPYSQPQPGIGLSPPHYGHYGDPSHTASPTGMMKPAGPLGATATRGMLPPGPPPPGPHQFGQNGAHATGHPPQRFPGPPPVNNVASSHAPYQPSAQSSYPGPISTSSVTQLGSQLSAMQINSYGSGMAPPSQGPPGPLSATSLQTPPRPPQPSILQPGSQVLPPPPTTLNGPGASPLPLPMYRPDGLSGPPPPNAQYQPPPLPGQTLGAGYPPQQANSGPQMAGAQLSYPGGFPGGPAQMAGPPQPQKKLDPDSIPSPIQVIENDRASRGGQVYATNTRGQIPPLVTTDCMIQDQGNASPRFIRCTTYCFPCTSDMAKQAQIPLAAVIKPFATIPSNESPLYLVNHGESGPVRCNRCKAYMCPFMQFIEGGRRYQCGFCNCVNDVPPFYFQHLDHIGRRLDHYEKPELSLGSYEYVATLDYCRKSKPPNPPAFIFMIDVSYSNIKNGLVKLICEELKTMLEKIPKEEQEETSAIRVGFITYNKVLHFFNVKSNLAQPQMMVVTDVGEVFVPLLDGFLVNYQESQSVIHNLLDQIPDMFADSNENETVFAPVIQAGMEALKAADCPGKLFIFHSSLPTAEAPGKLKNRDDKKLVNTDKEKILFQPQTNVYDSLAKDCVAHGCSVTLFLFPSQYVDVASLGLVPQLTGGTLYKYNNFQMHLDRQQFLNDLRNDIEKKIGFDAIMRVRTSTGFRATDFFGGILMNNTTDVEMAAIDCDKAVTVEFKHDDKLSEDSGALIQCAVLYTTISGQRRLRIHNLGLNCSSQLADLYKSCETDALINFFAKSAFKAVLHQPLKVIREILVNQTAHMLACYRKNCASPSAASQLILPDSMKVLPVYMNCLLKNCVLLSRPEISTDERAYQRQLVMTMGVADSQLFFYPQLLPIHTLDVKSTMLPAAVRCSESRLSEEGIFLLANGLHMFLWLGVSSPPELIQGIFNVPSFAHINTDMTLLPEVGNPYSQQLRMIMGIIQQKRPYSMKLTIVKQREQPEMVFRQFLVEDKGLYGGSSYVDFLCCVHKEICQLLN

SEQ ID NO: 3089 - protein, 198 aa, Homo sapiens
MAADISESSGADCKGDPRNSAKLDADYPLRVLYCGVCSLPTEYCEYMPDVAKCRQWLEKNFPNEFAKLTVENSPKQEAGISEGQGTAGEEEEKKKQKRGGRGQIKQKKKTVPQKVTIAKIPRAKKKYVTRVCGLATFEIDLKEAQRFFAQKFSCGASVTGEDEIIIQGDFTDDIIDVIQEKWPEVDDDSIEDLGEVKK

SEQ ID NO: 3090 - protein, 1343 aa, Homo sapiens
MIIKEYRIPLPMTVEEYRIAQLYMIQKKSRNETYGEGSGVEILENRPYTDGPGGSGQYTHKVYHVGMHIPSWFRSILPKAALRVVEESWNAYPYTRTRFTCPFVEKFSIDIETFYKTDAGENPDVFNLSPVEKNQLTIDFIDIVKDPVPHNEYKTEEDPKLFQSTKTQRGPLSENWIEEYKKQVFPIMCAYKLCKVEFRYWGMQSKIERFIHDTGLRRVMVRAHRQAWCWQDEWYGLSMENIRELEKEAQLMLSRKMAQFNEDGEEATELVKHEAVSDQTSGEPPEPSSSNGEPLVGRGLKKQWSTSSKSSRSSKRGASPSRHSISEWRMQSIARDSDESSDDEFFDAHEDLSDTEEMFPKDITKWSSNDLMDKIESPEPEDTQDGLYRQGAPEFRVASSVEQLNIIEDEVSQPLAAPPSKIHVLLLVLHGGTILDTGAGDPSSKKGDANTIANVFDTVMRVHYPSALGRLAIRLVPCPPVCSDAFALVSNLSPYSHDEGCLSSSQDHIPLAALPLLATSSPQYQEAVATVIQRANLAYGDFIKSQEGMTFNGQVCLIGDCVGGILAFDALCYSNQPVSESQSSSRRGSVVSMQDNDLLSPGILMNAAHCCGGGGGGGGGGGSSGGGGSSGGSSLESSRHLSRSNVDIPRSNGTEDPKRQLPRKRSDSSTYELDTIQQHQAFLSSLHASVLRTEPCSRHSSSSTMLDGTGALGRFDFEITDLFLFGCPLGLVLALRKTVIPALDVFQLRPACQQVYNLFHPADPSASRLEPLLERRFHALPPFSVPRYQRYPLGDGCSTLLVETVQRNPELVLEGGPLAPLPHGDGFLETSMPVPAPTWQDGPRPGCAESDVLQTHNAAFQEHGAPSSPGTAPASRGFRRASEISIASQVSGMAESYTASSIAQIAAKWWGQKRIDYALYCPDALTAFPTVALPHLFHASYWESTDVVSFLLRQVMRHDNSSILELDGKEVSVFTPSKPREKWQRKRTHVKLRNVTANHRINDALANEDGPQVLTGRFMYGPLDMVTLTGEKVDVHIMTQPPSGEWLYLDTLVTNNSGRVSYTIPESHRLGVGVYPIKMVVRGDHTFADSYITVLPKGTEFVVFSIDGSFAASVSIMGSDPKVRAGAVDVVRHWQDLGYLIIYVTGRPDMQKQRVVAWLAQHNFPHGVVSFCDGLVHDPLRHKANFLKLLISELHLRVHAAYGSTKDVAVYSAISLSPMQIYIVGRPTKKLQQQCQFITDGYAAHLAQLKYSHRARPARNTATRMALRKGSFGLPGQGDFLRSRNHLLRTISAQPSGPSHRHERTQSQADGEQRGQRSMSVAAGCWGRAMTGRLEPGAAAGPK

SEQ ID NO: 3091 - protein, 211 aa, Homo sapiens
MEEPPVREEEEEEGEEDEERDEVGPEGALGKSPFQLTAEDVYDISYLLGRELMALGSDPRVTQLQFKVVRVLEMLEALVNEGSLALEELKMERDHLRKEVEGLRRQSPPASGEVNLGPNKMVVDLTDPNRPRFTLQELRDVLQERNKLKSQLLVVQEELQCYKSGLIPPREGPGGRREKDAVVTSAKNAGRNKEEKTIIKKLFFFRSGKQT

SEQ ID NO: 3092 - protein, 553 aa, Homo sapiens
MKWCWGPVLLIAGATVLMEGLQAAQRACGQRGPGPPKPQEGNTVPGEWPWQASVRRQGAHICSGSLVADTWVLTAAHCFEKAAATELNSWSVVLGSLQREGLSPGAEEVGVAALQLPRAYNHYSQGSDLALLQLAHPTTHTPLCLPQPAHRFPFGASCWATGWDQDTSDAPGTLRNLRLRLISRPTCNCIYNQLHQRHLSNPARPGMLCGGPQPGVQGPCQGDSGGPVLCLEPDGHWVQAGIISFASSCAQEDAPVLLTNTAAHSSWLQARVQGAAFLAQSPETPEMSDEDSCVACGSLRTAGPQAGAPSPWPWEARLMHQGQLACGGALVSEEAVLTAAHCFIGRQAPEEWSVGLGTRPEEWGLKQLILHGAYTHPEGGYDMALLLLAQPVTLGASLRPLCLPYPDHHLPDGERGWVLGRARPGAGISSLQTVPVTLLGPRACSRLHAAPGGDGSPILPGMVCTSAVGELPSCEGLSGAPLVHEVRGTWFLAGLHSFGDACQGPARPAVFTALPAYEDWVSSLDWQVYFAEEPEPEAEPGSCLANISQPTSC

SEQ ID NO: 3093 - protein, 501 aa, Homo sapiens
MVRKPVVSTISKGGYLQGNVNGRLPSLGNKEPPGQEKVQLKRKVTLLRGVSIIIGTIIGAGIFISPKGVLQNTGSVGMSLTIWTVCGVLSLFGALSYAELGTTIKKSGGHYTYILEVFGPLPAFVRVWVELLIIRPAATAVISLAFGRYILEPFFIQCEIPELAIKLITAVGITVVMVLNSMSVSWSARIQIFLTFCKLTAILIIIVPGVMQLIKGQTQNFKDAFSGRDSSITRLPLAFYYGMYAYAGWFYLNFVTEEVENPEKTIPLAICISMAIVTIGYVLTNVAYFTTINAEELLLSNAVAVTFSERLLGNFSLAVPIFVALSCFGSMNGGVFAVSRLFYVASREGHLPEILSMIHVRKHTPLPAVIVLHPLTMIMLFSGDLDSLLNFLSFARWLFIGLAVAGLIYLRYKCPDMHRPFKVPLFIPALFSFTCLFMVALSLYSDPFSTGIGFVITLTGVPAYYLFIIWDKKPRWFRIMSEKITRTLQIILEVVPEEDKL

SEQ ID NO: 3094 - protein, 431 aa, Homo sapiens
MFHSPRRLCSALLQRDAPGLRRLPAPGLRRPLSPPAAVPRPASPRLLAAASAASGAARSCSRTVCSMGTGTSRLYSALAKTLNSSAASQHPEYLVSPDPEHLEPIDPKELLEECRAVLHTRPPRFQRDFVDLRTDCPSTHPPIRVMQWNILAQALGEGKDNFVQCPVEALKWEERKCLILEEILAYQPDILCLQEVDHYFDTFQPLLSRLGYQGTFFPKPWSPCLDVEHNNGPDGCALFFLQNRFKLVNSANIRLTAMTLKTNQVAIAQTLECKESGRQFCIAVTHLKARTGWERFRSAQGCDLLQNLQNITQGAKIPLIVCGDFNAEPTEEVYKHFASSSLNLNSAYKLLSADGQSEPPYTTWKIRTSGECRHTLDYIWYSKHALNVRSALDLLTEEQIGPNRLPSFNYPSDHLSLVCDFSFTEESDGLS

SEQ ID NO: 3095 - protein, 617 aa, Homo sapiens
MAAVAAGGLVGKGRDISLAALQRHDPYINRIVDVASQVALYTFGHRANEWEKTDVEGTLFVYTRSASPKHGFTIMNRLSMENRTEPITKDLDFQLQDPFLLYRNARLSIYGIWFYDKEECQRIAELMKNLTQYEQLKAHQGTGAGISPVILNSGEGKEVDILRMLIKAKDEYTKCKTCSEPKKITSSSAIYDNPNLIKPIPVKPSENQQQRIPQPNQTLDPEPQHLSLTALFGKQDKATCQETVEPPQTLHQQQQQQQQQQEKLPIRQGVVRSLSYEEPRRHSPPIEKQLCPAIQKLMVRSADLHPLSELPENRPCENGSTHSAGEFFTGPVQPGSPHNIGTSRGVQNASRTQNLFEKLQSTPGAANKCDPSTPAPASSAALNRSRAPTSVTPVAPGKGLAQPPQAYFNGSLPPQTVGHQAHGREQSTLPRQTLPISGSQTGSSGVISPQELLKKLQIVQQEQQLHASNRPALAAKFPVLAQSSGTGKPLESWINKTPNTEQQTPLFQVISPQRIPATAAPSLLMSPMVFAQPTSVPPKERESGLLPVGGQEPPAAATSLLLPIQSPEPSVITSSPLTKLQLQEALLYLIQNDDNFLNIIYEAYLFSMTQAAMKKTM

SEQ ID NO: 3096 - protein, 654 aa, Homo sapiens [sequence omitted]

SEQ ID NO: 3097 - protein, 332 aa, Homo sapiens
MSTVKEQLIEKLIEDDENSQCKITIVGTGAVGMACAISILLKDLADELALVDVALDKLKGEMMDLQHGSLFFSTSKITSGKDYSVSANSRIVIVTAGARQQEGETRLALVQRNVAIMKSIIPAIVHYSPDCKILVVSNPVDILTYIVWKISGLPVTRVIGSGCNLDSARFRYLIGEKLGVHPTSCHGWIIGEHGDSSVPLWSGVNVAGVALKTLDPKLGTDSDKEHWKNIHKQVIQSAYEIIKLKGYTSWAIGLSVMDLVGSILKNLRRVHPVSTMVKGLYGIKEELFLSIPCVLGRNGVSDVVKINLNSEEEALFKKSAETLWNIQKDLIF

SEQ ID NO: 3098 - protein, 116 aa, Homo sapiens
MNQTDKNQQEIPSYLNDEPPEGSMKDHPQQQPGMLSRVTGGIFSVTKGAVGATIGGVAWIGGKSLEVTKTAVTTVPSMGIGLVKGGVSAVAGGVTAVGSAVVNKVPLTGKKKDKSD

SEQ ID NO: 3099 - protein, 1104 aa, Homo sapiens
MARRGKKPVVRTLEDLTLDSGYGGAADSVRSSNLSLCCSDSHPASPYGGSCWPPLADSMHSRHNSFDTVNTALVEDSEGLDCAGQHCSRLLPDLDEVPWTLQELEALLLRSRDPRAGPAVPGGLPKDALAKLSTLVSRALVRIAKEAQRLSLRFAKCTKYEIQSAMEIVLSWGLAAHCTAAALAALSLYNMSSAGGDRLGRGKSARCGLTFSVGRVYRWMVDSRVALRIHEHAAIYLTACMESLFRDIYSRVVASGVPRSCSGPGSGSGSGPGPSSGPGAAPAADKEREAPGGGAASGGACSAASSASGGSSCCAPPAAAAAAVPPAAAANHHHHHHHALHEAPKFTVETLEHTVNNDSEIWGLLQPYQHLICGKNASGVLCLPDSLNLHRDPQRSNKPGELPMFSQSELRTIEQSLLATRVGSIAELSDLVSRAMHHLQPLNAKHHGNGTPLHHKQGALYWEPEALYTLCYFMHCPQMEWENPNVEPSKVNLQVERPFLVLPPLMEWIRVAVAHAGHRRSFSMDSDDVRQAARLLLPGVDCEPRQLRADDCFCASRKLDAVAIEAKFKQDLGFRMLNCGRTDLVKQAVSLLGPDGINTMSEQGMTPLMYACVRGDEAMVQMLLDAGADLNVEVVSTPHKYPSVHPETRHWTALTFAVLHGHIPVVQLLLDAGAKVEGSVEHGEENYSETPLQLAAAVGNFELVSLLLERGADPLIGTMYRNGISTTPQGDMNSFSQAAAHGHRNVFRKLLAQPEKEKSDILSLEEILAEGTDLAETAPPPLCASRNSKAKLRALREAMYHSAEHGYVDVTIDIRSIGVPWTLHTWLESLRIAFQQHRRPLIQCLLKEFKTIQEEEYTEELVTQGLPLMFEILKASKNEVISQQLCVIFTHCYGPYPIPKLTEIKRKQTSRLDPHFLNNKEMSDVTFLVEGRPFYAHKVLLFTASPRFKALLSSKPTNDGTCIEIGYVKYSIFQLVMQYLYYGGPESLLIKNNEIMELLSAAKFFQLEALQRHCEIICAKSINTDNCVDIYNHAKFLGVTELSAYCEGYFLKNMMVLIENEAFKQLLYDKNGEGTGQDVLQDLQRTLAIRIQSIHLSSSKGSVV

SEQ ID NO: 3100 - protein, 589 aa, Homo sapiens
MVGQMYCYPGSHLARALTRALALALVLALLVGPFLSGLAGAIPAPGGRWARDGQVPPASRSRSVLLDVSAGQLLMVDGRHPDAVAWANLTNAIRETGWAFLELGTSGQYNDSLQAYAAGVVEAAVSEELIYMHWMNTVVNYCGPFEYEVGYCERLKSFLEANLEWMQEEMESNPDSPYWHQVRLTLLQLKGLEDSYEGRVSFPAGKFTIKPLGFLLLQLSGDLEDLELALNKTKIKPSLGSGSCSALIKLLPGQSDLLVAHNTWNNYQHMLRVIKKYWLQFREGPWGDYPLVPGNKLVFSSYPGTIFSCDDFYILGSGLVTLETTIGNKNPALWKYVRPRGCVLEWVRNIVANRLASDGATWADIFKRFNSGTYNNQWMIVDYKAFIPGGPSPGSRVLTILEQIPGMVVVADKTSELYQKTYWASYNIPSFETVFNASGLQALVAQYGDWFSYDGSPRAQIFRRNQSLVQDMDSMVRLMRYNDFLHDPLSLCKACNPQPNGENAISARSDLNPANGSYPFQALRQRSHGGIDVKVTSMSLARILSLLAASGPTWDQVPPFQWSTSPFSGLLHMGQPDLWKFAPVKVSWD

SEQ ID NO: 3101 - protein, 648 aa, Homo sapiens
MSRKASENVEYTLRSLSSLMGERRRKQPEPDAASAAGECSLLAAAESSTSLQSAGAGGGGVGDLERAARRQFQQDETPAFVYVVAVFSALGGFLFGYDTGVVSGAMLLLKRQLSLDALWQELLVSSTVGAAAVSALAGGALNGVFGRRAAILLASALFTAGSAVLAAANNKETLLAGRLVVGLGIGIASMTVPVYIAEVSPPNLRGRLVTINTLFITGGQFFASVVDGAFSYLQKDGWRYMLGLAAVPAVIQFFGFLFLPESPRWLIQKGQTQKARRILSQMRGNQTIDEEYDSIKNNIEEEEKEVGSAGPVICRMLSYPPTRRALIVGCGLQMFQQLSGINTIMYYSATILQMSGVEDDRLAIWLASVTAFTNFIFTLVGVWLVEKVGRRKLTFGSLAGTTVALIILALGFVLSAQVSPRITFKPIAPSGQNATCTRYSYCNECMLDPDCGFCYKMNKSTVIDSSCVPVNKASTNEAAWGRCENETKFKTEDIFWAYNFCPTPYSWTALLGLILYLVFFAPGMGPMPWTVNSEIYPLWARSTGNACSSGINWIFNVLVSLTFLHTAEYLTYYGAFFLYAGFAAVGLLFIYGCLPETKGKKLEEIESLFDNRLCTCGTSDSDEGRYIEYIRVKGSNYHLSDNDASDVE

SEQ ID NO: 3102 - protein, 409 aa, Homo sapiens
MRRYLRVVVLCVACGFCSLLYAFSQLAVSLEEGTGGGGGKPQAAVASWLAGGGRGAVRGAGVAGPAAHPGVSDRYSLKIQPVEKMHLAVVACGERLEETMTMLKSAIIFSIKPLQFHIFAEDQLHHSFKGRLDNWSFLQTFNYTLYPITFPSENAAEWKKLFKPCASQRLFLPLILKEVDSLLYVDTDILFLRPVDDIWSLLKKFNSTQIAAMAPEHEEPRIGWYNRFARHPYYGKTGVNSGVMLMNMTRMRRKYFKNDMTTVRLQWGDILMPLLKKYKLNITWGDQDLLNIVFFHNPESLFVFPCQWNYRPDHCIYGSNCQEAEEGGIFILHGNRGVYHDDKQPAFRAVYEALRNCSFEDDNIRSLLKPLELELQKTVHTYCGKIYKIFIKQLAKSVRDRYARSPKEK

SEQ ID NO: 3103 - protein, 323 aa, Homo sapiens
MPEMPEDMEQEEVNIPNRRVLVTGATGLLGRAVHKEFQQNNWHAVGCGFRRARPKFEQVNLLDSNAVHHIIHDFQPHVIVHCAAERRPDVVENQPDAASQLNVDASGNLAKEAAAVGAFLIYISSDYVFDGTNPPYREEDIPAPLNLYGKTKLDGEKAVLENNLGAAVLRIPILYGEVEKLEESAVTVMFDKVQFSNKSANMDHWQQRFPTHVKDVATVCRQLAEKRMLDPSIKGTFHWSGNEQMTKYEMACAIADAFNLPSSHLRPITDSPVLGAQRPRNAQLDCSKLETLGIGQRTPFRIGIKESLWPFLIDKRWRQTVFH

SEQ ID NO: 3104 - protein, 236 aa, Homo sapiens
MEVGLPAITLFLTSASSPVVATTMDQEPVGGVERGEAVAASGAAAAAAFGESAGQMSNERGFENVELGVIGKKKKVPRRVIHFVSGETMEEYSTDEDEVDGLEKKDVLPTVDPTKLTWGPYLWFYMLRAATSTLSVCDFLGEKIASVLGISTPKYQYAIDEYYRMKKEEEEEEEENRMSEEAEKQYQQNKLQTDSIVQTDQPETVISSSFVNVNFEMEGDSEVIMESKQNPVSVPP

SEQ ID NO: 3105 - protein, 140 aa, Homo sapiens
MPSAFSVSSFPVSIPAVLTQTDWTEPWLMGLATFHALCVLLTCLSSRSYRLQIGHFLCLVILVYCAEYINEAAAMNWRLFSKYQYFDSRGMFISIVFSAPLLVNAMIIVVMWVWKTLNVMTDLKNAQERRKEKKRRRKED

SEQ ID NO: 3106 - protein, 146 aa, Homo sapiens
MQVLTKRYPKNCLLTVMDRYAAEVHNMEQVVMIPSLLRDVQLSGPGGQAQAEAPDLYTYFTMLKAICVDVDHGLLPREEWQAKVAGSEENGTAETEEVEDESASGELDLEAQFHLHFSSLHHILMHLTEKAQEVTRKYQEMTGQVW

SEQ ID NO: 3107 - protein, 119 aa, Homo sapiens
MIARRNPEPLRFLPDEARSLPPPKLTDPRLLYIGFLGYCSGLIDNLIRRRPIATAGLHRQLLYITAFFFAGYYLVKREDYLYAVRDREMFGYMKLHPEDFPEEDKKTYGEIFEKFHPIR

SEQ ID NO: 3108 - protein, 477 aa, Homo sapiens
MLGVRCLLRSVRFCSSAPFPKHKPSAKLSVRDALGAQNASGERIKIQGWIRSVRSQKEVLFLHVNDGSSLESLQVVADSGLDSRELNFGSSVEVQGQLIKSPSKRQNVELKAEKIKVIGNCDAKDFPIKYKERHPLEYLRQYPHFRCRTNVLGSILRIRSEATAAIHSFFKDSGFVHIHTPIITSNDSEGAGELFQLEPSGKLKVPEENFFNVPAFLTVSGQLHLEVMSGAFTQVFTFGPTFRAENSQSRRHLAEFYMIEAEISFVDSLQDLMQVIEELFKATTMMVLSKCPEDVELCHKFIAPGQKDRLEHMLKNNFLIISYTEAVEILKQASQNFTFTPEWGADLRTEHEKYLVKHCGNIPVFVINYPLTLKPFYMRDNEDGPQHTVAAVDLLVPGVGELFGGGLREERYHFLEERLARSGLTEVYQWYLDLRRFGSVPHGGFGMGFERYLQCILGVDNIKDVIPFPRFPHSCLL

SEQ ID NO: 3109 - protein, 319 aa, Homo sapiens
MGIWQRLLLFGGVSLRAGGGATAPLGGSRAMVCGRQLSGAGSETLKQRRTQIMSRGLPKQKPIEGVKQVIVVASGKGGVGKSTTAVNLALALAANDSSKAIGLLDVDVYGPSVPKMMNLKGNPELSQSNLMRPLLNYGIACMSMGFLVEESEPVVWRGLMVMSAIEKLLRQVDWGQLDYLVVDMPPGTGDVQLSVSQNIPITGAVIVSTPQDIALMDAHKGAEMFRRVHVPVLGLVQNMSVFQCPKCKHKTHIFGADGARKLAQTLGLEVLGDIPLHLNIREASDTGQPIVFSQPESDEAKAYLRIAVEVVRRLPSPSE

SEQ ID NO: 3110 - protein, 822 aa, Homo sapiens
MGFGSDLKNSHEAVLKLQDWELRLLETVKKFMALRIKSDKEYASTLQNLCNQVDKESTVQMNYVSNVSKSWLLMIQQTEQLSRIMKTHAEDLNSGPLHRLTMMIKDKQQVKKSYIGVHQQIEAEMIKVTKTELEKLKCSYRQLIKEMNSAKEKYKEALAKGKETEKAKERYDKATMKLHMLHNQYVLALKGAQLHQNQYYDITLPLLLDSLQKMQEEMIKALKGIFDEYSQITSLVTEEIVNVHKEIQMSVEQIDPSTEYNNFIDVHRTTAAKEQEIEFDTSLLEENENLQANEIMWNNLTAESLQVMLKTLAEELMQTQQMLLNKEEAVLELEKRIEESSETCEKKSDIVLLLSQKQALEELKQSVQQLRCTEAKFSAQKELLEQKVQENDGKEPPPVVNYEEDARSVTSMERKERLSKFESIRHSIAGIIRSPKSALGSSALSDMISISEKPLAEQDWYHGAIPRIEAQELLKKQGDFLVRESHGKPGEYVLSVYSDGQRRHFIIQYVDNMYRFEGTGFSNIPQLIDHHYTTKQVITKKSGVVLLNPIPKDKKWILSHEDVILGELLGKGNFGEVYKGTLKDKTSVAVKTCKEDLPQELKIKFLQEAKILKQYDHPNIVKLIGVCTQRQPVYIIMELVSGGDFLTFLRRKKDELKLKQLVKFSLDAAAGMLYLESKNCIHRDLAARNCLVGENNVLKISDFGMSRQEDGGVYSSSGLKQIPIKWTAPEALNYGRYSSESDVWSFGILLWETFSLGVCPYPGMTNQQAREQVERGYRMSAPQHCPEDISKIMMKCWDYKPENRPKFSELQKELTIIKRKLT

SEQ ID NO: 3111 - protein, 336 aa, Homo sapiens
MKKEHVLHCQFSAWYPFFRGVTIKSVILPLPQNVKDYLLDDGTLVVSGRDDPPTHSQPDSDDEAEEIQWSDDENTATLTAPEFPEFATKVQEAINSLGGSVFPKLNWSAPRDAYWIAMNSSLKCKTLSDIFLLFKSSDFITRDFTQPFIHCTDDSPDPCIEYELVLRKWCELIPGAEFRCFVKENKLIGISQRDYTQYYDHISKQKEEIRRCIQDFFKKHIQYKFLDEDFVFDIYRDSRGKVWLIDFNPFGEVTDSLLFTWEELISENNLNGDFSEVDAQEQDSPAFRCTNSEVTVQPSPYLSYRLPKDFVDLSTGEDAHKLIDFLKLKRNQQEDD

SEQ ID NO: 3112 - protein, 688 aa, Homo sapiens
MAAEIDFLREQNRRLNEDFRRYQMESFSKYSSVQKAVCQGEGDDTFENLVFDQSFLAPLVTEYDKHLGELNGQLKYYQKQVGEMKLQLENVIKENERLHSELKDAVEKKLEAFPLGTEVGTDIYADDETVRNLQEQLQLANQEKTQAVELWQTVSQELDRLHKLYQEHMTEAQIHVFESQKQKDQLFDFQQLTKQLHVTNENMEVTNQQFLKTVTEQSVIIEQLRKKLRQAKLELRVAVAKVEELTNVTEDLQGQMKKKEKDVVSAHGREEASDRRLQQLQSSIKQLEIRLCVTIQEANQLRTENTHLEKQTRELQAKCNELENERYEAIVRARNSMQLLEEANLQKSQALLEEKQKEEDIEKMKETVSRFVQDATIRTKKEVANTKKQCNIQISRLTEELSALQMECAEKQGQIERVIKEKKAVEEELEKIYREGRGNESDYRKLEEMHQRFLVSERSKDDLQLRLTRAENRIKQLETDSSEEISRYQEMIQKLQNVLESERENCGLVSEQRLKLQQENKQLRKETESLRKIALEAQKKAKVKISTMEHEFSIKERGFEVQLREMEDSNRNSIVELRHLLATQQKAANRWKEETKKLTESAEIRINNLKSELSRQKLHTQELLSQLEMANEKVAENEKLILEHQEKANRLQRRLSQAEERAASASQQLSVITVQRRKAASLMNLENI

SEQ ID NO: 3113 - protein, 199 aa, Homo sapiens
MDFKIEHTWDGFPVKHEPVFIRLNPGDRGVMMDISAPFFRDPPAPLGEPGKPFNELWDYEVVEAFFLNDITEQYLEVELCPHGQHLVLLLSGRRNVWKQELPLSFRMSRGETKWEGKAYLPWSYFPPNVTKFNSFAIHGSKDKRSYEALYPVPQHELQQGQKPDFHCLEYFKSFNFNTLLGEEWKQPESDLWLIEKCDI

SEQ ID NO: 3114 - protein, 1216 aa, Homo sapiens
MGHLPTGIHGARRLLPLLWLFVLFKNATAFHVTVQDDNNIVVSLEASDVISPASVYVVKITGESKNYFFEFEEFNSTLPPPVIFKASYHGLYYIITLVVVNGNVVTKPSRSITVLTKPLPVTSVSIYDYKPSPETGVLFEIHYPEKYNVFTRVNISYWEGKDFRTMLYKDFFKGKTVFNHWLPGMCYSNITFQLVSEATFNKSTLVEYSGVSHEPKQHRTAPYPPQNISVRIVNLNKNNWEEQSGNFPEESFMRSQDTIGKEKLFHFTEETPEIPSGNISSGWPDFNSSDYETTSQPYWWDSASAAPESEDEFVSVLPMEYENNSTLSETEKSTSGSFSFFPVQMILTWLPPKPPTAFDGFHIHIEREENFTEYLMVDEEAHEFVAELKEPGKYKLSVTTFSSSGSCETRKSQSAKSLSFYISPSGEWIEELTEKPQHVSVHVLSSTTALMSWTSSQENYNSTIVSVVSLTCQKQKESQRLEKQYCTQVNSSKPIIENLVPGAQYQVVIYLRKGPLIGPPSDPVTFAIVPTGIKDLMLYPLGPTAVVLSWTRPYLGVFRKYVVEMFYFNPATMTSEWTTYYEIAATVSLTASVRIANLLPAWYYNFRVTMVTWGDPELSCCDSSTISFITAPVAPEITSVEYFNSLLYISWTYGDDTTDLSHSRMLHWMVVAEGKKKIKKSVTRNVMTAILSLPPGDIYNLSVTACTERGSNTSMLRLVKLEPAPPKSLFAVNKTQTSVTLLWVEEGVADFFEVFCQQVGSSQKTKLQEPVAVSSHVVTISSLLPATAYNCSVTSFSHDSPSVPTFIAVSTMVTEMNPNVVVISVLAILSTLLIGLLLVTLIILRKKHLQMARECGAGTFVNFASLERDGKLPYNWRRSIFAFLTLLPSCLWTDYLLAFYINPWSKNGLKKRKLTNPVQLDDFDAYIKDMAKDSDYKFSLQFEELKLIGLDIPHFAADLPLNRCKNRYTNILPYDFSRVRLVSMNEEEGADYINANYIPGYNSPQEYIATQGPLPETRNDFWKMVLQQKSQIIVMLTQCNEKRRVKCDHYWPFTEEPIAYGDITVEMISEEEQDDWACRHFRINYADEMQDVMHFNYTAWPDHGVPTANAAESILQFVHMVRQQATKSKGPMIIHCSAGVGRTGTFIALDRLLQHIRDHEFVDILGLVSEMRSYRMSMVQTEEQYIFIHQCVQLMWMKKKQQFCISDVIYENVSKS

SEQ ID NO: 3115 - protein, 822 aa, Homo sapiens
MNGHISNHPSSFGMYPSQMNGYGSSPTFSQTDREHGSKTSAKALYEQRKNYARDSVSSVSDISQYRVEHLTTFVLDRKDAMITVDDGIRKLKLLDAKGKVWTQDMILQVDDRAVSLIDLESKNELENFPLNTIQHCQAVMHSCSYDSVLALVCKEPTQNKPDLHLFQCDEVKANLISEDIESAISDSKGGKQKRRPDALRMISNADPSIPPPPRAPAPAPPGTVTQVDVRSRVAAWSAWAADQGDFEKPRQYHEQEETPEMMAARIDRDVQILNHILDDIEFFITKLQKAAEAFSELSKRKKNKKGKRKGPGEGVLTLRAKPPPPDEFLDCFQKFKHGFNLLAKLKSHIQNPSAADLVHFLFTPLNMVVQATGGPELASSVLSPLLNKDTIDFLNYTVNGDERQLWMSLGGTWMKARAEWPKEQFIPPYVPRFRNGWEPPMLNFMGATMEQDLYQLAESVANVAEHQRKQEIKRLSTEHSSVSEYHPADGYAFSSNIYTRGSHLDQGEAAVAFKPTSNRHIDRNYEPLKTQPKKYAKSKYDFVARNNSELSVLKDDILEILDDRKQWWKVRNASGDSGFVPNNILDIVRPPESGLGRADPPYTHTIQKQRMEYGPRPADTPPAPSPPPTPAPVPVPLPPSTPAPVPVSKVPANITRQNSSSSDSGGSIVRDSQRHKQLPVDRRKSQMEEVQDELIHRLTIGRSAAQKKFHVPRQNVPVINITYDSTPEDVKTWLQSKGFNPVTVNSLGVLNGAQLFSLNKDELRTVCPEGARVYSQITVQKAALEDSSGSSELQEIMRRRQEKISAAASDSGVESFDEGSSH

SEQ ID NO: 3116 - protein, 415 aa, Homo sapiens
MLWSGCRRFGARLGCLPGGLRVLVQTGHRSLTSCIDPSMGLNEEQKEFQKVAFDFAAREMAPNMAEWDQKELFPVDVMRKAAQLGFGGVYIQTDVGGSGLSRLDTSVIFEALATGCTSTTAYISIHNMCAWMIDSFGNEEQRHKFCPPLCTMEKFASYCLTEPGSGSDAASLLTSAKKQGDHYILNGSKAFISGAGESDIYVVMCRTGGPGPKGISCIVVEKGTPGLSFGKKEKKVGWNSQPTRAVIFEDCAVPVANRIGSEGQGFLIAVRGLNGGRINIASCSLGAAHASVILTRDHLNVRKQFGEPLASNQYLQFTLADMATRLVAARLMVRNAAVALQEERKDAVALCSMAKLFATDECFAICNQALQMHGGYGYLKDYAVQQYVRDSRVHQILEGSNEVMRILISRSLLQE

SEQ ID NO: 3117 - protein, 336 aa, Homo sapiens
MSFFGFGQSVEVEILLNDAESRKRAEHKTEDGKKEKYFLFYDGETVSGKVSLALKNPNKRLEHQGIKIEFIGQIELYYDRGNHHEFVSLVKDLARPGEITQSQAFDFEFTHVEKPYESYTGQNVKLRYFLRATISRRLNDVVKEMDIVVHTLSTYPELNSSIKMEVGIEDCLHIEFEYNKSKYHLKDVIVGKIYFLLVRIKIKHMEIDIIKRETTGTGPNVYHENDTIAKYEIMDGAPVRGESIPIRLFLAGYELTPTMRDINKKFSVRYYLNLVLIDEEERRYFKQQEVVLWRKGDIVRKSMSHQAAIASQRFEGTTSLGEVRTPSQLSDNNCRQ

SEQ ID NO: 3118 - protein, 244 aa, Homo sapiens
MAAAAAAGEARRVLVYGGRGALGSRCVQAFRARNWWVASVDVVENEEASASIIVKMTDSFTEQADQVTAEVGKLLGEEKVDAILCVAGGWAGGNAKSKSLFKNCDLMWKQSIWTSTISSHLATKHLKEGGLLTLAGAKAALDGTPGMIGYGMAKGAVHQLCQSLAGKNSGMPPGAAAIAVLPVTLDTPMNRKSMPEADFSSWTPLEFLVETFHDWITGKNRPSSGSLIQVVTTEGRTELTPAYF

SEQ ID NO: 3119 - protein, 415 aa, Homo sapiens
MKLSLTKVVNGCRLGKIKNLGKTGDHTMDIPGCLLYTKTGSAPHLTHHTLHNIHGVPAMAQLTLSSLAEHHEVLTEYKEGVGKFIGMPESLLYCSLHDPVSPCPAGYVTNKSVSVWSVAGRVEMTVSKFMAIQKALQPDWFQCLSDGEVSCKEATSIKRVRKSVDRSLLFLDNCLRLQEESEVLQKSVIIGVIEGGDVMEERLRSARETAKRPVGGFLLDGFQGNPTTLEARLRLLSSVTAELPEDKPRLISGVSRPDEVLECIERGVDLFESFFPYQVTERGCALTFSFDYQPNPEETLLQQNGTQEEIKCMDQIKKIETTGCNQEITSFEINLKEKKYQEDFNPLVRGCSCYCCKNHTRAYIHHLLVTNELLAGVLLMMHNFEHYFGFFHYIREALKSDKLAQLKELIHRQAS

SEQ ID NO: 3120 - protein, 1302 aa, Homo sapiens
MELYFGEYQHVQQEYGVHLRLASDDTQKSRSSQNSKAGSYGVSIRVQGIDGHPYIVLNNTERCLAGTSFSENGPPFPPPVINNLPLHSSNGSVPKENSEELQLPENPYAQPSPIRNLKQPLLHEGKNGVLDRKDGSVKPSHLLNFQRHPELLQPYDPEKNELNLQNHQPSESNWLKTLTEEGINNKKPWTCFPKPSNSQPTSPSLEDPAKSGVTAIRLCSSVVIEDPKKQTSVCVNVQSCTKERVGEEALFTSGRPLTAHSPHAHPETKKTRPDVLPFRRQDSAGPVLDGARSRRSSSSSTTPTSANSLYRFLLDDQECAIHADNVNRHENRRYIPFLPGTGRDIDTGSIPGVDQLIEKFDQKPGLQRRGRSGKRNRINTDDRKRSRSVDSAFPFGLQGNSEYLIEFSRNLGKSSEHLLRPSQVCPQRPLSQERRGKQSVGRTFAKLQGAAHGASCAHSRPPQPNIDGKVLETEGSQESTVIRAPSLGAQSKKEEEVKTATATLMLQNRATATSPDSGAKKISVKTFPSASNTQATPDLLKGQQELTQQTNEETAKQILYNYLKEGSTDNDDATKRKVNLVFEKIQTLKSRAAGSAQGNNQACNSTSEVKDLLEQKSKLTIEVAELQRQLQLEVKNQQNIKEERERMRANLEELRSQHNEKVEENSTLQQRLEESEGELRKNLEELFQVKMEREQHQTEIRDLQDQLSEMHDELDSAKRSEDREKGALIEELLQAKQDLQDLLIAKEEQEDLLRKRERELTALKGALKEEVSSHDQEMDKLKEQYDAELQALRESVEEATKNVEVLASRSNTSEQDQAGTEMRVKLLQEENEKLQGRSEELERRVAQLQRQIEDLKGDEAKAKETLKKYEGEIRQLEEALVHARKEEKEAVSARRALENELEAAQGNLSQTTQEQKQLSEKLKEESEQKEQLRRLKNEMENERWHLGKTIEKLQKEMADIVEASRTSTLELQNQLDEYKEKNRRELAEMQRQLKEKTLEAEKSRLTAMKMQDEMRLMEEELRDYQRAQDEALTKRQLLEQTLKDLEYELEAKSHLKDDRSRLVKQMEDKVSQLEMELEEERNNSDLLSERISRSREQMEQLRNELLQERAARQDLECDKISLERQNKDLKSRIIHLEGSYRSSKEGLVVQMEARIAELEDRLESEERDRANLQLSNRRLERKVKELVMQVDDEHLSLTDQKDQLSLRLKAMKRQVEEAEEEIDRLESSKKKLQRELEEQMDMNEHLQGQLNSMKKDLRLKKLPSKVLDDMDDDDDLSTDGGSLYEAPVSYTFSKDSTVASQI

SEQ ID NO: 3121 - protein, 219 aa, Homo sapiens
MKDNDIKRLLYTHLLCIFSIILSVFIPSLFLENFSILETHLTWLCICSGFVTAVNLVLYLVVKPNTSSKRSSLSHKVTGFLKCCIYFLMSCFSFHVIFVLYGAPLIELALETFLFAVILSTFTTVPCLCLLGPNLKAWLRVFSRNGVTSIWENSLQITTISSFVGAWLGALPIPLDWERPWQVWPISCTLGATFGYVAGLVISPLWIYWNRKQLTYKNN

SEQ ID NO: 3122 - protein, 1170 aa, Homo sapiens
MFFYLSKKISIPNNVKLQCVSWNKEQGFIACGGEDGLLKVLKLETQTDDAKLRGLAAPSNLSMNQTLEGHSGSVQVVTWNEQYQKLTTSDENGLIIVWMLYKGSWIEEMINNRNKSVVRSMSWNADGQKICIVYEDGAVIVGSVDGNRIWGKDLKGIQLSHVTWSADSKVLLFGMANGEIHIYDNQGNFMIKMKLSCLVNVTGAISIAGIHWYHGTEGYVEPDCPCLAVCFDNGRCQIMRHENDQNPVLIDTGMYVVGIQWNHMGSVLAVAGFQKAAMQDKDVNIVQFYTPFGEHLGTLKVPGKEISALSWEGGGLKIALAVDSFIYFANIRPNYKWGYCSNTVVYAYTRPDRPEYCVVFWDTKNNEKYVKYVKGLISITTCGDFCILATKADENHPQFVLVLCNSIGTPLDPKYIDIVPLFVAMTKTHVIAASKEAFYTWQYRVAKKLTALEINQITRSRKEGRERIYHVDDTPSGSMDGVLDYSKTIQGTRDPICAITASDKILIVGRESGTIQRYSLPNVGLIQKYSLNCRAYQLSLNCNSSRLAIIDISGVLTFFDLDARVTDSTGQQVVGELLKLERRDVWDMKWAKDNPDLFAMMEKTRMYVFRNLDPEEPIQTSGYICNFEDLEIKSVLLDEILKDPEHPNKDYLINFEIRSLRDSRALIEKVGIKDASQFIEDNPHPRLWRLLAEAALQKLDLYTAEQAFVRCKDYQGIKFVKRLGKLLSESMKQAEVVGYFGRFEEAERTYLEMDRRDLAIGLRLKLGDWFRVLQLLKTGSGDADDSLLEQANNAIGDYFADRQKWLNAVQYYVQGRNQERLAECYYMLEDYEGLENLAISLPENHKLLPEIAQMFVRVGMCEQAVTAFLKCSQPKAAVDTCVHLNQWNKAVELAKNHSMKEIGSLLARYASHLLEKNKTLDAIELYRKANYFFDAAKLMFKIADEEAKKGSKPLRVKKLYVLSALLIEQYHEQMKNAQRGKVKGKSSEATSALAGLLEEEVLSTTDRFTDNAWRGAEAYHFFILAQRQLYEGCVDTALKTALHLKDYEDIIPPVEIYSLLALCACASRAFGTCSKAFIKLKSLETLSSEQKQQYEDLALEIFTKHTSKDNRKPELDSLMEGGEGKLPTCVATGSPITEYQFWMCSVCKHGVLAQEISHYSFCPLCHSPVG

SEQ ID NO: 3123 - protein, 791 aa, Homo sapiens
MADDKVAILTDDEEEQKRKYVLADPFNGISREPEPPSNETPSSTETSAIPEEEIDWIEKHCVKINNDLLISKVFYFFFYSAYGSLYPLLPVYYKQLGMSPSQSGLLVGIRYFIEFCSAPFWGVVADRFKKGKIVLLFSLLCWVLFNLGIGFVKPATLRCVPKIRPTTHPTNASHQLTILPTNSSFTSFLTISPKMREKRNLLETRLNVSDTVTLPTAPNMNSEPTLQPQTGEITNRMMDLTLNSSTATPVSPGSVTKETTTVIVTTTKSLPSDQVMLVYDQQEVEAIFLVILVVVIIGEFFSASSVTIVDTVTLQYLGKHRDRYGLQRMWGSLGWGLAMLSVGIGIDYTHIEVLIDGKGCKPPEYRNYQIVFIVFGVLMTMALIVATQFRFRYNHFKNDDSKGKEVEIPQVERNNSTESSEETPTTTSHSQAFNFWDLIKLLCSVQYGSVLFVAWFMGFGYGFVFTFLYWHLEDLNGTTTLFGVCSVLSHVSELTAYFFSHKLIELIGHIRVLYIGLACNTARYIYISYLENAWTVLPMEVLQGVTHAAIWAACISYLSAAVPPELRTSAQGILQGLHLGLGRGCGAMIGGVLVNYFGAAATFRGIGMACLVILLLFALIQWLAVPDEEEDKTMLAERIPVPSSPVPIATIDLVQQQTEDVMPRIEPRLPPKKTKHQEEQEDVNKPAWGVSSSPWVTFVYALYQIKEMMQLTRDNRASEIQPLQGTNENRENSPAGRAQPVPCETHSDPSRNQPSPDAAASQTQTSPAHPSVDPCTEESEEQQAQLAAGGH

SEQ ID NO: 3124 - protein, 1006 aa, Homo sapiens
MPDQISVSEFVAETHEDYKAPTASSFTTRTAQCRNTVAAIEEALDVDRMVLYKMKKSVKAINSSGLAHVENEEQYTQALEKFGGNCVCRDDPDLGSAFLKFSVFTKELTALFKNLIQNMNNIISFPLDSLLKGDLKGVKGDLKKPFDKAWKDYETKITKIEKEKKEHAKLHGMIRTEISGAEIAEEMEKERRFFQLQMCEYLLKVNEIKIKKGVDLLQNLIKYFHAQCNFFQDGLKAVESLKPSIETLSTDLHTIKQAQDEERRQLIQLRDILKSALQVEQKEDSQIRQSTAYSLHQPQGNKEHGTERNGSLYKKSDGIRKVWQKRKCSVKNGFLTISHGTANRPPAKLNLLTCQVKTNPEEKKCFDLISHDRTYHFQAEDEQECQIWMSVLQNSKEEALNNAFKGDDNTGENNIVQELTKEIISEVQRMTGNDVCCDCGAPDPTWLSTNLGILTCIECSGIHRELGVHYSRMQSLTLDVLGTSELLLAKNIGNAGFNEIMECCLPAEDSVKPNPGSDMNARKDYITAKYIERRYARKKHADNAAKLHSLCEAVKTRDIFGLLQAYADGVDLTEKIPLANGHEPDETALHLAVRSVDRTSLHIVDFLVQNSGNLDKQTGKGSTALHYCCLTDNAECLKLLLRGKASIEIANESGETPLDIAKRLKHEHCEELLTQALSGRFNSHVHVEYEWRLLHEDLDESDDDMDEKLQPSPNRREDRPISFYQLGSNQLQSNAVSLARDAANLAKEKQRAFMPSILQNETYGALLSGSPPPAQPAAPSTTSAPPLPPRNVGKVQTASSANTLWKTNSVSVDGGSRQRSSSDPPAVHPPLPPLRVTSTNPLTPTPPPPVAKTPSVMEALSQPSKPAPPGISQIRPPPLPPQPPSRLPQKKPAPGADKSTPLTNKGQPRGPVDLSATEALGPLSNAMVLQPPAPMPRKSQATKLKPKRVKALYNCVADNPDELTFSEGDVIIVDGEEDQEWWIGHIDGDPGRKGAFPVSFVHFIAD

SEQ ID NO: 3125 - protein, 418 aa, Homo sapiens
MAPRGRRRPRPHRSEGARRSKNTLERTHSMKDKAGQKCKPIDVFDFPDNSDVSSIGRLGENEKDEETYETFDPPLHSTAIYADEEEFSKHCGLSLSSTPPGKEAKRSSDTSGNEASEIESVKISAKKPGRKLRPISDDSESIEESDTRRKVKSAEKISTQRHEVIRTTASSELSEKPAESVTSKKTGPLSAQPSVEKENLAIESQSKTQKKGKISHDKRKKSRSKAIGSDTSDIVHIWCPEGMKTSDIKELNIVLPEFEKTHLEHQQRIESKVCKAAIATFYVNVKEQFIKMLKESQMLTNLKRKNAKMISDIEKKRQRMIEVQDELLRLEPQLKQLQTKYDELKERKSSLRNAAYFLSNLKQLYQDYSDVQAQEPNVKETYDSSSLPALLFKARTLLGAESHLRNINHQLEKLLDQG

SEQ ID NO: 3126 - protein, 698 aa, Homo sapiens
MQAHELFRYFRMPELVDFRQYVRTLPTNTLMGFGAFAALTTFWYATRPKPLKPPCDLSMQSVEVAGSGGARRSALLDSDEPLVYFYDDVTTLYEGFQRGIQVSNNGPCLGSRKPDQPYEWLSYKQVAELSECIGSALIQKGFKTAPDQFIGIFAQNRPEWVIIEQGCFAYSMVIVPLYDTLGNEAITYIVNKAELSLVFVDKPEKAKLLLEGVENKLIPGLKIIVVMDAYGSELVERGQRCGVEVTSMKAMEDLGRANRRKPKPPAPEDLAVICFTSGTTGNPKGAMVTHRNIVSDCSAFVKATENTVNPCPDDTLISFLPLAHMFERVVECVMLCHGAKIGFFQGDIRLLMDDLKVLQPTVFPVVPRLLNRMFDRIFGQANTTLKRWLLDFASKRKEAELRSGIIRNNSLWDRLIFHKVQSSLGGRVRLMVTGAAPVSATVLTFLRAALGCQFYEGYGQTECTAGCCLTMPGDWTAGHVGAPMPCNLIKLVDVEEMNYMAAEGEGEVCVKGPNVFQGYLKDPAKTAEALDKDGWLHTGDIGKWLPNGTLKIIDRKKHIFKLAQGEYIAPEKIENIYMRSEPVAQVFVHGESLQAFLIAIVVPDVETLCSWAQKRGFEGSFEELCRNKDVKKAILEDMVRLGKDSGLKPFEQVKGITLHPELFSIDNGLLTPTMKAKRPELRNYFRSQIDDLYSTIKV

SEQ ID NO: 3127 - protein, 298 aa, Homo sapiens
MGDHAWSFLKDFLAGGVAAAVSKTAVAPIERVKLLLQVQHASKQISAEKQYKGIIDCVVRIPKEQGFLSFWRGNLANVIRYFPTQALNFAFKDKYKQLFLGGVDRHKQFWRYFAGNLASGGAAGATSLCFVYPLDFARTRLAADVGKGAAQREFHGLGDCIIKIFKSDGLRGLYQGFNVSVQGIIIYRAAYFGVYDTAKGMLPDPKNVHIFVSWMIAQSVTAVAGLVSYPFDTVRRRMMMQSGRKGADIMYTGTVDCWRKIAKDEGAKAFFKGAWSNVLRGMGGAFVLVLYDEIKKYV

SEQ ID NO: 3128 - protein, 2371 aa, Homo sapiens
MAAPESGPALSPGTAEGEEETILYDLLVNTEWPPETEVQPRGNQKHGASFIITKAIRDRLLFLRQYIWYSPAPFLLPDGLVRLVNKQINWHLVLASNGKLLAAVQDQCVEIRSAKDDFTSIIGKCQVPKDPKPQWRRVAWSYDCTLLAYAESTGTVRVFDLMGSELFVISPASSFIGDLSYAIAGLIFLEYKASAQWSAELLVINYRGELRSYLVSVGTNQSYQESHCFSFSSHYPHGINTAIYHPGHRLLLVGGCETAEVGMSKASSCGLSAWRVLSGSPYYKQVTNGGDGVTAVPKTLGLLRMLSVKFYSRQGQEQDGIFKMSLSPDGMLLAAIHFSGKLSIWAIPSLKQQGEWGQNEQPGYDDLNPDWRLSTEKRKKIKDKESFYPLIDVNWWADSAVTLARCSGALTVSSVKTLKNLLGKSCEWFEPSPQVTATHDGGFLSLECEIKLAPKRSRLETRAGEEDEGEEDSDSDYEISAKARYFGYIKQGLYLVTEMERFAPPRKRPRTITKNYRLVSLRSTTPEELYQRKIESEEYEEALSLAHTYGLDTDLVYQRQWRKSAVNVASIQNYLSKIKKRSWVLHECLERVPENVDAAKELLQYGLKGTDLEALLAIGKGADDGRFTLPGEIDIDSISYEELSPPDEEPAKNKKEKELKKRQELLKLVNFSKLTLEQKELCRCRRKLLTYLDRLATYEEILGVPHASEQRYDAEFFKKFRNQNIVLSARTYAQESNVQALEILFTYHGSDLLPHRLAILSNFPETTSPHEYSVLLPEACFNGDSLMIIPWHEHKHRAKDWCEELACRMVVEPNLQDESEFLYAAQPELLRFRMTQLTVEKVMDWYQTRAEEIEHYARQVDCALSLIRLGMERNIPGLLVLCDNLVTLETLVYEARCDVTLTLKELQQMKDIEKLRLLMNSCSEDKYVTSAYQWMVPFLHRCEKQSPGVANELLKEYLVTLAKGDLKFPLKIFQHSKPDLQQKIIPDQDQLMAIALECIYTCERNDQLCLCYDLLECLPERGYGDKTEATTKLHDMVDQLEQILSVSELLEKHGLEKPISFVKNTQSSSEEARKLMVRLTRHTGRKQPPVSESHWRTLLQDMLTMQQNVYTCLDSDACYEIFTESLLCSSRLENIHLAGQMMHCSACSENPPAGIAHKGKPHYRVSYEKSIDLVLAASREYFNSSTNLTDSCMDLARCCLQLITDRPPAIQEELDLIQAVGCLEEFGVKILPLQVRLCPDRISLIKECISQSPTCYKQSTKLLGLAELLRVAGENPEERRGQVLILLVEQALRFHDYKAASMHCQELMATGYPKSWDVCSQLGQSEGYQDLATRQELMAFALTHCPPSSIELLLAASSSLQTEILYQRVNFQIHHEGGENISASPLTSKAVQEDEVGVPGSNSADLLRWTTATTMKVLSNTTTTTKAVLQAVSDGQWWKKSLTYLRPLQGQKCGGAYQIGTTANEDLEKQGCHPFYESVISNPFVAESEGTYDTYQHVPVESFAEVLLRTGKLAEAKNKGEVFPTTEVLLQLASEALPNDMTLALAYLLALPQVLDANRCFEKQSPSALSLQLAAYYYSLQIYARLAPCFRDKCHPLYRADPKELIKMVTRHVTRHEHEAWPEDLISLTKQLHCYNERLLDFTQAQILQGLRKGVDVQRFTADDQYKRETILGLAETLEESVYSIAISLAQRYSVSRWEVFMTHLEFLFTDSGLSTLEIENRAQDLHLFETLKTDPEAFHQHMVKYIYPTIGGFDHERLQYYFTLLENCGCADLGNCAIKPETHIRLLKKFKVVASGLNYKKLTDENMSPLEALEPVLSSQNILSISKLVPKIPEKDGQMLSPSSLYTIWLQKLFWTGDPHLIKQVPGSSPEWLHAYDVCMKYFDRLHPGDLITVVDAVTFSPKAVTKLSVEARKEMTRKAIKTVKHFIEKPRKRNSEDEAQEAKDSKVTYADTLNHLEKSLAHLETLSHSFILSLKNSEQETLQKYSHLYDLSRSEKEKLHDEAVAICLDGQPLAMIQQLLEVAVGPLDISPKDIVQSAIMKIISALSGGSADLGGPRDPLKVLEGVVAAVHASVDKGEELVSPEDLLEWLRPFCADDAWPVRPRIHVLQILGQSFHLTEEDSKLLVFFRTEAILKASWPQRQVDIADIENEENRYCLFMELLESSHHEAEFQHLVLLLQAWPPMKSEYVITNNPWVRLATVMLTRCTMENKEGLGNEVLKMCRSLYNTKQMLPAEGVKELCLLLLNQSLLLPSLKLLLESRDEHLHEMALEQITAVTTVNDSNCDQELLSLLLDAKLLVKCVSTPFYPRIVDHLLASLQQGRWDAEELGRHLREAGHEAEAGSLLLAVRGTHQAFRTFSTALRAAQHWV

SEQ ID NO: 3129 - protein, 1748 aa, Homo sapiens
MSARAAAAKSTAMEETAIWEQHTVTLHRAPGFGFGIAISGGRDNPHFQSGETSIVISDVLKGGPAEGQLQENDRVAMVNGVSMDNVEHAFAVQQLRKSGKNAKITIRRKKKVQIPVSRPDPEPVSDNEEDSYDEEIHDPRSGRSGVVNRRSEKIWPRDRSASRERSLSPRSDRRSVASSQPAKPTKVTLVKSRKNEEYGLRLASHIFVKEISQDSLAARDGNIQEGDVVLKINGTVTENMSLTDAKTLIERSKGKLKMVVQRDERATLLNVPDLSDSIHSANASERDDISEIQSLASDHSGRSHDRPPRRSRSRSPDQRSEPSDHSRHSPQQPSNGSLRSRDEERISKPGAVSTPVKHADDHTPKTVEEVTVERNEKQTPSLPEPKPVYAQVGQPDVDLPVSPSDGVLPNSTHEDGILRPSMKLVKFRKGDSVGLRLAGGNDVGIFVAGVLEDSPAAKEGLEEGDQILRVNNVDFTNIIREEAVLFLLDLPKGEEVTILAQKKKDVYRRIVESDVGDSFYIRTHFEYEKESPYGLSFNKGEVFRVVDTLYNGKLGSWLAIRIGKNHKEVERGIIPNKNRAEQLASVQYTLPKTAGGDRADFWRFRGLRSSKRNLRKSREDLSAQPVQTKFPAYERVVLREAGFLRPVTIFGPIADVAREKLAREEPDIYQIAKSEPRDAGTDQRSSGIIRLHTIKQIIDQDKHALLDVTPNAVDRLNYAQWYPIVVFLNPDSKQGVKTMRMRLCPESRKSARKLYERSHKLRKNNHHLFTTTINLNSMNDGWYGALKEAIQQQQNQLVWVSEGKADGATSDDLDLHDDRLSYLSAPGSEYSMYSTDSRHTSDYEDTDTEGGAYTDQELDETLNDEVGTPPESAITRSSEPVREDSSGMHHENQTYPPYSPQAQPQPIHRIDSPGFKPASQQKAEASSPVPYLSPETNPASSTSAVNHNVNLTNVRLEEPTPAPSTSYSPQADSLRTPSTEAAHIMLRDQEPSLSSHVDPTKVYRKDPYPEEMMRQNHVLKQPAVSHPGHRPDKEPNLTYEPQLPYVEKQASRDLEQPTYRYESSSYTDQFSRNYEHRLRYEDRVPMYEEQWSYYDDKQPYPSRPPFDNQHSQDLDSRQHPEESSERGYFPRFEEPAPLSYDSRPRYEQAPRASALRHEEQPAPGYDTHGRLRPEAQPHPSAGPKPAESKQYFEQYSRSYEQVPPQGFTSRAGHFEPLHGAAAVPPLIPSSQHKPEALPSNTKPLPPPPTQTEEEEDPAMKPQSVLTRVKMFENKRSASLETKKDVNDTGSFKPPEVASKPSGAPIIGPKPTSQNQFSEHDKTLYRIPEPQKPQLKPPEDIVRSNHYDPEEDEEYYRKQLSYFDRRSFENKPPAHIAASHLSEPAKPAHSQNQSNFSSYSSKGKPPEADGVDRSFGEKRYEPIQATPPPPPLPSQYAQPSQPVTSASLHIHSKGAHGEGNSVSLDFQNSLVSKPDPPPSQNKPATFRPPNREDTAQAAFYPQKSFPDKAPVNGTEQTQKTVTPAYNRFTPKPYTSSARPFERKFESPKFNHNLLPSETAHKPDLSSKTPTSPKTLVKSHSLAQPPEFDSGVETFSIHAEKPKYQINNISTVPKAIPVSPSAVEEDEDEDGHTVVATARGIFNSNGGVLSSIETGVSIIIPQGAIPEGVEQEIYFKVCRDNSILPPLDKEKGETLLSPLVMCGPHGLKFLKPVELRLPHCDPKTWQNKCLPGDPNYLVGANCVSVLIDHF

SEQ ID NO: 3130 - protein, 669 aa, Homo sapiens
MWTLVGRGWGCARALAPRATGAALLVAPGPRSAPTLGAAPESWATDRLYSSAEFKEKLDMSRFPVENIRNFSIVAHVDHGKSTLADRLLELTGTIDKTKNNKQVLDKLQVERERGITVKAQTASLFYNCEGKQYLLNLIDTPGHVDFSYEVSRSLSACQGVLLVVDANEGIQAQTVANFFLAFEAQLSVIPVINKIDLKNADPERVENQIEKVFDIPSDECIKISAKLGTNVESVLQAIIERIPPPKVHRKNPLRALVFDSTFDQYRGVIANVALFDGVVSKGDKIVSAHTQKTYEVNEVGVLNPNEQPTHKLYAGQVGYLIAGMKDVTEAQIGDTLCLHKQPVEPLPGFKSAKPMVFAGMYPLDQSEYNNLKSAIEKLTLNDSSVTVHRDSSLALGAGWRLGFLGLLHMEVFNQRLEQEYNASVILTTPTVPYKAVLSSSKLIKEHREKEITIINPAQFPDKSKVTEYLEPVVLGTIITPDEYTGKIMMLCEARRAVQKNMIFIDQNRVMLKYLFPLNEIVVDFYDSLKSLSSGYASFDYEDAGYQTAELVKMDILLNGNTVEELVTVVHKDKAHSIGKAICERLKDSLPRQLFEIAIQAAIGSKIIARETVKAYRKNVLAKCYGGDITRKMKLLKRQAEGKKKLRKIGNVEVPKDAFIKVLKTQSSK

SEQ ID NO: 3131 - protein, 387 aa, Homo sapiens
MAGSEPRSGTNSPPPPFSDWGRLEAAILSGWKTFWQSVSKERVARTTSREEVDEAASTLTRLPIDVQLYILSFLSPHDLCQLGSTNHYWNETVRDPILWRYFLLRDLPSWSSVDWKSLPDLEILKKPISEVTDGAFFDYMAVYRMCCPYTRRASKSSRPMYGAVTSFLHSLIIQNEPRFAMFGPGLEELNTSLVLSLMSSEELCPTAGLPQRQIDGIGSGVNFQLNNQHKFNILILYSTTRKERDRAREEHTSAVNKMFSRHNEGDDQQGSRYSVIPQIQKVCEVVDGFIYVANAEAHKRHEWQDEFSHIMAMTDPAFGSSGRPLLVLSCISQGDVKRMPCFYLAHELHLNLLNHPWLVQDTEAETLTGFLNGIEWILEEVESKRAR

SEQ ID NO: 3132 - protein, 856 aa, Homo sapiens
MKPRPAGFVDNKLKQRVIQYLTSNKCGKYVDIGVLASDLQRVYSIDYGRRKRNAFRIQVEKVFSIISSEKELKNLTELEDEHLAKRARQGEEDNEYTESYSDDDSSMEDYPDPQSANHMNSSLLSLYRKGNPDSVSNTPEMEQRETTSSTPRISSKTGSIPLKTPAKDSEGGWFIDKTPSVKKDSFFLDLSCEKSNPKKPITEIQDSKDSSLLESDMKRKGKLKNKGSKRKKEDLQEVDGEIEAVLQKKAKARGLEFQISNVKFEDVGGNDMTLKEVCKMLIHMRHPEVYHHLGVVPPRGVLLHGPPGCGKTLLAHAIAGELDLPILKVAAPEIVSGVSGESEQKLRELFEQAVSNAPCIIFIDEIDAITPKREVASKDMERRIVAQLLTCMDDLNNVAATARVLVIGATNRPDSLDPALRRAGRFDREICLGIPDEASRERILQTLCRKLRLPQAFDFCHLAHLTPGFVGADLMALCREAAMCAVNRVLMKLQEQQKKNPEMEDLPSKGVQEERLGTEPTSETQDELQRLLGLLRDQDPLSEEQMQGLCIELNDFIVALSSVQPSAKREGFVTVPNVTWADIGALEDIREELTMAILAPVRNPDQFKALGLVTPAGVLLAGPPGCGKTLLAKAVANESGLNFISVKGPELLNMYVGESERAVRQVFQRAKNSAPCVIFFDEVDALCPRRSDRETGASVRVVNQLLTEMDGLEARQQVFIMAATNRPDIIDPAILRPGRLDKTLFVGLPPPADRLAILKTITKNGTKPPLDADVNLEAIAGDLRCDCYTGADLSALVREASICALRQEMARQKSGNEKGELKVSHKHFEEAFKKVRSSISKKDQIMYERLQESLSR

SEQ ID NO: 3133 - protein, 825 aa, Homo sapiens
MFSGFNVFRVGISFVIMCIFYMPTVNSLPELSPQKYFSTLQPGKASLAYFCQADSPRTSVFLEELNEAVRPLQDYGISVAKVNCVKEEISRYCGKEKDLMKAYLFKGNILLREFPTDTLFDVNAIVAHVLFALLFSEVKYITNLEDLQNIENALKGKANIIFSYVRAIGIPEHRAVMEAAFVYGTTYQFVLTTEIALLESIGSEDVEYAHLYFFHCKLVLDLTQQCRRTLMEQPLTTLNIHLFIKTMKAPLLTEVAEDPQQVSTVHLQLGLPLVFIVSQQATYEADRRTAEWVAWRLLGKAGVLLLLRDSLEVNIPQDANVVFKRAEEGVPVEFLVLHDVDLIISHVENNMHIEEIQEDEDNDMEGPDIDVQDDEVAETVFRDRKRKLPLELTVELTEETFNATVMASDSIVLFYAGWQAVSMAFLQSYIDVAVKLKGTSTMLLTRINCADWSDVCTKQNVTEFPIIKMYKKGENPVSYAGMLGTEDLLKFIQLNRISYPVNITSIQEAEEYLSGELYKDLILYSSVSVLGLFSPTMKTAKEDFSEAGNYLKGYVITGIYSEEDVLLLSTKYAASLPALLLARHTEGKIESIPLASTHAQDIVQIITDALLEMFPEITVENLPSYFRLQKPLLILFSDGTVNPQYKKAILTLVKQKYLDSFTPCWLNLKNTPVGRGILRAYFDPLPPLPLLVLVNLHSGGQVFAFPSDQAIIEENLVLWLKKLEAGLENHITILPAQEWKPPLPAYDFLSMIDAATSQRGTRKVPKCMKETDVQENDKEQHEDKSAVRKEPIETLRIKHWNRSNWFKEAEKSFRRDKELGCSKVN

SEQ ID NO: 3134 - protein, 987 aa, Homo sapiens
MTPALREATAKGISFSSLPSTMESDKMLYMESPRTVDEKLKGDTFSQMLGFPTPEPTLNTNFVNLKHFGSPQSSKHYQTVFLMRSNSTLNKHNENYKQKKLGEPSCNKLKNILYNGSNIQLSKICLSHSEEFIKKEPLSDTTSQCMKDVQIILDSNITKDTNVDKVQLQNCKWYQENALLDKVTDAEIKKGLLHCTQKKIVPGHSNVPVSSSAAEKEEEVHARLLHCVSKQKILLSQARRTQKHLQMLLAKHVVKHYGQQMKLSMKHQLPKMKTFHEPTTILGNSLPKCTEIKPEVNTLTAENKLWDDAKNGFARCTAAEIQRFAFSATGLLSHVEEGLDSDATDSSSDDDLDEYTLRKNVAVNCSTEWKWLVDRARVGSRWTWLQAQISDLECKIQQLTDIHRQIRASKGIVVLEECQLPKDILKKQMQFADQAASLNILGNPQVPQECQDPVPEQDFEMSPSSPTLLLRNIEKQSAQLTEIINSLIAPLNLSPTSSPLSSKSCSHKCLANGIYRSASENLDELSSSSSWLLNQKHSKKKRKDRTRLKSSSLTFMSTSARTRPLQSFHKRKLYRLSPTFYWTPQTLPSKETAFLNTTQMPCLQSASTWSSYEHNSESYLLREHVSELDSSFHSVLSLPSDVPLHFHFETLLKKTEIKGNLAENKFVDEYIISPSPVHSTLNQWRNGYSPICKPQIRSESSAQLLQGRKKRHLSETALGERTKLEESDFQHTESGSHSNFTAVSNVNVLSRIQNSSRNTARRRLRSESSYDIDNIVIPMSLVAPAKLEKLQYKEILTPSWRMVVLQPLDEYNLGKEEIEDLSDEVFSLRHKKYEEREQARWSLWEQSKWHRRNSRAYSKNVEGQDLLLKEYPNNFSSSQQCAAASPPGLPSENQDLCAYGLPSLNQSQETKSLWWERRAFPLKGEDMAALLCQDEKKDQVERSSTAFHGEIFGTSVPENGHHPKKQSDGMEEYKTFGLGLTNVKKNR

SEQ ID NO: 3135 - protein, 986 aa, Homo sapiens
MAGIFYFALFSCLFGICDAVTGSRVYPANEVTLLDSRSVQGELGWIASPLEGGWEEVSIMDEKNTPIRTYQVCNVMEPSQNNWLRTDWITREGAQRVYIEIKFTLRDCNSLPGVMGTCKETFNLYYYESDNDKERFIRENQFVKIDTIAADESFTQVDIGDRIMKLNTEIRDVGPLSKKGFYLAFQDVGACIALVSVRVFYKKCPLTVRNLAQFPDTITGADTSSLVEVRGSCVNNSEEKDVPKMYCGADGEWLVPIGNCLCNAGHEERSGECQACKIGYYKALSTDATCAKCPPHSYSVWEGATSCTCDRGFFRADNDAASMPCTRPPSAPLNLISNVNETSVNLEWSSPQNTGGRQDISYNVVCKKCGAGDPSKCRPCGSGVHYTPQQNGLKTTKVSITDLLAHTNYTFEIWAVNGVSKYNPNPDQSVSVTVTTNQAAPSSIALVQAKEVTRYSVALAWLEPDRPNGVILEYEVKYYEKDQNERSYRIVRTAARNTDIKGLNPLTSYVFHVRARTAAGYGDFSEPLEVTTNTVPSRIIGDGANSTVLLVSVSGSVVLVVILIAAFVISRRRSKYSKAKQEADEEKHLNQGVRTYVDPFTYEDPNQAVREFAKEIDASCIKIEKVIGVGEFGEVCSGRLKVPGKREICVAIKTLKAGYTDKQRRDFLSEASIMGQFDHPNIIHLEGVVTKCKPVMIITEYMENGSLDAFLRKNDGRFTVIQLVGMLRGIGSGMKYLSDMSYVHRDLAARNILVNSNLVCKVSDFGMSRVLEDDPEAAYTTRGGKIPIRWTAPEAIAYRKFTSASDVWSYGIVMWEVMSYGERPYWDMSNQDVIKAIEEGYRLPPPMDCPIALHQLMLDCWQKERSDRPKFGQIVNMLDKLIRNPNSLKRTGTESSRPNTALLDPSSPEFSAVVSVGDWLQAIKMDRYKDNFTAAGYTTLEAVVHVNQEDLARIGITAITHQNKILSSVQAMRTQMQQMHGRMVPV

SEQ ID NO: 3136 - protein, 589 aa, Homo sapiens
MPTVSVKRDLLFQALGRTYTDEEFDELCFEFGLELDEITSEKEIISKEQGNVKAAGASDVVLYKIDVPANRYDLLCLEGLVRGLQVFKERIKAPVYKRVMPDGKIQKLIITEETAKIRPFAVAAVLRNIKFTKDRYDSFIELQEKLHQNICRKRALVAIGTHDLDTLSGPFTYTAKRPSDIKFKPLNKTKEYTACELMNIYKTDNHLKHYLHIIENKPLYPVIYDSNGVVLSMPPIINGDHSRITVNTRNIFIECTGTDFTKAKIVLDIIVTMFSEYCENQFTVEAAEVVFPNGKSHTFPELAYRKEMVRADLINKKVGIRETPENLAKLLTRMYLKSEVIGDGNQIEIEIPPTRADIIHACDIVEDAAIAYGYNNIQMTLPKTYTIANQFPLNKLTELLRHDMAAAGFTEALTFALCSQEDIADKLGVDISATKAVHISNPKTAEFQVARTTLLPGLLKTIAANRKMPLPLKLFEISDIVIKDSNTDVGAKNYRHLCAVYYNKNPGFEIIHGLLDRIMQLLDVPPGEDKGGYVIKASEGPAFFPGRCAEIFARGQSVGKLGVLHPDVITKFELTMPCSSLEINVGPFL

SEQ ID NO: 3137 - protein, 223 aa, Homo sapiens
MTWRHHVRLLFTVSLALQIINLGNSYQREKHNGGREEVTKVATQKHRQSPLNWTSSHFGEVTGSAEGWGPEEPLPYSWAFGEGASARPRCCRNGGTCVLGSFCVCPAHFTGRYCEHDQRRSECGALEHGAWTLRACHLCRCIFGALHCLPLQTPDRCDPKDFLASHAHGPSAGGAPSLLLLLPCALLHRLLRPDAPAHPRSLVPSVLQRERRPCGRPGLGHRL

SEQ ID NO: 3138 - protein, 741 aa, Homo sapiens
MALFTPWKLSSQKLGFFLVTFGFIWGMMLLHFTIQQRTQPESSSMLREQILDLSKRYIKALAEENRNVVDGPYAGVMTAYDLKKTLAVLLDNILQRIGKLESKVDNLVVNGTGTNSTNSTTAVPSLVALEKINVADIINGAQEKCVLPPMDGYPHCEGKIKWMKDMWRSDPCYADYGVDGSTCSFFIYLSEVENWCPHLPWRAKNPYEEADHNSLAEIRTDFNILYSMMKKHEEFRWMRLRIRRMADAWIQAIKSLAEKQNLEKRKRKKVLVHLGLLTKESGFKIAETAFSGGPLGELVQWSDLITSLYLLGHDIRISASLAELKEIMKKVVGNRSGCPTVGDRIVELIYIDIVGLAQFKKTLGPSWVHYQCMLRVLDSFGTEPEFNHANYAQSKGHKTPWGKWNLNPQQFYTMFPHTPDNSFLGFVVEQHLNSSDIHHINEIKRQNQSLVYGKVDSFWKNKKIYLDIIHTYMEVHATVYGSSTKNIPSYVKNHGILSGRDLQFLLRETKLFVGLGFPYEGPAPLEAIANGCAFLNPKFNPPKSSKNTDFFIGKPTLRELTSQHPYAEVFIGRPHVWTVDLNNQEEVEDAVKAILNQKIEPYMPYEFTCEGMLQRINAFIEKQDFCHGQVMWPPLSALQVKLAEPGQSCKQVCQESQLICEPSFFQHLNKDKDMLKYKVTCQSSELAKDILVPSFDPKNKHCVFQGDLLLFSCAGAHPRHQRVCPCRDFIKGQVALCKDCL

SEQ ID NO: 3139 - protein, 2210 aa, Homo sapiens
MTAAANWVANGASLEDCHSNLFSLAELTGIKWRRYNFGGHGDCGPIISAPAQDDPILLSFIRCLQANLLCVWRRDVKPDCKELWIFWWGDEPNLVGVIHHELQVVEEGLWENGLSYECRTLLFKAIHNLLERCLMDKNFVRIGKWFVRPYEKDEKPVNKSEHLSCAFTFFLHGESNVCTSVEIAQHQPIYLINEEHIHMAQSSPAPFQVLVSPYGLNGTLTGQAYKMSDPATRKLIEEWQYFYPMVLKKKEESKEEDELGYDDDFPVAVEVIVGGVRMVYPSAFVLISQNDIPVPQSVASAGGHIAVGQQGLGSVKDPSNCGMPLTPPTSPEQAILGESGGMQSAASHLVSQDGGMITMHSPKRSGKIPPKLHNHMVHRVWKECILNRTQSKRSQMSTPTLEEEPASNPATWDFVDPTQRVSCSCSRHKLLKRCAVGPNRPPTVSQPGFSAGPSSSSSLPPPASSKHKTAERQEKGDKLQKRPLIPFHHRPSVAEELCMEQDTPGQKLGLAGIDSSLEVSSSRKYDKQMAVPSRNTSKQMNLNPMDSPHSPISPLPPTLSPQPRGQETESLDPPSVPVNPALYGNGLELQQLSTLDDRTVLVGQRLPLMAEVSETALYCGIRPSNPESSEKWWHSYRLPPSDDAEFRPPELQGERCDAKMEVNSESTALQRLLAQPNKRFKIWQDKQPQLQPLHFLDPLPLSQQPGDSLGEVNDPYTFEDGDIKYIFTANKKCKQGTEKDSLKKNKSEDGFGTKDVTTPGHSTPVPDGKNAMSIFSSATKTDVRQDNAAGRAGSSSLTQVTDLAPSLHDLDNIFDNSDDDELGAVSPALRSSKMPAVGTEDRPLGKDGRAAVPYPPTVADLQRMFPTPPSLEQHPAFSPVMNYKDGISSETVTALGMMESPMVSMVSTQLTEFKMEVEDGLGSPKPEEIKDFSYVHKVPSFQPFVGSSMFAPLKMLPSHCLLPLKIPDACLFRPSWAIPPKIEQLPMPPAATFIRDGYNNVPSVGSLADPDYLNTPQMNTPVTLNSAAPASNSGAGVLPSPATPRFSVPTPRTPRTPRTPRGGGTASGQGSVKYDSTDQGSPASTPSTTRPLNSVEPATMQPIPEAHSLYVTLILSDSVMNIFKDRNFDSCCICACNMNIKGADVGLYIPDSSNEDQYRCTCGFSAIMNRKLGYNSGLFLEDELDIFGKNSDIGQAAERRLMMCQSTFLPQVEGTKKPQEPPISLLLLLQNQHTQPFASLNFLDYISSNNRQTLPCVSWSYDRVQADNNDYWTECFNALEQGRQYVDNPTGGKVDEALVRSATVHSWPHSNVLDISMLSSQDVVRMLLSLQPFLQDAIQKKRTGRTWENIQHVQGPLTWQQFHKMAGRGTYGSEESPEPLPIPTLLVGYDKDFLTISPFSLPFWERLLLDPYGGHRDVAYIVVCPENEALLEGAKTFFRDLSAVYEMCRLGQHKPICKVLRDGIMRVGKTVAQKLTDELVSEWFNQPWSGEENDNHSRLKLYAQVCRHHLAPYLATLQLDSSLLIPPKYQTPPAAAQGQATPGNAGPLAPNGSAAPPAGSAFNPTSNSSSTNPAASSSASGSSVPPVSSSASAPGISQISTTSSSGFSGSVGGQNPSTGGISADRTQGNIGCGGDTDPGQSSSQPSQDGQESVTERERIGIPTEPDSADSHAHPPAVVIYMVDPFTYAAEEDSTSGNFWLLSLMRCYTEMLDNLPEHMRNSFILQIVPCQYMLQTMKDEQVFYIQYLKSMAFSVYCQCRRPLPTQIHIKSLTGFGPAASIEMTLKNPERPSPIQLYSPPFILAPIKDKQTELGETFGEASQKYNVLFVGYCLSHDQRWLLASCTDLHGELLETCVVNIALPNRSRRSKVSARKIGLQKLWEWCIGIVQMTSLPWRVVIGRLGRLGHGELKDWSILLGECSLQTISKKLKDVCRMCGISAADSPSILSACLVAMEPQGSFVVMPDAVTMGSVFGRSTALNMQSSQLNTPQDASCTHILVFPTSSTIQVAPANYPNEDGFSPNNDDMFVDLPFPDDMDNDIGILMTGNLHSSPNSSPVPSPGSPSGIGVGSHFQHSRSQGERLLSREAPEELKQQPLALGYFVSTAKAENLPQWFWSSCPQAQNQCPLFLKASLHHHISVAQTDELLPARNSQRVPHPLDSKTTSDVLRFVLEQYNALSWLTCNPATQDRTSCLPVHFVVLTQLYNAIMNIL

SEQ ID NO: 3140 - protein, 196 aa, Homo sapiens
MADGQMPFSCHYPSRLRRDPFRDSPLSSRLLDDGFGMDPFPDDLTASWPDWALPRLSSAWPGTLRSGMVPRGPTATARFGVPAEGRTPPPFPGEPWKVCVNVHSFKPEELMVKTKDGYVEVSGKHEEKQQEGGIVSKNFTKKIQLPAEVDPVTVFASLSPEGLLIIEAPQVPPYSTFGESSFNNELPQDSQEVTCT

SEQ ID NO: 3141 - protein, 167 aa, Homo sapiens
MSEWMKKGPLEWQDYIYKEVRVTASEKNEYKGWVLTTDPVSANIVLVNFLEDGSMSVTGIMGHAVQTVETMNEGDHRVREKLMHLFTSGDCKAYSPEDLEERKNSLKKWLEKNHIPITEQGDAPRTLCVAGVLTIDPPYGPENCSSSNEIILSRVQDLIEGHLTASQ

SEQ ID NO: 3142 - protein, 726 aa, Homo sapiens
MAQTVQNVTLSLTLPITCHICLGKVRQPVICINNHVFCSICIDLWLKNNSQCPACRVPITPENPCKEIIGGTSESEPMLSHTVRKHLRKTRLELLHKEYEDEIDCLQKEVEELKSKNLSLESQIKTILDPLTLVQGNQNEDKHLVTDNPSKINPETVAEWKKKLRTANEIYEKVKDDVDKLKEANKKLKLENGGLVRENLRLKAEVDNRSPQKFGRFAVAALQSKVEQYERETNRLKKALERSDKYIEELESQVAQLKNSSEEKEAMNSICQTALSADGKGSKGSEEDVVSKNQGDSARKQPGSSTSSSSHLAKPSSSRLCDTSSARQESTSKADLNCSKNKDLYQEQVEVMLDVTDTSMDTYLEREWGNKPSDCVPYKDEELYDLPAPCTPLSLSCLQLSTPENRESSVVQAGGSKKHSNHLRKLVFDDFCDSSNVSNKDSSEDDISRSENEKKSECFSSPKTGFWDCCSTSYAQNLDFESSEGNTIANSVGEISSKLSEKSGLCLSKRLNSIRSFEMNRTRTSSEASMDAAYLDKISELDSMMSESDNSKSPCNNGFKSLDLDGLSKSSQGSEFLEEPDKLEEKTELNLSKGSLTNDQLENGSEWKPTSFFLLSPSDQEMNEDFSLHSSSCPVTNEIKPPSCLFQTEFSQGILLSSSHRLFEDQRFGSSLFKMSSEMHSLHNHLQSPWSTSFVPEKRNKNVNQSTKRKIQSSLSSASPSKATKS

SEQ ID NO: 3143 - protein, 1564 aa, Homo sapiens
MSKIRRKVTVENTKTISDSTSRRPSVFERLGPSTGSTAETQCRNWLKTGNCLYGNTCRFVHGPSPRGKGYSSNYRRSPERPTGDLRERMKNKRQDVDTEPQKRNTEESSSPVRKESSRGRHREKEDIKITKERTPESEEENVEWETNRDDSDNGDINYDYVHELSLEMKRQKIQRELMKLEQENMEKREEIIIKKEVSPEVVRSKLSPSPSLRKSSKSPKRKSSPKSSSASKKDRKTSAVSSPLLDQQRNSKTNQSKKKGPRTPSPPPPIPEDIALGKKYKEKYKVKDRIEEKTRDGKDRGRDFERQREKRDKPRSTSPAGQHHSPISSRHHSSSSQSGSSIQRHSPSPRRKRTPSPSYQRTLTPPLRRSASPYPSHSLSSPQRKQSPPRHRSPMREKGRHDHERTSQSHDRRHERREDTRGKRDREKDSREEREYEQDQSSSRDHRDDREPRDGRDRRDARDTRDRRELRDSRDMRDSREMRDYSRDTKESRDPRDSRSTRDAHDYRDREGRDTHRKEDTYPEESRSYGRNHLREESSRTEIRNESRNESRSEIRNDRMGRSRGRVPELPEKGSRGSRGSQIDSHSSNSNYHDSWETRSSYPERDRYPERDNRDQARDSSFERRHGERDRRDNRERDQRPSSPIRHQGRNDELERDERREERRVDRVDDRRDERARERDRERERDRERERERERERDREREKERELERERAREREREREKERDRERDRDRDHDRERERERERDREKEREREREERERERERERERERERERERERARERDKERERQRDWEDKDKGRDDRREKREEIREDRNPRDGHDERKSKKRYRNEGSPSPRQSPKRRREHSPDSDAYNSGDDKNEKHRLLSQVVRPQESRSLSPSHLTEDRQGRWKEEDRKPERKESSRRYEEQELKEKVSSVDKQREQTEILESSRMRAQDIIGHHQSEDRETSDRAHDENKKKAKIQKKPIKKKKEDDVGIERGNIETTSEDGQVFSPKKGQKKKSIEKKRKKSKGDSDISDEEAAQQSKKKRGPRTPPITTKEELVEMCNGKNGILEDSQKKEDTAFSDWSDEDVPDRTEVTEAEHTATATTPGSTPSPLSSLLPPPPPVATATATTVPATLAATTAAAATSFSTSAITISTSATPTNTTNNTFANEDSHRKCHRTRVEKVETPHVTIEDAQHRKPMDQKRSSSLGSNRSNRSHTSGRLRSPSNDSAHRSGDDQSGRKRVLHSGSRDREKTKSLEITGERKSRIDQLKRGEPSRSTSSDRQDSRSHSSRRSSPESDRQVHSRSGSFDSRDRLQERDRYEHDRERERERRDTRQREWDRDADKDWPRNRDRDRLRERERERERDKRRDLDRERERLISDSVERDRDRDRDRTFESSQIESVKRCEAKLEGEHERDLESTSRDSLALDKERMDKDLGSVQGFEETNKSERTESLEAGDDESKLDDAHSLGSGAGEGYEPISDDELDEILAGDAEKREDQQDEEKMPDPLDVIDVDWSGLMPKHPKEPREPGAALLKFTPGAVMLRVGISKKLAGSELFAKVKETCQRLLEKPKGSFILL

SEQ ID NO: 3144 - protein, 1007 aa, Homo sapiens
MEVFPFLLVLSVWWSRTWDSANADSIIHIGAIFDESAKKDDEVFRTAVGDLNQNEEILQTEKITFSVTFVDGNNPFQAVQEACELMNQGILALVSSIGCTSAGSLQSLADAMHIPHLFIQRSTAGTPRSGCGLTRSNRNDDYTLSVRPPVYLHDVILRVVTEYAWQKFIIFYDSEYDIRGIQEFLDKVSQQGMDVALQKVENNINKMITTLFDTMRIEELNRYRDTLRRAILVMNPATAKSFITEVVETNLVAFDCHWIIINEEINDVDVQELVRRSIGRLTIIRQTFPVPQNISQRCFRGNHRISSTLCDPKDPFAQNMEISNLYIYDTVLLLANAFHKKLEDRKWHSMASLSCIRKNSKPWQGGRSMLETIKKGGVSGLTGELEFGENGGNPNVHFEILGTNYGEELGRGVRKLGCWNPVTGLNGSLTDKKLENNMRGVVLRVVTVLEEPFVMVSENVLGKPKKYQGFSIDVLDALSNYLGFNYEIYVAPDHKYGSPQEDGTWNGLVGELVFKRADIGISALTITPDRENVVDFTTRYMDYSVGVLLRRAEKTVDMFACLAPFDLSLWACIAGTVLLVGLLVYLLNWLNPPRLQMGSMTSTTLYNSMWFVYGSFVQQGGEVPYTTLATRMMMGAWWLFALIVISSYTANLAAFLTITRIESSIQSLQDLSKQTEIPYGTVLDSAVYEHVRMKGLNPFERDSMYSQMWRMINRSNGSENNVLESQAGIQKVKYGNYAFVWDAAVLEYVAINDPDCSFYTIGNTVADRGYGIALQHGSPYRDVFSQRILELQQNGDMDILKHKWWPKNGQCDLYSSVDTKQKGGALDIKSFAGVFCILAAGIVLSCFIAMLETWWNKRKGSRVPSKEDDKEIDLEHLHRRVNSLCTDDDSPHKQFSTSSIDLTPLDIDTLPTRQALEQISDFRNTHITTTTFIPEQIQTLSRTLSAKAASGFTFGNVPEHRTGPFRHRAPNGGFFRSPIKTMSSIPYQPTPTLGLNLGNDPDRGTSI

SEQ ID NO: 3145 - protein, 260 aa, Homo sapiens
MMDPCSVGVQLRTTNECHKTYYTRHTGFKTLQELSSNDMLLLQLRTGMTLSGNNTICFHHVKIYIDRFEDLQKSCCDPFNIHKKLAKKNLHVIDLDDATFLSAKFGRQLVPGWKLCPKCTQIINGSVDVDTEDRQKRKPESDGRTAKALRSLQFTNPGRQTEFAPETGKREKRRLTKNATAGSDRQVIPAKSKVYDSQGLLIFSGMDLCDCLDEDCLGCFYACPACGSTKCGAECRCDRKWLYEQIEIEGGEIIHNKHAG

SEQ ID NO: 3146 - protein, 2579 aa, Homo sapiens
MAEAVKPQRRAKAKASRTKTKEKKKYETPQREESSEVSLPKTSREQEIPSLACEFKGDHLKVVTDSQLQDDASGQNESEMFDVPLTSLTISNEESLTCNTEPPKEGGEARPCVGDSAVTPKVHPGDNVGTKVETPKNFTEVEENMSVQGGLSESAPQSNFSYTQPAMENIQVRETQNSKEDKQGLVCSSEVPQNVGLQSSCPAKHGFQTPRVKKLYPQLPAEIAGEAPALVAVKPLLRSERLYPELPSQLELVPFTKEQLKILEPGSWLENVESYLEEFDSMAHQDRHEFYELLLNYSRCRKQLLLAEAELLTLTSDCQNAKSRLWQFKEEQMSVQGICADQVKVFSYHRYQRVEMNENALVELKKLFDAKSEHLHQTLALHSYTSVLSRLQVESYIYALLSSSAVLRSSAIHQQGRASKQTESIPSDLCQLKECISVLFMFTRRVNEDTQFHDDILLWLQKLVSVLQRVGCPGDHLFLLNHILRCPAGVSKWAVPFIQIKVLHNPSGVFHFMQSLALLMSPVKNRAEFMCHMKPSERKPSSSGPGSGTWTLVDEGGEEDEDPETSWILLNEDDLVTILAQFPFHELFQHLLGFKAKGDYLPETTRPQEMMKIFAFANSLVELLAVGLETFNRARYRQFVKRIGYMIRMTLGYVSDHWAQYVSHNQGSGLAQQPYSMEKLQVEFDELFLRAVLHVLKAKRLGIWLFMSEMPFGTLSVQMLWKLFYLMHQVESENLQQLSSSLQPAQCKQQLQDPEHFTNFEKCLSSMNSSEEICLLTTFAQMAQARRTNVDEDFIKIIVLEIYEVSYVTLSTRETFSKVGRELLGTITAVHPEIISVLLDRVQETIDQVGMVSLYLFKELPLYLWQPSASEIAVIRDWLLNYNLTVVKNKLACVILEGLNWGFAKQATLHLDQAVHAEVALMVLEAYQKYLAQKPYAGILSESMKQVSYLASIVRYGETPETSFNQWAWNLILRLKLHKNDYGIQPNCPAVPFSVTVPDMTESPTFHPLLKAVKAGMPIGCYLALSMTAVGHSIEKFCAEGIPLLGILVQSRHLRTVVHVLDKILPLFYPCQYYLLKNEQFLSHLLLFLHLDSGVPQGVTQQVTHKVAQHLTGASHGDNVKLLNSMIQAHISVSTQPNEVGPVAVLEFWVQALISQHLWYREQPILFLMDHLCKAAFQLMQEDCIQKLLYQQHKNALGYHCDRSLLSSLVSWIVAGNITPSFVEGLATPTQVWFAWTVLNMESIFEEDSQLRRVIEGELVINSAFTPDQALKKAQTQLKLPIVPSLQRLLIYRWAHQALVTPSDHPLLPLIWQKFFLLYLHRPGPQYGLPIDGCIGRRFFQSPAHINLLKEMKRRLTEVADFHHAASKALRVPAEGSEGLPESHSGTPGYLTSPELHKELVRLFNVYILWLEDENFQKGDTYIPSLPKHYDIHRLAKVMQNQQDLWMEYLNMERIYHEFQETVGLWTQAKLESHSTPCSLSVQLDFTDPLLAKERVLSNLRKHEAPQPPLALHPTKPPVPVISSAVLLSQKDATQLVCTDLNLLQQQARTAALRESQQVALDGELLDTMPKQYVNREEQTTLHLECRGSSGKKCQGAAVVTVQFEGMHKNEAISQQLHVLRKEVKQLQAEAAKPPSLNIVEAAVHAENLITALVNAYKLQPTPGIQKVGISLFFTIVDYVSDETQRHPPTRQFFTSCIEILGQVFISGIKSECRKVLETILKNSRLCSLLSPFFTPNAAPAEFIQLYEQVVKFLSEDNSDMIFMLLTKFDLKQWLSATKPPLSDRTRLLESIHLALTAWGLEPDEDILMPFNLFCKHWTYLLLYQFPDQYSDILRLLMQSSAEQLLSPECWKATLRALGCCAPSCQQGAASTEGAVLPSSSDALLSDKQVMETIQWLSDFFYKLRLSKMDFKSFGLFSKWSPYMADVKTFLGYLVKRLIDLEMTCLAQDPTASRKTVLKSLHSVIIQLFKPWILVLEDNESSQQRHYPWLESDTVVASSIVQLFTDCIDSLHESFKDKLLPGDAGALWLHLMHYCEACTAPKMPEFILYAFHSTYRKLPWKDLHPDQMLMEAFFKVERGSPKSCFLFLGSVLCEVNWVSVLSDAWNSSPHPETRSMIVCLLFMMILLAKEVQLVDQTDSPLLSLLGQTSSLSWHLVDIVSYQSVLSYFSSHYPPSIILAKESYAELIMKLLKVSAGLSIPTDSQKHLDAVPKCQAFTHQMVQFLSTLEQNGKITLAVLEQEMSKLLDDIIVFNPPDMDSQTRHMALSSLFMEVLMMMNNATIPTAEFLRGSIRTWIGQKMHGLVVLPLLTAACQSLASVRHMAETTEACITAYFKESPLNQNSGWGPILVSLQVPELTMEEFLQECLTLGSYLTLYVYLLQCLNSEQTLRNEMKVLLILSKWLEQVYPSSVEEEAKLFLWWHQVLQLSLIQTEQNDSVLTESVIRILLLVQSRQNLVAEERLSSGILGAIGFGRKSPLSNRFRVVARSMAAFLSVQVPMEDQIRLRPGSELHLTPKAQQALNALESMASSKQYVEYQDQILQATQFIRHPGHCLQDGKSFLALLVNCLYPEVHYLDHIR

SEQ ID NO: 3147 - protein, 553 aa, Homo sapiens
MLSVRVAAAVVRALPRRAGLVSRNALGSSFIAARNFHASNTHLQKTGTAEMSSILEERILGADTSVDLEETGRVLSIGDGIARVHGLRNVQAEEMVEFSSGLKGMSLNLEPDNVGVVVFGNDKLIKEGDIVKRTGAIVDVPVGEELLGRVVDALGNAIDGKGPIGSKTRRRVGLKAPGIIPRISVREPMQTGIKAVDSLVPIGRGQRELIIGDRQTGKTSIAIDTIINQKRFNDGSDEKKKLYCIYVAIGQKRSTVAQLVKRLTDADAMKYTIVVSATASDAAPLQYLAPYSGCSMGEYFRDNGKHALIIYDDLSKQAVAYRQMSLLLRRPPGREAYPGDVFYLHSRLLERAAKMNDAFGGGSLTALPVIETQAGDVSAYIPTNVISITDGQIFLETELFYKGIRPAINVGLSVSRVGSAAQTRAMKQVAGTMKLELAQYREVAAFAQFGSDLDAATQQLLSRGVRLTELLKQGQYSPMAIEEQVAVIYAGVRGYLDKLEPSKITKFENAFLSHVVSQHQALLGTIRADGKISEQSDAKLKEIVTNFLAGFEA

SEQ ID NO: 3148 - protein, 278 aa, Homo sapiens
MEPQEERETQVAAWLKKIFGDHPIPQYEVNPRTTEILHHLSERNRVRDRDVYLVIEDLKQKASEYESEAKYLQDLLMESVNFSPANLSSTGSRYLNALVDSAVALETKDTSLASFIPAVNDLTSDLFRTKSKSEEIKIELEKLEKNLTATLVLEKCLQEDVKKAELHLSTERAKVDNRRQNMDFLKAKSEEFRFGIKAAEEQLSARGMDASLSHQSLVALSEKLARLKQQTIPLKKKLESYLDLMPNPSLAQVKIEEAKRELDSIEAELTRRVDMMEL

SEQ ID NO: 3149 - protein, 224 aa, Homo sapiens
MVEDELALFDKSINEFWNKFKSTDTSCQMAGLRDTYKDSIKAFAEKLSVKLKEEERMVEMFLEYQNQISRQNKLIQEKKDNLLKLIAEVKGKKQELEVLTANIQDLKEEYSRKKETISTANKANAERLKRLQKSADLYKDRLGLEIRKIYGEKLQFIFTNIDPKNPESPFMFSLHLNEARDYEVSDSAPHLEGLAEFQENVRKTNNFSAFLANVRKAFTATVYN

SEQ ID NO: 3150 - protein, 436 aa, Homo sapiens
MRLARLLRGAALAGPGPGLRAAGFSRSFSSDSGSSPASERGVPGQVDFYARFSPSPLSMKQFLDFGSVNACEKTSFMFLRQELPVRLANIMKEISLLPDNLLRTPSVQLVQSWYIQSLQELLDFKDKSAEDAKAIYDFTDTVIRIRNRHNDVIPTMAQGVIEYKESFGVDPVTSQNVQYFLDRFYMSRISIRMLLNQHSLLFGGKGKGSPSHRKHIGSINPNCNVLEVIKDGYENARRLCDLYYINSPELELEELNAKSPGQPIQVVYVPSHLYHMVFELFKNAMRATMEHHANRGVYPPIQVHVTLGNEDLTVKMSDRGGGVPLRKIDRLFNYMYSTAPRPRVETSRAVPLAGFGYGLPISRLYAQYFQGDLKLYSLEGYGTDAVIYIKALSTDSIERLPVYNKAAWKHYNTNHEADDWCVPSREPKDMTTFRSA

SEQ ID NO: 3151 - protein, 115 aa, Homo sapiens
MIPAKDMAKVMIVMLAICFLTKSDGKSVKKRSVSEIQLMHNLGKHLNSMERVEWLRKKLQDVHNFVALGAPLAPRDAGSQRPRKKEDNVLVESHEKSLGEADKADVNVLTKAKSQ

SEQ ID NO: 3152 - protein, 588 aa, Homo sapiens
MPQLGGGGGGGGGGSGGGGGSSAGAAGGGDDLGANDELIPFQDEGGEEQEPSSDSASAQRDLDEVKSSLVNESENQSSSSDSEAERRPQPVRDTFQKPRDYFAEVRRPQDSAFFKGPPYPGYPFLMIPDLSSPYLSNGPLSPGGARTYLQMKWPLLDVPSSATVKDTRSPSPAHLSNKVPVVQHPHHMHPLTPLITYSNDHFSPGSPPTHLSPEIDPKTGIPRPPHPSELSPYYPLSPGAVGQIPHPLGWLVPQQGQPMYSLPPGGFRHPYPALAMNASMSSLVSSRFSPHMVAPAHPGLPTSGIPHPAIVSPIVKQEPAPPSLSPAVSVKSPVTVKKEEEKKPHVKKPLNAFMLYMKEMRAKVVAECTLKESAAINQILGRKWHNLSREEQAKYYELARKERQLHSQLYPTWSARDNYGKKKKRKREKQLSQTQSQQQVQEAEGALASKSKKPCVQYLPPEKPCDSPASSHGSMLDSPATPSAALASPAAPAATHSEQAQPLSLTTKPETRAQLALHSAAFLSAKAAASSSGQMGSQPPLLSRPLPLGSMPTALLASPPSFPATLHAHQALPVLQAQPLSLVTKSAH

SEQ ID NO: 3153 - protein, 479 aa, Homo sapiens
MRFVVALVLLNVAAAGAVPLLATESVKQEEAGVRPSAGNVSTHPSLSQRPGGSTKSHPEPQTPKDSPSKSSAEAQTPEDTPNKSGAEAKTQKDSSNKSGAEAKTQKGSTSKSGSEAQTTKDSTSKSHPELQTPKDSTGKSGAEAQTPEDSPNRSGAEAKTQKDSPSKSGSEAQTTKDVPNKSGADGQTPKDGSSKSGAEDQTPKDVPNKSGAEKQTPKDGSNKSGAEEQGPIDGPSKSGAEEQTSKDSPNKVVPEQPSRKDHSKPISNPSDNKELPKADTNQLADKGKLSPHAFKTESGEETDLISPPQEEVKSSEPTEDVEPKEAEDDDTGPEEGSPPKEEKEKMSGSASSENREGTLSDSTGSEKDDLYPNGSGNGSAESSHFFAYLVTAAILVAVLYIAHHNKRKIIAFVLEGKRSKVTRRPKASDYQRLDQKYVLILNVFPAPPKRSFFPVLTEWYIPLEKDERHQWIVLLSFQL

SEQ ID NO: 3154 - protein, 276 aa, Homo sapiens
MAASAGGPGSWSENILEYFLRNSQITAEDGAEITWYHAANHKAQTNEALKSTAHMIEADVLLPSDGSEHSQPIMAHPPETNSDNTLQEWLTEVMKSNKGIKLDFKSLAVVEPSMMLLENVKRHLKRPVWINADILPGPNGNSKVIDAKPFLDTVISFFPDVTFSLGWTTGWHPEKVNEGYSWTMVKEMEYICNELSQPVTFPVRAALVRQSCSQLLWLLKKSNRYSLTIWTGKNDNYSVEDLLYIRDHFDKKQVFYDILEPQNHEFKQAIGIKVNL

SEQ ID NO: 3155 - protein, 894 aa, Homo sapiens
MATSMAAASGRFESAKSIEERKEQTRNARAEVLRQAKANFEKEERRKELKRLRGEDTWMLPDVNERIEQFSQEHSVKKKKKKDKHSKKAKKEKKKKSKKQKYEKNNESSDSSSSSEDEWVEAVPSQTPDKEKAWKVKDEKSGKDDTQIIKRDEWMTVDFMSVKTVSSSSLKAEKETMRKIEQEKNQALEQSKLMERELNPYWKDGGTGLPPEDCSVSSITKVSVVEDGGLSWLRKSYLRMKEQAEKQSRNFEDIVAERYGSMEIFQSKLEDAEKAASTKEDYRRERWRKPTYSDKAQNCQESRESDLVKYGNSSRDRYATTDTAKNSNNEKFIGDEKDKRPGSLETCRRESNPRQNQEFSFGNLRAKFLRPSDDEELSFHSKGRKFEPLSSSSALVAQGSLCSGFRKPTKNSEERLTSWSRSDGRGDKKHSNQKPSETSTDEHQHVPEDPREKSQDEVLRDDPPKKEHLRDTKSTFAGSPERESIHILSVDEKNKLGAKIIKAEMMGNMELAEQLKVQLEKANKFKETITQIPKKSGVENEDQQEVILVRTDQSGRVWPVNTPGKSLESQGGRRKRQMVSTHEERERVRYFHDDDNLSLNDLVKNEKMGTAENQNKLFMRMASKFMGKTDGDYYTLDDMFVSKAAERERLGEEEENQRKKAIAEHRSLAAQMEKCLYCFDSSQFPKHLIVAIGVKVYLCLPNVRSLTEGHCLIVPLQHHRAATLLDEDIWEEIQMFRKSLVKMFEDKGLDCIFLETNMSMKKQYHMVYECIPLPKEVGDMAPIYFKKAIMESDEEWSMNKKLIDLSSKDIRKSVPRGLPYFSVDFGLHGGFAHVIEDQHKFPHYFGKEIIGGMLDIEPRLWRKGIRESFEDQRKKALQFAQWWKPYDFTKSKNY

SEQ ID NO: 3156 - protein, 993 aa, Homo sapiens
MAVLKLTDQPPLVQAIFSGDPEEIRMLIHKTEDVNTLDSEKRTPLHVAAFLGDAEIIELLILSGARVNAKDNMWLTPLHRAVASRSEEAVQVLIKHSADVNARDKNWQTPLHVAAANKAVKCAEVIIPLLSSVNVSDRGGRTALHHAALNGHVEMVNLLLAKGANINAFDKKDRRALHWAAYMGHLDVVALLINHGAEVTCKDKKGYTPLHAAASNGQINVVKHLLNLGVEIDEINVYGNTALHIACYNGQDAVVNELIDYGANVNQPNNNGFTPLHFAAASTHGALCLELLVNNGADVNIQSKDGKSPLHMTAVHGRFTRSQTLIQNGGEIDCVDKDGNTPLHVAARYGHELLINTLITSGADTAKCGIHSMFPLHLAALNAHSDCCRKLLSSGFEIDTPDKFGRTCLHAAAAGGNVECIKLLQSSGADFHKKDKCGRTPLHYAAANCHFHCIETLVTTGANVNETDDWGRTALHYAAASDMDRNKTILGNAHDNSEELERARELKEKEATLCLEFLLQNDANPSIRDKEGYNSIHYAAAYGHRQCLELLLERTNSGFEESDSGATKSPLHLAAYNGHHQALEVLLQSLVDLDIRDEKGRTALDLAAFKGHTECVEALINQGASIFVKDNVTKRTPLHASVINGHTLCLRLLLEIADNPEAVDVKDAKGQTPLMLAVAYGHIDAVSLLLEKEANVDTVDILGCTALHRGIMTGHEECVQMLLEQEVSILCKDSRGRTPLHYAAARGHATWLSELLQMALSEEDCCFKDNQGYTPLHWACYNGNENCIEVLLEQKCFRKFIGNPFTPLHCAIINDHGNCASLLLGAIDSSIVSCRDDKGRTPLHAAAFADHVECLQLLLRHSAPVNAVDNSGKTALMMAAENGQAGAVDILVNSAQADLTVKDKDLNTPLHLACSKGHEKCALLILDKIQDESLINEKNNALQTPLHVAARNGLKVVVEELLAKGACVLAVDENASRSNGPRSTPGTAVQKEE

SEQ ID NO: 3157 - protein, 593 aa, Homo sapiens
MLRTSVLRLLGRTGASRLSLLEDFGPRYYSSGSLSAGDDACDVRAYFTTPIFYVNAAPHIGHLYSALLADALCRHRRLRGPSTAATRFSTGTDEHGLKIQQAAATAGLAPTELCDRVSEQFQQLFQEAGISCTDFIRTTEARHRVAVQHFWGVLKSRGLLYKGVYEGWYCASDECFLPEAKVTQQPGPSGDSFPVSLESGHPVSWTKEENYIFRLSQFRKPLQRWLRGNPQAITPEPFHHVVLQWLDEELPDLSVSRRSSHLHWGIPVPGDDSQTIYVWLDALVNYLTVIGYPNAEFKSWWPATSHIIGKDILKFHAIYWPAFLLGAGMSPPQRICVHSHWTVCGQKMSKSLGNVVDPRTCLNRYTVDGFRYFLLRQGVPNWDCDYYDEKVVKLLNSELADALGGLLNRCTAKRINPSETYPAFCTTCFPSEPGLVGPSVRAQAEDYALVSAVATLPKQVADHYDNFRIYKALEAVSSCVRQTNGFVQRHAPWKLNWESPVDAPWLGTVLHVALECLRVFGTLLQPVTPSLADKLLSRLGVSASERSLGELYFLPRFYGHPCPFEGRRLGPETGLLFPRLDQSRTWLVKAHRT

SEQ ID NO: 3158 - protein, 404 aa, Homo sapiens
MPRPGSAQRWAAVAGRWGCRLLALLLLVPGPGGASEITFELPDNAKQCFYEDIAQGTKCTLEFQVITGGHYDVDCRLEDPDGKVLYKEMKKQYDSFTFTASKNGTYKFCFSNEFSTFTHKTVYFDFQVGEDPPLFPSENRVSALTQMESACVSIHEALKSVIDYQTHFRLREAQGRSRAEDLNTRVAYWHSVDTSPGYHESDSKKSEDLSLCNVAEHSNTTEGPTGKQEGAQSVEEMFEEEAEEEVFLKFVILHAEDDTDEALRVQNLLQDDFGIKPGIIFAEMPCGRQHLQNLDDAVNGSAWTILLLTENFLRDTWCNFQFYTSLMNSVNRQHKYNSVIPMRPLNNPLPRERTPFALQTINALEEESRGFPTQVERIFQESVYKTQQTIWKETRNMVQRQFIA

SEQ ID NO: 3159 - protein, 1338 aa, Homo sapiens
MVSYWDTGVLLCALLSCLLLTGSSSGSKLKDPELSLKGTQHIMQAGQTLHLQCRGEAAHKWSLPEMVSKESERLSITKSACGRNGKQFCSTLTLNTAQANHTGFYSCKYLAVPTSKKKETESAIYIFISDTGRPFVEMYSEIPEIIHMTEGRELVIPCRVTSPNITVTLKKFPLDTLIPDGKRIIWDSRKGFIISNATYKEIGLLTCEATVNGHLYKTNYLTHRQTNTIIDVQISTPRPVKLLRGHTLVLNCTATTPLNTRVQMTWSYPDEKNKRASVRRRIDQSNSHANIFYSVLTIDKMQNKDKGLYTCRVRSGPSFKSVNTSVHIYDKAFITVKHRKQQVLETVAGKRSYRLSMKVKAFPSPEVVWLKDGLPATEKSARYLTRGYSLIIKDVTEEDAGNYTILLSIKQSNVFKNLTATLIVNVKPQIYEKAVSSFPDPALYPLGSRQILTCTAYGIPQPTIKWFWHPCNHNHSEARCDFCSNNEESFILDADSNMGNRIESITQRMAIIEGKNKMASTLVVADSRISGIYICIASNKVGTVGRNISFYITDVPNGFHVNLEKMPTEGEDLKLSCTVNKFLYRDVTWILLRTVNNRTMHYSISKQKMAITKEHSITLNLTIMNVSLQDSGTYACRARNVYTGEEILQKKEITIRDQEAPYLLRNLSDHTVAISSSTTLDCHANGVPEPQITWFKNNHKIQQEPGIILGPGSSTLFIERVTEEDEGVYHCKATNQKGSVESSAYLTVQGTSDKSNLELITLTCTCVAATLFWLLLTLFIRKMKRSSSEIKTDYLSIIMDPDEVPLDEQCERLPYDASKWEFARERLKLGKSLGRGAFGKVVQASAFGIKKSPTCRTVAVKMLKEGATASEYKALMTELKILTHIGHHLNVVNLLGACTKQGGPLMVIVEYCKYGNLSNYLKSKRDLFFLNKDAALHMEPKKEKMEPGLEQGKKPRLDSVTSSESFASSGFQEDKSLSDVEEEEDSDGFYKEPITMEDLISYSFQVARGMEFLSSRKCIHRDLAARNILLSENNVVKICDFGLARDIYKNPDYVRKGDTRLPLKWMAPESIFDKIYSTKSDVWSYGVLLWEIFSLGGSPYPGVQMDEDFCSRLREGMRMRAPEYSTPEIYQIMLDCWHRDPKERPRFAELVEKLGDLLQANVQQDGKDYIPINAILTGNSGFTYSTPAFSEDFFKESISAPKFNSGSSDDVRYVNAFKFMSLERIKTFEELLPNATSMFDDYQGDSSTLLASPMLKRFTWTDSKPKASLKIDLRVTSKSKESGLSDVSRPSFCHSSCGHVSEGKRRFTYDHAELERKIACCSPPPDYNSVVLYSTPPI

SEQ ID NO: 3160 - protein, 479 aa, Homo sapiens
MGAFLDKPKTEKHNAHGAGNGLRYGLSSMQGWRVEMEDAHTAVVGIPHGLEDWSFFAVYDGHAGSRVANYCSTHLLEHITTNEDFRAAGKSGSALELSVENVKNGIRTGFLKIDEYMRNFSDLRNGMDRSGSTAVGVMISPKHIYFINCGDSRAVLYRNGQVCFSTQDHKPCNPREKERIQNAGGSVMIQRVNGSLAVSRALGDYDYKCVDGKGPTEQLVSPEPEVYEILRAEEDEFIILACDGIWDVMSNEELCEYVKSRLEVSDDLENVCNWVVDTCLHKGSRDNMSIVLVCFSNAPKVSDEAVKKDSELDKHLESRVEEIMEKSGEEGMPDLAHVMRILSAENIPNLPPGGGLAGKRNVIEAVYSRLNPHRESDGASDEAEESGSQGKLVEALRQMRINHRGNYRQLLEEMLTSYRLAKVEGEESPAEPAATATSSNSDAGNPVTMQESHTESESGLAELDSSNEDAGTKMSGEKI

SEQ ID NO: 3161 - protein, 504 aa, Homo sapiens
MDPGQQPPPQPAPQGQGQPPSQPPQGQGPPSGPGQPAPAATQAAPQAPPAGHQIVHVRGDSETDLEALFNAVMNPKTANVPQTVPMRLRKLPDSFFKPPEPKSHSRQASTDAGTAGALTPQHVRAHSSPASLQLGAVSPGTLTPTGVVSGPAATPTAQHLRQSSFEIPDDVPLPAGWEMAKTSSGQRYFLNHIDQTTTWQDPRKAMLSQMNVTAPTSPPVQQNMMNSASGPLPDGWEQAMTQDGEIYYINHKNKTTSWLDPRLDPRFAMNQRISQSAPVKQPPPLAPQSPQGGVMGGSNSNQQQQMRLQQLQMEKERLRLKQQELLRQAMRNINPSTANSPKCQELALRSQLPTLEQDGGTQNPVSSPGMSQELRTMTTNSSDPFLNSGTYHSRDESTDSGLSMSSYSVPRTPDDFLNSVDEMDTGDTINQSTLPSQQNRFPDYLEAIPGTNVDLGTLEGDGMNIEGEELMPSLQEALSSDILNDMESVLAATKLDKESFLTWL

SEQ ID NO: 3162 - protein, 2623 aa, Homo sapiens
MKVKGRGITCLLVSFAVICLVATPGGKACPRRCACYMPTEVHCTFRYLTSIPDSIPPNVERINLGYNSLVRLMETDFSGLTKLELLMLHSNGIHTIPDKTFSDLQALQVLKMSYNKVRKLQKDTFYGLRSLTRLHMDHNNIEFINPEVFYGLNFLRLVHLEGNQLTKLHPDTFVSLSYLQIFKISFIKFLYLSDNFLTSLPQEMVSYMPDLDSLYLHGNPWTCDCHLKWLSDWIQEKPDVIKCKKDRSPSSAQQCPLCMNPRTSKGKPLAMVSAAAFQCAKPTIDSSLKSKSLTILEDSSSAFISPQGFMAPFGSLTLNMTDQSGNEANMVCSIQKPSRTSPIAFTEENDYIVLNTSFSTFLVCNIDYGHIQPVWQILALYSDSPLILERSHLLSETPQLYYKYKQVAPKPEDIFTNIEADLRADPSWLMQDQISLQLNRTATTFSTLQIQYSSDAQITLPRAEMRPVKHKWTMISRDNNTKLEHTVLVGGTVGLNCPGQGDPTPHVDWLLADGSKVRAPYVSEDGRILIDKSGKLELQMADSFDTGVYHCISSNYDDADILTYRITVVEPLVEAYQENGIHHTVFIGETLDLPCHSTGIPDASISWVIPGNNVLYQSSRDKKVLNNGTLRILQVTPKDQGYYRCVAANPSGVDFLIFQVSVKMKGQRPLEHDGETEGSGLDESNPIAHLKEPPGAQLRTSALMEAEVGKHTSSTSKRHNYRELTLQRRGDSTHRRFRENRRHFPPSARRIDPQHWAALLEKAKKNAMPDKRENTTVSPPPVVTQLPNIPGEEDDSSGMLALHEEFMVPATKALNLPARTVTADSRTISDSPMTNINYGTEFSPVVNSQILPPEEPTDFKLSTAIKTTAMSKNINPTMSSQIQGTTNQHSSTVFPLLLGATEFQDSDQMGRGREHFQSRPPITVRTMIKDVNVKMLSSTTNKLLLESVNTTNSHQTSVREVSEPRHNHFYSHTTQILSTSTFPSDPHTAAHSQFPIPRNSTVNIPLFRRFGRQRKIGGRGRIISPYRTPVLRRHRYSIFRSTTRGSSEKSTTAFSATVLNVTCLSCLPRERLTTATAALSFPSAAPITFPKADIARVPSEESTTLVQNPLLLLENKPSVEKTTPTIKYFRTEISQVTPTGAVMTYAPTSIPMEKTHKVNASYPRVSSTNEAKRDSVITSSLSGAITKPPMTIIAITRFSRRKIPWQQNFVNNHNPKGRLRNQHKVSLQKSTAVMLPKTSPALPRDKVSPFHFTTLSTSVMQIPSNTLTTAHHTTTKTHNPGSLPTKKELPFPPLNPMLPSIISKDSSTKSIISTQTAIPATTPTFPASVITYETQTERSRAQTIQREQEPQKKNRTDPNISPDQSSGFTTPTAMTPPVLTTAETSVKPSVSAFTHSPPENTTGISSTISFHSRTLNLTDVIEELAQASTQTLKSTIASETTLSSKSHQSTTTRKAIIRHSTIPPFLSSSATLMPVPISPPFTQRAVTDNVATPISGLMTNTVVKLHESSRHNAKPQQLVAEVATSPKVHPNAKFTIGTTHFIYSNLLHSTPMPALTTVKSQNSKLTPSPWAENQFWHKPYSEIAEKGKKPEVSMLATTGLSEATTLVSDWDGQKNTKKSDFDKKPVQEATTSKLLPFDSLSRYIFEKPRIVGGKAASFTIPANSDAFLPCEAVGNPLPTIHWTRVPSGLDLSKRKQNSRVQVLPNGTLSIQRVEIQDRGQYLCSASNLFGTDHLHVTLSVVSYPPRILERRTKEITVHSGSTVELKCRAEGRPSPTVTWILANQTVVSESSQGSRQAVVTVDGTLVLHNLSIYDRGFYKCVASNPGGQDSLLVKIQVIAAPPVILEQRRQVIVGTWGESLKLPCTAKGTPQPSVYWVLSDGTEVKPLQFTNSKLFLFSNGTLYIRNLASSDRGTYECIATSSTGSERRVVMLTMEERVTSPRIEAASQKRTEVNFGDKLLLNCSATGEPKPQIMWRLPSKAVVDQQHRVGSWIHVYPNGSLFIGSVTEKDSGVYLCVARNKMGDDLILMHVSLRLKPAKIDHKQYFRKQVLHGKDFQVDCKASGSPVPEISWSLPDGTMINNAMQADDSGHRTRRYTLFNNGTLYFNKVGVAEEGDYTCYAQNTLGKDEMKVHLTVITAAPRIRQSNKTNKRIKAGDTAVLDCEVTGDPKPKIFWLLPSNDMISFSIDRYTFHANGSLTINKVKLLDSGEYVCVARNPSGDDTKMYKLDVVSKPPLINGLYTNRTVIKATAVRHSKKHFDCRAEGTPSPEVMWIMPDNIFLTAPYYGSRITVHKNGTLEIRNVRLSDSADFICVARNEGGESVLVVQLEVLEMLRRPTFRNPFNEKIVAQLGKSTALNCSVDGNPPPEIIWILPNGTRFSNGPQSYQYLIASNGSFIISKTTREDAGKYRCAARNKVGYIEKLVILEIGQKPVILTYAPGTVKGISGESLSLHCVSDGIPKPNIKWTMPSGYVVDRPQINGKYILHDNGTLVIKEATAYDRGNYICKAQNSVGHTLITVPVMIVAYPPRITNRPPRSIVTRTGAAFQLHCVALGVPKPEITWEMPDHSLLSTASKERTHGSEQLHLQGTLVIQNPQTSDSGIYKCTAKNPLGSDYAATYIQVI

SEQ ID NO: 3163 - protein, 664 aa, Homo sapiens
MKTGLFFLCLLGTAAAIPTNARLLSDHSKPTAETVAPDNTAIPSLRAEAEENEKETAVSTEDDSHHKAEKSSVLKSKEESHEQSAEQGKSSSQELGLKDQEDSDGHLSVNLEYAPTEGTLDIKEDMSEPQEKKLSENTDFLAPGVSSFTDSNQQESITKREENQEQPRNYSHHQLNRSSKHSQGLRDQGNQEQDPNISNGEEEEEKEPGEVGTHNDNQERKTELPREHANSKQEEDNTQSDDILEESDQPTQVSKMQEDEFDQGNQEQEDNSNAEMEEENASNVNKHIQETEWQSQEGKTGLEAISNHKETEEKTVSEALLMEPTDDGNTTPRNHGVDDDGDDDGDDGGTDGPRHSASDDYFIPSQAFLEAERAQSIAYHLKIEEQREKVHENENIGTTEPGEHQEAKKAENSSNEEETSSEGNMRVHAVDSCMSFQCKRGHICKADQQGKPHCVCQDPVTCPPTKPLDQVCGTDNQTYASSCHLFATKCRLEGTKKGHQLQLDYFGACKSIPTCTDFEVIQFPLRMRDWLKNILMQLYEANSEHAGYLNEKQRNKVKKIYLDEKRLLAGDHPIDLLLRDFKKNYHMYVYPVHWQFSELDQHPMDRVLTHSELAPLRASLVPMEHCITRFFEECDPNKDKHITLKEWGHCFGIKEEDIDENLLF

SEQ ID NO: 3164 - protein, 497 aa, Homo sapiens
MKISILLMFLWGLSCALPVTRYQNNESEDSEEWKGHLAQAPTPPLANEDPSDSTQSEEGLGSDDHQYIYRLAGGFSRSTGKGGDDKDDDEDDSGDDTFGDDDSGPGPKDRQEGGNSRLGSDEDSDDTIQASEESAPQGQDSAQDTTSESRELDNEDRVDSKPEGGDSTQESESEEHWVGGGSDGESSHGDGSELDDEGMQSDDPESIRSERGNSRMNSAGMKSKESGENSEQANTQDSGGSQLLEHPSRKIFRKSRISEEDDRSELDDNNTMEEVKSDSTENSNSRDTGLSQPRRDSKGDSQEDSKENLSQEESQNVDGPSSESSQEANLSSQENSSESQEEVVSESRGDNPDPTTSYVEDQEDSDSSEEDSSHTLSHSKSESREEQADSESSESLNFSEESPESPEDENSSSQEGLQSHSSSAESQSEESHSEEDDSDSQDSSRSKEDSNSTESKSSSEEDGQLKNIEIESRKLTVDAYHNKPIGDQDDNDCQDGY

SEQ ID NO: 3165 - protein, 388 aa, Homo sapiens
MAVSVTPIRDTKWLTLEVCREFQRGTCSRPDTECKFAHPSKSCQVENGRVIACFDSLKGRCSRENCKYLHPPPHLKTQLEINGRNNLIQQKNMAMLAQQMQLANAMMPGAPLQPVPMFSVAPSLATNASAAAFNPYLGPVSPSLVPAEILPTAPMLVTGNPGVPVPAAAAAAAQKLMRTDRLEVCREYQRGNCNRGENDCRFAHPADSTMIDTNDNTVTVCMDYIKGRCSREKCKYFHPPAHLQAKIKAAQYQVNQAAAAQAAATAAAMTQSAVKSLKRPLEATFDLGIPQAVLPPLPKRPALEKTNGATAVFNTGIFQYQQALANMQLQQHTAFLPPVPMVHGATPATVSAATTSATSVPFAATATANQIPIISAEHLTSHKYVTQM

SEQ ID NO: 3166 - protein, 400 aa, Homo sapiens
MAVSVTPIRDTKWLTLEVCREFQRGTCSRPDTECKFAHPSKSCQVENGRVIACFDSLKGRCSRENCKYLHPPPHLKTQLEINGRNNLIQQKNMAMLAQQMQLANAMMPGAPLQPVPMFSVAPSLATNASAAAFNPYLGPVSPSLVPAEILPTAPMLVTGNPGVPVPAAAAAAAQKLMRTDRLEVCREYQRGNCNRGENDCRFAHPADSTMIDTNDNTVTVCMDYIKGRCSREKCKYFHPPAHLQAKIKAAQYQVNQAAAAQAAATAAAMTQSAVKSLKRPLEATFDLGIPQAVLPPLPKRPALEKTNGATAVFNTGIFQYQQALANMQLQQHTAFLPPGSILCMTPATSVVPMVHGATPATVSAATTSATSVPFAATATANQIPIISAEHLTSHKYVTQM

SEQ ID NO: 3167 - protein, 902 aa, Homo sapiens
MRIISRQIVLLFSGFWGLAMGAFPSSVQIGGLFIRNTDQEYTAFRLAIFLHNTSPNASEAPFNLVPHVDNIETANSFAVTNAFCSQYSRGVFAIFGLYDKRSVHTLTSFCSALHISLITPSFPTEGESQFVLQLRPSLRGALLSLLDHYEWNCFVFLYDTDRGYSILQAIMEKAGQNGWHVSAICVENFNDVSYRQLLEELDRRQEKKFVIDCEIERLQNILEQIVSVGKHVKGYHYIIANLGFKDISLERFIHGGANVTGFQLVDFNTPMVIKLMDRWKKLDQREYPGSETPPKYTSALTYDGVLVMAETFRSLRRQKIDISRRGNAGDCLANPAAPWGQGIDMERTLKQVRIQGLTGNVQFDHYGRRVNYTMDVFELKSTGPRKVGYWNDMDKLVLIQDVPTLGNDTAAIENRTVVVTTIMESPYVMYKKNHEMFEGNDKYEGYCVDLASEIAKHIGIKYKIAIVPDGKYGARDADTKIWNGMVGELVYGKAEIAIAPLTITLVREEVIDFSKPFMSLGISIMIKKPQKSKPGVFSFLDPLAYEIWMCIVFAYIGVSVVLFLVSRFSPYEWHTEEPEDGKEGPSDQPPNEFGIFNSLWFSLGAFMQQGCDISPRSLSGRIVGGVWWFFTLIIISSYTANLAAFLTVERMVSPIESAEDLAKQTEIAYGTLDSGSTKEFFRRSKIAVYEKMWTYMRSAEPSVFTRTTAEGVARVRKSKGKFAFLLESTMNEYIEQRKPCDTMKVGGNLDSKGYGVATPKGSSLRTPVNLAVLKLSEAGVLDKLKNKWWYDKGECGPKDSGSKDKTSALSLSNVAGVFYILVGGLGLAMLVALIEFCYKSRAEAKRMKLTFSEAIRNKARLSITGSVGENGRVLTPDCPKAVHTGTAIRQSSGLAVIASDLP

SEQ ID NO: 3168 - protein, 523 aa, Homo sapiens
MAGQRVLLLVGFLLPGVLLSEAAKILTISTVGGSHYLLMDRVSQILQDHGHNVTMLNHKRGPFMPDFKKEEKSYQVISWLAPEDHQREFKKSFDFFLEETLGGRGKFENLLNVLEYLALQCSHFLNRKDIMDSLKNENFDMVIVETFDYCPFLIAEKLGKPFVAILSTSFGSLEFGLPIPLSYVPVFRSLLTDHMDFWGRVKNFLMFFSFCRRQQHMQSTFDNTIKEHFTEGSRPVLSHLLLKAELWFINSDFAFDFARPLLPNTVYVGGLMEKPIKPVPQDLENFIAKFGDSGFVLVTLGSMVNTCQNPEIFKEMNNAFAHLPQGVIWKCQCSHWPKDVHLAANVKIVDWLPQSDLLAHPSIRLFVTHGGQNSIMEAIQHGVPMVGIPLFGDQPENMVRVEAKKFGVSIQLKKLKAETLALKMKQIMEDKRYKSAAVAASVILRSHPLSPTQRLVGWIDHVLQTGGATHLKPYVFQQPWHEQYLLDVFVFLLGLTLGTLWLCGKLLGMAVWWLRGARKVKET

SEQ ID NO: 3169 - protein, 279 aa, Homo sapiens
MLLAASKVLDRLKPVIGVNTDPERSEGHLCLPVRYTHSFPEALQKFYRGEFRWLWRQRIRLYLEGTGINPVPVDLHEQQLSLNQHNRALNIERAHDERSEASGPQLLPVRALNEVFIGESLSSRASYYEISVDDGPWEKQKSSGLNLCTGTGSKAWSFNINRVATQAVEDVLNIAKRQGNLSLPLNRELVEKVTNEYNESLLYSPEEPKILFSIREPIANRVFSSSRQRCFSSKVCVRSRCWDACMVVDGGTSFEFNDGAIASMMINKEDELRTVLLEQ

SEQ ID NO: 3170 - protein, 2804 aa, Homo sapiens
MNGDMPHVPITTLAGIASLTDLLNQLPLPSPLPATTTKSLLFNARIAEEVNCLLACRDDNLVSQLVHSLNQVSTDHIELKDNLGSDDPEGDIPVLLQAVLARSPNVFREKSMQNRYVQSGMMMSQYKLSQNSMHSSPASSNYQQTTISHSPSSRFVPPQTSSGNRFMPQQNSPVPSPYAPQSPAGYMPYSHPSSYTTHPQMQQASVSSPIVAGGLRNIHDNKVSGPLSGNSANHHADNPRHGSSEDYLHMVHRLSSDDGDSSTMRNAASFPLRSPQPVCSPAGSEGTPKGSRPPLILQSQSLPCSSPRDVPPDILLDSPERKQKKQKKMKLGKDEKEQSEKAAMYDIISSPSKDSTKLTLRLSRVRSSDMDQQEDMISGVENSNVSENDIPFNVQYPGQTSKTPITPQDINRPLNAAQCLSQQEQTAFLPANQVPVLQQNTSVAAKQPQTSVVQNQQQISQQGPIYDEVELDALAEIERIERESAIERERFSKEVQDKDKPLKKRKQDSYPQEAGGATGGNRPASQETGSTGNGSRPALMVSIDLHQAGRVDSQASITQDSDSIKKPEEIKQCNDAPVSVLQEDIVGSLKSTPENHPETPKKKSDPELSKSEMKQSESRLAESKPNENRLVETKSSENKLETKVETQTEELKQNESRTTECKQNESTIVEPKQNENRLSDTKPNDNKQNNGRSETTKSRPETPKQKGESRPETPKQKSDGHPETPKQKGDGRPETPKQKGESRPETPKQKNEGRPETPKHRHDNRRDSGKPSTEKKPEVSKHKQDTKSDSPRLKSERAEALKQRPDGRSVSESLRRDHDNKQKSDDRGESERHRGDQSRVRRPETLRSSSRNEHGIKSDSSKTDKLERKHRHESGDSRERPSSGEQKSRPDSPRVKQGDSNKSRSDKLGFKSPTSKDDKRTEGNKSKVDTNKAHPDNKAEFPSYLLGGRSGALKNFVIPKIKRDKDGNVTQETKKMEMKGEPKDKVEKIGLVEDLNKGAKPVVVLQKLSLDDVQKLIKDREDKSRSSLKPIKNKPSKSNKGSIDQSVLKELPPELLAEIESTMPLCERVKMNKRKRSTVNEKPKYAEISSDEDNDSDEAFESSRKRHKKDDDKAWEYEERDRRSSGDHRRSGHSHEGRRSSGGGRYRNRSPSDSDMEDYSPPPSLSEVARKMKKKEKQKKRKAYEPKLTPEEMMDSSTFKRFTASIENILDNLEDMDFTAFGDDDEIPQELLLGKHQLNELGSESAKIKAMGIMDKLSTDKTVKVLNILEKNIQDGSKLSTLLNHNNDTEEEERLWRDLIMERVTKSADACLTTINIMTSPNMPKAVYIEDVIERVIQYTKFHLQNTLYPQYDPVYRLDPHGGGLLSSKAKRAKCSTHKQRVIVMLYNKVCDIVSSLSELLEIQLLTDTTILQVSSMGITPFFVENVSELQLCAIKLVTAVFSRYEKHRQLILEEIFTSLARLPTSKRSLRNFRLNSSDMDGEPMYIQMVTALVLQLIQCVVHLPSSEKDSNAEEDSNKKIDQDVVITNSYETAMRTAQNFLSIFLKKCGSKQGEEDYRPLFENFVQDLLSTVNKPEWPAAELLLSLLGRLLVHQFSNKSTEMALRVASLDYLGTVAARLRKDAVTSKMDQGSIERILKQVSGGEDEIQQLQKALLDYLDENTETDPSLVFSRKFYIAQWFRDTTLETEKAMKSQKDEESSEGTHHAKEIETTGQIMHRAENRKKFLRSIIKTTPSQFSTLKMNSDTVDYDDACLIVRYLASMRPFAQSFDIYLTQILRVLGENAIAVRTKAMKCLSEVVAVDPSILARLDMQRGVHGRLMDNSTSVREAAVELLGRFVLCRPQLAEQYYDMLIERILDTGISVRKRVIKILRDICIEQPTFPKITEMCVKMIRRVNDEEGIKKLVNETFQKLWFTPTPHNDKEAMTRKILNITDVVAACRDTGYDWFEQLLQNLLKSEEDSSYKPVKKACTQLVDNLVEHILKYEESLADSDNKGVNSGRLVACITTLFLFSKIRPQLMVKHAMTMQPYLTTKCSTQNDFMVICNVAKILELVVPLMEHPSETFLATIEEDLMKLIIKYGMTVVQHCVSCLGAVVNKVTQNFKFVWACFNRYYGAISKLKSQHQEDPNNTSLLTNKPALLRSLFTVGALCRHFDFDLEDFKGNSKVNIKDKVLELLMYFTKHSDEEVQTKAIIGLGFAFIQHPSLMFEQEVKNLYNNILSDKNSSVNLKIQVLKNLQTYLQEEDTRMQQADRDWKKVAKQEDLKEMGDVSSGMSSSIMQLYLKQVLEAFFHTQSSVRHFALNVIALTLNQGLIHPVQCVPYLIAMGTDPEPAMRNKADQQLVEIDKKYAGFIHMKAVAGMKMSYQVQQAINTCLKDPVRGFRQDESSSALCSHLYSMIRGNRQHRRAFLISLLNLFDDTAKTDVTMLLYIADNLACFPYQTQEEPLFIMHHIDITLSVSGSNLLQSFKESMVKDKRKERKSSPSKENESSDSEEEVSRPRKSRKRVDSDSDSDSEDDINSVMKCLPENSAPLIEFANVSQGILLLLMLKQHLKNLCGFSDSKIQKYSPSESAKVYDKAINRKTGVHFHPKQTLDFLRSDMANSKITEEVKRSIVKQYLDFKLLMEHLDPDEEEEEGEVSASTNARNKAITSLLGGGSPKNNTAAETEDDESDGEDRGGGTSGSLRRSKRNSDSTELAAQMNESVDVMDVIAICCPKYKDRPQIARVVQKTSSGFSVQWMAGSYSGSWTEAKRRDGRKLVPWVDTIKESDIIYKKIALTSANKLTNKVVQTLRSLYAAKDGTSS

SEQ ID NO: 3171 - protein, 351 aa, Homo sapiens
MAAAPLKVCIVGSGNWGSAVAKIIGNNVKKLQKFASTVKMWVFEETVNGRKLTDIINNDHENVKYLPGHKLPENVVAMSNLSEAVQDADLLVFVIPHQFIHRICDEITGRVPKKALGITLIKGIDEGPEGLKLISDIIREKMGIDISVLMGANIANEVAAEKFCETTIGSKVMENGLLFKELLQTPNFRITVVDDADTVELCGALKNIVAVGAGFCDGLRCGDNTKAAVIRLGLMEMIAFARIFCKGQVSTATFLESCGVADLITTCYGGRNRRVAEAFARTGKTIEELEKEMLNGQKLQGPQTSAEVYRILKQKGLLDKFPLFTAVYQICYESRPVQEMLSCLQSHPEHT

SEQ ID NO: 3172 - protein, 382 aa, Homo sapiens
MGDWSALGKLLDKVQAYSTAGGKVWLSVLFIFRILLLGTAVESAWGDEQSAFRCNTQQPGCENVCYDKSFPISHVRFWVLQIIFVSVPTLLYLAHVFYVMRKEEKLNKKEEELKVAQTDGVNVDMHLKQIEIKKFKYGIEEHGKVKMRGGLLRTYIISILFKSIFEVAFLLIQWYIYGFSLSAVYTCKRDPCPHQVDCFLSRPTEKTIFIIFMLVVSLVSLALNIIELFYVFFKGVKDRVKGKSDPYHATSGALSPAKDCGSQKYAYFNGCSSPTAPLSPMSPPGYKLVTGDRNNSSCRNYNKQASEQNWANYSAEQNRMGQAGSTISNSHAQPFDFPDDNQNSKKLAAGHELQPLAIVDQRPSSRASSRASSRPRPDDLEI

SEQ ID NO: 3173 - protein, 515 aa, Homo sapiens
MGSLSSRVLRQPRPALAQQAQGARAGGSARRPDTGDDAAGHGFCYCAGSHKRKRSSGSFCYCHPDSETDEDEEEGDEQQRLLNTPRRKKLKSTSKYIYQTLFLNGENSDIKICALGEEWSLHKIYLCQSGYFSSMFSGSWKESSMNIIELEIPDQNIDVEALQVAFGSLYRDDVLIKPSRVVAILAAACLLQLDGLIQQCGETMKETVNVKTVCGYYTSAGTYGLDSVKKKCLEWLLNNLMTHQNVELFKELSINVMKQLIGSSNLFVMQVEMDIYTALKKWMFLQLVPSWNGSLKQLLTETDVWFSKQRKDFEGMAFLETEQGKPFVSVFRHLRLQYIISDLASARIIEQDAVVPSEWLSSVYKQQWFAMLRAEQDSEVGPQEINKEELEGNSMRCGRKLAKDGEYCWRWTGFNFGFDLLVTYTNRYIIFKRNTLNQPCSGSVSLQPRRSIAFRLRLASFDSSGKLICSRTTGYQILTLEKDQEQVVMNLDSRLLIFPLYICCNFLYISPEKKN

SEQ ID NO: 3174 - protein, 461 aa, Homo sapiens
MGTIHLFRKPQRSFFGKLLREFRLVAADRRSWKILLFGVINLICTGFLLMWCSSTNSIALTAYTYLTIFDLFSLMTCLISYWVTLRKPSPVYSFGFERLEVLAVFASTVLAQLGALFILKESAERFLEQPEIHTGRLLVGTFVALCFNLFTMLSIRNKPFAYVSEAASTSWLQEHVADLSRSLCGIIPGLSSIFLPRMNPFVLIDLAGAFALCITYMLIEINNYFAVDTASAIAIALMTFGTMYPMSVYSGKVLLQTTPPHVIGQLDKLIREVSTLDGVLEVRNEHFWTLGFGSLAGSVHVRIRRDANEQMVLAHVTNRLYTLVSTLTVQIFKDDWIRPALLSGPVAANVLNFSDHHVIPMPLLKGTDDLNPVTSTPAKPSSPPPEFSFNTPGKNVNPVILLNTQTRPYGFGLNHGHTPYSSMLNQGLGVPGIGATQGLRTGFTNIPSRYGTNNRIGQPRP

SEQ ID NO: 3175 - protein, 1179 aa, Homo sapiens
MAPRPRARPGVAVACCWLLTVVLRCCVSFNVDVKNSMTFSGPVEDMFGYTVQQYENEEGKWVLIGSPLVGQPKNRTGDVYKCPVGRGESLPCVKLDLPVNTSIPNVTEVKENMTFGSTLVTNPNGGFLACGPLYAYRCGHLHYTTGICSDVSPTFQVVNSIAPVQECSTQLDIVIVLDGSNSIYPWDSVTAFLNDLLERMDIGPKQTQVGIVQYGENVTHEFNLNKYSSTEEVLVAAKKIVQRGGRQTMTALGIDTARKEAFTEARGARRGVKKVMVIVTDGESHDNHRLKKVIQDCEDENIQRFSIAILGSYNRGNLSTEKFVEEIKSIASEPTEKHFFNVSDELALVTIVKTLGERIFALEATADQSAASFEMEMSQTGFSAHYSQDWVMLGAVGAYDWNGTVVMQKASQIIIPRNTTFNVESTKKNEPLASYLGYTVNSATASSGDVLYIAGQPRYNHTGQVIIYRMEDGNIKILQTLSGEQIGSYFGSILTTTDIDKDSNTDILLVGAPMYMGTEKEEQGKVYVYALNQTRFEYQMSLEPIKQTCCSSRQHNSCTTENKNEPCGARFGTAIAAVKDLNLDGFNDIVIGAPLEDDHGGAVYIYHGSGKTIRKEYAQRIPSGGDGKTLKFFGQSIHGEMDLNGDGLTDVTIGGLGGAALFWSRDVAVVKVTMNFEPNKVNIQKKNCHMEGKETVCINATVCFDVKLKSKEDTIYEADLQYRVTLDSLRQISRSFFSGTQERKVQRNITVRKSECTKHSFYMLDKHDFQDSVRITLDFNLTDPENGPVLDDSLPNSVHEYIPFAKDCGNKEKCISDLSLHVATTEKDLLIVRSQNDKFNVSLTVKNTKDSAYNTRTIVHYSPNLVFSGIEAIQKDSCESNHNITCKVGYPFLRRGEMVTFKILFQFNTSYLMENVTIYLSATSDSEEPPETLSDNVVNISIPVKYEVGLQFYSSASEYHISIAANETVPEVINSTEDIGNEINIFYLIRKSGSFPMPELKLSISFPNMTSNGYPVLYPTGLSSSENANCRPHIFEDPFSINSGKKMTTSTDHLKRGTILDCNTCKFATITCNLTSSDISQVNVSLILWKPTFIKSYFSSLNLTIRGELRSENASLVLSSSNQKRELAIQISKDGLPGRVPLWVILLSAFAGLLLLMLLILALWKIGFFKRPLKKKMEK

SEQ ID NO: 3176 - protein, 219 aa, Homo sapiens
MKMRFLGLVVCLVLWTLHSEGSGGKLTAVDPETNMNVSEIISYWGFPSEEYLVETEDGYILCLNRIPHGRKNHSDKGPKPVVFLQHGLLADSSNWVTNLANSSLGFILADAGFDVWMGNSRGNTWSRKHKTLSVSQDEFWAFSYDEMAKYDLPASINFILNKTGQEQVYYVGHSQGTTIGFIAFSQIPELAKRIKMFFALGPVASVAFCTSPMAKLGRL

SEQ ID NO: 3177 - protein, 472 aa, Homo sapiens
MAGASRLLFLWLGCFCVSLAQGERPKPPFPELRKAVPGDRTAGGGPDSELQPQDKVSEHMLRLYDRYSTVQAARTPGSLEGGSQPWRPRLLREGNTVRSFRAAAAETLERKGLYIFNLTSLTKSENILSATLYFCIGELGNISLSCPVSGGCSHHAQRKHIQIDLSAWTLKFSRNQSQLLGHLSVDMAKSHRDIMSWLSKDITQLLRKAKENEEFLIGFNITSKGRQLPKRRLPFPEPYILVYANDAAISEPESVVSSLQGHRNFPTGTVPKWDSHIRAALSIERRKKRSTGVLLPLQNNELPGAEYQYKKDEVWEERKPYKTLQAQAPEKSKNKKKQRKGPHRKSQTLQFDEQTLKKARRKQWIEPRNCARRYLKVDFADIGWSEWIISPKSFDAYYCSGACQFPMPKSLKPSNHATIQSIVRAVGVVPGIPEPCCVPEKMSSLSILFFDENKNVVLKVYPNMTVESCACR

SEQ ID NO: 3178 - protein, 1194 aa, Homo sapiens
MVGLLLFFFPAIFLEVSLLPRSPGRKVLLAGASSQRSVARMDGDVIIGALFSVHHQPPAEKVPERKCGEIREQYGIQRVEAMFHTLDKINADPVLLPNITLGSEIRDSCWHSSVALEQSIEFIRDSLISIRDEKDGINRCLPDGQSLPPGRTKKPIAGVIGPGSSSVAIQVQNLLQLFDIPQIAYSATSIDLSDKTLYKYFLRVVPSDTLQARAMLDIVKRYNWTYVSAVHTEGNYGESGMDAFKELAAQEGLCIAHSDKIYSNAGEKSFDRLLRKLRERLPKARVVVCFCEGMTVRGLLSAMRRLGVVGEFSLIGSDGWADRDEVIEGYEVEANGGITIKLQSPEVRSFDDYFLKLRLDTNTRNPWFPEFWQHRFQCRLPGHLLENPNFKRICTGNESLEENYVQDSKMGFVINAIYAMAHGLQNMHHALCPGHVGLCDAMKPIDGSKLLDFLIKSSFIGVSGEEVWFDEKGDAPGRYDIMNLQYTEANRYDYVHVGTWHEGVLNIDDYKIQMNKSGVVRSVCSEPCLKGQIKVIRKGEVSCCWICTACKENEYVQDEFTCKACDLGWWPNADLTGCEPIPVRYLEWSNIESIIAIAFSCLGILVTLFVTLIFVLYRDTPVVKSSSRELCYIILAGIFLGYVCPFTLIAKPTTTSCYLQRLLVGLSSAMCYSALVTKTNRIARILAGSKKKICTRKPRFMSAWAQVIIASILISVQLTLVVTLIIMEPPMPILSYPSIKEVYLICNTSNLGVVAPLGYNGLLIMSCTYYAFKTRNVPANFNEAKYIAFTMYTTCIIWLAFVPIYFGSNYKIITTCFAVSLSVTVALGCMFTPKMYIIIAKPERNVRSAFTTSDVVRMHVGDGKLPCRSNTFLNIFRRKKAGAGNANSNGKSVSWSEPGGGQVPKGQHMWHRLSVHVKTNETACNQTAVIKPLTKSYQGSGKSLTFSDTSTKTLYNVEEEEDAQPIRFSPPGSPSMVVHRRVPSAATTPPLPSHLTAEETPLFLAEPALPKGLPPPLQQQQQPPPQQKSLMDQLQGVVSNFSTAIPDFHAVLAGPGGPGNGLRSLYPPPPPPQHLQMLPLQLSTFGEELVSPPADDDDDSERFKLLQEYVYEHEREGNTEEDELEEEEEDLQAASKLTPDDSPALTPPSPFRDSVASGSSVPSSPVSESVLCTPPNVSYASVILRDYKQSSSTL

SEQ ID NO: 3179 - protein, 300 aa, Homo sapiens [sequence omitted]

SEQ ID NO: 3180 - protein, 419 aa, Homo sapiens
MELKVWVDGVQRIVCGVTEVTTCQEVVIALAQAIGRTGRYTLIEKWRDTERHLAPHENPIISLNKWGQYASDVQLILRRTGPSLSERPTSDSVARIPERTLYRQSLPPLAKLRPQIDKSIKRREPKRKSLTFTGGAKGLMDIFGKGKETEFKQKVLNNCKTTADELKKLIRLQTEKLQSIEKQLESNEIEIRFWEQKYNSNLEEEIVRLEQKIKRNDVEIEEEEFWENELQIEQENEKQLKDQLQEIRQKITECENKLKDYLAQIRTMESGLEAEKLQREVQEAQVNEEEVKGKIGKVKGEIDIQGQQSLRLENGIKAVERSLGQATKRLQDKEQELEQLTKELRQVNLQQFIQQTGTKVTVLPAEPIEIEASHADIEREAPFQSGSLKRPGSSRQLPSNLRILQNPISSGFNPEGIYV

SEQ ID NO: 3181 - protein, 144 aa, Homo sapiens
MADRLTQLQDAVNSLADQFCNAIGVLQQCGPPASFNNIQTAINKDQPANPTEEYAQLFAALIARTAKDIDVLIDSLPSEESTAALQAASLYKLEEENHEAATCLEDVVYRGDMLLEKIQSALADIAQSQLKTRSGTHSQSLPDS

SEQ ID NO: 3182 - protein, 758 aa, Homo sapiens
MGGCTVKPQLLLLALVLHPWNPCLGADSEKPSSIPTDKLLVITVATKESDGFHRFMQSAKYFNYTVKVLGQGEEWRGGDGINSIGGGQKVRLMKEVMEHYADQDDLVVMFTECFDVIFAGGPEEVLKKFQKANHKVVFAADGILWPDKRLADKYPVVHIGKRYLNSGGFIGYAPYVNRIVQQWNLQDNDDDQLFYTKVYIDPLKREAINITLDHKCKIFQTLNGAVDEVVLKFENGKARAKNTFYETLPVAINGNGPTKILLNYFGNYVPNSWTQDNGCTLCEFDTVDLSAVDVHPNVSIGVFIEQPTPFLPRFLDILLTLDYPKEALKLFIHNKEVYHEKDIKVFFDKAKHEIKTIKIVGPEENLSQAEARNMGMDFCRQDEKCDYYFSVDADVVLTNPRTLKILIEQNRKIIAPLVTRHGKLWSNFWGALSPDGYYARSEDYVDIVQGNRVGVWNVPYMANVYLIKGKTLRSEMNERNYFVRDKLDPDMALCRNAREMTLQREKDSPTPETFQMLSPPKGVFMYISNRHEFGRLLSTANYNTSHYNNDLWQIFENPVDWKEKYINRDYSKIFTENIVEQPCPDVFWFPIFSEKACDELVEEMEHYGKWSGGKHHDSRISGGYENVPTDDIHMKQVDLENVWLHFIREFIAPVTLKVFAGYYTKGFALLNFVVKYSPERQRSLRPHHDASTFTINIALNNVGEDFQGGGCKFLRYNCSIESPRKGWSFMHPGRLTHLHEGLPVKNGTRYIAVSFIDP

SEQ ID NO: 3183 - protein, 414 aa, Homo sapiens
MGGNHSHKPPVFDENEEVNFDHFQILRAIGKGSFGKVCIVQKRDTKKMYAMKYMNKQKCIERDEVRNVFRELQIMQGLEHPFLVNLWYSFQDEEDMFMVVDLLLGGDLRYHLQQNVHFTEGTVKLYICELALALEYLQRYHIIHRDIKPDNILLDEHGHVHITDFNIATVVKGAERASSMAGTKPYMAPEVFQVYMDRGPGYSYPVDWWSLGITAYELLRGWRPYEIHSVTPIDEILNMFKVERVHYSSTWCKGMVALLRKLLTKDPESRVSSLHDIQSVPYLADMNWDAVFKKALMPGFVPNKGRLNCDPTFELEEMILESKPLHKKKKRLAKNRSRDGTKDSCPLNGHLQHCLETVREEFIIFNREKLRRQQGQGSQLLDTDSRGGGQAQSKLQDGCNNNLLTHTCTRGCSS

SEQ ID NO: 3184 - protein, 417 aa, Homo sapiens
MLALLVLVTVALASAHHGGEHFEGEKVFRVNVEDENHINIIRELASTTQIDFWKPDSVTQIKPHSTVDFRVKAEDTVTVENVLKQNELQYKVLISNLRNVVEAQFDSRVRATGHSYEKYNKWETIEAWTQQVATENPALISRSVIGTTFEGRAIYLLKVGKAGQNKPAIFMDCGFHAREWISPAFCQWFVREAVRTYGREIQVTELLDKLDFYVLPVLNIDGYIYTWTKSRFWRKTRSTHTGSSCIGTDPNRNFDAGWCEIGASRNPCDETYCGPAAESEKETKALADFIRNKLSSIKAYLTIHSYSQMMIYPYSYAYKLGENNAELNALAKATVKELASLHGTKYTYGPGATTIYPAAGGSDDWAYDQGIRYSFTFELRDTGRYGFLLPESQIRATCEETFLAIKYVASYVLEHLY

SEQ ID NO: 3185 - protein, 249 aa, Homo sapiens
MGELMAFLLPLIIVLMVKHSDSRTHSLRYFRLGVSDPIHGVPEFISVGYVDSHPITTYDSVTRQKEPRAPWMAENLAPDHWERYTQLLRGWQQMFKVELKRLQRHYNHSGSHTYQRMIGCELLEDGSTTGFLQYAYDGQDFLIFNKDTLSWLAVDNVAHTIKQAWEANQHELLYQKNWLEEECIAWLKRFLEYGKDTLQRTESETIPLVMKAVSGSIVLVIVLAGVGVLVWRRRPREQNGAIYLPTPDR

SEQ ID NO: 3186 - protein, 887 aa, Homo sapiens
MAGRVPSLLVLLVFPSSCLAFRSPLSVFKRFKETTRPFSNECLGTTRPVVPIDSSDFALDIRMPGVTPKQSDTYFCMSMRIPVDEEAFVIDFKPRASMDTVHHMLLFGCNMPSSTGSYWFCDEGTCTDKANILYAWARNAPPTRLPKGVGFRVGGETGSKYFVLQVHYGDISAFRDNNKDCSGVSLHLTRLPQPLIAGMYLMMSVDTVIPAGEKVVNSDISCHYKNYPMHVFAYRVHTHHLGKVVSGYRVRNGQWTLIGRQSPQLPQAFYPVGHPVDVSFGDLLAARCVFTGEGRTEATHIGGTSSDEMCNLYIMYYMEAKHAVSFMTCTQNVAPDMFRTIPPEANIPIPVKSDMVMMHEHHKETEYKDKIPLLQQPKREEEEVLDQGDFYSLLSKLLGEREDVVHVHKYNPTEKAESESDLVAEIANVVQKKDLGRSDAREGAEHERGNAILVRDRIHKFHRLVSTLRPPESRVFSLQQPPPGEGTWEPEHTGDFHMEEALDWPGVYLLPGQVSGVALDPKNNLVIFHRGDHVWDGNSFDSKFVYQQIGLGPIEEDTILVIDPNNAAVLQSSGKNLFYLPHGLSIDKDGNYWVTDVALHQVFKLDPNNKEGPVLILGRSMQPGSDQNHFCQPTDVAVDPGTGAIYVSDGYCNSRIVQFSPSGKFITQWGEESSGSSPLPGQFTVPHSLALVPLLGQLCVADRENGRIQCFKTDTKEFVREIKHSSFGRNVFAISYIPGLLFAVNGKPHFGDQEPVQGFVMNFSNGEIIDIFKPVRKHFDMPHDIVASEDGTVYIGDAHTNTVWKFTLTEKLEHRSVKKAGIEVQEIKGKGSGGLNLGNFFASRKGYSRKGFDRLSTEGSDQEKEDDGSESEEEYSAPLPALAPSSS

SEQ ID NO: 3187 - protein, 110 aa, Homo sapiens
MACAAARSPADQDRFICIYPAYLNNKKTIAEGRRIPISKAVENPTATEIQDVCSAVGLNVFLEKNKMYSREWNRDVQYRGRVRVQLKQEDGSLCLVQFPSHYTLSLTSGS

SEQ ID NO: 3188 - protein, 320 aa, Homo sapiens
MEEVPHDCPGADSAQAGRGASCQGCPNQRLCASGAGATPDTAIEEIKEKMKTVKHKILVLSGKGGVGKSTFSAHLAHGLAEDENTQIALLDIDICGPSIPKIMGLEGEQVHQSGSGWSPVYVEDNLGVMSVGFLLSSPDDAVIWRGPKKNGMIKQFLRDVDWGEVDYLIVDTPPGTSDEHLSVVRYLATAHIDGAVIITTPQEVSLQDVRKEINFCRKVKLPIIGVVENMSGFICPKCKKESQIFPPTTGGAELMCQDLEVPLLGRVPLDPLIGKNCDKGQSFFIDAPDSPATLAYRSIIQRIQEFCNLHQSKEENLISS

SEQ ID NO: 3189 - protein, 958 aa, Homo sapiens
MSECGGRGGGSSSSEDAEDEGGGGGGPAGSDCLSSSPTLATASSAGRLRRGLRGAFLMARQRPELLCGAVALGCALLLALKFTCSRAKDVIIPAKPPVSFFSLRSPVLDLFQGQLDYAEYVRRDSEVVLLFFYAPWCGQSIAARAEIEQAASRLSDQVLFVAINCWWNQGKCRKQKHFFYFPVIYLYHRSFGPIEYKGPMSAVYIEKFVRRVMKPLLYIPSQSELLDFLSNYEPGVLGYFEFSGSPQPPGYLTFFTSALHSLKKDYLGTVRFGVITNKHLAKLVSLVHSGSVYLHRHFNTSLVFPREVLNYTAENICKWALENQETLFRWLRPHGGKSLLLNNELKKGPALFLFIPFNPLAESHPLIDEITEVALEYNNCHGDQVVERLLQHLRRVDAPVLESLALEVPAQLPDPPTITASPCCNTVVLPQWHSFSRTHNVCELCVNQTSGGMKPSSVSVPQCSFFEMAAALDSFYLKEQTFYHVASDSIECSNFLTSYSPFSYYTACCRTISRGVSGFIDSEQGVFEAPTVAFSSLEKKCEVDAPSSVPHIEENRYLFPEVDMTSTNFTGLSCRTNKTLNIYLLDSNLFWLYAERLGAPSSTQVKEFAAIVDVKEESHYILDPKQALMKLTLESFIQNFSVLYSPLKRHLIGSGSAQFPSQHLITEVTTDTFWEVVLQKQDVLLLYYAPWCGFCPSLNHIFIQLARNLPMDTFTVARIDVSQNDLPWEFMVDRLPTVLFFPCNRKDLSVKYPEDVPITLPNLLRFILHHSDPASSPQNVANSPTKECLQSEAVLQRGHISHLEREIQKLRAEISSLQRAQVQVESQLSSARRDEHRLRQQQRALEEQHSLLHAHSEQLQALYEQKTRELQELARKLQELADASENLLTENTWLKILVATMERKLEGRDGAESLAAQREVHPKQPEPSATPQLPGSSPPPANVSATLVSERNKENRTD

SEQ ID NO: 3190 - protein, 552 aa, Homo sapiens
MGKVNVAKLRYMSRDDFRVLTAVEMGMKNHEIVPGSLIASIASLKHGGCNKVLRELVKHKLIAWERTKTVQGYRLTNAGYDYLALKTLSSRQVVESVGNQMGVGKESDIYIVANEEGQQFALKLHRLGRTSFRNLKNKRDYHKHRHNVSWLYLSRLSAMKEFAYMKALYERKFPVPKPIDYNRHAVVMELINGYPLCQIHHVEDPASVYDEAMELIVKLANHGLIHGDFNEFNLILDESDHITMIDFPQMVSTSHPNAEWYFDRDVKCIKDFFMKRFSYESELFPTFKDIRREDTLDVEVSASGYTKEMQADDELLHPLGPDDKNIETKEGSEFSFSDGEVAEKAEVYGSENESERNCLEESEGCYCRSSGDPEQIKEDSLSEESADARSFEMTEFNQALEEIKGQVVENNSVTEFSEEKNRTENYNRQDGQRVQGGVPAGSDEYEDECPHLIALSSLNREFRPFRDEENVGAMNQYRTRTLSITSSGSAVSCSTIPPELVKQKVKRQLTKQQKSAVRRRLQKGEANIFTKQRRENMQNIKSSLEAASFWGE

SEQ ID NO: 3191 - protein, 167 aa, Homo sapiens
MSLALRSELVVDKTKRKKRRELSEEQKQEIKDAFELFDTDKDEAIDYHELKVAMRALGFDVKKADVLKILKDYDREATGKITFEDFNEVVTDWILERDPHEEILKAFKLFDDDDSGKISLRNLRRVARELGENMSDEELRAMIEEFDKDGDGEINQEEFIAIMTGDI

SEQ ID NO: 3192 - protein, 1052 aa, Homo sapiens
MSSAAEPPPPPPPESAPSKPAASIASGGSNSSNKGGPEGVAAQAVASAASAGPADAEMEEIFDDASPGKQKEIQEPDPTYEEKMQTDRANRFEYLLKQTELFAHFIQPAAQKTPTSPLKMKPGRPRIKKDEKQNLLSVGDYRHRRTEQEEDEELLTESSKATNVCTRFEDSPSYVKWGKLRDYQVRGLNWLISLYENGINGILADEMGLGKTLQTISLLGYMKHYRNIPGPHMVLVPKSTLHNWMSEFKRWVPTLRSVCLIGDKEQRAAFVRDVLLPGEWDVCVTSYEMLIKEKSVFKKFNWRYLVIDEAHRIKNEKSKLSEIVREFKTTNRLLLTGTPLQNNLHELWSLLNFLLPDVFNSADDFDSWFDTNNCLGDQKLVERLHMVLRPFLLRRIKADVEKSLPPKKEVKIYVGLSKMQREWYTRILMKDIDILNSAGKMDKMRLLNILMQLRKCCNHPYLFDGAEPGPPYTTDMHLVTNSGKMVVLDKLLPKLKEQGSRVLIFSQMTRVLDILEDYCMWRNYEYCRLDGQTPHDERQDSINAYNEPNSTKFVFMLSTRAGGLGINLATADVVILYDSDWNPQVDLQAMDRAHRIGQTKTVRVFRFITDNTVEERIVERAEMKLRLDSIVIQQGRLVDQNLNKIGKDEMLQMIRHGATHVFASKESEITDEDIDGILERGAKKTAEMNEKLSKMGESSLRNFTMDTESSVYNFEGEDYREKQKIAFTEWIEPPKRERKANYAVDAYFREALRVSEPKAPKAPRPPKQPNVQDFQFFPPRLFELLEKEILFYRKTIGYKVPRNPELPNAAQAQKEEQLKIDEAESLNDEELEEKEKLLTQGFTNWNKRDFNQFIKANEKWGRDDIENIAREVEGKTPEEVIEYSAVFWERCNELQDIEKIMAQIERGEARIQRRISIKKALDTKIGRYKAPFHQLRISYGTNKGKNYTEEEDRFLICMLHKLGFDKENVYDELRQCIRNSPQFRFDWFLKSRTAMELQRRCNTLITLIERENMELEEKEKAEKKKRGPKPSTQKRKMDGAPDGRGRKKKLKL

SEQ ID NO: 3193 - protein, 513 aa, Homo sapiens
MPGLGRRAQWLCWWWGLLCSCCGPPPLRPPLPAAAAAAAGGQLLGDGGSPGRTEQPPPSPQSSSGFLYRRLKTQEKREMQKEILSVLGLPHRPRPLHGLQQPQPPALRQQEEQQQQQQLPRGEPPPGRLKSAPLFMLDLYNALSADNDEDGASEGERQQSWPHEAASSSQRRQPPPGAAHPLNRKSLLAPGSGSGGASPLTSAQDSAFLNDADMVMSFVNLVEYDKEFSPRQRHHKEFKFNLSQIPEGEVVTAAEFRIYKDCVMGSFKNQTFLISIYQVLQEHQHRDSDLFLLDTRVVWASEEGWLEFDITATSNLWVVTPQHNMGLQLSVVTRDGVHVHPRAAGLVGRDGPYDKQPFMVAFFKVSEVHVRTTRSASSRRRQQSRNRSTQSQDVARVSSASDYNSSELKTACRKHELYVSFQDLGWQDWIIAPKGYAANYCDGECSFPLNAHMNATNHAIVQTLVHLMNPEYVPKPCCAPTKLNAISVLYFDDNSNVILKKYRNMVVRACGCH

SEQ ID NO: 3194 - protein, 425 aa, Homo sapiens
MVSKALLRLVSAVNRRRMKLLLGIALLAYVASVWGNFVNMSFLLNRSIQENGELKIESKIEEMVEPLREKIRDLEKSFTQKYPPVKFLSEKDRKRILITGGAGFVGSHLTDKLMMDGHEVTVVDNFFTGRKRNVEHWIGHENFELINHDVVEPLYIEVDQIYHLASPASPPNYMYNPIKTLKTNTIGTLNMLGLAKRVGARLLLASTSEVYGDPEVHPQSEDYWGHVNPIGPRACYDEGKRVAETMCYAYMKQEGVEVRVARIFNTFGPRMHMNDGRVVSNFILQALQGEPLTVYGSGSQTRAFQYVSDLVNGLVALMNSNVSSPVNLGNPEEHTILEFAQLIKNLVGSGSEIQFLSEAQDDPQKRKPDIKKAKLMLGWEPVVPLEEGLNKAIHYFRKELEYQANNQYIPKPKPARIKKGRTRHS

SEQ ID NO: 3195 - protein, 3224 aa, Homo sapiens
MRRSKADVERYIASVQGSTPSPRQKSMKGFYFAKLYYEAKEYDLAKKYICTYINVQERDPKAHRFLGLLYELEENTDKAVECYRRSVELNPTQKDLVLKIAELLCKNDVTDGRAKYWLERAAKLFPGSPAIYKLKEQLLDCEGEDGWNKLFDLIQSELYVRPDDVHVNIRLVEVYRSTKRLKDAVAHCHEAERNIALRSSLEWNSCVVQTLKEYLESLQCLESDKSDWRATNTDLLLAYANLMLLTLSTRDVQESRELLQSFDSALQSVKSLGGNDELSATFLEMKGHFYMHAGSLLLKMGQHSSNVQWRALSELAALCYLIAFQVPRPKIKLIKGEAGQNLLEMMACDRLSQSGHMLLNLSRGKQDFLKEIVETFANKSGQSALYDALFSSQSPKDTSFLGSDDIGNIDVREPELEDLTRYDVGAIRAHNGSLQHLTWLGLQWNSLPALPGIRKWLKQLFHHLPHETSRLETNAPESICILDLEVFLLGVVYTSHLQLKEKCNSHHSSYQPLCLPLPVCKQLCTERQKSWWDAVCTLIHRKAVPGNVAKLRLLVQHEINTLRAQEKHGLQPALLVHWAECLQKTGSGLNSFYDQREYIGRSVHYWKKVLPLLKIIKKKNSIPEPIDPLFKHFHSVDIQASEIVEYEEDAHITFAILDAVNGNIEDAVTAFESIKSVVSYWNLALIFHRKAEDIENDALSPEEQEECKNYLRKTRDYLIKIIDDSDSNLSVVKKLPVPLESVKEMLNSVMQELEDYSEGGPLYKNGSLRNADSEIKHSTPSPTRYSLSPSKSYKYSPKTPPRWAEDQNSLLKMICQQVEAIKKEMQELKLNSSNSASPHRWPTENYGPDSVPDGYQGSQTFHGAPLTVATTGPSVYYSQSPAYNSQYLLRPAANVTPTKGPVYGMNRLPPQQHIYAYPQQMHTPPVQSSSACMFSQEMYGPPALRFESPATGILSPRGDDYFNYNVQQTSTNPPLPEPGYFTKPPIAAHASRSAESKTIEFGKTNFVQPMPGEGLRPSLPTQAHTTQPTPFKFNSNFKSNDGDFTFSSPQVVTQPPPAAYSNSESLLGLLTSDKPLQGDGYSGAKPIPGGQTIGPRNTFNFGSKNVSGISFTENMGSSQQKNSGFRRSDDMFTFHGPGKSVFGTPTLETANKNHETDGGSAHGDDDDDGPHFEPVVPLPDKIEVKTGEEDEEEFFCNRAKLFRFDVESKEWKERGIGNVKILRHKTSGKIRLLMRREQVLKICANHYISPDMKLTPNAGSDRSFVWHALDYADELPKPEQLAIRFKTPEEAALFKCKFEEAQSILKAPGTNVAMASNQAVRIVKEPTSHDNKDICKSDAGNLNFEFQVAKKEGSWWHCNSCSLKNASTAKKCVSCQNLNPSNKELVGPPLAETVFTPKTSPENVQDRFALVTPKKEGHWDCSICLVRNEPTVSRCIACQNTKSANKSGSSFVHQASFKFGQGDLPKPINSDFRSVFSTKEGQWDCSACLVQNEGSSTKCAACQNPRKQSLPATSIPTPASFKFGTSETSKTLKSGFEDMFAKKEGQWDCSSCLVRNEANATRCVACQNPDKPSPSTSVPAPASFKFGTSETSKAPKSGFEGMFTKKEGQWDCSVCLVRNEASATKCIACQNPGKQNQTTSAVSTPASSETSKAPKSGFEGMFTKKEGQWDCSVCLVRNEASATKCIACQNPGKQNQTTSAVSTPASSETSKAPKSGFEGMFTKKEGQWDCSVCLVRNEASATKCIACQCPSKQNQTTAISTPASSEISKAPKSGFEGMFIRKGQWDCSVCCVQNESSSLKCVACDASKPTHKPIAEAPSAFTLGSEMKLHDSSGSQVGTGFKSNFSEKASKFGNTEQGFKFGHVDQENSPSFMFQGSSNTEFKSTKEGFSIPVSADGFKFGISEPGNQEKKSEKPLENGTGFQAQDISGQKNGRGVIFGQTSSTFTFADLAKSTSGEGFQFGKKDPNFKGFSGAGEKLFSSQYGKMANKANTSGDFEKDDDAYKTEDSDDIHFEPVVQMPEKVELVTGEEDEKVLYSQRVKLFRFDAEVSQWKERGLGNLKILKNEVNGKLRMLMRREQVLKVCANHWITTTMNLKPLSGSDRAWMWLASDFSDGDAKLEQLAAKFKTPELAEEFKQKFEECQRLLLDIPLQTPHKLVDTGRAAKLIQRAEEMKSGLKDFKTFLTNDQTKVTEEENKGSGTGAAGASDTTIKPNPENTGPTLEWDNYDLREDALDDSVSSSSVHASPLASSPVRKNLFRFGESTTGFNFSFKSALSPSKSPAKLNQSGTSVGTDEESDVTQEEERDGQYFEPVVPLPDLVEVSSGEENEQVVFSHRAKLYRYDKDVGQWKERGIGDIKILQNYDNKQVRIVMRRDQVLKLCANHRITPDMTLQNMKGTERVWLWTACDFADGERKVEHLAVRFKLQDVADSFKKIFDEAKTAQEKDSLITPHVSRSSTPRESPCGKIAVAVLEETTRERTDVIQGDDVADATSEVEVSSTSETTPKAVVSPPKFVFGSESVKSIFSSEKSKPFAFGNSSATGSLFGFSFNAPLKSNNSETSSVAQSGSESKVEPKKCELSKNSDIEQSSDSKVKNLFASFPTEESSINYTFKTPEKAKEKKKPEDSPSDDDVLIVYELTPTAEQKALATKLKLPPTFFCYKNRPDYVSEEEEDDEDFETAVKKLNGKLYLDGSEKCRPLEENTADNEKECIIVWEKKPTVEEKAKADTLKLPPTFFCGVCSDTDEDNGNGEDFQSELQKVQEAQKSQTEEITSTTDSVYTGGTEVMVPSFCKSEEPDSITKSISSPSVSSETMDKPVDLSTRKEIDTDSTSQGESKIVSFGFGSSTGLSFADLASSNSGDFAFGSKDKNFQWANTGAAVFGTQSVGTQSAGKVGEDEDGSDEEVVHNEDIHFEPIVSLPEVEVKSGEEDEEILFKERAKLYRWDRDVSQWKERGVGDIKILWHTMKNYYRILMRRDQVFKVCANHVITKTMELKPLNVSNNALVWTASDYADGEAKVEQLAVRFKTKEVADCFKKTFEECQQNLMKLQKGHVSLAAELSKETNPVVFFDVCADGEPLGRITMELFSNIVPRTAENFRALCTGEKGFGFKNSIFHRVIPDFVCQGGDITKHDGTGGQSIYGDKFEDENFDVKHTGPGLLSMANQGQNTNNSQFVITLKKAEHLDFKHVVFGFVKDGMDTVKKIESFGSPKGSVCRRITITECGQI

SEQ ID NO: 3196 - protein, 657 aa, Homo sapiens
MRRAVCFPALCLLLNLHAAGCFSGNNDHFLAINQKKSGKPVFIYKHSQDIEKSLDIAPQKIYRHSYHSSSEAQVSKRHQIVNSAFPRPAYDPSLNLLAMDGQDLEVENLPIPAANVIVVTLQMDVNKLNITLLRIFRQGVAAALGLLPQQVHINRLIGKKNSIELFVSPINRKTGISDALPSEEVLRSLNINVLHQSLSQFGITEVSPEKNVLQGQHEADKIWSKEGFYAVVIFLSIFVIIVTCLMILYRLKERFQLSLRQDKEKNQEIHLSPITLQPALSEAKTVHSMVQPEQAPKVLNVVVDPQGRGAPEIKATTATSVCPSPFKMKPIGLQERRGSNVSLTLDMSSLGNIEPFVSIPTPREKVAMEYLQSASRILTRSQLRDVVASSHLLQSEFMEIPMNFVDPKEIDIPRHGTKNRYKTILPNPLSRVCLRPKNVTDSLSTYINANYIRGYSGKEKAFIATQGPMINTVDDFWQMVWQEDSPVIVMITKLKEKNEKCVLYWPEKRGIYGKVEVLVISVNECDNYTIRNLVLKQGSHTQHVKHYWYTSWPDHKTPDSAQPLLQLMLDVEEDRLASQGRGPVVVHCSAGIGRTGCFIATSIGCQQLKEEGVVDALSIVCQLRMDRGGMVQTSEQYEFVHHALCLYESRLSAETVQ

SEQ ID NO: 3197 - protein, 1463 aa, Homo sapiens
MLLSPSLLLLLLLGAPRGCAEGVAAALTPERLLEWQDKGIFVIQSESLKKCIQAGKSVLTLENCKQANKHMLWKWVSNHGLFNIGGSGCLGLNFSAPEQPLSLYECDSTLVSLRWRCNRKMITGPLQYSVQVAHDNTVVASRKYIHKWISYGSGGGDICEYLHKDLHTIKGNTHGMPCMFPFQYNHQWHHECTREGREDDLLWCATTSRYERDEKWGFCPDPTSAEVGCDTIWEKDLNSHICYQFNLLSSLSWSEAHSSCQMQGGTLLSITDETEENFIREHMSSKTVEVWMGLNQLDEHAGWQWSDGTPLNYLNWSPEVNFEPFVEDHCGTFSSFMPSAWRSRDCESTLPYICKKYLNHIDHEIVEKDAWKYYATHCEPGWNPYNRNCYKLQKEEKTWHEALRSCQADNSALIDITSLAEVEFLVTLLGDENASETWIGLSSNKIPVSFEWSNDSSVIFTNWHTLEPHIFPNRSQLCVSAEQSEGHWKVKNCEERLFYICKKAGHVLSDAESGCQEGWERHGGFCYKIDTVLRSFDQASSGYYCPPALVTITNRFEQAFITSLISSVVKMKDSYFWIALQDQNDTGEYTWKPVGQKPEPVQYTHWNTHQPRYSGGCVAMRGRHPLGRWEVKHCRHFKAMSLCKQPVENQEKAEYEERWPFHPCYLDWESEPGLASCFKVFHSEKVLMKRTWREAEAFCEEFGAHLASFAHIEEENFVNELLHSKFNWTEERQFWIGFNKRNPLNAGSWEWSDRTPVVSSFLDNTYFGEDARNCAVYKANKTLLPLHCGSKREWICKIPRDVKPKIPFWYQYDVPWLFYQDAEYLFHTFASEWLNFEFVCSWLHSDLLTIHSAHEQEFIHSKIKALSKYGASWWIGLQEERANDEFRWRDGTPVIYQNWDTGRERTVNNQSQRCGFISSITGLWGSEECSVSMPSICKRKKVWLIEKKKDTPKQHGTCPKGWLYFNYKCLLLNIPKDPSSWKNWTHAQHFCAEEGGTLVAIESEVEQAFITMNLFGQTTSVWIGLQNDDYETWLNGKPVVYSNWSPFDIINIPSHNTTEVQKHIPLCALLSSNPNFHFTGKWYFEDCGKEGYGFVCEKMQDTSGHGVNTSDMYPMPNTLEYGNRTYKIINANMTWYAAIKTCLMHKAQLVSITDQYHQSFLTVVLNRLGYAHWIGLFTTDNGLNFDWSDGTKSSFTFWKDEESSLLGDCVFADSNGRWHSTACESFLQGAICHVPPETRQSEHPELCSETSIPWIKFKSNCYSFSTVLDSMSFEAAHEFCKKEGSNLLTIKDEAENAFLLEELFAFGSSVQMVWLNAQFDGNNETIKWFDGTPTDQSNWGIRKPDTDYFKPHHCVALRIPEGLWQLSPCQEKKGFICKMEADIHTAEALPEKGPSHSIIPLAVVLTLIVIVAICTLSFCIYKHNGGFFRRLAGFRNPYYPATNFSTVYLEENILISDLEKSDQ

SEQ ID NO: 3198 - protein, 788 aa, Homo sapiens
MGIELLCLFFLFLGRNDHVQGGCALGGAETCEDCLLIGPQCAWCAQENFTHPSGVGERCDTPANLLAKGCQLNFIENPVSQVEILKNKPLSVGRQKNSSDIVQIAPQSLILKLRPGGAQTLQVHVRQTEDYPVDLYYLMDLSASMDDDLNTIKELGSRLSKEMSKLTSNFRLGFGSFVEKPVSPFVKTTPEEIANPCSSIPYFCLPTFGFKHILPLTNDAERFNEIVKNQKISANIDTPEGGFDAIMQAAVCKEKIGWRNDSLHLLVFVSDADSHFGMDSKLAGIVIPNDGLCHLDSKNEYSMSTVLEYPTIGQLIDKLVQNNVLLIFAVTQEQVHLYENYAKLIPGATVGLLQKDSGNILQLIISAYEELRSEVELEVLGDTEGLNLSFTAICNNGTLFQHQKKCSHMKVGDTASFSVTVNIPHCERRSRHIIIKPVGLGDALELLVSPECNCDCQKEVEVNSSKCHHGNGSFQCGVCACHPGHMGPRCECGEDMLSTDSCKEAPDHPSCSGRGDCYCGQCICHLSPYGNIYGPYCQCDNFSCVRHKGLLCGGNGDCDCGECVCRSGWTGEYCNCTTSTDSCVSEDGVLCSGRGDCVCGKCVCTNPGASGPTCERCPTCGDPCNSKRSCIECHLSAAGQAREECVDKCKLAGATISEEEDFSKDGSVSCSLQGENECLITFLITTDNEGKTIIHSINEKDCPKPPNIPMIMLGVSLAILLIGVVLLCIWKLLVSFHDRKEVAKFEAERSKAKWQTGTNPLYRGSTSTFKNVTYKHREKQKVDLSTDC

SEQ ID NO: 3199 - protein, 1314 aa, Homo sapiens
MLDPSSSEEESDEIVEEESGKEVLGSAPSGARLSPSRTSEGSAGSAGLGGGGAGAGAGVGAGGGGGSGASSGGGAGGLQPSSRAGGGRPSSPSPSVVSEKEKEELERLQKEEEERKKRLQLYVFVMRCIAYPFNAKQPTDMARRQQKISKQQLQTVKDRFQAFLNGETQIMADEAFMNAVQSYYEVFLKSDRVARMVQSGGCSANDSREVFKKHIEKRVRSLPEIDGLSKETVLSSWMAKFDAIYRGEEDPRKQQARMTASAASELILSKEQLYEMFQNILGIKKFEHQLLYNACQLDNPDEQAAQIRRELDGRLQMADQIARERKFPKFVSKEMENMYIEELKSSVNLLMANLESMPVSKGGEFKLQKLKRSHNASIIDMGEESENQLSKSDVVLSFSLEVVIMEVQGLKSLAPNRIVYCTMEVEGGEKLQTDQAEASKPTWGTQGDFSTTHALPAVKVKLFTESTGVLALEDKELGRVILHPTPNSPKQSEWHKMTVSKNCPDQDLKIKLAVRMDKPQNMKHSGYLWAIGKNVWKRWKKRFFVLVQVSQYTFAMCSYREKKAEPQELLQLDGYTVDYTDPQPGLEGGRAFFNAVKEGDTVIFASDDEQDRILWVQAMYRATGQSHKPVPPTQVQKLNAKGGNVPQLDAPISQFYADRAQKHGMDEFISSNPCNFDHASLFEMVQRLTLDHRLNDSYSCLGWFSPGQVFVLDEYCARNGVRGCHRHLCYLRDLLERAENGAMIDPTLLHYSFAFCASHVHGNRPDGIGTVTVEEKERFEEIKERLRVLLENQITHFRYCFPFGRPEGALKATLSLLERVLMKDIVTPVPQEEVKTVIRKCLEQAALVNYSRLSEYAKIEGKKREMYEHPVFCLASQVMDLTIQNVGRLITPAKKLEDTIRLAELVIEVLQQNEEHHAEAFAWWSDLMVEHAETFLSLFAVDMDAALEVQPPDTWDSFPLFQLLNDFLRTDYNLCNGKFHKHLQDLFAPLVVRYVDLMESSIAQSIHRGFERESWEPVNNGSGTSEDLFWKLDALQTFIRDLHWPEEEFGKHLEQRLKLMASDMIESCVKRTRIAFEVKLQKTSRSTDFRVPQSICTMFNVMVDAKAQSTKLCSMEMGQEHQYHSKIDELIEETVKEMITLLVAKFVTILEGVLAKLSRYDEGTLFSSFLSFTVKAASKYVDVPKPGMDVADAYVTFVRHSQDVLRDKVNEEMYIERLFDQWYNSSMNVICTWLTDRMDLQLHIYQLKTLIRMVKKTYRDFRLQGVLDSTLNSKTYETIRNRLTVEEATASVSEGGGLQGISMKDSDEEDEEDD

SEQ ID NO: 3200 - protein, 314 aa, Homo sapiens
MQNVINTVKGKALEVAEYLTPVLKESKFKETGVITPEEFVAAGDHLVHHCPTWQWATGEELKVKAYLPTGKQFLVTKNVPCYKRCKQMEYSDELEAIIEEDDGDGGWVDTYHNTGITGITEAVKEITLENKDNIRLQDCSALCEEEEDEDEGEAADMEEYEESGLLETDEATLDTRKIVEACKAKTDAGGEDAILQTRTYDLYITYDKYYQTPRLWLFGYDEQRQPLTVEHMYEDISQDHVKKTVTIENHPHLPPPPMCSVHPCRHAEVMKKIIETVAEGGGELGVHMYLLIFLKFVQAVIPTIEYDYTRHFTM

SEQ ID NO: 3201 - protein, 695 aa, Homo sapiens
MKMKSQATMICCLVFFLSTECSHYRSKIHLKAGDKLQSPEGKPKTGRIQEKCEGPCISSSNCSQPCAKDFHGEIGFTCNQKKWQKSAETCTSLSVEKLFKDSTGASRLSVAAPSIPLHILDFRAPETIESVAQGIRKNCPFDYACITDMVKSSETTSGNIAFIVELLKNISTDLSDNVTREKMKSYSEVANHILDTAAISNWAFIPNKNASSDLLQSVNLFARQLHIHNNSENIVNELFIQTKGFHINHNTSEKSLNFSMSMNNTTEDILGMVQIPRQELRKLWPNASQAISIAFPTLGAILREAHLQNVSLPRQVNGLVLSVVLPERLQEIILTFEKINKTRNARAQCVGWHSKKRRWDEKACQMMLDIRNEVKCRCNYTSVVMSFSILMSSKSMTDKVLDYITCIGLSVSILSLVLCLIIEATVWSRVVVTEISYMRHVCIVNIAVSLLTANVWFIIGSHFNIKAQDYNMCVAVTFFSHFFYLSLFFWMLFKALLIIYGILVIFRRMMKSRMMVIGFAIGYGCPLIIAVTTVAITEPEKGYMRPEACWLNWDNTKALLAFAIPAFVIVAVNLIVVLVVAVNTQRPSIGSSKSQDVVIIMRISKNVAILTPLLGLTWGFGIATLIEGTSLTFHIIFALLNAFQGFFILLFGTIMDHKIRDALRMRMSSLKGKSRAAENASLGPTNGSKLMNRQG

SEQ ID NO: 3202 - protein, 1435 aa, Homo sapiens
MAQCVQSVQELIPDSFVPCVAALCSDEAERLTRLNHLSFAELLKPFSRLTSEVHMRDPNNQLHVIKNLKIAVSNIVTQPPQPGAIRKLLNDVVSGSQPAEGLVANVITAGDYDLNISATTPWFESYRETFLQSMPALDHEFLNHYLACMLVASSSEAEPVEQFSKLSQEQHRIQHNSDYSYPKWFIPNTLKYYVLLHDVSAGDEQRAESIYEEMKQKYGTQGCYLLKINSRTSNRASDEQIPDPWSQYLQKNSIQNQESYEDGPCTITSNKNSDNNLLSLDGLDNEVKDGLPNNFRAHPLQLEQSSDPSNSIDGPDHLRSASSLHETKKGNTGIIHGACLTLTDHDRIRQFIQEFTFRGLLPHIEKTIRQLNDQLISRKGLSRSLFSATKKWFSGSKVPEKSINDLKNTSGLLYPPEAPELQIRKMADLCFLVQHYDLAYSCYHTAKKDFLNDQAMLYAAGALEMAAVSAFLQPGAPRPYPAHYMDTAIQTYRDICKNMVLAERCVLLSAELLKSQSKYSEAAALLIRLTSEDSDLRSALLLEQAAHCFINMKSPMVRKYAFHMILAGHRFSKAGQKKHALRCYCQAMQVYKGKGWSLAEDHINFTIGRQSYTLRQLDNAVSAFRHILINESKQSAAQQGAFLREYLYVYKNVSQLSPDGPLPQLPLPYINSSATRVFFGHDRRPADGEKQAATHVSLDQEYDSESSQQWRELEEQVVSVVNKGVIPSNFHPTQYCLNSYSDNSRFPLAVVEEPITVEVAFRNPLKVLLLLTDLSLLWKFHPKDFSGKDNEEVKQLVTSEPEMIGAEVISEFLINGEESKVARLKLFPHHIGELHILGVVYNLGTIQGSMTVDGIGALPGCHTGKYSLSMSVRGKQDLEIQGPRLNNTKEEKTSVKYGPDRRLDPIITEEMPLLEVFFIHFPTGLLCGEIRKAYVEFVNVSKCPLTGLKVVSKRPEFFTFGGNTAVLTPLSPSASENCSAYKTVVTDATSVCTALISSASSVDFGIGTGSQPEVIPVPLPDTVLLPGASVQLPMWLRGPDEEGVHEINFLFYYESVKKQPKIRHRILRHTAIICTSRSLNVRATVCRSNSLENEEGRGGNMLVFVDVENTNTSEAGVKEFHIVQVSSSSKHWKLQKSVNLSENKDTKLASREKGKFCFKAIRCEKEEAATQSSEKYTFADIIFGNEQIISSASPCADFFYRSLSSELKKPQAHLPVHTEKQSTEDAVRLIQKCSEVDLNIVILWKAYVVEDSKQLILEGQHHVILRTIGKEAFSYPQKQEPPEMELLKFFRPENITVSSRPSVEQLSSLIKTSLHYPESFNHPFHQKSLCLVPVTLLLSNCSKADVDVIVDLRHKTTSPEALEIHGSFTWLGQTQYKLQLKSQEIHSLQLKACFVHTGVYNLGTPRVFAKLSDQVTVFETSQQNSMPALIIISNV

SEQ ID NO: 3203 - protein, 534 aa, Homo sapiens
MRLRGCGPRAAPASSAGASDARLLAPPGRNPFVHELRLSALQKAQVALMTLTLFPVRLLVAAAMMLLAWPLALVASLGSAEKEPEQPPALWRKVVDFLLKAIMRTMWFAGGFHRVAVKGRQALPTEAAILTLAPHSSYFDAIPVTMTMSSIVMKAESRDIPIWGTLIQYIRPVFVSRSDQDSRRKTVEEIKRRAQSNGKWPQIMIFPEGTCTNRTCLITFKPGAFIPGAPVQPVVLRYPNKLDTITWTWQGPGALEILWLTLCQFHNQVEIEFLPVYSPSEEEKRNPALYASNVRRVMAEALGVSVTDYTFEDCQLALAEGQLRLPADTCLLEFARLVRGLGLKPEKLEKDLDRYSERARMKGGEKIGIAEFAASLEVPVSDLLEDMFSLFDESGSGEVDLRECVVALSVVCRPARTLDTIQLAFKMYGAQEDGSVGEGDLSCILKTALGVAELTVTDLFRAIDQEEKGKITFADFHRFAEMYPAFAEEYLYPDQTHFESCAETSPAPIPNGFCADFSPENSDAGRKPVRKKLD

SEQ ID NO: 3204 - protein, 299 aa, Homo sapiens
MVDKKLVVVFGGTGAQGGSVARTLLEDGTFKVRVVTRNPRKKAAKELRLQGAEVVQGDQDDQVIMELALNGAYATFIVTNYWESCSQEQEVKQGKLLADLARRLGLHYVVYSGLENIKKLTAGRLAAAHFDGKGEVEEYFRDIGVPMTSVRLPCYFENLLSHFLPQKAPDGKSYLLSLPTGDVPMDGMSVSDLGPVVLSLLKMPEKYVGQNIGLSTCRHTAEEYAALLTKHTRKVVHDAKMTPEDYEKLGFPGARDLANMFRFYALRPDRDIELTLRLNPKALTLDQWLEQHKGDFNLL

SEQ ID NO: 3205 - protein, 177 aa, Homo sapiens
MSVNMDELKHQVMINQFVLTAGCAADQAKQLLQAAHWQFETALSAFFQETNIPYSHHHHQMMCTPANTPATPPNFPDALTMFSRLKASESFHSGGSGSPMAATATSPPPHFPHAATSSSAASSWPTAASPPGGPQHHQPQPPLWTPTPPSPASDWPPLAPQQATSEPRAHPAMEAER

SEQ ID NO: 3206 - protein, 195 aa, Homo sapiens
MAVSQGDGTLCFVLLLCCWQETELRPRTVIPGSPTEIPFSSKQEDMSELLDEILVQEILDLNKTTPSEMPSTASTLSTPLHAGIDENYQAGGSENYHELLENLQFSPGIEVKISNDEANANANLHGDPSENYRGPQVSPGSEKSVSSKEKNSKNTQYENLSILDQILQNIGRSSGNIFHKEQQRTSAQRRSQGSQ

SEQ ID NO: 3207 - protein, 391 aa, Homo sapiens
MDQCVTVERELEKVLHKFSGYGQLCERGLEELIDYTGGLKHEILQSHGQDAELSGTLSLVLTQCCKRIKDTVQKLASDHKDIHSSVSRVGKAIDKNFDSDISSVGIDGCWQADSQRLLNEVMVEHFFRQGMLDVAEELCQESGLSVDPSQKEPFVELNRILEALKVRVLRPALEWAVSNREMLIAQNSSLEFKLHRLYFISLLMGGTTNQREALQYAKNFQPFALNHQKDIQVLMGSLVYLRQGIENSPYVHLLDANQWADICDIFTRDACALLGLSVESPLSVSFSAGCVALPALINIKAVIEQRQCTGVWNQKDELPIEVDLGKKCWYHSIFACPILRQQTTDNNPPMKLVCGHIISRDALNKMFNGSKLKCPYCPMEQSPGDAKQIFF

SEQ ID NO: 3208 - protein, 235 aa, Homo sapiens
MALPVTALLLPLALLLHAARPSQFRVSPLDRTWNLGETVELKCQVLLSNPTSGCSWLFQPRGAAASPTFLLYLSQNKPKAAEGLDTQRFSGKRLGDTFVLTLSDFRRENEGYYFCSALSNSIMYFSHFVPVFLPAKPTTTPAPRPPTPAPTIASQPLSLRPEACRPAAGGAVHTRGLDFACDIYIWAPLAGTCGVLLLSLVITLYCNHRNRRRVCKCPRPVVKSGDKPSLSARYV

SEQ ID NO: 3209 - protein, 311 aa, Homo sapiens
MQRPGPFSTLYGRVLAPLPGRAGGAASGGGGNSWDLPGSHVRLPGRAQSGTRGGAGNTSTSCGDSNSICPAPSTMSKAEEAKKLAGRAAVENHVRNNQVLGIGSGSTIVHAVQRIAERVKQENLNLVCIPTSFQARQLILQYGLTLSDLDRHPEIDLAIDGADEVDADLNLIKGGGGCLTQEKIVAGYASRFIVIADFRKDSKNLGDQWHKGIPIEVIPMAYVPVSRAVSQKFGGVVELRMAVNKAGPVVTDNGNFILDWKFDRVHKWSEVNTAIKMIPGVVDTGLFINMAERVYFGMQDGSVNMREKPFC

SEQ ID NO: 3210 - protein, 445 aa, Homo sapiens
MAELKYISGFGNECSSEDPRCPGSLPEGQNNPQVCPYNLYAEQLSGSAFTCPRSTNKRSWLYRILPSVSHKPFESIDEGQVTHNWDEVDPDPNQLRWKPFEIPKASQKKVDFVSGLHTLCGAGDIKSNNGLAIHIFLCNTSMENRCFYNSDGDFLIVPQKGNLLIYTEFGKMLVQPNEICVIQRGMRFSIDVFEETRGYILEVYGVHFELPDLGPIGANGLANPRDFLIPIAWYEDRQVPGGYTVINKYQGKLFAAKQDVSPFNVVAWHGNYTPYKYNLKNFMVINSVAFDHADPSIFTVLTAKSVRPGVAIADFVIFPPRWGVADKTFRPPYYHRNCMSEFMGLIRGHYEAKQGGFLPGGGSLHSTMTPHGPDADCFEKASKVKLAPERIADGTMAFMFESSLSLAVTKWGLKASRCLDENYHKCWEPLKSHFTPNSRNPAEPN

SEQ ID NO: 3211 - protein, 439 aa, Homo sapiens
MADPDVLTEVPAALKRLAKYVIRGFYGIEHALALDILIRNSCVKEEDMLELLKFDRKQLRSVLNNLKGDKFIKCRMRVETAADGKTTRHNYYFINYRTLVNVVKYKLDHMRRRIETDERDSTNRASFKCPVCSSTFTDLEANQLFDPMTGTFRCTFCHTEVEEDESAMPKKDARTLLARFNEQIEPIYALLRETEDVNLAYEILEPEPTEIPALKQSKDHAATTAGAASLAGGHHREAWATKGPSYEDLYTQNVVINMDDQEDLHRASLEGKSAKERPIWLRESTVQGAYGSEDMKEGGIDMDAFQEREEGHAGPDDNEEVMRALLIHEKKTSSAMAGSVGAAAPVTAANGSDSESETSESDDDSPPRPAAVAVHKREEDEEEDDEFEEVADDPIVMVAGRPFSYSEVSQRPELVAQMTPEEKEAYIAMGQRMFEDLFE

SEQ ID NO: 3212 - protein, 299 aa, Homo sapiens
MEEFDSEDFSTSEEDEDYVPSGGEYSEDDVNELVKEDEVDGEEQTQKTQGKKRKAQSIPARKRRQGGLSLEEEEEEDANSESEGSSSEEEDDAAEQEKGIGSEDARKKKEDELWASFLNDVGPKSKVPPSTQVKKGEETEETSSSKLLVKAEELEKPKETEKVKITKVFDFAGEEVRVTKEVDATSKEAKSFFKQNEKEKPQANVPSALPSLPAGSGLKRSSGMSSLLGKIGAKKQKMSTLEKSKLDWESFKEEEGIGEELAIHNRGKEGYIERKAFLDRVDHRQFEIERDLRLSKMKP

SEQ ID NO: 3213 - protein, 243 aa, Homo sapiens
MTGIAAASFFSNTCRFGGCGLHFPTLADLIEHIEDNHIDTDPRVLEKQELQQPTYVALSYINRFMTDAARREQESLKKKIQPKLSLTLSSSVSRGNVSTPPRHSSGSLTPPVTPPITPSSSFRSSTPTGSEYDEEEVDYEESDSDESWTTESAISSEAILSSMCMNGGEEKPFACPVPGCKKRYKNVNGIKYHAKNGHRTQIRVRKPFKCRCGKSYKTAQGLRHHTINFHPPVSAEIIRKMQQ

SEQ ID NO: 3214 - protein, 150 aa, Homo sapiens
MSKISQQNSTPGVNGISVIHTQAHASGLQQVPQLVPAGPGGGGKAVAPSKQSKKSSPMDRNSDEYRQRRERNNMAVKKSRLKSKQKAQDTLQRVNQLKEENERLEAKIKLLTKELSVLKDLFLEHAHNLADNVQSISTENTTADGDNAGQ

SEQ ID NO: 3215 - protein, 285 aa, Homo sapiens
MAGLGHPAAFGRATHAVVRALPESLGQHALRSAKGEEVDVARAERQHQLYVGVLGSKLGLQVVELPADESLPDCVFVEDVAVVCEETALITRPGAPSRRKEVDMMKEALEKLQLNIVEMKDENATLDGGDVLFTGREFFVGLSKRTNQRGAEILADTFKDYAVSTVPVADGLHLKSFCSMAGPNLIAIGSSESAQKALKIMQQMSDHRYDKLTVPDDIAANCIYLNIPNKGHVLLHRTPEEYPESAKVYEKLKDHMLIPVSMSELEKVDGLLTCCSVLINKKVDS

SEQ ID NO: 3216 - protein, 406 aa, Homo sapiens
MAPPGPASALSTSAEPLSRSIFRKFLLMLCSLLTSLYVFYCLAERCQTLSGPVVGLSGGGEEAGAPGGGVLAGGPRELAVWPAAAQRKRLLQLPQWRRRRPPAPRDDGEEAAWEEESPGLSGGPGGSGAGSTVAEAPPGTLALLLDEGSKQLPQAIIIGVKKGGTRALLEFLRVHPDVRAVGAEPHFFDRSYDKGLAWYRDLMPRTLDGQITMEKTPSYFVTREAPARISAMSKDTKLIVVVRDPVTRAISDYTQTLSKRPDIPTFESLTFKNRTAGLIDTSWSAIQIGIYAKHLEHWLRHFPIRQMLFVSGERLISDPAGELGRVQDFLGLKRIITDKHFYFNKTKGFPCLKKAEGSSRPHCLGKTKGRTHPEIDREVVRRLREFYRPFNLKFYQMTGHDFGWDG

SEQ ID NO: 3217 - protein, 777 aa, Homo sapiens
MNANKDERLKARSQDFHLFPALMMLSMTMLFLPVTGTLKQNIPRLKLTYKDLLLSNSCIPFLGSSEGLDFQTLLLDEERGRLLLGAKDHIFLLSLVDLNKNFKKIYWPAAKERVELCKLAGKDANTECANFIRVLQPYNKTHIYVCGTGAFHPICGYIDLGVYKEDIIFKLDTHNLESGRLKCPFDPQQPFASVMTDEYLYSGTASDFLGKDTAFTRSLGPTHDHHYIRTDISEHYWLNGAKFIGTFFIPDTYNPDDDKIYFFFRESSQEGSTSDKTILSRVGRVCKNDVGGQRSLINKWTTFLKARLICSIPGSDGADTYFDELQDIYLLPTRDERNPVVYGVFTTTSSIFKGSAVCVYSMADIRAVFNGPYAHKESADHRWVQYDGRIPYPRPGTCPSKTYDPLIKSTRDFPDDVISFIKRHSVMYKSVYPVAGGPTFKRINVDYRLTQIVVDHVIAEDGQYDVMFLGTDIGTVLKVVSISKEKWNMEEVVLEELQIFKHSSIILNMELSLKQQQLYIGSRDGLVQLSLHRCDTYGKACADCCLARDPYCAWDGNACSRYAPTSKRRARRQDVKYGDPITQCWDIEDSISHETADEKVIFGIEFNSTFLECIPKSQQATIKWYIQRSGDEHREELKPDERIIKTEYGLLIRSLQKKDSGMYYCKAQEHTFIHTIVKLTLNVIENEQMENTQRAEHEEGKVKDLLAESRLRYKDYIQILSSPNFSLDQYCEQMWHREKRRQRNKGGPKWKHMQEMKKKRNRRHHRDLDELPRAVAT

SEQ ID NO: 3218 - protein, 320 aa, Homo sapiens
MAEGDAGSDQRQNEEIEAMAAIYGEEWCVIDDCAKIFCIRISDDIDDPKWTLCLQVMLPNEYPGTAPPIYQLNAPWLKGQERADLSNSLEEIYIQNIGESILYLWVEKIRDVLIQKSQMTEPGPDVKKKTEEEDVECEDDLILACQPESSLKALDFDISETRTEVEVEELPPIDHGIPITDRRSTFQAHLAPVVCPKQVKMVLSKLYENKKIASATHNIYAYRIYCEDKQTFLQDCEDDGETAAGGRLLHLMEILNVKNVMVVVSRWYGGILLGPDRFKHINNCARNILVEKNYTNSPEESSKALGKNKKVRKDKKRNEH

SEQ ID NO: 3219 - protein, 161 aa, Homo sapiens
MNLAISIALLLTVLQVSRGQKVTSLTACLVDQSLRLDCRHENTSSSPIQYEFSLTRETKKHVLFGTVGVPEHTYRSRTNFTSKYNMKVLYLSAFTSKDEGTYTCALHHSGHSPPISSQNVTVLRDKLVKCEGISLLAQNTSWLLLLLLSLSLLQATDFMSL

SEQ ID NO: 3220 - protein, 492 aa, Homo sapiens
MVKFPALTHYWPLIRFLVPLGITNIAIDFGEQALNRGIAAVKEDAVEMLASYGLAYSLMKFFTGPMSDFKNVGLVFVNSKRDRTKAVLCMVVAGAIAAVFHTLIAYSDLGYYIINKLHHVDESVGSKTRRAFLYLAAFPFMDAMAWTHAGILLKHKYSFLVGCASISDVIAQVVFVAILLHSHLECREPLLIPILSLYMGALVRCTTLCLGYYKNIHDIIPDRSGPELGGDATIRKMLSFWWPLALILATQRISRPIVNLFVSRDLGGSSAATEAVAILTATYPVGHMPYGWLTEIRAVYPAFDKNNPSNKLVSTSNTVTAAHIKKFTFVCMALSLTLCFVMFWTPNVSEKILIDIIGVDFAFAELCVVPLRIFSFFPVPVTVRAHLTGWLMTLKKTFVLAPSSVLRIIVLIASLVVLPYLGVHGATLGVGSLLAGFVGESTMVAIAACYVYRKQKKKMENESATEGEDSAMTDMPPTEEVTDIVEMREENE

SEQ ID NO: 3221 - protein, 352 aa, Homo sapiens
MSRGTMPQPEAWPGASCAETPAREAAATARDGGKAAASGQPRPEMQCPAEHEEDMYRAADEIEKEKELLIHERGASEPRLSVAPEMDIMDYCKKEWRGNTQKATCMKMGYEEVSQKFTSIRRVRGDNYCALRATLFQAMSQAVGLPPWLQDPELMLLPEKLISKYNWIKQWKLGLKFDGKNEDLVDKIKESLTLLRKKWAGLAEMRTAEARQIACDELFTNEAEEYSLYEAVKFLMLNRAIELYNDKEKGKEVPFFSVLLFARDTSNDPGQLLRNHLNQVGHTGGLEQVEMFLLAYAVRHTIQVYRLSKYNTEEFITVYPTDPPKDWPVVTLIAEDDRHYNIPVRVCEETSL

SEQ ID NO: 3222 - protein, 608 aa, Homo sapiens
MAASKPVEAAVVAAAVPSSGSGVGGGGTAGPGTGGLPRWQLALAVGAPLLLGAGAIYLWSRQQRRREARGRGDASGLKRNSERKTPEGRASPAPGSGHPEGPGAHLDMNSLDRAQAAKNKGNKYFKAGKYEQAIQCYTEAISLCPTEKNVDLSTFYQNRAAAFEQLQKWKEVAQDCTKAVELNPKYVKALFRRAKAHEKLDNKKECLEDVTAVCILEGFQNQQSMLLADKVLKLLGKEKAKEKYKNREPLMPSPQFIKSYFSSFTDDIISQPMLKGEKSDEDKDKEGEALEVKENSGYLKAKQYMEEENYDKIISECSKEIDAEGKYMAEALLLRATFYLLIGNANAAKPDLDKVISLKEANVKLRANALIKRGSMYMQQQQPLLSTQDFNMAADIDPQNADVYHHRGQLKILLDQVEEAVADFDECIRLRPESALAQAQKCFALYRQAYTGNNSSQIQAAMKGFEEVIKKFPRCAEGYALYAQALTDQQQFGKADEMYDKCIDLEPDNATTYVHKGLLQLQWKQDLDRGLELISKAIEIDNKCDFAYETMGTIEVQRGNMEKAIDMFNKAINLAKSEMEMAHLYSLCDAAHAQTEVAKKYGLKPPTL

SEQ ID NO: 3223 - protein, 1075 aa, Homo sapiens
MRGGKCNMLSSLGCLLLCGSITLALGNAQKLPKGKRPNLKVHINTTSDSILLKFLRPSPNVKLEGLLLGYGSNVSPNQYFPLPAEGKFTEAIVDAEPKYLIVVRPAPPPSQKKSCSGKTRSRKPLQLVVGTLTPSSVFLSWGFLINPHHDWTLPSHCPNDRFYTIRYREKDKEKKWIFQICPATETIVENLKPNTVYEFGVKDNVEGGIWSKIFNHKTVVGSKKVNGKIQSTYDQDHTVPAYVPRKLIPITIIKQVIQNVTHKDSAKSPEKAPLGGVILVHLIIPGLNETTVKLPASLMFEISDALKTQLAKNETLALPAESKTPEVEKISARPTTVTPETVPRSTKPTTSSALDVSETTLASSEKPWIVPTAKISEDSKVLQPQTATYDVFSSPTTSDEPEISDSYTATSDRILDSIPPKTSRTLEQPRATLAPSETPFVPQKLEIFTSPEMQPTTPAPQQTTSIPSTPKRRPRPKPPRTKPERTTSAGTITPKISKSPEPTWTTPAPGKTQFISLKPKIPLSPEVTHTKPAPKQTPRAPPKPKTSPRPRIPQTQPVPKVPQRVTAKPKTSPSPEVSYTTPAPKDVLLPHKPYPEVSQSEPAPLETRGIPFIPMISPSPSQEELQTTLEETDQSTQEPFTTKIPRTTELAKTTQAPHRFYTTVRPRTSDKPHIRPGVKQAPRPSGADRNVSVDSTHPTKKPGTRRPPLPPRPTHPRRKPLPPNNVTGKPGSAGIISSGPITTPPLRSTPRPTGTPLERIETDIKQPTVPASGEELENITDFSSSPTRETDPLGKPRFKGPHVRYIQKPDNSPCSITDSVKRFPKEEATEGNATSPPQNPPTNLTVVTVEGCPSFVILDWEKPLNDTVTEYEVISRENGSFSGKNKSIQMTNQTFSTVENLKPNTSYEFQVKPKNPLGEGPVSNTVAFSTESADPRVSEPVSAGRDAIWTERPFNSDSYSECKGKQYVKRTWYKKFVGVQLCNSLRYKIYLSDSLTGKFYNIGDQRGHGEDHCQFVDSFLDGRTGQQLTSDQLPIKEGYFRAVRQEPVQFGEIGGHTQINYVQWYECGTTIPGKW

SEQ ID NO: 3224 - protein, 852 aa, Homo sapiens
MMPGPRPRKGPQARGQGVAAAKQMGLFMEFGPEDMLLGMDEAEDDEDLEAELLALTGEAQTTGKKPAPKGQAPLPMAHIEKLAADCMRDVEEEEEEEGLEEDAELLTELQEVLGVDEETEPLDGDEVADPGGSEEENGLEDTEPPVQTAVLTASAPAAQAGASQGLHALLEERIHNYREAAASAKEAGEAAKARRCERGLKTLESQLASVRRGRKINEDEIPPPVALGKRPLAPQEPANRSPETDPPAPPALESDNPSQPETSLPGISAQPVSDLDPDPRALLSSRQREYKVAALSAKRAGELDRARELMRIGKRFGAVLEALEKGQPVDLSAMPPAPEDLKPQQASQAPTAPSVIPPAVERVQPVMAPDVPATPVAPTESQTVLDALQQRLNKYREAGIQARSGGDERKARMHERIAKQYQDAIRAHRAGRKVNFAELPVPPGFPPIPGLESTMGVEEDAVAATLAAAEKLASAEDSAPADKDEDEGEPPAQAPVAKKPARPTVPSSQRLPEPRASSSKESPSPSVREQLALLEARKLQYQRAALQAKRSQDLEQAKAYLRVAKWLEAQIIQARSGRPVDLSKVPSPLTDEEGDFILIHHEDLRLSQKAEEVYAQLQKMLLEQQEKCLLFSKQFMHQGNVAETTRFEKLAQDRKKQLEILQLAQAQGLDPPTHHFELKTFQTVRIFSELNSTEMHLIIVRGMNLPAPPGVTPDDLDAFVRFEFHYPNSDQAQKSKTAVVKNTNSPEFDQLFKLNINRNHRGFKRVIQSKGIKFEIFHKGSFFRSDKLVGTAHLKLERLENECEIREIVEVLDGRKPTGGKLEVKVRLREPLSGQDVQMVTENWLVLEPRGL

SEQ ID NO: 3225 - protein, 1617 aa, Homo sapiens
MNMKQKSVYQQTKALLCKNFLKKWRMKRESLLEWGLSILLGLCIALFSSSMRNVQFPGMAPQNLGRVDKFNSSSLMVVYTPISNLTQQIMNKTALAPLLKGTSVIGAPNKTHMDEILLENLPYAMGIIFNETFSYKLIFFQGYNSPLWKEDFSAHCWDGYGEFSCTLTKYWNRGFVALQTAINTAIIEITTNHPVMEELMSVTAITMKTLPFITKNLLHNEMFILFFLLHFSPLVYFISLNVTKERKKSKNLMKMMGLQDSAFWLSWGLIYAGFIFIISIFVTIIITFTQIIVMTGFMVIFILFFLYGLSLVALVFLMSVLLKKAVLTNLVVFLLTLFWGCLGFTVFYEQLPSSLEWILNICSPFAFTTGMIQIIKLDYNLNGVIFPDPSGDSYTMIATFSMLLLDGLIYLLLALYFDKILPYGDERHYSPLFFLNSSSCFQHQRTNAKVIEKEIDAEHPSDDYFEPVAPEFQGKEAIRIRNVKKEYKGKSGKVEALKGLLFDIYEGQITAILGHSGAGKSSLLNILNGLSVPTEGSVTIYNKNLSEMQDLEEIRKITGVCPQFNVQFDILTVKENLSLFAKIKGIHLKEVEQEVQRILLELDMQNIQDNLAKHLSEGQKRKLTFGITILGDPQILLLDEPTTGLDPFSRDQVWSLLRERRADHVILFSTQSMDEADILADRKVIMSNGRLKCAGSSMFLKRRWGLGYHLSLHRNEICNPEQITSFITHHIPDAKLKTENKEKLVYTLPLERTNTFPDLFSDLDKCSDQGVTGYDISMSTLNEVFMKLEGQSTIEQDFEQVEMIRDSESLNEMELAHSSFSEMQTAVSDMGLWRMQVFAMARLRFLKLKRQTKVLLTLLLVFGIAIFPLIVENIMYAMLNEKIDWEFKNELYFLSPGQLPQEPRTSLLIINNTESNIEDFIKSLKHQNILLEVDDFENRNGTDGLSYNGAIIVSGKQKDYRFSVVCNTKRLHCFPILMNIISNGLLQMFNHTQHIRIESSPFPLSHIGLWTGLPDGSFFLFLVLCSISPYITMGSISDYKKNAKSQLWISGLYTSAYWCGQALVDVSFFILILLLMYLIFYIENMQYLLITSQIVFALVIVTPGYAASLVFFIYMISFIFRKRRKNSGLWSFYFFFASTIMFSITLINHFDLSILITTMVLVPSYTLLGFKTFLEVRDQEHYREFPEANFELSATDFLVCFIPYFQTLLFVFVLRCMELKCGKKRMRKDPVFRISPQSRDAKPNPEEPIDEDEDIQTERIRTATALTTSILDEKPVIIASCLHKEYAGQKKSCFSKRKKKIAARNISFCVQEGEILGLLGPNGAGKSSSIRMISGITKPTAGEVELKGCSSVLGHLGYCPQENVLWPMLTLREHLEVYAAVKGLRKADARLAIARLVSAFKLHEQLNVPVQKLTAGITRKLCFVLSLLGNSPVLLLDEPSTGIDPTGQQQMWQAIQAVVKNTERGVLLTTHNLAEAEALCDRVAIMVSGRLRCIGSIQHLKNKLGKDYILELKVKETSQVTLVHTEILKLFPQAAGQERYSSLLTYKLPVADVYPLSQTFHKLEAVKHNFNLEEYSLSQCTLEKVFLELSKEQEVGNFDEEIDTTMRWKLLPHSDEP

SEQ ID NO: 3226 - protein, 223 aa, Homo sapiens [sequence omitted]

SEQ ID NO: 3227 - protein, 352 aa, Homo sapiens
MAPLGYFLLLCSLKQALGSYPIWWSLAVGPQYSSLGSQPILCASIPGLVPKQLRFCRNYVEIMPSVAEGIKIGIQECQHQFRGRRWNCTTVHDSLAIFGPVLDKATRESAFVHAIASAGVAFAVTRSCAEGTAAICGCSSRHQGSPGKGWKWGGCSEDIEFGGMVSREFADARENRPDARSAMNRHNNEAGRQAIASHMHLKCKCHGLSGSCEVKTCWWSQPDFRAIGDFLKDKYDSASEMVVEKHRESRGWVETLRPRYTYFKVPTERDLVYYEASPNFCEPNPETGSFGTRDRTCNVSSHGIDGCDLLCCGRGHNARAERRREKCRCVFHWCCYVSCQECTRVYDVHTCK

SEQ ID NO: 3228 - protein, 468 aa, Homo sapiens
MAAPDLSTNLQEEATCAICLDYFTDPVMTDCGHNFCRECIRRCWGQPEGPYACPECRELSPQRNLRPNRPLAKMAEMARRLHPPSPVPQGVCPAHREPLAAFCGDELRLLCAACERSGEHWAHRVRPLQDAAEDLKAKLEKSLEHLRKQMQDALLFQAQADETCVLWQKMVESQRQNVLGEFERLRRLLAEEEQQLLQRLEEEELEVLPRLREGAAHLGQQSAHLAELIAELEGRCQLPALGLLQDIKDALRRVQDVKLQPPEVVPMELRTVCRVPGLVETLRRFRGDVTLDPDTANPELILSEDRRSVQRGDLRQALPDSPERFDPGPCVLGQERFTSGRHYWEVEVGDRTSWALGVCRENVNRKEKGELSAGNGFWILVFLGSYYNSSERALAPLRDPPRRVGIFLDYEAGHLSFYSATDGSLLFIFPEIPFSGTLRPLFSPLSSSPTPMTICRPKGGSGDTLAPQ

SEQ ID NO: 3229 - protein, 888 aa, Homo sapiens
MDESALLDLLECPVCLERLDASAKVLPCQHTFCKRCLLGIVGSRNELRCPECRTLVGSGVEELPSNILLVRLLDGIKQRPWKPGPGGGSGTNCTNALRSQSSTVANCSSKDLQSSQGGQQPRVQSWSPPVRGIPQLPCAKALYNYEGKEPGDLKFSKGDIIILRRQVDENWYHGEVNGIHGFFPTNFVQIIKPLPQPPPQCKALYDFEVKDKEADKDCLPFAKDDVLTVIRRVDENWAEGMLADKIGIFPISYVEFNSAAKQLIEWDKPPVPGVDAGECSSAAAQSSTAPKHSDTKKNTKKRHSFTSLTMANKSSQASQNRHSMEISPPVLISSSNPTAAARISELSGLSCSAPSQVHISTTGLIVTPPPSSPVTTGPSFTFPSDVPYQAALGTLNPPLPPPPLLAATVLASTPPGATAAAAAAGMGPRPMAGSTDQIAHLRPQTRPSVYVAIYPYTPRKEDELELRKGEMFLVFERCQDGWFKGTSMHTSKIGVFPGNYVAPVTRAVTNASQAKVPMSTAGQTSRGVTMVSPSTAGGPAQKLQGNGVAGSPSVVPAAVVSAAHIQTSPQAKVLLHMTGQMTVNQARNAVRTVAAHNQERPTAAVTPIQVQNAAGLSPASVGLSHHSLASPQPAPLMPGSATHTAAISISRASAPLACAAAAPLTSPSITSASLEAEPSGRIVTVLPGLPTSPDSASSACGNSSATKPDKDSKKEKKGLLKLLSGASTKRKPRVSPPASPTLEVELGSAELPLQGAVGPELPPGGGHGRAGSCPVDGDGPVTTAVAGAALAQDAFHRKASSLDSAVPIAPPPRQACSSLGPVLNESRPVVCERHRVVVSYPPQSEAELELKEGDIVFVHKKREDGWFKGTLQRNGKTGLFPGSFVENI

SEQ ID NO: 3230 - protein, 743 aa, Homo sapiens
MEEEGLECPNSSSEKRYFPESLDSSDGDEEEVLACEDLELNPFDGLPYSSRYYKLLKEREDLPIWKEKYSFMENLLQNQIVIVSGDAKCGKSAQVPQWCAEYCLSIHYQHGGVICTQVHKQTVVQLALRVADEMDVNIGHEVGYVIPFENCCTNETILRYCTDDMLQREMMSNPFLGSYGVIILDDIHERSIATDVLLGLLKDVLLARPELKLIINSSPHLISKLNSYYGNVPVIEVKNKHPVEVVYLSEAQKDSFESILRLIFEIHHSGEKGDIVVFLACEQDIEKVCETVYQGSNLNPDLGELVVVPLYPKEKCSLFKPLDETEKRCQVYQRRVVLTTSSGEFLIWSNSVRFVIDVGVERRKVYNPRIRANSLVMQPISQSQAEIRKQILGSSSSGKFFCLYTEEFASKDMTPLKPAEMQEANLTSMVLFMKRIDIAGLGHCDFMNRPAPESLMQALEDLDYLAALDNDGNLSEFGIIMSEFPLDPQLSKSILASCEFDCVDEVLTIAAMVTAPNCFSHVPHGAEEAALTCWKTFLHPEGDHFTLISIYKAYQDTTLNSSSEYCVEKWCRDYFLNCSALRMADVIRAELLEIIKRIELPYAEPAFGSKENTLNIKKALLSGYFMQIARDVDGSGNYLMLTHKQVAQLHPLSGYSITKKMPEWVLFHKFSISENNYIRITSEISPELFMQLVPQYYFSNLPPSESKDILQQVVDHLSPVSTMNKEQQMCETCPETEQRCTLQ

SEQ ID NO: 3231 - protein, 396 aa, Homo sapiens
MPPKKGGDGIKPPPIIGRFGTSLKIGIVGLPNVGKSTFFNVLTNSQASAENFPFCTIDPNESRVPVPDERFDFLCQYHKPASKIPAFLNVVDIAGLVKGAHNGQGLGNAFLSHISACDGIFHLTRAFEDDDITHVEGSVDPIRDIEIIHEELQLKDEEMIGPIIDKLEKVAVRGGDKKLKPEYDIMCKVKSWVIDQKKPVRFYHDWNDKEIEVLNKHLFLTSKPMVYLVNLSEKDYIRKKNKWLIKIKEWVDKYDPGALVIPFSGALELKLQELSAEERQKYLEANMTQSALPKIIKAGFAALQLEYFFTAGPDEVRAWTIRKGTKAPQAAGKIHTDFEKGFIMAEVMKYEDFKEEGSENAVKAAGKYRQQGRNYIVEDGDIIFFKFNTPQQPKKK

SEQ ID NO: 3232 - protein, 142 aa, Homo sapiens
MFACAKLACTPSLIRAGSRVAYRPISASVLSRPEASRTGEGSTVFNGAQNGVSQLIQREFQTSAISRDIDTAAKFIGAGAATVGVAGSGAGIGTVFGSLIIGYARNPSLKQQLFSYAILGFALSEAMGLFCLMVAFLILFAM

SEQ ID NO: 3233 - protein, 316 aa, Homo sapiens
MPQTVILPGPAPWGFRLSGGIDFNQPLVITRITPGSKAAAANLCPGDVILAIDGFGTESMTHADAQDRIKAAAHQLCLKIDRGETHLWSPQVSEDGKAHPFKINLESEPQEFKPIGTAHNRRAQPFVAAANIDDKRQVVSASYNSPIGLYSTSNIQDALHGQLRGLIPSSPQNEPTASVPPESDVYRMLHDNRNEPTQPRQSGSFRVLQGMVDDGSDDRPAGTRSVRAPVTKVHGGSGGAQRMPLCDKCGSGIVGAVVKARDKYRHPECFVCADCNLNLKQKGYFFIEGELYCETHARARTKPPEGYDTVTLYPKA

SEQ ID NO: 3234 - protein, 160 aa, Homo sapiens [sequence omitted]

SEQ ID NO: 3235 - protein, 365 aa, Homo sapiens
MALLLCFVLLCGVVDFARSLSITTPEEMIEKAKGETAYLPCKFTLSPEDQGPLDIEWLISPADNQKVDQVIILYSGDKIYDDYYPDLKGRVHFTSNDLKSGDASINVTNLQLSDIGTYQCKVKKAPGVANKKIHLVVLVKPSGARCYVDGSEEIGSDFKIKCEPKEGSLPLQYEWQKLSDSQKMPTSWLAEMTSSVISVKNASSEYSGTYSCTVRNRVGSDQCLLRLNVVPPSNKAGLIAGAIIGTLLALALIGLIIFCCRKKRREEKYEKEVHHDIREDVPPPKSRTSTARSYIGSNHSSLGSMSPSNMEGYSKTQYNQVPSEDFERTPQSPTLPPAKVAAPNLSRMGAIPVMIPAQSKDGSIV

SEQ ID NO: 3236 - protein, 252 aa, Homo sapiens
MKNEIAAVVFFFTRLVRKHDKLKKEAVERFAEKLTLILQEKYKNHWYPEKPSKGQAYRCIRVNKFQRVDPDVLKACENSCILYSDLGLPKELTLWVDPCEVCCRYGEKNNAFIVASFENKDENKDEISRKVTRALDKVTSDYHSGSSSSDEETSKEMEVKPSSVTAAASPVYQISELIFPPLPMWHPLPRKKPGMYRGNGHQNHYPPPVPFGYPNQGRKNKPYRPIPVTWVPPPGMHCDRNHWINPHMLAPH

SEQ ID NO: 3237 - protein, 688 aa, Homo sapiens
MKPLSLLIEILIILGVTIKTIKAEEHNKRQKERNVTTQVSVNEIKQYLSHILEQRTSSNVINKRENLLEKKKNQRKIRIKGIQNKDILKRNKNHLQKQAEKNFTDEGDQLFKMGIKVLQQSKSQKQKEEAYLLFAKAADMGNLKAMEKMADALLFGNFGVQNITAAIQLYESLAKEGSCKAQNALGFLSSYGIGMEYDQAKALIYYTFGSAGGNMMSQMILGYRYLSGINVLQNCEVALSYYKKVADYIADTFEKSEGVPVEKVRLTERPENLSSNSEILDWDIYQYYKFLAERGDVQIQVSLGQLHLIGRKGLDQDYYKALHYFLKAAKAGSANAMAFIGKMYLEGNAAVPQNNATAFKYFSMAASKGNAIGLHGLGLLYFHGKGVPLNYAEALKYFQKAAEKGWPDAQFQLGFMYYSGSGIWKDYKLAFKYFYLASQSGQPLAIYYLAKMYATGTGVVRSCRTAVELYKGVCELGHWAEKFLTAYFAYKDGDIDSSLVQYALLAEMGYEVAQSNSAFILESKKANILEKEKMYPMALLLWNRAAIQGNAFARVKIGDYHYYGYGTKKDYQTAATHYSIAANKYHNAQAMFNLAYMYEHGLGITKDIHLARRLYDMAAQTSPDAHIPVLFAVMKLETTHLLRDILFFNFTTRWNWLKLDNTIGPHWDLFVIGLIVPGLILLLRNHHG

SEQ ID NO: 3238 - protein, 491 aa, Homo sapiens
MSLKSERRGIHVDQSDLLCKKGCGYYGNPAWQGFCSKCWREEYHKARQKQIQEDWELAERLQREEEEAFASSQSSQGAQSLTFSKFEEKKTNEKTRKVTTVKKFFSASSRVGSKKEIQEAKAPSPSINRQTSIETDRVSKEFIEFLKTFHKTGQEIYKQTKLFLEGMHYKRDLSIEEQSECAQDFYHNVAERMQTRGKVPPERVEKIMDQIEKYIMTRLYKYVFCPETTDDEKKDLAIQKRIRALRWVTPQMLCVPVNEDIPEVSDMVVKAITDIIEMDSKRVPRDKLACITKCSKHIFNAIKITKNEPASADDFLPTLIYIVLKGNPPRLQSNIQYITRFCNPSRLMTGEDGYYFTNLCCAVAFIEKLDAQSLNLSQEDFDRYMSGQTSPRKQEAESWSPDACLGVKQMYKNLDLLSQLNERQERIMNEAKKLEKDLIDWTDGIAREVQDIVEKYPLEIKPPNQPLAAIDSENVENDKLPPPLQPQVYAG

SEQ ID NO: 3239 - protein, 338 aa, Homo sapiens [sequence omitted]

SEQ ID NO: 3240 - protein, 108 aa, Homo sapiens
MILQRLFRFSSVIRSAVSVHLRRNIGVTAVAFNKELDPIQKLFVDKIREYKSKRQTSGGPVDASSEYQQELERELFKLKQMFGNADMNTFPTFKFEDPKFEVIEKPQA

SEQ ID NO: 3241 - protein, 770 aa, Homo sapiens
MLPGLALLLLAAWTARALEVPTDGNAGLLAEPQIAMFCGRLNMHMNVQNGKWDSDPSGTKTCIDTKEGILQYCQEVYPELQITNVVEANQPVTIQNWCKRGRKQCKTHPHFVIPYRCLVGEFVSDALLVPDKCKFLHQERMDVCETHLHWHTVAKETCSEKSTNLHDYGMLLPCGIDKFRGVEFVCCPLAEESDNVDSADAEEDDSDVWWGGADTDYADGSEDKVVEVAEEEEVAEVEEEEADDDEDDEDGDEVEEEAEEPYEEATERTTSIATTTTTTTESVEEVVREVCSEQAETGPCRAMISRWYFDVTEGKCAPFFYGGCGGNRNNFDTEEYCMAVCGSAMSQSLLKTTQEPLARDPVKLPTTAASTPDAVDKYLETPGDENEHAHFQKAKERLEAKHRERMSQVMREWEEAERQAKNLPKADKKAVIQHFQEKVESLEQEAANERQQLVETHMARVEAMLNDRRRLALENYITALQAVPPRPRHVFNMLKKYVRAEQKDRQHTLKHFEHVRMVDPKKAAQIRSQVMTHLRVIYERMNQSLSLLYNVPAVAEEIQDEVDELLQKEQNYSDDVLANMISEPRISYGNDALMPSLTETKTTVELLPVNGEFSLDDLQPWHSFGADSVPANTENEVEPVDARPAADRGLTTRPGSGLTNIKTEEISEVKMDAEFRHDSGYEVHHQKLVFFAEDVGSNKGAIIGLMVGGVVIATVIVITLVMLKKKQYTSIHHGVVEVDAAVTPEERHLSKMQQNGYENPTYKFFEQMQN

SEQ ID NO: 3242 - protein, 967 aa, Homo sapiens
MQRAVPEGFGRRKLGSDMGNAERAPGSRSFGPVPTLLLLAAALLAVSDALGRPSEEDEELVVPELERAPGHGTTRLRLHAFDQQLDLELRPDSSFLAPGFTLQNVGRKSGSETPLPETDLAHCFYSGTVNGDPSSAAALSLCEGVRGAFYLLGEAYFIQPLPAASERLATAAPGEKPPAPLQFHLLRRNRQGDVGGTCGVVDDEPRPTGKAETEDEDEGTEGEDEGAQWSPQDPALQGVGQPTGTGSIRKKRFVSSHRYVETMLVADQSMAEFHGSGLKHYLLTLFSVAARLYKHPSIRNSVSLVVVKILVIHDEQKGPEVTSNAALTLRNFCNWQKQHNPPSDRDAEHYDTAILFTRQDLCGSQTCDTLGMADVGTVCDPSRSCSVIEDDGLQAAFTTAHELGHVFNMPHDDAKQCASLNGVNQDSHMMASMLSNLDHSQPWSPCSAYMITSFLDNGHGECLMDKPQNPIQLPGDLPGTSYDANRQCQFTFGEDSKHCPDAASTCSTLWCTGTSGGVLVCQTKHFPWADGTSCGEGKWCINGKCVNKTDRKHFDTPFHGSWGMWGPWGDCSRTCGGGVQYTMRECDNPVPKNGGKYCEGKRVRYRSCNLEDCPDNNGKTFREEQCEAHNEFSKASFGSGPAVEWIPKYAGVSPKDRCKLICQAKGIGYFFVLQPKVVDGTPCSPDSTSVCVQGQCVKAGCDRIIDSKKKFDKCGVCGGNGSTCKKISGSVTSAKPGYHDIITIPTGATNIEVKQRNQRGSRNNGSFLAIKAADGTYILNGDYTLSTLEQDIMYKGVVLRYSGSSAALERIRSFSPLKEPLTIQVLTVGNALRPKIKYTYFVKKKKESFNAIPTFSAWVIEEWGECSKSCELGWQRRLVECRDINGQPASECAKEVKPASTRPCADHPCPQWQLGEWSSCSKTCGKGYKKRSLKCLSHDGGVLSHESCDPLKKPKHFIDFCTMAECS

SEQ ID NO: 3243 - protein, 930 aa, Homo sapiens
MLLGWASLLLCAFRLPLAAVGPAATPAQDKAGQPPTAAAAAQPRRRQGEEVQERAEPPGHPHPLAQRRRSKGLVQNIDQLYSGGGKVGYLVYAGGRRFLLDLERDGSVGIAGFVPAGGGTSAPWRHRSHCFYRGTVDGSPRSLAVFDLCGGLDGFFAVKHARYTLKPLLRGPWAEEEKGRVYGDGSARILHVYTREGFSFEALPPRASCETPASTPEAHEHAPAHSNPSGRAALASQLLDQSALSPAGGSGPQTWWRRRRRSISRARQVELLLVADASMARLYGRGLQHYLLTLASIANRLYSHASIENHIRLAVVKVVVLGDKDKSLEVSKNAATTLKNFCKWQHQHNQLGDDHEEHYDAAILFTREDLCGHHSCDTLGMADVGTICSPERSCAVIEDDGLHAAFTVAHEIGHLLGLSHDDSKFCEETFGSTEDKRLMSSILTSIDASKPWSKCTSATITEFLDDGHGNCLLDLPRKQILGPEELPGQTYDATQQCNLTFGPEYSVCPGMDVCARLWCAVVRQGQMVCLTKKLPAVEGTPCGKGRICLQGKCVDKTKKKYYSTSSHGNWGSWGSWGQCSRSCGGGVQFAYRHCNNPAPRNNGRYCTGKRAIYRSCSLMPCPPNGKSFRHEQCEAKNGYQSDAKGVKTFVEWVPKYAGVLPADVCKLTCRAKGTGYYVVFSPKVTDGTECRLYSNSVCVRGKCVRTGCDGIIGSKLQYDKCGVCGGDNSSCTKIVGTFNKKSKGYTDVVRIPEGATHIKVRQFKAKDQTRFTAYLALKKKNGEYLINGKYMISTSETIIDINGTVMNYSGWSHRDDFLHGMGYSATKEILIVQILATDPTKPLDVRYSFFVPKKSTPKVNSVTSHGSNKVGSHTSQPQWVTGPWLACSRTCDTGWHTRTVQCQDGNRKLAKGCPLSQRPSAFKQCLLKKC

SEQ ID NO: 3244 - protein, 465 aa, Homo sapiens
MAEAVFHAPKRKRRVYETYESPLPIPFGQDHGPLKEFKIFRAEMINNNVIVRNAEDIEQLYGKGYFGKGILSRSRPSFTISDPKLVAKWKDMKTNMPIITSKRYQHSVEWAAELMRRQGQDESTVRRILKDYTKPLEHPPVKRNEEAQVHDKLNSGMVSNMEGTAGGERPSVVNGDSGKSGGVGDPREPLGCLQEGSGCHPTTESFEKSVREDASPLPHVCCCKQDALILQRGLHHEDGSQHIGLLHPGDRGPDHEYVLVEEAECAMSEREAAPNEELVQRNRLICRRNPYRIFEYLQLSLEEAFFLVYALGCLSIYYEKEPLTIVKLWKAFTVVQPTFRTTYMAYHYFRSKGWVPKVGLKYGTDLLLYRKGPPFYHASYSVIIELVDDHFEGSLRRPLSWKSLAALSRVSVNVSKELMLCYLIKPSTMTDKEMESPECMKRIKVQEVILSRWVSSRERSDQDDL

SEQ ID NO: 3245 - protein, 940 aa, Homo sapiens
MARKRAAGGEPRGRELRSQKSKAKSKARREEEEEDAFEDEKPPKKSLLSKVSQGKRKRGCSHPGGSADGPAKKKVAKVTVKSENLKVIKDEALSDGDDLRDFPSDLKKAHHLKRGATMNEDSNEEEEESENDWEEVEELSEPVLGDVRESTAFSRSLLPVKPVEIEIETPEQAKTRERSEKIKLEFETYLRRAMKRFNKGVHEDTHKVHLLCLLANGFYRNNICSQPDLHAIGLSIIPARFTRVLPRDVDTYYLSNLVKWFIGTFTVNAELSASEQDNLQTTLERRFAIYSARDDEELVHIFLLILRALQLLTRLVLSLQPIPLKSATAKGKKPSKERLTADPGGSSETSSQVLENHTKPKTSKGTKQEETFAKGTCRPSAKGKRNKGGRKKRSKPSSSEEDEGPGDKQEKATQRRPHGRERRVASRVSYKEESGSDEAGSGSDFELSSGEASDPSDEDSEPGPPKQRKAPAPQRTKAGSKSASRTHRGSHRKDPSLPAASSSSSSSKRGKKMCSDGEKAEKRSIAGIDQWLEVFCEQEEKWVCVDCVHGVVGQPLTCYKYATKPMTYVVGIDSDGWVRDVTQRYDPVWMTVTRKCRVDAEWWAETLRPYQSPFMDREKKEDLEFQAKHMDQPLPTAIGLYKNHPLYALKRHLLKYEAIYPETAAILGYCRGEAVYSRDCVHTLHSRDTWLKKARVVRLGEVPYKMVKGFSNRARKARLAEPQLREENDLGLFGYWQTEEYQPPVAVDGKVPRNEFGNVYLFLPSMMPIGCVQLNLPNLHRVARKLDIDCVQAITGFDFHGGYSHPVTDGYIVCEEFKDVLLTAWENEQAVIERKEKEKKEKRALGNWKLLAKGLLIRERLKRRYGPKSEAAAPHTDAGGGLSSDEEEGTSSQAEAARILAASWPQNREDEEKQKLKGGPKKTKREKKAAASHLFPFEQL

SEQ ID NO: 3246 - protein, 579 aa, Homo sapiens
MNAIVALCHFCELHGPRTLFCTEVLHAPLPQGDGNEDSPGQGEQAEEEEGGIQMNSRMRAHSPAEGASVESSSPGPKKSDMCEGCRSLAAGHPGYISHDKETSIKYVSHQHPSHPQLFSIVRQACVRSLSCEVCPGREGPIFFGDEQHGFVFSHTFFIKDSLARGFQRWYSIITIMMDRIYLINSWPFLLGKVRGIIDELQGKALKVFEAEQFGCPQRAQRMNTAFTPFLHQRNGNAARSLTSLTSDDNLWACLHTSFAWLLKACGSRLTEKLLEGAPTEDTLVQMEKLADLEEESESWDNSEAEEEEKAPVLPESTEGRELTQGPAESSSLSGCGSWQPRKLPVFKSLRHMRQVLGAPSFRMLAWHVLMGNQVIWKSRDVDLVQSAFEVLRTMLPVGCVRIIPYSSQYEEAYRCNFLGLSPHVQIPPHVLSSEFAVIVEVHAAARSTLHPVGCEDDQSLSKYEFVVTSGSPVAADRVGPTILNKIEAALTNQNLSVDVVDQCLVCLKEEWMNKVKVLFKFTKVDSRPKEDTQKLLSILGASEEDNVKLLKFWMTGLSKTYKSHLMSTVRSPTASESRN

SEQ ID NO: 3247 - protein, 312 aa, Homo sapiens
MACAAVMIPGLLRCSVGAIRIEAASLRLTLSTLRHLTLTSIMKSKRKTDHMERTASVLRREIVSAAKVCGAASESPSVKSLRLLVADQDFSFKAGQWVDFFIPGVSVVGGFSICSSPRLLEQERVIELAVKYTNHPPALWVHNTCTLDCEVAVRVGGEFFFDPQPADASRNLVLIAGGVGINPLLSILRHAADLLREQANKRNGYEIGTIKLFYSAKNTSELLFKKNILDLVNEFPEKIACSLHVTKQTTQINAELKPYITEGRITEKEIRDHISKETLFYICGPPPMTDFFSKQLENNHVPKEHICFEKWW

SEQ ID NO: 3248 - protein, 397 aa, Homo sapiens
MALLRGVFVVAAKRTPFGAYGGLLKDFTATDLSEFAAKAALSAGKVSPETVDSVIMGNVLQSSSDAIYLARHVGLRVGIPKETPALTINRLCGSGFQSIVNGCQEICVKEAEVVLCGGTESMSQAPYCVRNVRFGTKLGSDIKLEDSLWVSLTDQHVQLPMAMTAENLAVKHKISREECDKYALQSQQRWKAANDAGYFNDEMAPIEVKTKKGKQTMQVDEHARPQTTLEQLQKLPPVFKKDGTVTAGNASGVADGAGAVIIASEDAVKKHNFTPLARIVGYFVSGCDPSIMGIGPVPAISGALKKAGLSLKDMDLVEVNEAFAPQYLAVERSLDLDISKTNVNGGAIALGHPLGGSGSRITAHLVHELRRRGGKYAVGSACIGGGQGIAVIIQSTA

SEQ ID NO: 3249 - protein, 656 aa, Homo sapiens
MEGDGSDPEPPDAGEDSKSENGENAPIYCICRKPDINCFMIGCDNCNEWFHGDCIRITEKMAKAIREWYCRECREKDPKLEIRYRHKKSRERDGNERDSSEPRDEGGGRKRPVPDPDLQRRAGSGTGVGAMLARGSASPHKSSPQPLVATPSQHHQQQQQQIKRSARMCGECEACRRTEDCGHCDFCRDMKKFGGPNKIRQKCRLRQCQLRARESYKYFPSSLSPVTPSESLPRPRRPLPTQQQPQPSQKLGRIREDEGAVASSTVKEPPEATATPEPLSDEDLPLDPDLYQDFCAGAFDDHGLPWMSDTEESPFLDPALRKRAVKVKHVKRREKKSEKKKEERYKRHRQKQKHKDKWKHPERADAKDPASLPQCLGPGCVRPAQPSSKYCSDDCGMKLAANRIYEILPQRIQQWQQSPCIAEEHGKKLLERIRREQQSARTRLQEMERRFHELEAIILRAKQQAVREDEESNEGDSDDTDLQIFCVSCGHPINPRVALRHMERCYAKYESQTSFGSMYPTRIEGATRLFCDVYNPQSKTYCKRLQVLCPEHSRDPKVPADEVCGCPLVRDVFELTGDFCRLPKRQCNRHYCWEKLRRAEVDLERVRVWYKLDELFEQERNVRTAMTNRAGLLALMLHQTIQHDPLTTDLRSSADR

(The sequence listing continues in the following parts.)

What is claimed is:

1. An agent that comprises and/or modulates the expression or activity of a target protein identified in the Sequence Listing, in Table A, or a variant of the foregoing.

2. The agent of claim 1, wherein the agent comprises the target protein.

3. The agent of claim 1, wherein the agent modulates the expression of the target protein.

4. The agent of claim 2 or 3, wherein the agent modulates the expression of a gene or gene transcript encoding the target protein.

5. The agent of claim 1, wherein the agent modulates the activity of the target protein.

6. The agent of any one of claims 2-5, comprising a polypeptide, a polynucleotide, or a small molecule.

7. The agent of any one of claims 2-6, wherein the agent decreases the expression or activity of the target protein.

8. The agent of claim 7, wherein the agent comprises an inhibitor of the target protein.

9. The agent of claim 8, wherein the inhibitor is a polypeptide.

10. The agent of claim 9, wherein the polypeptide is an antagonist antibody, or an antigen-binding fragment thereof, that binds to the target protein.

11. The agent of claim 8, wherein the inhibitor is a polynucleotide.

12. The agent of claim 11, wherein the polynucleotide comprises a nucleotide sequence that is complementary to at least a portion of a gene or gene transcript encoding the target protein.

13. The agent of claim 11 or 12, wherein the polynucleotide comprises DNA.

14. The agent of claim 11 or 12, wherein the polynucleotide comprises RNA.

15. The agent of claim 11 or 12, wherein the polynucleotide is a small interfering RNA (siRNA), a short hairpin RNA (shRNA), an antisense DNA, an antisense RNA, a microRNA (miRNA), an antagomir, a guide RNA (gRNA), a locked nucleic acid (LNA) or a morpholino nucleic acid (MNA).

16. The agent of claim 8, wherein the inhibitor is a small molecule.

17. The agent of claim 16, wherein the small molecule binds to the target protein, thereby decreasing the activity of the target protein.

18. The agent of any one of claims 1-6, wherein the agent increases the expression or activity of the target protein.

19. The agent of claim 18, wherein the agent is an isolated polypeptide comprising the amino acid sequence of the target protein, or a variant thereof comprising an amino acid sequence having at least 80% sequence identity to the amino acid sequence of the target protein.

20. The agent of claim 19, wherein the isolated polypeptide or variant thereof is a recombinant protein or a synthetic protein.

21. The agent of claim 18, wherein the agent is a polynucleotide encoding the target protein or a variant thereof having at least 80% sequence identity to the amino acid sequence of the target protein.

22. The agent of claim 21, wherein the polynucleotide comprises DNA.

23. The agent of claim 21 or 22, wherein the polynucleotide comprises a vector.

24. The agent of claim 21, wherein the polynucleotide comprises RNA.

25. The agent of claim 24, wherein the RNA is messenger RNA (mRNA) and/or circular RNA (circRNA).

26. The agent of claim 18, wherein the agent comprises an activator of the target protein.

27. The agent of claim 26, wherein the activator is a polypeptide.

28. The agent of claim 27, wherein the polypeptide is an agonist antibody, or an antigen-binding fragment thereof, that binds to the target protein.

29. The agent of claim 26, wherein the activator is a small molecule.

30. The agent of claim 29, wherein the small molecule binds to the target protein, thereby increasing the activity of the target protein.

31. The agent of any one of claims 1-8, 18 and 26, comprising a gene editing system.

32. The agent of claim 31, wherein the gene editing system is a CRISPR/Cas system, a transposon-based gene editing system, and a transcription activator-like effector nuclease (TALEN) system.

33. The agent of any one of claims 1-32, wherein the target protein is translated from a non-coding RNA.

34. The agent of claim 33, wherein the non-coding RNA is a long intergenic non-coding RNA (lincRNA).

35. The agent of any one of claims 1-32, wherein the target protein is translated from a non-exonic element in an unprocessed precursor mRNA (pre-mRNA).

36. The agent of claim 35, wherein the non-exonic element is an intron in a pre-mRNA.

37. The agent of claim 35, wherein the non-exonic element is a 5′-untranslated region (5′-UTR) in a pre-mRNA.

38. The agent of claim 35, wherein the non-exonic element is a 3′-untranslated region (3′-UTR) in a pre-mRNA.

39. A pharmaceutical composition comprising the agent of any one of claims 1-38, and a pharmaceutically acceptable carrier.

40. The pharmaceutical composition of claim 39, wherein the pharmaceutically acceptable carrier is a vector.

41. A method for modulating the expression or activity of a target protein identified in the Sequence Listing, in Table A, or a variant of the foregoing in a cell and/or tissue, comprising contacting the cell with the agent of any one of claims 1-38 or the pharmaceutical composition of claim 39 or 40.

42. The method of claim 41, wherein the agent decreases the expression or activity of the target protein in the cell and/or tissue.

43. The method of claim 41, wherein the agent increases the expression or activity of the target protein in the cell and/or tissue.

44. The method of any one of claims 41-43, wherein the cell and/or tissue is in a subject, and wherein:
a) the cell is a liver cell (e.g., a hepatocyte (HC), a hepatic stellate cell (HSC), a Kupffer cell (KC), and/or a liver sinusoidal endothelial cell (LSEC)); a pancreatic cell (e.g., an alpha cell, a beta cell, a delta cell, and/or a PP cell); a thyroid cell; a glandular cell; or a combination thereof. In particular embodiments, the target cell is a hepatocyte (HC), a Kupffer cell (KC), a pancreatic beta cell, a muscle cell, a cardiac cell, a brain cell, a kidney cell, an adipocyte, or a combination thereof; and/or
b) the tissue comprises liver, pancreas, thyroid, ovary, testes, muscle, heart, brain, kidney, or an adipose tissue, or a combination thereof.

45. The method of claim 44, wherein the subject has a disease or condition selected from aging, senescence, fibrosis, a metabolic disease, a cardiovascular disease, an endocrine-associated disorder, a genetic disease, cancer, an infection, an immunological disease, an indication treated with hormone, growth factor and/or protein replacement, or a combination thereof.

46. The method of any one of claims 41-45, wherein the agent modulates the expression or activity of the target protein by at least 10%.

47. The method of any one of claims 41-46, wherein the agent modulates the expression of a gene encoding the target protein by at least 10%, thereby modulating the expression or activity of the target protein.

48. A method of predicting a likelihood of developing a disease or condition in a subject, comprising quantifying an expression or activity of a target protein identified in the Sequence Listing, in Table A, or a variant of the foregoing, in a sample from the subject, wherein the level of expression or activity of the target protein in the sample is indicative of the likelihood of developing cancer in the subject, wherein the disease or condition is selected from aging, senescence, fibrosis, a metabolic disease, a cardiovascular disease, an endocrine-associated disorder, a genetic disease, cancer, an infection, an immunological disease, an indication treated with hormone, growth factor and/or protein replacement, or a combination thereof.

49. A method of preparing a sample that is useful for detecting a likelihood of developing a disease or condition in a subject, comprising:
a) obtaining or having obtained a sample from the subject;
b) adding a protease inhibitor, a control peptide, a standard peptide, or a combination thereof to the sample to prepare a sample that is useful for detecting a likelihood of developing cancer; and
c) quantifying an expression or activity of a target protein identified in the Sequence Listing, in Table A, or a variant of the foregoing, in the sample prepared in step b),
wherein the disease or condition is selected from aging, senescence, fibrosis, a metabolic disease, a cardiovascular disease, an endocrine-associated disorder, a genetic disease, cancer, an infection, an immunological disease, an indication treated with hormone, growth factor and/or protein replacement, or a combination thereof.

50. The method of claim 48 or 49, further comprising administering to the subject an effective amount of the agent of any one of claims 1-38, or the pharmaceutical composition of claim 39 or 40 if the subject is predicted to have a likelihood of developing cancer.

51. A method of treating a disease or condition in a subject in need thereof, comprising administering to the subject an effective amount of the agent of any one of claims 1-38, or the pharmaceutical composition of claim 39 or 40, wherein the disease or condition is selected from aging, senescence, fibrosis, a metabolic disease, a cardiovascular disease, an endocrine-associated disorder, a genetic disease, cancer, an infection, an immunological disease, an indication treated with hormone, growth factor and/or protein replacement, or a combination thereof.

52. A method for identifying an agent that modulates the expression or activity of a target protein identified in the Sequence Listing, in Table A, or a of the foregoing, comprising:
a) contacting a protein identified in the Sequence Listing, in Table A, or a variant of the foregoing with an agent; and
b) determining whether the agent modulates the expression or activity of the target protein,
wherein a difference in the expression or activity of the target protein that has been contacted with the agent compared to a reference for the expression or activity of the target protein indicates that the agent modulates the expression or activity of the target protein.

53. The method of claim 52, wherein a difference of at least 10% in the expression or activity of the target protein that has been contacted with the agent compared to the reference indicates that the agent modulates the expression or activity of the target protein.

54. The method of claim 52 or 53, wherein a decrease in the expression or activity of the target protein that has been contacted with the agent compared to the reference indicates the agent inhibits the expression or activity of the target protein.

55. The method of claim 52 or 53, wherein an increase in the expression or activity of the target protein compared to the reference indicates the agent activates the expression or activity of the target protein.
